United States Patent Application Publication US 2014/0199313 A1 - sequence listing, part 9

SEQ ID NO: 35861 - protein, 45 aa, Artificial sequence; identical to SEQ ID NO: 28534
  Consensus
  Variant (2)..(3): Xaa in position 2 to 3 is any amino acid
  Variant (4)..(4): Xaa in position 4 is any or no amino acid
  Variant (6)..(6): Xaa in position 6 is Ala, Gly or Thr
  Variant (7)..(7): Xaa in position 7 is any amino acid
  Variant (9)..(9): Xaa in position 9 is Ala, Gly or Ser
  Variant (10)..(12): Xaa in position 10 to 12 is any amino acid
  Variant (13)..(13): Xaa in position 13 is Ala, Gly, Pro, Ser or Thr
  Variant (14)..(15): Xaa in position 14 to 15 is any amino acid
  Variant (16)..(16): Xaa in position 16 is Ala, Gly, Asn, Pro or Ser
  Variant (17)..(18): Xaa in position 17 to 18 is any amino acid
  Variant (19)..(19): Xaa in position 19 is Phe, His or Tyr
  Variant (20)..(24): Xaa in position 20 to 24 is any amino acid
  Variant (26)..(26): Xaa in position 26 is any amino acid
  Variant (27)..(27): Xaa in position 27 is Ala, Ser or Val
  Variant (28)..(28): Xaa in position 28 is any amino acid
  Variant (30)..(31): Xaa in position 30 to 31 is any amino acid
  Variant (32)..(33): Xaa in position 32 to 33 is any or no amino acid
  Variant (35)..(38): Xaa in position 35 to 38 is any amino acid
  Variant (39)..(39): Xaa in position 39 is Ala, Gly or Val
  Variant (40)..(44): Xaa in position 40 to 44 is any amino acid
  Variant (45)..(45): Xaa in position 45 is Phe, Ile, Leu or Val

SEQ ID NO: 35862 - protein, 24 aa, Artificial sequence
  Consensus
  Variant (2)..(3): Xaa in position 2 to 3 is any amino acid
  Variant (4)..(4): Xaa in position 4 is any or no amino acid
  Variant (6)..(6): Xaa in position 6 is any or no amino acid
  Variant (8)..(8): Xaa in position 8 is Ala, Gly or Ser
  Variant (9)..(9): Xaa in position 9 is Phe or Tyr
  Variant (10)..(10): Xaa in position 10 is Ala, Ile or Val
  Variant (11)..(11): Xaa in position 11 is Ala or Gly
  Variant (12)..(12): Xaa in position 12 is any amino acid
  Variant (13)..(13): Xaa in position 13 is Ala, Gly, Ser or Thr
  Variant (14)..(15): Xaa in position 14 to 15 is any amino acid
  Variant (16)..(16): Xaa in position 16 is Phe, Leu, Met or Val
  Variant (17)..(17): Xaa in position 17 is Ala, Gly, Pro, Ser or Thr
  Variant (18)..(23): Xaa in position 18 to 23 is any amino acid
  Variant (24)..(24): Xaa in position 24 is Phe or Tyr
YXXXFXGXXXXXXXXXXXXXXXXX

SEQ ID NO: 35863 - protein, 33 aa, Artificial sequence; identical to SEQ ID NO: 28536
  Consensus
  Variant (2)..(19): Xaa in position 2 to 19 is any amino acid
  Variant (20)..(22): Xaa in position 20 to 22 is any or no amino acid
  Variant (24)..(24): Xaa in position 24 is Phe, Ile, Leu, Met or Val
  Variant (25)..(25): Xaa in position 25 is any amino acid
  Variant (26)..(26): Xaa in position 26 is Ala, Gly or Ser
  Variant (27)..(28): Xaa in position 27 to 28 is any amino acid
  Variant (30)..(30): Xaa in position 30 is Ala, Cys, Gly, Asn, Ser or Thr
  Variant (31)..(31): Xaa in position 31 is any amino acid
  Variant (33)..(33): Xaa in position 33 is Ala, Gly, Pro or Ser

SEQ ID NO: 35864 - DNA, 1818 bp, Escherichia coli; identical to SEQ ID NO: 13510
  CDS (1)..(1818)

SEQ ID NO: 35865 - protein, 605 aa, Escherichia coli; identical to SEQ ID NO: 13511

SEQ ID NO: 35866 - DNA, 1665 bp, Mesorhizobium loti MAFF303099; identical to SEQ ID NO: 13512
  CDS (1)..(1665): transl_table=11

SEQ ID NO: 35867 - protein, 554 aa, Mesorhizobium loti MAFF303099; identical to SEQ ID NO: 13513

SEQ ID NO: 35868 - DNA, 1635 bp, Mesorhizobium loti MAFF303099; identical to SEQ ID NO: 13514
  CDS (1)..(1635): transl_table=11

SEQ ID NO: 35869 - protein, 544 aa, Mesorhizobium loti MAFF303099; identical to SEQ ID NO: 13515

SEQ ID NO: 35870 - DNA, 1851 bp, Thermoplasma volcanium GSS1; identical to SEQ ID NO: 13516
  CDS (1)..(1851): transl_table=11

SEQ ID NO: 35871 - protein, 616 aa, Thermoplasma volcanium GSS1; identical to SEQ ID NO: 13517

SEQ ID NO: 35872 - DNA, 1422 bp, Thermotoga maritima MSB8; identical to SEQ ID NO: 13518
  CDS (1)..(1422): transl_table=11

SEQ ID NO: 35873 - protein, 473 aa, Thermotoga maritima MSB8; identical to SEQ ID NO: 13519

SEQ ID NO: 35874 - DNA, 1671 bp, Thermotoga maritima MSB8; identical to SEQ ID NO: 13520
  CDS (1)..(1671): transl_table=11

SEQ ID NO: 35875 - protein, 556 aa, Thermotoga maritima MSB8; identical to SEQ ID NO: 13521

SEQ ID NO: 35876 - DNA, 1737 bp, Bacillus halodurans C-125; identical to SEQ ID NO: 13522
  CDS (1)..(1737): transl_table=11

SEQ ID NO: 35877 - protein, 578 aa, Bacillus halodurans C-125; identical to SEQ ID NO: 13523

SEQ ID NO: 35878 - DNA, 1704 bp, Streptococcus pyogenes M1 GAS; identical to SEQ ID NO: 13524
  CDS (1)..(1704): transl_table=11

SEQ ID NO: 35879 - protein, 567 aa, Streptococcus pyogenes M1 GAS; identical to SEQ ID NO: 13525

SEQ ID NO: 35880 - DNA, 1614 bp, Streptococcus pyogenes M1 GAS; identical to SEQ ID NO: 13526
  CDS (1)..(1614): transl_table=11

SEQ ID NO: 35881 - protein, 537 aa, Streptococcus pyogenes M1 GAS; identical to SEQ ID NO: 13527

SEQ ID NO: 35882 - DNA, 1974 bp, Deinococcus radiodurans R1; identical to SEQ ID NO: 13528
  CDS (1)..(1974): transl_table=11

SEQ ID NO: 35883 - protein, 657 aa, Deinococcus radiodurans R1; identical to SEQ ID NO: 13529

SEQ ID NO: 35884 - DNA, 1497 bp, Deinococcus radiodurans R1; identical to SEQ ID NO: 13530
  CDS (1)..(1497): transl_table=11

SEQ ID NO: 35885 - protein, 498 aa, Deinococcus radiodurans R1; identical to SEQ ID NO: 13531

SEQ ID NO: 35886 - DNA, 1695 bp, Deinococcus radiodurans R1; identical to SEQ ID NO: 13532
  CDS (1)..(1695): transl_table=11

SEQ ID NO: 35887 - protein, 564 aa, Deinococcus radiodurans R1; identical to SEQ ID NO: 13533

SEQ ID NO: 35888 - DNA, 1452 bp, Deinococcus radiodurans R1; identical to SEQ ID NO: 13534
  CDS (1)..(1452): transl_table=11

SEQ ID NO: 35889 - protein, 483 aa, Deinococcus radiodurans R1; identical to SEQ ID NO: 13535

SEQ ID NO: 35890 - DNA, 1659 bp, Deinococcus radiodurans R1; identical to SEQ ID NO: 13536
  CDS (1)..(1659): transl_table=11

SEQ ID NO: 35891 - protein, 552 aa, Deinococcus radiodurans R1; identical to SEQ ID NO: 13537

SEQ ID NO: 35892 - DNA, 1824 bp, Mycoplasma pulmonis UAB CTIP; identical to SEQ ID NO: 13538
  CDS (1)..(1824): transl_table=4

SEQ ID NO: 35893 - protein, 607 aa, Mycoplasma pulmonis UAB CTIP; identical to SEQ ID NO: 13539

SEQ ID NO: 35894 - DNA, 1806 bp, Mycobacterium tuberculosis CDC1551; identical to SEQ ID NO: 13540
  CDS (1)..(1806): transl_table=11

SEQ ID NO: 35895 - protein, 601 aa, Mycobacterium tuberculosis CDC1551; identical to SEQ ID NO: 13541

SEQ ID NO: 35896 - DNA, 1641 bp, Mycobacterium tuberculosis CDC1551; identical to SEQ ID NO: 13542
  CDS (1)..(1641): transl_table=11

SEQ ID NO: 35897 - protein, 546 aa, Mycobacterium tuberculosis CDC1551; identical to SEQ ID NO: 13543

SEQ ID NO: 35898 - DNA, 1356 bp, Clostridium acetobutylicum ATCC 824; identical to SEQ ID NO: 13544
  CDS (1)..(1356): transl_table=11

SEQ ID NO: 35899 - protein, 451 aa, Clostridium acetobutylicum ATCC 824; identical to SEQ ID NO: 13545

SEQ ID NO: 35900 - DNA, 1785 bp, Agrobacterium tumefaciens str. C58; identical to SEQ ID NO: 13546
  CDS (1)..(1785): transl_table=11

SEQ ID NO: 35901 - protein, 594 aa, Agrobacterium tumefaciens str. C58; identical to SEQ ID NO: 13547

SEQ ID NO: 35902 - DNA, 1608 bp, Streptococcus pneumoniae R6; identical to SEQ ID NO: 13548
  CDS (1)..(1608): transl_table=11

SEQ ID NO: 35903 - protein, 535 aa, Streptococcus pneumoniae R6; identical to SEQ ID NO: 13549

SEQ ID NO: 35904 - DNA, 1764 bp, Streptococcus pneumoniae R6; identical to SEQ ID NO: 13550
  CDS (1)..(1764): transl_table=11

SEQ ID NO: 35905 - protein, 587 aa, Streptococcus pneumoniae R6; identical to SEQ ID NO: 13551

SEQ ID NO: 35906 - DNA, 1851 bp, Thermoplasma acidophilum DSM 1728; identical to SEQ ID NO: 13552
  CDS (1)..(1851): transl_table=11

SEQ ID NO: 35907 - protein, 616 aa, Thermoplasma acidophilum DSM 1728; identical to SEQ ID NO: 13553

SEQ ID NO: 35908 - DNA, 1527 bp, Synechocystis sp. PCC 6803; identical to SEQ ID NO: 13554
  CDS (1)..(1527): transl_table=11

SEQ ID NO: 35909 - protein, 508 aa, Synechocystis sp. PCC 6803; identical to SEQ ID NO: 13555

SEQ ID NO: 35910 - DNA, 1818 bp, Salmonella typhimurium LT2; identical to SEQ ID NO: 13556
  CDS (1)..(1818): transl_table=11

SEQ ID NO: 35911 - protein, 605 aa, Salmonella typhimurium LT2; identical to SEQ ID NO: 13557

SEQ ID NO: 35912 - DNA, 1662 bp, Listeria monocytogenes EGD-e; identical to SEQ ID NO: 13558
  CDS (1)..(1662): transl_table=11

SEQ ID NO: 35913 - protein, 553 aa, Listeria monocytogenes EGD-e; identical to SEQ ID NO: 13559

SEQ ID NO: 35914 - DNA, 1776 bp, Listeria monocytogenes EGD-e; identical to SEQ ID NO: 13560
  CDS (1)..(1776): transl_table=11

SEQ ID NO: 35915 - protein, 591 aa, Listeria monocytogenes EGD-e; identical to SEQ ID NO: 13561

SEQ ID NO: 35916 - DNA, 1467 bp, Nostoc sp. PCC 7120; identical to SEQ ID NO: 13562
  CDS (1)..(1467): transl_table=11

SEQ ID NO: 35917 - protein, 488 aa, Nostoc sp. PCC 7120; identical to SEQ ID NO: 13563

SEQ ID NO: 35918 - DNA, 3483 bp, Ralstonia solanacearum GMI1000; identical to SEQ ID NO: 13564
  CDS (1)..(3483): transl_table=11

SEQ ID NO: 35919 - protein, 1160 aa, Ralstonia solanacearum GMI1000; identical to SEQ ID NO: 13565

SEQ ID NO: 35920 - DNA, 1821 bp, Clostridium perfringens str. 13; identical to SEQ ID NO: 13566
  CDS (1)..(1821): transl_table=11

SEQ ID NO: 35921 - protein, 606 aa, Clostridium perfringens str. 13; identical to SEQ ID NO: 13567

SEQ ID NO: 35922 - DNA, 1665 bp, Clostridium perfringens str. 13; identical to SEQ ID NO: 13568
  CDS (1)..(1665): transl_table=11

SEQ ID NO: 35923 - protein, 554 aa, Clostridium perfringens str. 13; identical to SEQ ID NO: 13569

SEQ ID NO: 35924 - DNA, 1833 bp, Clostridium perfringens str. 13; identical to SEQ ID NO: 13570
  CDS (1)..(1833): transl_table=11

SEQ ID NO: 35925 - protein, 610 aa, Clostridium perfringens str. 13; identical to SEQ ID NO: 13571

SEQ ID NO: 35926 - DNA, 1938 bp, Pyrococcus furiosus DSM 3638; identical to SEQ ID NO: 13572
  CDS (1)..(1938): transl_table=11

SEQ ID NO: 35927 - protein, 645 aa, Pyrococcus furiosus DSM 3638; identical to SEQ ID NO: 13573

SEQ ID NO: 35928 - DNA, 1614 bp, Streptococcus pyogenes MGAS8232; identical to SEQ ID NO: 13574
  CDS (1)..(1614): transl_table=11

SEQ ID NO: 35929 - protein, 537 aa, Streptococcus pyogenes MGAS8232; identical to SEQ ID NO: 13575

SEQ ID NO: 35930 - DNA, 1725 bp, Thermoanaerobacter tengcongensis MB4; identical to SEQ ID NO: 13576
  CDS (1)..(1725): transl_table=11

SEQ ID NO: 35931 - protein, 574 aa, Thermoanaerobacter tengcongensis MB4; identical to SEQ ID NO: 13577

SEQ ID NO: 35932 - DNA, 1575 bp, Thermoanaerobacter tengcongensis MB4; identical to SEQ ID NO: 13578
  CDS (1)..(1575): transl_table=11

SEQ ID NO: 35933 - protein, 524 aa, Thermoanaerobacter tengcongensis MB4; identical to SEQ ID NO: 13579

SEQ ID NO: 35934 - DNA, 1719 bp, Streptomyces coelicolor A3(2); identical to SEQ ID NO: 13580
  CDS (1)..(1719)

SEQ ID NO: 35935 - protein, 572 aa, Streptomyces coelicolor A3(2); identical to SEQ ID NO: 13581

SEQ ID NO: 35936 - DNA, 3351 bp, Xanthomonas campestris pv. campestris str. ATCC 33913; identical to SEQ ID NO: 13582
  CDS (1)..(3351): transl_table=11

SEQ ID NO: 35937 - protein, 1116 aa, Xanthomonas campestris pv. campestris str. ATCC 33913; identical to SEQ ID NO: 13583

SEQ ID NO: 35938 - DNA, 1617 bp, Xanthomonas campestris pv. campestris str. ATCC 33913; identical to SEQ ID NO: 13584
  CDS (1)..(1617): transl_table=11

SEQ ID NO: 35939 - protein, 538 aa, Xanthomonas campestris pv. campestris str. ATCC 33913; identical to SEQ ID NO: 13585

SEQ ID NO: 35940 - DNA, 1617 bp, Xanthomonas axonopodis pv. citri str. 306; identical to SEQ ID NO: 13586
  CDS (1)..(1617): transl_table=11

SEQ ID NO: 35941 - protein, 538 aa, Xanthomonas axonopodis pv. citri str. 306; identical to SEQ ID NO: 13587

SEQ ID NO: 35942 - DNA, 3327 bp, Chlorobium tepidum TLS; identical to SEQ ID NO: 13588
  CDS (1)..(3327): transl_table=11

SEQ ID NO: 35943 - protein, 1108 aa, Chlorobium tepidum TLS; identical to SEQ ID NO: 13589

SEQ ID NO: 35944 - DNA, 1668 bp, Yersinia pestis KIM; identical to SEQ ID NO: 13590
  CDS (1)..(1668): transl_table=11

SEQ ID NO: 35945 - protein, 555 aa, Yersinia pestis KIM; identical to SEQ ID NO: 13591

SEQ ID NO: 35946 - DNA, 1830 bp, Yersinia pestis KIM; identical to SEQ ID NO: 13592
  CDS (1)..(1830): transl_table=11

SEQ ID NO: 35947 - protein, 609 aa, Yersinia pestis KIM; identical to SEQ ID NO: 13593

SEQ ID NO: 35948 - DNA, 1608 bp, Streptococcus agalactiae 2603V/R; identical to SEQ ID NO: 13594
  CDS (1)..(1608): transl_table=11

SEQ ID NO: 35949 - protein, 535 aa, Streptococcus agalactiae 2603V/R; identical to SEQ ID NO: 13595

SEQ ID NO: 35950 - DNA, 1497 bp, Oceanobacillus iheyensis HTE831; identical to SEQ ID NO: 13596
  CDS (1)..(1497): transl_table=11

SEQ ID NO: 35951 - protein, 498 aa, Oceanobacillus iheyensis HTE831; identical to SEQ ID NO: 13597

SEQ ID NO: 35952 - DNA, 1752 bp, Oceanobacillus iheyensis HTE831; identical to SEQ ID NO: 13598
  CDS (1)..(1752): transl_table=11

SEQ ID NO: 35953 - protein, 583 aa, Oceanobacillus iheyensis HTE831; identical to SEQ ID NO: 13599

SEQ ID NO: 35954 - DNA, 1398 bp, Bifidobacterium longum NCC2705; identical to SEQ ID NO: 13600
  CDS (1)..(1398): transl_table=11

SEQ ID NO: 35955 - protein, 465 aa, Bifidobacterium longum NCC2705; identical to SEQ ID NO: 13601

SEQ ID NO: 35956 - DNA, 1818 bp, Shigella flexneri 2a str. 301; identical to SEQ ID NO: 13602
  CDS (1)..(1818): transl_table=11

SEQ ID NO: 35957 - protein, 605 aa, Shigella flexneri 2a str. 301; identical to SEQ ID NO: 13603

SEQ ID NO: 35958 - DNA, 1746 bp, Leptospira interrogans serovar Lai str. 56601; identical to SEQ ID NO: 13604
  CDS (1)..(1746): transl_table=11

SEQ ID NO: 35959 - protein, 581 aa, Leptospira interrogans serovar Lai str. 56601; identical to SEQ ID NO: 13605

SEQ ID NO: 35960 - DNA, 1839 bp, Corynebacterium efficiens YS-314; identical to SEQ ID NO: 13606
  CDS (1)..(1839): transl_table=11

SEQ ID NO: 35961 - protein, 612 aa, Corynebacterium efficiens YS-314; identical to SEQ ID NO: 13607

SEQ ID NO: 35962 - DNA, 1839 bp, Vibrio vulnificus CMCP6; identical to SEQ ID NO: 13608
  CDS (1)..(1839): transl_table=11

SEQ ID NO: 35963 - protein, 612 aa, Vibrio vulnificus CMCP6; identical to SEQ ID NO: 13609

SEQ ID NO: 35964 - DNA, 2064 bp, Vibrio vulnificus CMCP6; identical to SEQ ID NO: 13610
  CDS (1)..(2064): transl_table=11

SEQ ID NO: 35965 - protein, 687 aa, Vibrio vulnificus CMCP6; identical to SEQ ID NO: 13611

SEQ ID NO: 35966 - DNA, 1464 bp, Bradyrhizobium japonicum USDA 110; identical to SEQ ID NO: 13612
  CDS (1)..(1464)

SEQ ID NO: 35967 - protein, 487 aa, Bradyrhizobium japonicum USDA 110; identical to SEQ ID NO: 13613

SEQ ID NO: 35968 - DNA, 1698 bp, Bradyrhizobium japonicum USDA 110; identical to SEQ ID NO: 13614
  CDS (1)..(1698)

SEQ ID NO: 35969 - protein, 565 aa, Bradyrhizobium japonicum USDA 110; identical to SEQ ID NO: 13615

SEQ ID NO: 35970 - DNA, 1626 bp, Lactobacillus plantarum WCFS1; identical to SEQ ID NO: 13616
  CDS (1)..(1626): transl_table=11

SEQ ID NO: 35971 - protein, 541 aa, Lactobacillus plantarum WCFS1; identical to SEQ ID NO: 13617

SEQ ID NO: 35972 - DNA, 1827 bp, Vibrio parahaemolyticus RIMD 2210633; identical to SEQ ID NO: 13618
  CDS (1)..(1827): transl_table=11

SEQ ID NO: 35973 - protein, 608 aa, Vibrio parahaemolyticus RIMD 2210633; identical to SEQ ID NO: 13619

SEQ ID NO: 35974 - DNA, 1818 bp, Salmonella enterica subsp. enterica serovar Typhi Ty2; identical to SEQ ID NO: 13620
  CDS (1)..(1818): transl_table=11

SEQ ID NO: 35975 - protein, 605 aa, Salmonella enterica subsp. enterica serovar Typhi Ty2; identical to SEQ ID NO: 13621

SEQ ID NO: 35976 - DNA, 2079 bp, Bacteroides thetaiotaomicron VPI-5482; identical to SEQ ID NO: 13622
  CDS (1)..(2079): transl_table=11

SEQ ID NO: 35977 - protein, 692 aa, Bacteroides thetaiotaomicron VPI-5482; identical to SEQ ID NO: 13623

SEQ ID NO: 35978 - DNA, 1854 bp, Bacteroides thetaiotaomicron VPI-5482; identical to SEQ ID NO: 13624
  CDS (1)..(1854): transl_table=11

SEQ ID NO: 35979 - protein, 617 aa, Bacteroides thetaiotaomicron VPI-5482; identical to SEQ ID NO: 13625

SEQ ID NO: 35980 - DNA, 1767 bp, Enterococcus faecalis V583; identical to SEQ ID NO: 13626
  CDS (1)..(1767): transl_table=11

SEQ ID NO: 35981 - protein, 588 aa, Enterococcus faecalis V583; identical to SEQ ID NO: 13627

SEQ ID NO: 35982 - DNA, 1614 bp, Enterococcus faecalis V583; identical to SEQ ID NO: 13628
  CDS (1)..(1614): transl_table=11

SEQ ID NO: 35983 - protein, 537 aa, Enterococcus faecalis V583; identical to SEQ ID NO: 13629

SEQ ID NO: 35984 - DNA, 1674 bp, Enterococcus faecalis V583; identical to SEQ ID NO: 13630
  CDS (1)..(1674): transl_table=11

SEQ ID NO: 35985 - protein, 557 aa, Enterococcus faecalis V583; identical to SEQ ID NO: 13631

SEQ ID NO: 35986 - DNA, 1719 bp, Streptomyces avermitilis MA-4680; identical to SEQ ID NO: 13632
  CDS (1)..(1719)

SEQ ID NO: 35987 - protein, 572 aa, Streptomyces avermitilis MA-4680; identical to SEQ ID NO: 13633

SEQ ID NO: 35988 - DNA, 1752 bp, Streptomyces avermitilis MA-4680; identical to SEQ ID NO: 13634
  CDS (1)..(1752)

SEQ ID NO: 35989 - protein, 583 aa, Streptomyces avermitilis MA-4680; identical to SEQ ID NO: 13635

SEQ ID NO: 35990 - DNA, 1665 bp, Bacillus anthracis str. Ames; identical to SEQ ID NO: 13636
  CDS (1)..(1665): transl_table=11

SEQ ID NO: 35991 - protein, 554 aa, Bacillus anthracis str. Ames; identical to SEQ ID NO: 13637

SEQ ID NO: 35992 - DNA, 1761 bp, Bacillus anthracis str. Ames; identical to SEQ ID NO: 13638
  CDS (1)..(1761): transl_table=11

SEQ ID NO: 35993 - protein, 586 aa, Bacillus anthracis str. Ames; identical to SEQ ID NO: 13639

SEQ ID NO: 35994 - DNA, 1641 bp, Mycobacterium bovis AF2122/97; identical to SEQ ID NO: 13640
  CDS (1)..(1641): transl_table=11

SEQ ID NO: 35995 - protein, 546 aa, Mycobacterium bovis AF2122/97; identical to SEQ ID NO: 13641

SEQ ID NO: 35996 - DNA, 1761 bp, Rhodopirellula baltica SH 1; identical to SEQ ID NO: 13642
  CDS (1)..(1761): transl_table=11

SEQ ID NO: 35997 - protein, 586 aa, Rhodopirellula baltica SH 1; identical to SEQ ID NO: 13643

SEQ ID NO: 35998 - DNA, 3342 bp, Bordetella pertussis Tohama I; identical to SEQ ID NO: 13644
  CDS (1)..(3342): transl_table=11

SEQ ID NO: 35999 - protein, 1113 aa, Bordetella pertussis Tohama I; identical to SEQ ID NO: 13645

SEQ ID NO: 36000 - DNA, 3342 bp, Bordetella bronchiseptica RB50; identical to SEQ ID NO: 13646
  CDS (1)..(3342)

SEQ ID NO: 36001 - protein, 1113 aa, Bordetella bronchiseptica RB50; identical to SEQ ID NO: 13647

SEQ ID NO: 36002 - DNA, 1452 bp, Prochlorococcus marinus str. MIT 9313; identical to SEQ ID NO: 13648
  CDS (1)..(1452): transl_table=11

SEQ ID NO: 36003 - protein, 483 aa, Prochlorococcus marinus str. MIT 9313; identical to SEQ ID NO: 13649

SEQ ID NO: 36004 - DNA, 1407 bp, Synechococcus sp. WH 8102; identical to SEQ ID NO: 13650
  CDS (1)..(1407): transl_table=11

SEQ ID NO: 36005 - protein, 468 aa, Synechococcus sp. WH 8102; identical to SEQ ID NO: 13651

SEQ ID NO: 36006 - DNA, 1662 bp, Synechococcus sp. WH 8102; identical to SEQ ID NO: 13652
  CDS (1)..(1662): transl_table=11

SEQ ID NO: 36007 - protein, 553 aa, Synechococcus sp. WH 8102; identical to SEQ ID NO: 13653

SEQ ID NO: 36008 - DNA, 1863 bp, Gloeobacter violaceus PCC 7421; identical to SEQ ID NO: 13654
  CDS (1)..(1863): transl_table=11

SEQ ID NO: 36009 - protein, 620 aa, Gloeobacter violaceus PCC 7421; identical to SEQ ID NO: 13655

SEQ ID NO: 36010 - DNA, 1443 bp, Gloeobacter violaceus PCC 7421; identical to SEQ ID NO: 13656
  CDS (1)..(1443): transl_table=11

SEQ ID NO: 36011 - protein, 480 aa, Gloeobacter violaceus PCC 7421; identical to SEQ ID NO: 13657

SEQ ID NO: 36012 - DNA, 1635 bp, Vibrio vulnificus YJ016; identical to SEQ ID NO: 13658
  CDS (1)..(1635): transl_table=11

SEQ ID NO: 36013 - protein, 544 aa, Vibrio vulnificus YJ016; identical to SEQ ID NO: 13659

SEQ ID NO: 36014 - DNA, 3303 bp, Rhodopseudomonas palustris CGA009; identical to SEQ ID NO: 13660
  CDS (1)..(3303): transl_table=11

SEQ ID NO: 36015 - protein, 1100 aa, Rhodopseudomonas palustris CGA009; identical to SEQ ID NO: 13661

SEQ ID NO: 36016 - DNA, 1617 bp, Rhodopseudomonas palustris CGA009; identical to SEQ ID NO: 13662
  CDS (1)..(1617): transl_table=11

SEQ ID NO: 36017 - protein, 538 aa, Rhodopseudomonas palustris CGA009; identical to SEQ ID NO: 13663

SEQ ID NO: 36018 - DNA, 3336 bp, Geobacter sulfurreducens PCA; identical to SEQ ID NO: 13664
  CDS (1)..(3336): transl_table=11

SEQ ID NO: 36019 - protein, 1111 aa, Geobacter sulfurreducens PCA; identical to SEQ ID NO: 13665

SEQ ID NO: 36020 - DNA, 1335 bp, Mycobacterium avium subsp. paratuberculosis str. k10; identical to SEQ ID NO: 13666
  CDS (1)..(1335): transl_table=11

SEQ ID NO: 36021 - protein, 444 aa, Mycobacterium avium subsp. paratuberculosis str. k10; identical to SEQ ID NO: 13667

SEQ ID NO: 36022 - DNA, 1773 bp, Mycobacterium avium subsp. paratuberculosis str. k10; identical to SEQ ID NO: 13668
  CDS (1)..(1773): transl_table=11

SEQ ID NO: 36023 - protein, 590 aa, Mycobacterium avium subsp. paratuberculosis str. k10; identical to SEQ ID NO: 13669

SEQ ID NO: 36024 - DNA, 1725 bp, Lactobacillus johnsonii NCC 533; identical to SEQ ID NO: 13670
  CDS (1)..(1725): transl_table=11

SEQ ID NO: 36025 - protein, 574 aa, Lactobacillus johnsonii NCC 533; identical to SEQ ID NO: 13671

SEQ ID NO: 36026 - DNA, 1668 bp, Lactobacillus johnsonii NCC 533; identical to SEQ ID NO: 13672
  CDS (1)..(1668): transl_table=11

SEQ ID NO: 36027 - protein, 555 aa, Lactobacillus johnsonii NCC 533; identical to SEQ ID NO: 13673

SEQ ID NO: 36028 - DNA, 1665 bp, Bacillus cereus ATCC 10987; identical to SEQ ID NO: 13674
  CDS (1)..(1665): transl_table=11

SEQ ID NO: 36029 - protein, 554 aa, Bacillus cereus ATCC 10987; identical to SEQ ID NO: 13675

SEQ ID NO: 36030 - DNA, 1710 bp, Anopheles gambiae str. PEST; identical to SEQ ID NO: 13676
  CDS (1)..(1710)

SEQ ID NO: 36031 - protein, 569 aa, Anopheles gambiae str. PEST; identical to SEQ ID NO: 13677

SEQ ID NO: 36032 - DNA, 1800 bp, Anopheles gambiae str. PEST; identical to SEQ ID NO: 13678
  CDS (1)..(1800)

SEQ ID NO: 36033 - protein, 599 aa, Anopheles gambiae str. PEST; identical to SEQ ID NO: 13679

SEQ ID NO: 36034 - DNA, 1509 bp, Anopheles gambiae str. PEST; identical to SEQ ID NO: 13680
  CDS (1)..(1509)

SEQ ID NO: 36035 - protein, 502 aa, Anopheles gambiae str. PEST; identical to SEQ ID NO: 13681

SEQ ID NO: 36036 - DNA, 1716 bp, Gibberella zeae PH-1; identical to SEQ ID NO: 13682
  CDS (1)..(1716)

SEQ ID NO: 36037 - protein, 571 aa, Gibberella zeae PH-1; identical to SEQ ID NO: 13683

SEQ ID NO: 36038 - DNA, 1635 bp, Leptospira interrogans serovar Copenhageni str. Fiocruz L1-130; identical to SEQ ID NO: 13684
  CDS (1)..(1635): transl_table=11

SEQ ID NO: 36039 - protein, 544 aa, Leptospira interrogans serovar Copenhageni str. Fiocruz L1-130; identical to SEQ ID NO: 13685

SEQ ID NO: 36040 - DNA, 1251 bp, Thermus thermophilus HB27; identical to SEQ ID NO: 13686
  CDS (1)..(1251): transl_table=11

SEQ ID NO: 36041 - protein, 416 aa, Thermus thermophilus HB27 [sequence omitted]

SEQ ID NO: 36042 - DNA, 1662 bp, Listeria monocytogenes str. 4b F2365; identical to SEQ ID NO: 13688
  CDS (1)..(1662): transl_table=11

SEQ ID NO: 36043 - protein, 553 aa, Listeria monocytogenes str. 4b F2365; identical to SEQ ID NO: 13689

SEQ ID NO: 36044 - DNA, 1533 bp, Listeria monocytogenes str. 4b F2365; identical to SEQ ID NO: 13690
  CDS (1)..(1533): transl_table=11

SEQ ID NO: 36045 - protein, 510 aa, Listeria monocytogenes str. 4b F2365; identical to SEQ ID NO: 13691

SEQ ID NO: 36046 - DNA, 1761 bp, Bacillus thuringiensis serovar konkukian str. 97-27; identical to SEQ ID NO: 13692
  CDS (1)..(1761): transl_table=11

SEQ ID NO: 36047 - protein, 586 aa, Bacillus thuringiensis serovar konkukian str. 97-27; identical to SEQ ID NO: 13693

SEQ ID NO: 36048 - DNA, 1710 bp, Leifsonia xyli subsp. xyli str. CTCB07; identical to SEQ ID NO: 13694
  CDS (1)..(1710): transl_table=11

SEQ ID NO: 36049 - protein, 569 aa, Leifsonia xyli subsp. xyli str. CTCB07; identical to SEQ ID NO: 13695

SEQ ID NO: 36050 - DNA, 1683 bp, Bacillus licheniformis ATCC 14580; identical to SEQ ID NO: 13696
  CDS (1)..(1683): transl_table=11

SEQ ID NO: 36051 - protein, 560 aa, Bacillus licheniformis ATCC 14580; identical to SEQ ID NO: 13697

SEQ ID NO: 36052 - DNA, 1764 bp, Bacillus licheniformis ATCC 14580; identical to SEQ ID NO: 13698
  CDS (1)..(1764): transl_table=11

SEQ ID NO: 36053 - protein, 587 aa, Bacillus licheniformis ATCC 14580; identical to SEQ ID NO: 13699

SEQ ID NO: 36054 - DNA, 1620 bp, Methylococcus capsulatus str. Bath; identical to SEQ ID NO: 13700
  CDS (1)..(1620): transl_table=11

SEQ ID NO: 36055 - protein, 539 aa, Methylococcus capsulatus str. Bath; identical to SEQ ID NO: 13701

SEQ ID NO: 36056 - DNA, 1866 bp, Photobacterium profundum SS9; identical to SEQ ID NO: 13702
  CDS (1)..(1866): transl_table=11

SEQ ID NO: 36057 - protein, 621 aa, Photobacterium profundum SS9; identical to SEQ ID NO: 13703

SEQ ID NO: 36058 - DNA, 1656 bp, Thermus thermophilus HB8; identical to SEQ ID NO: 13704
  CDS (1)..(1656): transl_table=11

SEQ ID NO: 36059 - protein, 551 aa, Thermus thermophilus HB8; identical to SEQ ID NO: 13705

SEQ ID NO: 36060 - DNA, 1767 bp, Geobacillus kaustophilus HTA426; identical to SEQ ID NO: 13706
  CDS (1)..(1767): transl_table=11

SEQ ID NO: 36061 - protein, 588 aa, Geobacillus kaustophilus HTA426; identical to SEQ ID NO: 13707

SEQ ID NO: 36062 - DNA, 1542 bp, Geobacillus kaustophilus HTA426; identical to SEQ ID NO: 13708
  CDS (1)..(1542): transl_table=11

SEQ ID NO: 36063 - protein, 513 aa, Geobacillus kaustophilus HTA426; identical to SEQ ID NO: 13709

SEQ ID NO: 36064 - DNA, 4983 bp, Geobacillus kaustophilus HTA426; identical to SEQ ID NO: 13710
  CDS (1)..(4983): transl_table=11

SEQ ID NO: 36065 - protein, 1660 aa, Geobacillus kaustophilus HTA426; identical to SEQ ID NO: 13711

SEQ ID NO: 36066 - DNA, 1689 bp, Azoarcus sp. EbN1; identical to SEQ ID NO: 13712
  CDS (1)..(1689): transl_table=11

SEQ ID NO: 36067 - protein, 562 aa, Azoarcus sp. EbN1; identical to SEQ ID NO: 13713

SEQ ID NO: 36068 - DNA, 1770 bp, Bacillus clausii KSM-K16; identical to SEQ ID NO: 13714
  CDS (1)..(1770): transl_table=11

SEQ ID NO: 36069 - protein, 589 aa, Bacillus clausii KSM-K16; identical to SEQ ID NO: 13715

SEQ ID NO: 36070 - DNA, 2298 bp, Thermococcus kodakarensis KOD1; identical to SEQ ID NO: 13716
  CDS (1)..(2298): transl_table=11

SEQ ID NO: 36071 - protein, 765 aa, Thermococcus kodakarensis KOD1; identical to SEQ ID NO: 13717

SEQ ID NO: 36072 - DNA, 2724 bp, Xanthomonas oryzae pv. oryzae KACC10331; identical to SEQ ID NO: 13718
  CDS (1)..(2724): transl_table=11

SEQ ID NO: 36073 - protein, 907 aa, Xanthomonas oryzae pv. oryzae KACC10331; identical to SEQ ID NO: 13719

SEQ ID NO: 36074 - DNA, 1260 bp, Vibrio fischeri ES114; identical to SEQ ID NO: 13720
  CDS (1)..(1260): transl_table=11

SEQ ID NO: 36075 - protein, 419 aa, Vibrio fischeri ES114; identical to SEQ ID NO: 13721

SEQ ID NO: 36076 - DNA, 1815 bp, Corynebacterium glutamicum ATCC 13032; identical to SEQ ID NO: 13722
  CDS (1)..(1815): transl_table=11

SEQ ID NO: 36077 - protein, 604 aa, Corynebacterium glutamicum ATCC 13032; identical to SEQ ID NO: 13723

SEQ ID NO: 36078 - DNA, 3327 bp, Pseudomonas syringae pv. syringae B728a; identical to SEQ ID NO: 13724
  CDS (1)..(3327)

SEQ ID NO: 36079 - protein, 1108 aa, Pseudomonas syringae pv. syringae B728a; identical to SEQ ID NO: 13725

SEQ ID NO: 36080 - DNA, 1659 bp, Lactobacillus gasseri; identical to SEQ ID NO: 13726
  CDS (1)..(1659)

SEQ ID NO: 36081 - protein, 552 aa, Lactobacillus gasseri; identical to SEQ ID NO: 13727

SEQ ID NO: 36082 - DNA, 1467 bp, Nostoc punctiforme PCC 73102; identical to SEQ ID NO: 13728
  CDS (1)..(1467)

SEQ ID NO: 36083 - protein, 488 aa, Nostoc punctiforme PCC 73102; identical to SEQ ID NO: 13729

SEQ ID NO: 36084 - DNA, 1674 bp, Nostoc punctiforme PCC 73102; identical to SEQ ID NO: 13730
  CDS (1)..(1674)

SEQ ID NO: 36085 - protein, 557 aa, Nostoc punctiforme PCC 73102; identical to SEQ ID NO: 13731

SEQ ID NO: 36086 - DNA, 1266 bp, Bifidobacterium longum DJO10A; identical to SEQ ID NO: 13732
  CDS (1)..(1266)

SEQ ID NO: 36087 - protein, 421 aa, Bifidobacterium longum DJO10A; identical to SEQ ID NO: 13733

SEQ ID NO: 36088 - DNA, 3333 bp, Desulfovibrio desulfuricans G20; identical to SEQ ID NO: 13734
  CDS (1)..(3333)

SEQ ID NO: 36089 - protein, 1110 aa, Desulfovibrio desulfuricans G20; identical to SEQ ID NO: 13735

SEQ ID NO: 36090 - DNA, 1467 bp, Anabaena variabilis ATCC 29413; identical to SEQ ID NO: 13736
  CDS (1)..(1467)

SEQ ID NO: 36091 - protein, 488 aa, Anabaena variabilis ATCC 29413; identical to SEQ ID NO: 13737

SEQ ID NO: 36092 - DNA, 3366 bp, Ralstonia eutropha JMP134; identical to SEQ ID NO: 13738
  CDS (1)..(3366)

SEQ ID NO: 36093 - protein, 1121 aa, Ralstonia eutropha JMP134; identical to SEQ ID NO: 13739

SEQ ID NO: 36094 - DNA, 2586 bp, Rhodobacter sphaeroides 2.4.1; identical to SEQ ID NO: 13740
  CDS (1)..(2586)

SEQ ID NO: 36095 - protein, 861 aa, Rhodobacter sphaeroides 2.4.1; identical to SEQ ID NO: 13741

SEQ ID NO: 36096 - DNA, 3417 bp, Burkholderia cepacia R18194; identical to SEQ ID NO: 13742
  CDS (1)..(3417)

SEQ ID NO: 36097 - protein, 1138 aa, Burkholderia cepacia R18194; identical to SEQ ID NO: 13743

SEQ ID NO: 36098 - DNA, 1776 bp, Listeria monocytogenes str. 4b H7858; identical to SEQ ID NO: 13744
  CDS (1)..(1776): transl_table=11

SEQ ID NO: 36099 - protein, 591 aa, Listeria monocytogenes str. 4b H7858; identical to SEQ ID NO: 13745

SEQ ID NO: 36100 - DNA, 1533 bp, Listeria monocytogenes str. 1/2a F6854; identical to SEQ ID NO: 13746
  CDS (1)..(1533): transl_table=11

SEQ ID NO: 36101 - protein, 510 aa, Listeria monocytogenes str. 1/2a F6854; identical to SEQ ID NO: 13747

SEQ ID NO: 36102 - DNA, 1662 bp, Listeria monocytogenes str. 1/2a F6854; identical to SEQ ID NO: 13748
  CDS (1)..(1662): transl_table=11

SEQ ID NO: 36103 - protein, 553 aa, Listeria monocytogenes str. 1/2a F6854; identical to SEQ ID NO: 13749

SEQ ID NO: 36104 - DNA, 3342 bp, Pseudomonas fluorescens PfO-1; identical to SEQ ID NO: 13750
  CDS (1)..(3342)

SEQ ID NO: 36105 - protein, 1113 aa, Pseudomonas fluorescens PfO-1; identical to SEQ ID NO: 13751

SEQ ID NO: 36106 - DNA, 1629 bp, Rhodospirillum rubrum; identical to SEQ ID NO: 13752
  CDS (1)..(1629)

SEQ ID NO: 36107 - protein, 542 aa, Rhodospirillum rubrum; identical to SEQ ID NO: 13753

SEQ ID NO: 36108 - DNA, 3303 bp, Rhodospirillum rubrum; identical to SEQ ID NO: 13754
  CDS (1)..(3303)

SEQ ID NO: 36109 - protein, 1100 aa, Rhodospirillum rubrum; identical to SEQ ID NO: 13755

SEQ ID NO: 36110 - DNA, 3465 bp, Burkholderia fungorum LB400; identical to SEQ ID NO: 13756
  CDS (1)..(3465)

SEQ ID NO: 36111 - protein, 1154 aa, Burkholderia fungorum LB400; identical to SEQ ID NO: 13757

SEQ ID NO: 36112 - DNA, 1821 bp, Thermobifida fusca; identical to SEQ ID NO: 13758
  CDS (1)..(1821)

SEQ ID NO: 36113 - protein, 606 aa, Thermobifida fusca; identical to SEQ ID NO: 13759

SEQ ID NO: 36114 - DNA, 1563 bp, Microbulbifer degradans 2-40; identical to SEQ ID NO: 13760
  CDS (1)..(1563)

SEQ ID NO: 36115 - protein, 520 aa, Microbulbifer degradans 2-40; identical to SEQ ID NO: 13761

SEQ ID NO: 36116 - DNA, 1671 bp, Oenococcus oeni PSU-1; identical to SEQ ID NO: 13762
  CDS (1)..(1671)

SEQ ID NO: 36117 - protein, 556 aa, Oenococcus oeni PSU-1; identical to SEQ ID NO: 13763

SEQ ID NO: 36118 - DNA, 1482 bp, Trichodesmium erythraeum IMS101; identical to SEQ ID NO: 13764
  CDS (1)..(1482)

SEQ ID NO: 36119 - protein, 493 aa, Trichodesmium erythraeum IMS101; identical to SEQ ID NO: 13765

SEQ ID NO: 36120 - DNA, 3288 bp, Thiobacillus denitrificans ATCC 25259; identical to SEQ ID NO: 13766
  CDS (1)..(3288)

SEQ ID NO: 36121 - protein, 1095 aa, Thiobacillus denitrificans ATCC 25259; identical to SEQ ID NO: 13767

SEQ ID NO: 36122 - DNA, 1815 bp, Chloroflexus aurantiacus; identical to SEQ ID NO: 13768
  CDS (1)..(1815)

SEQ ID NO: 36123 - protein, 604 aa, Chloroflexus aurantiacus; identical to SEQ ID NO: 13769

SEQ ID NO: 36124 - DNA, 4140 bp, Chloroflexus aurantiacus; identical to SEQ ID NO: 13770
  CDS (1)..(4140)

SEQ ID NO: 36125 - protein, 1379 aa, Chloroflexus aurantiacus; identical to SEQ ID NO: 13771

SEQ ID NO: 36126 - DNA, 3363 bp, Chloroflexus aurantiacus; identical to SEQ ID NO: 13772
  CDS (1)..(3363)

SEQ ID NO: 36127 - protein, 1120 aa, Chloroflexus aurantiacus; identical to SEQ ID NO: 13773

SEQ ID NO: 36128 - DNA, 1803 bp, Lactococcus lactis subsp. cremoris SK11; identical to SEQ ID NO: 13774
  CDS (1)..(1803)

SEQ ID NO: 36129 - protein, 600 aa, Lactococcus lactis subsp. cremoris SK11; identical to SEQ ID NO: 13775

SEQ ID NO: 36130 - DNA, 1755 bp, Lactococcus lactis subsp. cremoris SK11; identical to SEQ ID NO: 13776
  CDS (1)..(1755)

SEQ ID NO: 36131 - protein, 584 aa, Lactococcus lactis subsp. cremoris SK11; identical to SEQ ID NO: 13777

SEQ ID NO: 36132 - DNA, 1695 bp, Lactobacillus casei ATCC 334; identical to SEQ ID NO: 13778
  CDS (1)..(1695)

SEQ ID NO: 36133 - protein, 564 aa, Lactobacillus casei ATCC 334; identical to SEQ ID NO: 13779

SEQ ID NO: 36134 - DNA, 1779 bp, Lactobacillus casei ATCC 334; identical to SEQ ID NO: 13780
  CDS (1)..(1779)

SEQ ID NO: 36135 - protein, 592 aa, Lactobacillus casei ATCC 334; identical to SEQ ID NO: 13781

SEQ ID NO: 36136 - DNA, 1668 bp, Lactobacillus casei ATCC 334; identical to SEQ ID NO: 13782
  CDS (1)..(1668)

SEQ ID NO: 36137 - protein, 555 aa, Lactobacillus casei ATCC 334; identical to SEQ ID NO: 13783

SEQ ID NO: 36138 - DNA, 570 bp, Lactobacillus delbrueckii subsp. bulgaricus ATCC BAA-365; identical to SEQ ID NO: 13784
  CDS (1)..(570)

SEQ ID NO: 36139 - protein, 189 aa, Lactobacillus delbrueckii subsp. bulgaricus ATCC BAA-365; identical to SEQ ID NO: 13785

SEQ ID NO: 36140 - DNA, 1827 bp, Deinococcus geothermalis DSM 11300; identical to SEQ ID NO: 13786
  CDS (1)..(1827): transl_table=11

SEQ ID NO: 36141 - protein, 608 aa, Deinococcus geothermalis DSM 11300; identical to SEQ ID NO: 13787

SEQ ID NO: 36142 - DNA, 1491 bp, Deinococcus geothermalis DSM 11300; identical to SEQ ID NO: 13788
  CDS (1)..(1491): transl_table=11

SEQ ID NO: 36143 - protein, 496 aa, Deinococcus geothermalis DSM 11300; identical to SEQ ID NO: 13789

SEQ ID NO: 36144 - DNA, 2097 bp, Deinococcus geothermalis DSM 11300; identical to SEQ ID NO: 13790
  CDS (1)..(2097): transl_table=11

SEQ ID NO: 36145 - protein, 698 aa, Deinococcus geothermalis DSM 11300; identical to SEQ ID NO: 13791

SEQ ID NO: 36146 - DNA, 1662 bp, Anaeromyxobacter dehalogenans 2CP-C; identical to SEQ ID NO: 13792
  CDS (1)..(1662): transl_table=11

SEQ ID NO: 36147 - protein, 553 aa, Anaeromyxobacter dehalogenans 2CP-C; identical to SEQ ID NO: 13793

SEQ ID NO: 36148 - DNA, 1638 bp, Anaeromyxobacter dehalogenans 2CP-C; identical to SEQ ID NO: 13794
  CDS (1)..(1638): transl_table=11

SEQ ID NO: 36149 - protein, 545 aa, Anaeromyxobacter dehalogenans 2CP-C; identical to SEQ ID NO: 13795

SEQ ID NO: 36150 - DNA, 1602 bp, Anaeromyxobacter dehalogenans 2CP-C; identical to SEQ ID NO: 13796
  CDS (1)..(1602): transl_table=11

SEQ ID NO: 36151 - protein, 533 aa, Anaeromyxobacter dehalogenans 2CP-C; identical to SEQ ID NO: 13797

SEQ ID NO: 36152 - DNA, 1188 bp, Streptococcus pneumoniae TIGR4; identical to SEQ ID NO: 13798
  CDS (1)..(1188)

SEQ ID NO: 36153 - protein, 395 aa, Streptococcus pneumoniae TIGR4; identical to SEQ ID NO: 13799

SEQ ID NO: 36154 - DNA, 1407 bp, Arthrobacter sp. FB24; identical to SEQ ID NO: 13800
  CDS (1)..(1407): transl_table=11

SEQ ID NO: 36155 - protein, 468 aa, Arthrobacter sp. FB24; identical to SEQ ID NO: 13801

SEQ ID NO: 36156 - DNA, 1968 bp, Arthrobacter sp. FB24; identical to SEQ ID NO: 13802
  CDS (1)..(1968): transl_table=11

SEQ ID NO: 36157 - protein, 655 aa, Arthrobacter sp. FB24; identical to SEQ ID NO: 13803

SEQ ID NO: 36158 - DNA, 1797 bp, Arthrobacter sp. FB24; identical to SEQ ID NO: 13804
  CDS (1)..(1797): transl_table=11

SEQ ID NO: 36159 - protein, 598 aa, Arthrobacter sp. FB24; identical to SEQ ID NO: 13805

SEQ ID NO: 36160 - DNA, 3327 bp, Azotobacter vinelandii AvOP; identical to SEQ ID NO: 13806
  CDS (1)..(3327): transl_table=11

SEQ ID NO: 36161 - protein, 1108 aa, Azotobacter vinelandii AvOP; identical to SEQ ID NO: 13807

SEQ ID NO: 36162 - DNA, 3414 bp, Burkholderia vietnamiensis G4; identical to SEQ ID NO: 13808
  CDS (1)..(3414): transl_table=11

SEQ ID NO: 36163 - protein, 1137 aa, Burkholderia vietnamiensis G4; identical to SEQ ID NO: 13809

SEQ ID NO: 36164 - DNA, 3414 bp, Burkholderia cenocepacia HI2424; identical to SEQ ID NO: 13810
  CDS (1)..(3414): transl_table=11

SEQ ID NO: 36165 - protein, 1137 aa, Burkholderia cenocepacia HI2424; identical to SEQ ID NO: 13811

SEQ ID NO: 36166 - DNA, 1614 bp, Chromohalobacter salexigens DSM 3043; identical to SEQ ID NO: 13812
  CDS (1)..(1614): transl_table=11

SEQ ID NO: 36167 - protein, 537 aa, Chromohalobacter salexigens DSM 3043; identical to SEQ ID NO: 13813

SEQ ID NO: 36168 - DNA, 3396 bp, Burkholderia pseudomallei S13; identical to SEQ ID NO: 13814
  CDS (1)..(3396)

SEQ ID NO: 36169 - protein, 1131 aa, Burkholderia pseudomallei S13; identical to SEQ ID NO: 13815

SEQ ID NO: 36170 - DNA, 1728 bp, Clostridium thermocellum ATCC 27405; identical to SEQ ID NO: 13816
  CDS (1)..(1728): transl_table=11

SEQ ID NO: 36171 - protein, 575 aa, Clostridium thermocellum ATCC 27405; identical to SEQ ID NO: 13817

SEQ ID NO: 36172 - DNA, 1461 bp, Crocosphaera watsonii WH 8501; identical to SEQ ID NO: 13818
  CDS (1)..(1461): transl_table=11

SEQ ID NO: 36173 - protein, 486 aa, Crocosphaera watsonii WH 8501; identical to SEQ ID NO: 13819

SEQ ID NO: 36174 - DNA, 3318 bp, Chlorobium phaeobacteroides BS1; identical to SEQ ID NO: 13820
  CDS (1)..(3318): transl_table=11

SEQ ID NO: 36175 - protein, 1105 aa, Chlorobium phaeobacteroides BS1; identical to SEQ ID NO: 13821

SEQ ID NO: 36176 - DNA, 3339 bp, Geobacter metallireducens GS-15; identical to SEQ ID NO: 13822
  CDS (1)..(3339): transl_table=11

SEQ ID NO: 36177 - protein, 1112 aa, Geobacter metallireducens GS-15; identical to SEQ ID NO: 13823

SEQ ID NO: 36178 - DNA, 1785 bp, Exiguobacterium sp. 255-15; identical to SEQ ID NO: 13824
  CDS (1)..(1785): transl_table=11

SEQ ID NO: 36179 - protein, 594 aa, Exiguobacterium sp. 255-15; identical to SEQ ID NO: 13825

SEQ ID NO: 36180 - DNA, 1674 bp, Exiguobacterium sp. 255-15; identical to SEQ ID NO: 13826
  CDS (1)..(1674): transl_table=11

SEQ ID NO: 36181 - protein, 557 aa, Exiguobacterium sp. 255-15; identical to SEQ ID NO: 13827

SEQ ID NO: 36182 - DNA, 1611 bp, Exiguobacterium sp. 255-15; identical to SEQ ID NO: 13828
  CDS (1)..(1611): transl_table=11

SEQ ID NO: 36183 - protein, 536 aa, Exiguobacterium sp. 255-15; identical to SEQ ID NO: 13829

SEQ ID NO: 36184 - DNA, 1788 bp, Exiguobacterium sp. 255-15; identical to SEQ ID NO: 13830
  CDS (1)..(1788): transl_table=11

SEQ ID NO: 36185 - protein, 595 aa, Exiguobacterium sp. 255-15; identical to SEQ ID NO: 13831

SEQ ID NO: 36186 - DNA, 1803 bp, Frankia sp. CcI3; identical to SEQ ID NO: 13832
  CDS (1)..(1803): transl_table=11

SEQ ID NO: 36187 - protein, 600 aa, Frankia sp. CcI3; identical to SEQ ID NO: 13833

SEQ ID NO: 36188 - DNA, 3582 bp, Desulfitobacterium hafniense DCB-2; identical to SEQ ID NO: 13834
  CDS (1)..(3582): transl_table=11

SEQ ID NO: 36189 - protein, 1193 aa, Desulfitobacterium hafniense DCB-2; identical to SEQ ID NO: 13835

SEQ ID NO: 36190 - DNA, 1719 bp, Frankia sp. EAN1pec; identical to SEQ ID NO: 13836
  CDS (1)..(1719): transl_table=11

SEQ ID NO: 36191 - protein, 572 aa, Frankia sp. EAN1pec; identical to SEQ ID NO: 13837

SEQ ID NO: 36192 - DNA, 1761 bp, Moorella thermoacetica ATCC 39073; identical to SEQ ID NO: 13838
  CDS (1)..(1761): transl_table=11

SEQ ID NO: 36193 - protein, 586 aa, Moorella thermoacetica ATCC 39073; identical to SEQ ID NO: 13839

SEQ ID NO: 36194 - DNA, 1623 bp, Shewanella baltica OS155; identical to SEQ ID NO: 13840
  CDS (1)..(1623): transl_table=11

SEQ ID NO: 36195 - protein, 540 aa, Shewanella baltica OS155; identical to SEQ ID NO: 13841

SEQ ID NO: 36196 - DNA, 1635 bp, Shewanella amazonensis SB2B; identical to SEQ ID NO: 13842
  CDS (1)..(1635): transl_table=11

SEQ ID NO: 36197 - protein, 544 aa, Shewanella amazonensis SB2B; identical to SEQ ID NO: 13843

SEQ ID NO: 36198 - DNA, 3297 bp, Pelodictyon phaeoclathratiforme BU-1; identical to SEQ ID NO: 13844
  CDS (1)..(3297): transl_table=11

SEQ ID NO: 36199 - protein, 1098 aa, Pelodictyon phaeoclathratiforme BU-1; identical to SEQ ID NO: 13845

SEQ ID NO: 36200 - DNA, 3414 bp, Prosthecochloris aestuarii DSM 271; identical to SEQ ID NO: 13846
  CDS (1)..(3414): transl_table=11

SEQ ID NO: 36201 - protein, 1137 aa, Prosthecochloris aestuarii DSM 271; identical to SEQ ID NO: 13847

SEQ ID NO: 36202 - DNA, 1593 bp, Rubrobacter xylanophilus DSM 9941; identical to SEQ ID NO: 13848
  CDS (1)..(1593): transl_table=11

SEQ ID NO: 36203 - protein, 530 aa, Rubrobacter xylanophilus DSM 9941; identical to SEQ ID NO: 13849

SEQ ID NO: 36204 - DNA, 5328 bp, Rubrobacter xylanophilus DSM 9941; identical to SEQ ID NO: 13850
  CDS (1)..(5328): transl_table=11

SEQ ID NO: 36205 - protein, 1775 aa, Rubrobacter xylanophilus DSM 9941; identical to SEQ ID NO: 13851

SEQ ID NO: 36206 - DNA, 1755 bp, Mesorhizobium sp. BNC1; identical to SEQ ID NO: 13852
  CDS (1)..(1755): transl_table=11

SEQ ID NO: 36207 - protein, 584 aa, Mesorhizobium sp. BNC1; identical to SEQ ID NO: 13853

SEQ ID NO: 36208 - DNA, 3348 bp, Mesorhizobium sp. BNC1; identical to SEQ ID NO: 13854
  CDS (1)..(3348): transl_table=11

SEQ ID NO: 36209 - protein, 1115 aa, Mesorhizobium sp. BNC1; identical to SEQ ID NO: 13855

SEQ ID NO: 36210 - DNA, 1653 bp, Silicibacter sp. TM1040; identical to SEQ ID NO: 13856
  CDS (1)..(1653): transl_table=11

SEQ ID NO: 36211 - protein, 550 aa, Silicibacter sp. TM1040; identical to SEQ ID NO: 13857

SEQ ID NO: 36212 - DNA, 3267 bp, Nitrobacter hamburgensis X14; identical to SEQ ID NO: 13858
  CDS (1)..(3267): transl_table=11

SEQ ID NO: 36213 - protein, 1088 aa, Nitrobacter hamburgensis X14; identical to SEQ ID NO: 13859

SEQ ID NO: 36214 - DNA, 1926 bp, Shewanella denitrificans OS-217; identical to SEQ ID NO: 13860
  CDS (1)..(1926): transl_table=11

SEQ ID NO: 36215 - protein, 641 aa, Shewanella denitrificans OS-217; identical to SEQ ID NO: 13861

SEQ ID NO: 36216 - DNA, 1419 bp, Thermotoga neapolitana; identical to SEQ ID NO: 13862
  CDS (1)..(1419): transl_table=11

SEQ ID NO: 36217 - protein, 472 aa, Thermotoga neapolitana; identical to SEQ ID NO: 13863

SEQ ID NO: 36218 - DNA, 1701 bp, Bacteroides thetaiotaomicron; identical to SEQ ID NO: 13864
  CDS (1)..(1701): transl_table=11

SEQ ID NO: 36219 - protein, 566 aa, Bacteroides thetaiotaomicron; identical to SEQ ID NO: 13865

SEQ ID NO: 36220 - DNA, 3906 bp, Alicyclobacillus acidocaldarius; identical to SEQ ID NO: 13866
  CDS (1)..(3906): transl_table=11

SEQ ID NO: 36221 - protein, 1301 aa, Alicyclobacillus acidocaldarius; identical to SEQ ID NO: 13867

SEQ ID NO: 36222 - DNA, 1797 bp, Klebsiella oxytoca; identical to SEQ ID NO: 13868
  CDS (1)..(1797): transl_table=11

SEQ ID NO: 36223 - protein, 598 aa, Klebsiella oxytoca; identical to SEQ ID NO: 13869

SEQ ID NO: 36224 - DNA, 1581 bp, Bacillus sp; identical to SEQ ID NO: 13870
  CDS (1)..(1581): transl_table=11

SEQ ID NO: 36225 - protein, 526 aa, Bacillus sp; identical to SEQ ID NO: 13871

SEQ ID NO: 36226 - DNA, 1761 bp, Anoxybacillus flavithermus; identical to SEQ ID NO: 13872
  CDS (1)..(1761): transl_table=11

SEQ ID NO: 36227 - protein, 586 aa, Anoxybacillus flavithermus; identical to SEQ ID NO: 13873

SEQ ID NO: 36228 - DNA, 1749 bp, Thermoactinomyces thalpophilus; identical to SEQ ID NO: 13874
  CDS (1)..(1749): transl_table=11

SEQ ID NO: 36229 - protein, 582 aa, Thermoactinomyces thalpophilus; identical to SEQ ID NO: 13875

SEQ ID NO: 36230 - DNA, 1332 bp, Anaerobranca gottschalkii; identical to SEQ ID NO: 13876
  CDS (1)..(1332): transl_table=11

SEQ ID NO: 36231 - protein, 443 aa, Anaerobranca gottschalkii; identical to SEQ ID NO: 13877

SEQ ID NO: 36232 - DNA, 1740 bp, Aedes albopictus; identical to SEQ ID NO: 13878
  CDS (1)..(1740)

SEQ ID NO: 36233 - protein, 579 aa, Aedes albopictus; identical to SEQ ID NO: 13879

SEQ ID NO: 36234 - DNA, 1170 bp, Aeromonas hydrophila; identical to SEQ ID NO: 13880
  misc_feature (866)..(866): n is a, c, g, or t
  CDS (1)..(1170): transl_table=11

SEQ ID NO: 36235 - protein, 389 aa, Aeromonas hydrophila; identical to SEQ ID NO: 13881
  misc_feature (289)..(289): Xaa can be any naturally occuring amino acid

SEQ ID NO: 36236 - DNA, 1449 bp, Thermoactinomyces vulgaris; identical to SEQ ID NO: 13882
  CDS (1)..(1449): transl_table=11

SEQ ID NO: 36237 - protein, 482 aa, Thermoactinomyces vulgaris; identical to SEQ ID NO: 13883

SEQ ID NO: 36238 - DNA, 1581 bp, Xanthomonas campestris; identical to SEQ ID NO: 13884
  CDS (1)..(1581): transl_table=11

SEQ ID NO: 36239 - protein, 526 aa, Xanthomonas campestris; identical to SEQ ID NO: 13885

SEQ ID NO: 36240 - DNA, 3309 bp, Rhodobacter sphaeroides f; identical to SEQ ID NO: 13886
  CDS (1)..(3309): transl_table=11

SEQ ID NO: 36241 - protein, 1102 aa, Rhodobacter sphaeroides f; identical to SEQ ID NO: 13887

SEQ ID NO: 36242 - DNA, 1548 bp, Ostreococcus tauri; identical to SEQ ID NO: 13888
  CDS (1)..(1548)

SEQ ID NO: 36243 - protein, 515 aa, Ostreococcus tauri; identical to SEQ ID NO: 13889

SEQ ID NO: 36244 - DNA, 1554 bp, uncultured bacterium; identical to SEQ ID NO: 13890
  CDS (1)..(1554)

SEQ ID NO: 36245 - protein, 517 aa, uncultured bacterium; identical to SEQ ID NO: 13891

SEQ ID NO: 36246 - DNA, 2628 bp, Chlamydomonas reinhardtii; identical to SEQ ID NO: 13892
  CDS (1)..(2628)

SEQ ID NO: 36247 - protein, 875 aa, Chlamydomonas reinhardtii; identical to SEQ ID NO: 13893

SEQ ID NO: 36248 - DNA, 1962 bp, Paenibacillus sp; identical to SEQ ID NO: 13894
  CDS (1)..(1962): transl_table=11

SEQ ID NO: 36249 - protein, 653 aa, Paenibacillus sp; identical to SEQ ID NO: 13895

SEQ ID NO: 36250 - DNA, 1548 bp, Halothermothrix orenii; identical to SEQ ID NO: 13896
  CDS (1)..(1548): transl_table=11

SEQ ID NO: 36251 - protein, 515 aa, Halothermothrix orenii; identical to SEQ ID NO: 13897

SEQ ID NO: 36252 - DNA, 1533 bp, Paenibacillus sp; identical to SEQ ID NO: 13898
  CDS (1)..(1533): transl_table=11

SEQ ID NO: 36253 - protein, 510 aa, Paenibacillus sp; identical to SEQ ID NO: 13899

SEQ ID NO: 36254 - DNA, 1767 bp, Bacillus stearothermophilus; identical to SEQ ID NO: 13900
  CDS (1)..(1767): transl_table=11

SEQ ID NO: 36255 - protein, 588 aa, Bacillus stearothermophilus; identical to SEQ ID NO: 13901

SEQ ID NO: 36256 - DNA, 6057 bp, Bacillus stearothermophilus; identical to SEQ ID NO: 13902
  CDS (1)..(6057): transl_table=11

SEQ ID NO: 36257 - protein, 2018 aa, Bacillus stearothermophilus; identical to SEQ ID NO: 13903

SEQ ID NO: 36258 - DNA, 1983 bp, Thermococcus sp; identical to SEQ ID NO: 13904
  CDS (1)..(1983): transl_table=11

SEQ ID NO: 36259 - protein, 660 aa, Thermococcus sp; identical to SEQ ID NO: 13905

SEQ ID NO: 36260 - DNA, 2181 bp, Thermococcus sp; identical to SEQ ID NO: 13906
  CDS (1)..(2181)

SEQ ID NO: 36261 - protein, 726 aa, Thermococcus sp; identical to SEQ ID NO: 13907

SEQ ID NO: 36262 - DNA, 2220 bp, Thermococcus sp; identical to SEQ ID NO: 13908
  CDS (1)..(2220): transl_table=11

SEQ ID NO: 36263 - protein, 739 aa, Thermococcus sp; identical to SEQ ID NO: 13909

SEQ ID NO: 36264 - DNA, 1737 bp, Alicyclobacillus acidocaldarius; identical to SEQ ID NO: 13910
  CDS (1)..(1737): transl_table=11

SEQ ID NO: 36265 - protein, 578 aa, Alicyclobacillus acidocaldarius; identical to SEQ ID NO: 13911

SEQ ID NO: 36266 - DNA, 1548 bp, Paenibacillus polymyxa; identical to SEQ ID NO: 13912
  CDS (1)..(1548): transl_table=11

SEQ ID NO: 36267 - protein, 515 aa, Paenibacillus polymyxa; identical to SEQ ID NO: 13913

SEQ ID NO: 36268 - DNA, 1689 bp, Dictyoglomus thermophilum; identical to SEQ ID NO: 13914
  CDS (1)..(1689): transl_table=11

SEQ ID NO: 36269 - protein, 562 aa, Dictyoglomus thermophilum; identical to SEQ ID NO: 13915

SEQ ID NO: 36270 - DNA, 1497 bp, Dictyoglomus thermophilum; identical to SEQ ID NO: 13916
  CDS (1)..(1497): transl_table=11

SEQ ID NO: 36271 - protein, 498 aa, Dictyoglomus thermophilum; identical to SEQ ID NO: 13917

SEQ ID NO: 36272 - DNA, 1242 bp, Triticum aestivum; identical to SEQ ID NO: 13918
  CDS (1)..(1242)

SEQ ID NO: 36273 - protein, 413 aa, Triticum aestivum; identical to SEQ ID NO: 13919

SEQ ID NO: 36274 - DNA, 1761 bp, Bacillus acidopullulyticus; identical to SEQ ID NO: 13920
  CDS (1)..(1761): transl_table=11

SEQ ID NO: 36275 - protein, 586 aa, Bacillus acidopullulyticus; identical to SEQ ID NO: 13921

SEQ ID NO: 36276 - DNA, 1563 bp, Bacillus megaterium; identical to SEQ ID NO: 13922
  CDS (1)..(1563): transl_table=11

SEQ ID NO: 36277 - protein, 520 aa, Bacillus megaterium; identical to SEQ ID NO: 13923

SEQ ID NO: 36278 - DNA, 4428 bp, Thermoanaerobacter thermohydrosulfuricus; identical to SEQ ID NO: 13924
  CDS (1)..(4428): transl_table=11

SEQ ID NO: 36279 - protein, 1475 aa, Thermoanaerobacter thermohydrosulfuricus; identical to SEQ ID NO: 13925

SEQ ID NO: 36280 - DNA, 1776 bp, Bacillus sphaericus; identical to SEQ ID NO: 13926
  CDS (1)..(1776): transl_table=11

SEQ ID NO: 36281 - protein, 591 aa, Bacillus sphaericus; identical to SEQ ID NO: 13927

SEQ ID NO: 36282 - DNA, 1725 bp, Thermoanaerobacter ethanolicus; identical to SEQ ID NO: 13928
  CDS (1)..(1725): transl_table=11

SEQ ID NO: 36283 - protein, 574 aa, Thermoanaerobacter ethanolicus; identical to SEQ ID NO: 13929

SEQ ID NO: 36284 - DNA, 1761 bp, Drosophila virilis; identical to SEQ ID NO: 13930
  CDS (1)..(1761)

SEQ ID NO: 36285 - protein, 586 aa, Drosophila virilis; identical to SEQ ID NO: 13931

SEQ ID NO: 36286 - DNA, 1329 bp, Thermotoga neapolitana; identical to SEQ ID NO: 13932
  CDS (1)..(1329): transl_table=11

SEQ ID NO: 36287 - protein, 442 aa, Thermotoga neapolitana; identical to SEQ ID NO: 13933

SEQ ID NO: 36288 - DNA, 2001 bp, Thermoactinomyces vulgaris; identical to SEQ ID NO: 13934
  CDS (1)..(2001): transl_table=11

SEQ ID NO: 36289 - protein, 666 aa, Thermoactinomyces vulgaris; identical to SEQ ID NO: 13935

SEQ ID NO: 36290 - DNA, 1758 bp, Thermoactinomyces vulgaris; identical to SEQ ID NO: 13936
  CDS (1)..(1758): transl_table=11

SEQ ID NO: 36291 - protein, 585 aa, Thermoactinomyces vulgaris; identical to SEQ ID NO: 13937

SEQ ID NO: 36292 - DNA, 24 bp, Artificial sequence
  Primer sequence
atgatgttaaatgcatggcacctg

SEQ ID NO: 36293 - DNA, 24 bp, Artificial sequence
  Primer sequence
ttagttcatccataccgtagccga

SEQ ID NO: 36294 - protein, 917 aa, Artificial sequence; identical to SEQ ID NO: 13940
  Consensus
  Variant (2)..(2): Xaa in position 2 is any amino acid
  Variant (6)..(6): Xaa in position 6 is any amino acid
  Variant (15)..(16): Xaa in position 15 to 16 is any amino acid
  Variant (18)..(18): Xaa in position 18 is any amino acid
  Variant (22)..(22): Xaa in position 22 is any amino acid
  Variant (25)..(25): Xaa in position 25 is any amino acid
  Variant (26)..(85): Xaa in position 26 to 85 is any or no amino acid
  Variant (89)..(89): Xaa in position 89 is any amino acid
  Variant (93)..(93): Xaa in position 93 is any amino acid
  Variant (99)..(99): Xaa in position 99 is any amino acid
  Variant (101)..(108): Xaa in position 101 to 108 is any or no amino acid
  Variant (112)..(112): Xaa in position 112 is any amino acid
  Variant (117)..(117): Xaa in position 117 is any amino acid
  Variant (121)..(121): Xaa in position 121 is any amino acid
  Variant (124)..(125): Xaa in position 124 to 125 is any amino acid
  Variant (126)..(152): Xaa in position 126 to 152 is any or no amino acid
  Variant (158)..(158): Xaa in position 158 is any amino acid
  Variant (161)..(162): Xaa in position 161 to 162 is any amino acid
  Variant (166)..(166): Xaa in position 166 is any amino acid
  Variant (171)..(171): Xaa in position 171 is any amino acid
  Variant (174)..(175): Xaa in position 174 to 175 is any amino acid
  Variant (178)..(179): Xaa in position 178 to 179 is any amino acid
  Variant (182)..(182): Xaa in position 182 is any amino acid
  Variant (186)..(189): Xaa in position 186 to 189 is any or no amino acid
  Variant (195)..(195): Xaa in position 195 is any amino acid
  Variant (197)..(197): Xaa in position 197 is any amino acid
  Variant (203)..(203): Xaa in position 203 is any amino acid
  Variant (205)..(205): Xaa in position 205 is any amino acid
  Variant (208)..(208): Xaa in position 208 is any amino acid
  Variant (211)..(214): Xaa in position 211 to 214 is any amino acid
  Variant (215)..(256): Xaa in position 215 to 256 is any or no amino acid
  Variant (258)..(258): Xaa in position 258 is any or no amino acid
  Variant (266)..(266): Xaa in position 266 is any or no amino acid
  Variant (268)..(269): Xaa in position 268 to 269 is any amino acid
  Variant (270)..(394): Xaa in position 270 to 394 is any or no amino acid
  Variant (397)..(399): Xaa in position 397 to 399 is any or no amino acid
  Variant (401)..(402): Xaa in position 401 to 402 is any amino acid
  Variant (403)..(404): Xaa in position 403 to 404 is any or no amino acid
  Variant (413)..(413): Xaa in position 413 is any amino acid
  Variant (415)..(417): Xaa in position 415 to 417 is any amino acid
  Variant (420)..(420): Xaa in position 420 is any amino acid
  Variant (421)..(426): Xaa in position 421 to 426 is any or no amino acid
  Variant (433)..(433): Xaa in position 433 is any amino acid
  Variant (434)..(434): Xaa in position 434 is any or no amino acid
  Variant (436)..(441): Xaa in position 436 to 441 is any or no amino acid
  Variant (449)..(449): Xaa in position 449 is any amino acid
  Variant (451)..(452): Xaa in position 451 to 452 is any amino acid
  Variant (454)..(458): Xaa in position 454 to 458 is any amino acid
  Variant (459)..(487): Xaa in position 459 to 487 is any or no amino acid
  Variant (489)..(490): Xaa in position 489 to 490 is any amino acid
  Variant (492)..(495): Xaa in position 492 to 495 is any amino acid
  Variant (498)..(498): Xaa in position 498 is any amino acid
  Variant (504)..(509): Xaa in position 504 to 509 is any amino acid
  Variant (510)..(529): Xaa in position 510 to 529 is any or no amino acid
  Variant (532)..(534): Xaa in position 532 to 534 is any amino acid
  Variant (535)..(538): Xaa in position 535 to 538 is any or no amino acid
  Variant (540)..(544): Xaa in position 540 to 544 is any amino acid
  Variant (547)..(554): Xaa in position 547 to 554 is any amino acid
  Variant (555)..(592): Xaa in position 555 to 592 is any or no amino acid
  Variant (594)..(607): Xaa in position 594 to 607 is any amino acid
  Variant (608)..(611): Xaa in position 608 to 611 is any or no amino acid
  Variant (613)..(613): Xaa in position 613 is any amino acid
  Variant (617)..(618): Xaa in position 617 to 618 is any amino acid
  Variant (620)..(620): Xaa in position 620 is any amino acid
  Variant (623)..(623): Xaa in position 623 is any amino acid
  Variant (625)..(627): Xaa in position 625 to 627 is any amino acid
  Variant (628)..(667): Xaa in position 628 to 667 is any or no amino acid
  Variant (672)..(674): Xaa in position 672 to 674 is any amino acid
  Variant (684)..(684): Xaa in position 684 is any amino acid
  Variant (694)..(697): Xaa in position 694 to 697 is any amino acid
  Variant (698)..(737): Xaa in position 698 to 737 is any or no amino acid
  Variant (739)..(739): Xaa in position 739 is any amino acid
  Variant (740)..(740): Xaa in position 740 is any or no amino acid
  Variant (742)..(742): Xaa in position 742 is any or no amino acid
  Variant (745)..(745): Xaa in position 745 is any or no amino acid
  Variant (747)..(750): Xaa in position 747 to 750 is any amino acid
  Variant (752)..(797): Xaa in position 752 to 797 is any or no amino acid
  Variant (801)..(801): Xaa in position 801 is any amino acid
  Variant (803)..(803): Xaa in position 803 is any amino acid
  Variant (805)..(805): Xaa in position 805 is any amino acid
  Variant (808)..(808): Xaa in position 808 is any amino acid
  Variant (812)..(814): Xaa in position 812 to 814 is any amino acid
  Variant (817)..(817): Xaa in position 817 is any amino acid
  Variant (818)..(818): Xaa in position 818 is any or no amino acid
  Variant (820)..(827): Xaa in position 820 to 827 is any amino acid
  Variant (828)..(840): Xaa in position 828 to 840 is any or no amino acid
  Variant (845)..(845): Xaa in position 845 is any amino acid
  Variant (847)..(850): Xaa in position 847 to 850 is any amino acid
  Variant (852)..(852): Xaa in position 852 is any amino acid
  Variant (857)..(857): Xaa in position 857 is any amino acid
  Variant (859)..(864): Xaa in position 859 to 864 is any amino acid
  Variant (865)..(886): Xaa in position 865 to 886 is any or no amino acid
  Variant (888)..(898): Xaa in position 888 to 898 is any amino acid
  Variant (899)..(909): Xaa in position 899 to 909 is any or no amino acid
  Variant (911)..(915): Xaa in position 911 to 915 is any amino acid
  Variant (916)..(916): Xaa in position 916 is any or no amino acid

SEQ ID NO: 36295 - protein, 8 aa, Artificial sequence
  Consensus
  Variant (2)..(2): Xaa in position 2 is Glu or Gln
  Variant (3)..(3): Xaa in position 3 is Ile, Leu or Val
  Variant (4)..(7): Xaa in position 4 to 7 is any amino acid
YXXXXXXF

SEQ ID NO: 36296 - protein, 72 aa, Artificial sequence; identical to SEQ ID NO: 13942
  Consensus
  Variant (2)..(12): Xaa in position 2 to 12 is any amino acid
  Variant (14)..(16): Xaa in position 14 to 16 is any amino acid
  Variant (17)..(17): Xaa in position 17 is Phe, Ile, Leu, Met or Val
  Variant (18)..(18): Xaa in position 18 is Trp or Tyr
  Variant (19)..(19): Xaa in position 19 is Phe, Ile, Leu, Met or Val
  Variant (20)..(20): Xaa in position 20 is any amino acid
  Variant (22)..(30): Xaa in position 22 to 30 is any amino acid
  Variant (31)..(31): Xaa in position 31 is any or no amino acid
  Variant (33)..(35): Xaa in position 33 to 35 is any amino acid
  Variant (36)..(36): Xaa in position 36 is Asp, Glu, Asn or Thr
  Variant (37)..(39): Xaa in position 37 to 39 is any amino acid
  Variant (40)..(40): Xaa in position 40 is Phe, Ile, Leu or Val
  Variant (41)..(44): Xaa in position 41 to 44 is any amino acid
  Variant (46)..(52): Xaa in position 46 to 52 is any amino acid
  Variant (53)..(53): Xaa in position 53 is Phe, Leu, Met or Val
  Variant (54)..(61): Xaa in position 54 to 61 is any amino acid
  Variant (62)..(62): Xaa in position 62 is Phe, Ile, Leu, Met or Val
  Variant (63)..(63): Xaa in position 63 is any amino acid
  Variant (64)..(64): Xaa in position 64 is Ile, Leu or Val
  Variant (65)..(66): Xaa in position 65 to 66 is any amino acid
  Variant (67)..(67): Xaa in position 67 is Asp or Glu
  Variant (68)..(71): Xaa in position 68 to 71 is any amino acid

SEQ ID NO: 36297 - protein, 14 aa, Artificial sequence
  Consensus
  Variant (2)..(6): Xaa in position 2 to 6 is any amino acid
  Variant (7)..(8): Xaa in position 7 to 8 is any or no amino acid
  Variant (10)..(10): Xaa in position 10 is Ala or Gly
  Variant (11)..(11): Xaa in position 11 is any amino acid
  Variant (13)..(13): Xaa in position 13 is Phe, Ile, Leu, Met or Val
WXXXXXXXDXXRXD

SEQ ID NO: 36298 - protein, 12 aa, Artificial sequence
  Consensus
  Variant (2)..(2): Xaa in position 2 is any amino acid
  Variant (3)..(3): Xaa in position 3 is Ala, Ile, Pro or Val
  Variant (4)..(5): Xaa in position 4 to 5 is any amino acid
  Variant (7)..(7): Xaa in position 7 is any amino acid
  Variant (9)..(9): Xaa in position 9 is Asp, Glu, Gly, Asn, Gln, Ser or Thr
  Variant (11)..(11): Xaa in position 11 is any amino acid
GXXXXYXGXEXG

SEQ ID NO: 36299 - DNA, 456 bp, Escherichia coli K12; identical to SEQ ID NO: 19503
  CDS (1)..(456): transl_table=11

SEQ ID NO: 36300 - protein, 151 aa, Escherichia coli K12; identical to SEQ ID NO: 19504

SEQ ID NO: 36301 - DNA, 444 bp, Escherichia coli; identical to SEQ ID NO: 19505
  CDS (1)..(444): transl_table=11

SEQ ID NO: 36302 - protein, 147 aa, Escherichia coli; identical to SEQ ID NO: 19506

SEQ ID NO: 36303 - DNA, 465 bp, Mesorhizobium loti MAFF303099; identical to SEQ ID NO: 19507
  CDS (1)..(465): transl_table=11

SEQ ID NO: 36304 - protein, 154 aa, Mesorhizobium loti MAFF303099; identical to SEQ ID NO: 19508

SEQ ID NO: 36305 - DNA, 423 bp, Thermotoga maritima MSB8; identical to SEQ ID NO: 19509
  CDS (1)..(423): transl_table=11

SEQ ID NO: 36306 - protein, 140 aa, Thermotoga maritima MSB8; identical to SEQ ID NO: 19510

SEQ ID NO: 36307 - DNA, 570 bp, Vibrio cholerae O1 biovar eltor str. N16961; identical to SEQ ID NO: 19511
  CDS (1)..(570): transl_table=11

SEQ ID NO: 36308 - protein, 189 aa, Vibrio cholerae O1 biovar eltor str. N16961; identical to SEQ ID NO: 19512

SEQ ID NO: 36309 - DNA, 450 bp, Pasteurella multocida subsp. multocida str. Pm70; identical to SEQ ID NO: 19513
  CDS (1)..(450): transl_table=11

SEQ ID NO: 36310 - protein, 149 aa, Pasteurella multocida subsp. multocida str. Pm70; identical to SEQ ID NO: 19514

SEQ ID NO: 36311 - DNA, 453 bp, Pseudomonas aeruginosa PAO1; identical to SEQ ID NO: 19515
  CDS (1)..(453): transl_table=11

SEQ ID NO: 36312 - protein, 150 aa, Pseudomonas aeruginosa PAO1; identical to SEQ ID NO: 19516

SEQ ID NO: 36313 - DNA, 480 bp, Deinococcus radiodurans R1; identical to SEQ ID NO: 19517
  CDS (1)..(480): transl_table=11

SEQ ID NO: 36314 - protein, 159 aa, Deinococcus radiodurans R1; identical to SEQ ID NO: 19518

SEQ ID NO: 36315 - DNA, 435 bp, Xylella fastidiosa 9a5c; identical to SEQ ID NO: 19519
  CDS (1)..(435): transl_table=11

SEQ ID NO: 36316 - protein, 144 aa, Xylella fastidiosa 9a5c; identical to SEQ ID NO: 19520

SEQ ID NO: 36317 - DNA, 456 bp, Sinorhizobium meliloti 1021; identical to SEQ ID NO: 19521
  CDS (1)..(456): transl_table=11

SEQ ID NO: 36318 - protein, 151 aa, Sinorhizobium meliloti 1021; identical to SEQ ID NO: 19522

SEQ ID NO: 36319 - DNA, 465 bp, Caulobacter crescentus CB15; identical to SEQ ID NO: 19523
  CDS (1)..(465): transl_table=11

SEQ ID NO: 36320 - protein, 154 aa, Caulobacter crescentus CB15; identical to SEQ ID NO: 19524

SEQ ID NO: 36321 - DNA, 465 bp, Agrobacterium tumefaciens str. C58; identical to SEQ ID NO: 19525
  CDS (1)..(465): transl_table=11

SEQ ID NO: 36322 - protein, 154 aa, Agrobacterium tumefaciens str. C58; identical to SEQ ID NO: 19526

SEQ ID NO: 36323 - DNA, 417 bp, Xanthomonas axonopodis pv. citri str. 306; identical to SEQ ID NO: 19527
  CDS (1)..(417): transl_table=11

SEQ ID NO: 36324 - protein, 138 aa, Xanthomonas axonopodis pv. citri str. 306; identical to SEQ ID NO: 19528

SEQ ID NO: 36325 - DNA, 468 bp, Brucella suis 1330; identical to SEQ ID NO: 19529
  CDS (1)..(468): transl_table=11

SEQ ID NO: 36326 - protein, 155 aa, Brucella suis 1330; identical to SEQ ID NO: 19530

SEQ ID NO: 36327 - DNA, 432 bp, Pseudomonas putida KT2440; identical to SEQ ID NO: 19531
  CDS (1)..(432): transl_table=11

SEQ ID NO: 36328 - protein, 143 aa, Pseudomonas putida KT2440; identical to SEQ ID NO: 19532

SEQ ID NO: 36329 - DNA, 453 bp, Vibrio vulnificus CMCP6; identical to SEQ ID NO: 19533
  CDS (1)..(453): transl_table=11

SEQ ID NO: 36330 - protein, 150 aa, Vibrio vulnificus CMCP6; identical to SEQ ID NO: 19534

SEQ ID NO: 36331 - DNA, 444 bp, Bradyrhizobium japonicum USDA 110; identical to SEQ ID NO: 19535
  CDS (1)..(444): transl_table=11

SEQ ID NO: 36332 - protein, 147 aa, Bradyrhizobium japonicum USDA 110; identical to SEQ ID NO: 19536

SEQ ID NO: 36333 - DNA, 435 bp, Xylella fastidiosa Temecula1; identical to SEQ ID NO: 19537
  CDS (1)..(435): transl_table=11

SEQ ID NO: 36334 - protein, 144 aa, Xylella fastidiosa Temecula1; identical to SEQ ID NO: 19538

SEQ ID NO: 36335 - DNA, 462 bp, Vibrio parahaemolyticus RIMD 2210633; identical to SEQ ID NO: 19539
  CDS (1)..(462): transl_table=11

SEQ ID NO: 36336 - protein, 153 aa, Vibrio parahaemolyticus RIMD 2210633; identical to SEQ ID NO: 19540

SEQ ID NO: 36337 - DNA, 429 bp, Bacillus cereus ATCC 14579; identical to SEQ ID NO: 19541
  CDS (1)..(429): transl_table=11

SEQ ID NO: 36338 - protein, 142 aa, Bacillus cereus ATCC 14579; identical to SEQ ID NO: 19542

SEQ ID NO: 36339 - DNA, 444 bp, Prochlorococcus marinus str. MIT 9313; identical to SEQ ID NO: 19543
  CDS (1)..(444): transl_table=11

SEQ ID NO: 36340 - protein, 147 aa, Prochlorococcus marinus str. MIT 9313; identical to SEQ ID NO: 19544

SEQ ID NO: 36341 - DNA, 456 bp, Photorhabdus luminescens subsp. laumondii TTO1; identical to SEQ ID NO: 19545
  CDS (1)..(456): transl_table=11

SEQ ID NO: 36342 - protein, 151 aa, Photorhabdus luminescens subsp. laumondii TTO1; identical to SEQ ID NO: 19546

SEQ ID NO: 36343 - DNA, 459 bp, Vibrio vulnificus YJ016; identical to SEQ ID NO: 19547
  CDS (1)..(459): transl_table=11

SEQ ID NO: 36344 - protein, 152 aa, Vibrio vulnificus YJ016; identical to SEQ ID NO: 19548

SEQ ID NO: 36345 - DNA, 450 bp, Rhodopseudomonas palustris CGA009; identical to SEQ ID NO: 19549
  CDS (1)..(450): transl_table=11

SEQ ID NO: 36346 - protein, 149 aa, Rhodopseudomonas palustris CGA009; identical to SEQ ID NO: 19550

SEQ ID NO: 36347 - DNA, 429 bp, Bacillus cereus ATCC 10987; identical to SEQ ID NO: 19551
  CDS (1)..(429): transl_table=11

SEQ ID NO: 36348 - protein, 142 aa, Bacillus cereus ATCC 10987; identical to SEQ ID NO: 19552

SEQ ID NO: 36349 - DNA, 429 bp, Bacillus anthracis str. Sterne; identical to SEQ ID NO: 19553
  CDS (1)..(429): transl_table=11

SEQ ID NO: 36350 - protein, 142 aa, Bacillus anthracis str. Sterne; identical to SEQ ID NO: 19554

SEQ ID NO: 36351 - DNA, 429 bp, Bacillus thuringiensis serovar konkukian str. 97-27; identical to SEQ ID NO: 19555
  CDS (1)..(429): transl_table=11

SEQ ID NO: 36352 - protein, 142 aa, Bacillus thuringiensis serovar konkukian str. 97-27; identical to SEQ ID NO: 19556

SEQ ID NO: 36353 - DNA, 471 bp, Acinetobacter sp. ADP1; identical to SEQ ID NO: 19557
  CDS (1)..(471): transl_table=11

SEQ ID NO: 36354 - protein, 156 aa, Acinetobacter sp. ADP1; identical to SEQ ID NO: 19558

SEQ ID NO: 36355 - DNA, 456 bp, Erwinia carotovora subsp. atroseptica SCRI1043; identical to SEQ ID NO: 19559
  CDS (1)..(456): transl_table=11

SEQ ID NO: 36356 - protein, 151 aa, Erwinia carotovora subsp. atroseptica SCRI1043; identical to SEQ ID NO: 19560

SEQ ID NO: 36357 - DNA, 468 bp, Propionibacterium acnes KPA171202; identical to SEQ ID NO: 19561
  CDS (1)..(468): transl_table=11

SEQ ID NO: 36358 - protein, 155 aa, Propionibacterium acnes KPA171202; identical to SEQ ID NO: 19562

SEQ ID NO: 36359 - DNA, 492 bp, Desulfotalea psychrophila LSv54; identical to SEQ ID NO: 19563
  CDS (1)..(492): transl_table=11

SEQ ID NO: 36360 - protein, 163 aa, Desulfotalea psychrophila LSv54; identical to SEQ ID NO: 19564

SEQ ID NO: 36361 - DNA, 462 bp, Desulfotalea psychrophila LSv54; identical to SEQ ID NO: 19565
  CDS (1)..(462): transl_table=11

SEQ ID NO: 36362 - protein, 153 aa, Desulfotalea psychrophila LSv54; identical to SEQ ID NO: 19566

SEQ ID NO: 36363 - DNA, 450 bp, Yersinia pseudotuberculosis IP 32953; identical to SEQ ID NO: 19567
  CDS (1)..(450): transl_table=11

SEQ ID NO: 36364 - protein, 149 aa, Yersinia pseudotuberculosis IP 32953; identical to SEQ ID NO: 19568

SEQ ID NO: 36365 - DNA, 429 bp, Bacillus cereus E33L; identical to SEQ ID NO: 19569
  CDS (1)..(429): transl_table=11

SEQ ID NO: 36366 - protein, 142 aa, Bacillus cereus E33L; identical to SEQ ID NO: 19570

SEQ ID NO: 36367 - DNA, 453 bp, Mannheimia succiniciproducens MBEL55E; identical to SEQ ID NO: 19571
  CDS (1)..(453): transl_table=11

SEQ ID NO: 36368 - protein, 150 aa, Mannheimia succiniciproducens MBEL55E; identical to SEQ ID NO: 19572

SEQ ID NO: 36369 - DNA, 444 bp, Methylococcus capsulatus str. Bath; identical to SEQ ID NO: 19573
  CDS (1)..(444): transl_table=11

SEQ ID NO: 36370 - protein, 147 aa, Methylococcus capsulatus str. Bath; identical to SEQ ID NO: 19574

SEQ ID NO: 36371 - DNA, 459 bp, Photobacterium profundum SS9; identical to SEQ ID NO: 19575
  CDS (1)..(459): transl_table=11

SEQ ID NO: 36372 - protein, 152 aa, Photobacterium profundum SS9; identical to SEQ ID NO: 19576

SEQ ID NO: 36373 - DNA, 453 bp, Salmonella enterica subsp. enterica serovar Paratyphi A str. ATCC; identical to SEQ ID NO: 19577
  CDS (1)..(453): transl_table=11

SEQ ID NO: 36374 - protein, 150 aa, Salmonella enterica subsp. enterica serovar Paratyphi A str. ATCC; identical to SEQ ID NO: 19578

SEQ ID NO: 36375 - DNA, 579 bp, Xanthomonas oryzae pv. oryzae KACC10331; identical to SEQ ID NO: 19579
  CDS (1)..(579): transl_table=11

SEQ ID NO: 36376 - protein, 192 aa, Xanthomonas oryzae pv. oryzae KACC10331; identical to SEQ ID NO: 19580

SEQ ID NO: 36377 - DNA, 453 bp, Vibrio fischeri ES114; identical to SEQ ID NO: 19581
  CDS (1)..(453): transl_table=11

SEQ ID NO: 36378 - protein, 150 aa, Vibrio fischeri ES114; identical to SEQ ID NO: 19582

SEQ ID NO: 36379 - DNA, 453 bp, Salmonella enterica subsp. enterica serovar Choleraesuis str; identical to SEQ ID NO: 19583
  CDS (1)..(453): transl_table=11

SEQ ID NO: 36380 - protein, 150 aa, Salmonella enterica subsp. enterica serovar Choleraesuis str; identical to SEQ ID NO: 19584

SEQ ID NO: 36381 - DNA, 468 bp, Brucella abortus biovar 1 str. 9-941; identical to SEQ ID NO: 19585
  CDS (1)..(468): transl_table=11

SEQ ID NO: 36382 - protein, 155 aa, Brucella abortus biovar 1 str. 9-941; identical to SEQ ID NO: 19586

SEQ ID NO: 36383 - DNA, 435 bp, Xanthomonas campestris pv. campestris str. 8004; identical to SEQ ID NO: 19587
  CDS (1)..(435): transl_table=11

SEQ ID NO: 36384 - protein, 144 aa, Xanthomonas campestris pv. campestris str. 8004; identical to SEQ ID NO: 19588

SEQ ID NO: 36385 - DNA, 450 bp, Pseudomonas fluorescens Pf-5; identical to SEQ ID NO: 19589
  CDS (1)..(450): transl_table=11

SEQ ID NO: 36386 - protein, 149 aa, Pseudomonas fluorescens Pf-5; identical to SEQ ID NO: 19590

SEQ ID NO: 36387 - DNA, 498 bp, Psychrobacter arcticum 273-4; identical to SEQ ID NO: 19591
  CDS (1)..(498): transl_table=11

SEQ ID NO: 36388 - protein, 165 aa, Psychrobacter arcticum 273-4; identical to SEQ ID NO: 19592

SEQ ID NO: 36389 - DNA, 441 bp, Dechloromonas aromatica RCB; identical to SEQ ID NO: 19593
  CDS (1)..(441): transl_table=11

SEQ ID NO: 36390 - protein, 146 aa, Dechloromonas aromatica RCB; identical to SEQ ID NO: 19594

SEQ ID NO: 36391 - DNA, 444 bp, Haemophilus somnus 129PT; identical to SEQ ID NO: 19595
  CDS (1)..(444)

SEQ ID NO: 36392 - protein, 147 aa, Haemophilus somnus 129PT; identical to SEQ ID NO: 19596

SEQ ID NO: 36393 - DNA, 444 bp, Haemophilus somnus 2336; identical to SEQ ID NO: 19597
  CDS (1)..(444)

SEQ ID NO: 36394 - protein, 147 aa, Haemophilus somnus 2336; identical to SEQ ID NO: 19598

SEQ ID NO: 36395 - DNA, 453 bp, Pseudomonas aeruginosa UCBPP-PA14; identical to SEQ ID NO: 19599
  CDS (1)..(453)

SEQ ID NO: 36396 - protein, 150 aa, Pseudomonas aeruginosa UCBPP-PA14; identical to SEQ ID NO: 19600

SEQ ID NO: 36397 - DNA, 495 bp, Psychrobacter sp. 273-4; identical to SEQ ID NO: 19601
  CDS (1)..(495)

SEQ ID NO: 36398 - protein, 164 aa, Psychrobacter sp. 273-4; identical to SEQ ID NO: 19602

SEQ ID NO: 36399 - DNA, 471 bp, Erythrobacter litoralis HTCC2594; identical to SEQ ID NO: 19603
  CDS (1)..(471): transl_table=11

SEQ ID NO: 36400 - protein, 156 aa, Erythrobacter litoralis HTCC2594; identical to SEQ ID NO: 19604

SEQ ID NO: 36401 - DNA, 447 bp, Sphingopyxis alaskensis RB2256; identical to SEQ ID NO: 19605
  CDS (1)..(447): transl_table=11

SEQ ID NO: 36402 - protein, 148 aa, Sphingopyxis alaskensis RB2256; identical to SEQ ID NO: 19606

SEQ ID NO: 36403 - DNA, 447 bp, Magnetococcus sp. MC-1; identical to SEQ ID NO: 19607
  CDS (1)..(447): transl_table=11

SEQ ID NO: 36404 - protein, 148 aa, Magnetococcus sp. MC-1; identical to SEQ ID NO: 19608

SEQ ID NO: 36405 - DNA, 462 bp, Mesorhizobium sp. BNC1; identical to SEQ ID NO: 19609
  CDS (1)..(462): transl_table=11

SEQ ID NO: 36406 - protein, 153 aa, Mesorhizobium sp. BNC1; identical to SEQ ID NO: 19610

SEQ ID NO: 36407 - DNA, 417 bp, Xylella fastidiosa Dixon; identical to SEQ ID NO: 19611
  CDS (1)..(417): transl_table=11

SEQ ID NO: 36408 - protein, 138 aa, Xylella fastidiosa Dixon; identical to SEQ ID NO: 19612

SEQ ID NO: 36409 - DNA, 498 bp, Psychrobacter cryohalolentis K5; identical to SEQ ID NO: 19613
  CDS (1)..(498): transl_table=11

SEQ ID NO: 36410 - protein, 165 aa, Psychrobacter cryohalolentis K5; identical to SEQ ID NO: 19614

SEQ ID NO: 36411 - DNA, 417 bp, Xylella fastidiosa Ann-1; identical to SEQ ID NO: 19615
  CDS (1)..(417): transl_table=11

SEQ ID NO: 36412 - protein, 138 aa, Xylella fastidiosa Ann-1; identical to SEQ ID NO: 19616

SEQ ID NO: 36413 - DNA, 447 bp, Nitrobacter winogradskyi Nb; identical to SEQ ID NO: 19617
  CDS (1)..(447)

SEQ ID NO: 36414 - protein, 148 aa, Nitrobacter winogradskyi Nb; identical to SEQ ID NO: 19618

SEQ ID NO: 36415 - DNA, 438 bp, uncultured bacterium 578; identical to SEQ ID NO: 19619
  CDS (1)..(438)

SEQ ID NO: 36416 - protein, 145 aa, uncultured bacterium 578; identical to SEQ ID NO: 19620

SEQ ID NO: 36417 - DNA, 24 bp, Artificial sequence
  Primer sequence
atggagttaatggtcgttcatcca

SEQ ID NO: 36418 - DNA, 23 bp, Artificial sequence
  Primer sequence
ttaagacgagacggctcggatat

SEQ ID NO: 36419 - protein, 147 aa, Artificial sequence; identical to SEQ ID NO: 19623
  Consensus
  Variant (2)..(4): Xaa in position 2 to 4 is any amino acid
  Variant (6)..(6): Xaa in position 6 is any amino acid
  Variant (10)..(11): Xaa in position 10 to 11 is any amino acid
  Variant (14)..(18): Xaa in position 14 to 18 is any amino acid
  Variant (20)..(20): Xaa in position 20 is any amino acid
  Variant (21)..(21): Xaa in position 21 is any or no amino acid
  Variant (24)..(24): Xaa in position 24 is any amino acid
  Variant (27)..(27): Xaa in position 27 is any amino acid
  Variant (29)..(33): Xaa in position 29 to 33 is any amino acid
  Variant (35)..(42): Xaa in position 35 to 42 is any amino acid
  Variant (43)..(48): Xaa in position 43 to 48 is any or no amino acid
  Variant (50)..(52): Xaa in position 50 to 52 is any amino acid
  Variant (54)..(55): Xaa in position 54 to 55 is any amino acid
  Variant (58)..(81): Xaa in position 58 to 81 is any amino acid
  Variant (82)..(90): Xaa in position 82 to 90 is any or no amino acid
  Variant (94)..(97): Xaa in position 94 to 97 is any amino acid
  Variant (99)..(102): Xaa in position 99 to 102 is any amino acid
  Variant (103)..(106): Xaa in position 103 to 106 is any or no amino acid
  Variant (108)..(112): Xaa in position 108 to 112 is any amino acid
  Variant (114)..(117): Xaa in position 114 to 117 is any amino acid
  Variant (119)..(124): Xaa in position 119 to 124 is any amino acid
  Variant (125)..(128): Xaa in position 125 to 128 is any or no amino acid
  Variant (130)..(131): Xaa in position 130 to 131 is any amino acid
  Variant (133)..(134): Xaa in position 133 to 134 is any amino acid
  Variant (136)..(136): Xaa in position 136 is any amino acid
  Variant (138)..(141): Xaa in position 138 to 141 is any amino acid
  Variant (143)..(144): Xaa in position 143 to 144 is any amino acid
  Variant (146)..(146): Xaa in position 146 is any amino acid

SEQ ID NO: 36420 - protein, 29 aa, Artificial sequence
  Consensus
  Variant (2)..(7): Xaa in position 2 to 7 is any amino acid
  Variant (8)..(9): Xaa in position 8 to 9 is any or no amino acid
  Variant (11)..(11): Xaa in position 11 is any amino acid
  Variant (12)..(13): Xaa in position 12 to 13 is any or no amino acid
  Variant (15)..(15): Xaa in position 15 is any amino acid
  Variant (16)..(16): Xaa in position 16 is Phe, Ile, Leu or Val
  Variant (17)..(18): Xaa in position 17 to 18 is any amino acid
  Variant (19)..(19): Xaa in position 19 is Ala, Gly, Asn, Ser or Thr
  Variant (20)..(22): Xaa in position 20 to 22 is any amino acid
  Variant (23)..(23): Xaa in position 23 is Phe, Ile, Leu or Val
  Variant (25)..(25): Xaa in position 25 is any amino acid
  Variant (26)..(26): Xaa in position 26 is Ala or Gly
  Variant (27)..(27): Xaa in position 27 is Ala, Ile, Leu or Val
  Variant (28)..(28): Xaa in position 28 is Ala, Gly or Ser
WXXXXXXXXLXXXEXXXXXXXXXWXXXXA

SEQ ID NO: 36421 - protein, 29 aa, Artificial sequence
  Consensus
  Variant (2)..(5): Xaa in position 2 to 5 is any amino acid
  Variant (6)..(6): Xaa in position 6 is Ala, Ile, Leu or Val
  Variant (7)..(12): Xaa in position 7 to 12 is any amino acid
  Variant (14)..(19): Xaa in position 14 to 19 is any amino acid
  Variant (20)..(20): Xaa in position 20 is any or no amino acid
  Variant (22)..(22): Xaa in position 22 is any amino acid
  Variant (23)..(24): Xaa in position 23 to 24 is any or no amino acid
  Variant (26)..(26): Xaa in position 26 is any amino acid
  Variant (27)..(27): Xaa in position 27 is Ala, Ile or Val
  Variant (28)..(28): Xaa in position 28 is any amino acid
  Variant (29)..(29): Xaa in position 29 is Ala, Cys, Gly, Ser or Thr
GXXXXXXXXXXXGXXXXXXXDXXXWXXXX

SEQ ID NO: 36422 - DNA, 2106 bp, Escherichia coli
  CDS (1)..(2106)
atgaacaaatcagggaaatacctcgtctggacagtgctctctgtaatgggagcatttgctctgggatacattgctttaaatcgtggggaacagatcaacgcgctgtggattgtggtggcgtcggtctgtatctatctgatcgcttaccgtttttatgggctgtatatcgccaaaaatgtgctggcggttgacccgacgcgtatgacgccagcggtgcgccataacgacgggctggactatgtgccgacggacaagaaagtgctgttcggtcaccattttgcggccattgccggagcaggtccgctggtggggccggtactggcggcgcaaatgggctacctgccggggatgatctggctgctcgctggggtggttctcgccggtgcggtgcaggatttcatggtgctgtttgtttctacgcgccgtgacggtcgctcgctgggtgagctggtcaaagaagagatggggccaaccgccggggtgattgcgctggtggcctgctttatgatcatggtcattatccttgcagtgctggcgatgatcgtggtgaaagccctgactcatagcccgtggggaacatataccgttgcgttcaccattccgctggcgctgtttatggggatctacctgcgctatctgcgtccggggcgtattggcgaagtgtcggtcatcggtctggtattcctgattttcgccattatctctggcggctgggtggcagaaagtccgacctgggcaccgtactttgactttaccggcgtgcagttgacctggatgctggtgggttacggttttgtggcggcggtgctgccggtgtggttactgctggccccgcgtgactacctctctaccttcctgaaaatcgggactatcgtcggtctggcggtaggcattttgattatgcgcccgacgctgaccatgcctgcgctgaccaaatttgtcgatggcactggcccggtatggaccggtaacctgttcccgttcctgtttatcaccatcgcctgtggcgcggtgtctggcttccatgcgctgatctcttctgggaccacgccgaagatgctggcgaacgaagggcaggcgtgctttatcggctacggtgggatgttaatggaatccttcgtggcgattatggcgctggtttccgcctgtatcatcgatccgggcgtgtattttgccatgaacagcccgatggcggtgctggctccggcagggacggcggatgtggtcgcttctgccgcgcaggtggtgagtagctggggctttagcattacaccagatacgctaaaccagattgccagcgaagtgggtgaacagtcgatcatttcccgtgcgggcggtgcgccgacgctggcggtggggatggcctacattctgcacggcgcgctgggcggcatgatggatgtggcgttctggtatcacttcgccattttgtttgaagcactgtttattctgacggcggtggatgcaggtacgcgtgctgcgcgctttatgttgcaggatctgctgggcgtggtgtctcctggcctgaagcggaccgattcactgcctgctaacctgctggcaacagcgctgtgcgtactggcgtggggctacttcctccatcagggcgtggtcgatccgctgggcggcattaacactctgtggccgctgtttggtattgccaaccagatgctggcagggatggcgctgatgctctgtgccgtggtgttgttcaagatgaaacgtcaacgttacgcctgggtggcgctggtaccaacggcctggctgctgatttgtaccctgaccgcaggctggcagaaagcgtttagcccggatgcgaaagtcggcttcctggccattgctaataagttccaggcaatgatcgacagcggcaatattccgtcgcagtatactgagtcacagctggcgcaactggtgttcaacaaccgtctggatgccgggttaaccatcttctttatggtggtcgtggtggttctggcactgttctcgattaagacggcacttgcggcattgaaagatccgaagccaacggcgaaagaaacgccgtatgaaccaatgccggaaaatgtcgaggagatcgtggcgcaggcaaaaggcgcacactaa

SEQ ID NO: 36423 - protein, 701 aa, Escherichia coli
MNKSGKYLVWTVLSVMGAFALGYIALNRGEQINALWIVVASVCIYLIAYRFYGLYIAKNVLAVDPTRMTPAVRHNDGLDYVPTDKKVLFGHHFAAIAGAGPLVGPVLAAQMGYLPGMIWLLAGVVLAGAVQDFMVLFVSTRRDGRSLGELVKEEMGPTAGVIALVACFMIMVIILAVLAMIVVKALTHSPWGTYTVAFTIPLALFMGIYLRYLRPGRIGEVSVIGLVFLIFAIISGGWVAESPTWAPYFDFTGVQLTWMLVGYGFVAAVLPVWLLLAPRDYLSTFLKIGTIVGLAVGILIMRPTLTMPALTKFVDGTGPVWTGNLFPFLFITIACGAVSGFHALISSGTTPKMLANEGQACFIGYGGMLMESFVAIMALVSACIIDPGVYFAMNSPMAVLAPAGTADVVASAAQVVSSWGFSITPDTLNQIASEVGEQSIISRAGGAPTLAVGMAYILHGALGGMMDVAFWYHFAILFEALFILTAVDAGTRAARFMLQDLLGVVSPGLKRTDSLPANLLATALCVLAWGYFLHQGVVDPLGGINTLWPLFGIANQMLAGMALMLCAVVLFKMKRQRYAWVALVPTAWLLICTLTAGWQKAFSPDAKVGFLAIANKFQAMIDSGNIPSQYTESQLAQLVFNNRLDAGLTIFFMVVVVVLALFSIKTALAALKDPKPTAKETPYEPMPENVEEIVAQAKGAH

SEQ ID NO: 36424 - DNA, 1779 bp, Pyrococcus abyssi GE5
  CDS (1)..(1779): transl_table=11
atgaattcaaccgtcgttattcttgctgccgcaataatatatgtaggcctctattttacctatggaaaggggcttcagaacaaggtcgtcagggcagaccccaacaggccgacaccggcccacaggctctacgatggagttgactacgttccagcacatccgctagtcctctatggacaccacttcgcctctatagctggagcaggtcccatagtgggtccggccgttgcaatggcgtggggatggctaccttcactgatctgggtctggttcggaaacgtcttcataggagcagttcacgactacctggccttgatgtcatcggttaggtacgatggaaagtcaatccaatggatagctggaaaattgatgagcaagagaacgagcatggccttcgagctatacgtttggttcgctttgatactggttatagcggcatttgcagctgtaattgcgggaatcttcgtgaagaccccaggagcggcaactgcctcgatactgttcctattgatagcggtcctgcttggatggttactttacaaggttcagataaacttcaaggttggaacaataatagggataattctactgataatagcgatatacatcgggttcaagttcccgctagttgccagcgctaaggcctggtacatattcctgggggcctacgtgatagtggcttcttcacttccagtgtgggttctgctacagcctagagactacttgaacgcttacatcctgtggtttggcctagtgctaggtggattggcattcttcataatagggttcaagggagtcggaacatttactgcgccagcctacacaaccttcagtgcccacgtagttggtggaaagccctctccattctggccaacgatacccctagtgatagcgtgtggtgcactgagtggattccactcgctggtaggctctggaacctcaagtaagcaactcgacaatgagctccacggtctactcgtaggttacggtggaatgttcactgagggattcttgtcaacgatagtcatctcctcgatagccgtctatggacttcagatattccacaatgctggaataggaataacagctgaaacctgggcccaagcttacgctccactggttgccgcaaagtcgataaccacggaaacccttcagaagcttggtgttgcagctctagagaatttcaagaatggaaccgtcataggaaaggtaggaatatttgcaagtagctatgctcatggactccacgatgcgtttggaatcgacattcacttaggaacgctcttcgccagcctatgggtctcggcgttcgcattgacaacgcttgacactgcaactagactgggcaggtttgcttggcaggagataattgagatggtcaagggtccagagatcctcaagaacaagtgggttgcatccttcatactggtattctttggaatagcccttgcatggaagggtaagtggctagtcatatggccagcgttcagcggaatgaaccagatgcttgctagcatagccatgatgacagcttcactctgggttgccaagatacagaggccaagtggattctggaagtgggcggttctaatcccagcgctcttcctatgggtcacggtgacttcagcactgatatggttcctaatctacgtaggaaagtcaagcatttgggtcagcctgataacgatagtcggcctagtgctgaacttcttactggtgatagactggtacaacgcctggaagaaacctgcagaggagtaccaagcggctgccgcttga

SEQ ID NO: 36425 - protein, 592 aa, Pyrococcus abyssi GE5
MNSTVVILAAAIIYVGLYFTYGKGLQNKVVRADPNRPTPAHRLYDGVDYVPAHPLVLYGHHFASIAGAGPIVGPAVAMAWGWLPSLIWVWFGNVFIGAVHDYLALMSSVRYDGKSIQWIAGKLMSKRTSMAFELYVWFALILVIAAFAAVIAGIFVKTPGAATASILFLLIAVLLGWLLYKVQINFKVGTIIGIILLIIAIYIGFKFPLVASAKAWYIFLGAYVIVASSLPVWVLLQPRDYLNAYILWFGLVLGGLAFFIIGFKGVGTFTAPAYTTFSAHVVGGKPSPFWPTIPLVIACGALSGFHSLVGSGTSSKQLDNELHGLLVGYGGMFTEGFLSTIVISSIAVYGLQIFHNAGIGITAETWAQAYAPLVAAKSITTETLQKLGVAALENFKNGTVIGKVGIFASSYAHGLHDAFGIDIHLGTLFASLWVSAFALTTLDTATRLGRFAWQEIIEMVKGPEILKNKWVASFILVFFGIALAWKGKWLVIWPAFSGMNQMLASIAMMTASLWVAKIQRPSGFWKWAVLIPALFLWVTVTSALIWFLIYVGKSSIWVSLITIVGLVLNFLLVIDWYNAWKKPAEEYQAAAA

SEQ ID NO: 36426 - DNA, 1815 bp, Aeropyrum pernix K1
  CDS (1)..(1815): transl_table=11
gtgtccatgcctatactactccttgttgcagttattctagctatatatgctgtggcgtatcttttctatggcaggaatatactacaggagaaggttgttagagcatcccctgagagggagaccccggctatagccaagttcgacggcgtcgactatgtcccggcccacaggttcgtgctcttcggccaccacttcgctagcatagcgggcgctggacctatagtaggccctgccatagccatggcctacggctggctcctccccctagtctgggttctatttggcaatgtgttcatgggagccgttcacgactacctctccctaatggcgagcgtgaggtacggcggcatctctatcgttagcgttggcgagaacctaatggggaggaaggcgaggtatctcttcctgatatacgtattgttcactctgattctcgtatatgccgccttcgcgagcatagcggcatctctgttcgctagagaccccagggttgcaacactatccatactattcatgccgctggctctgctgcttggcataatgatgtacaggatgggccttgggatggggccctcaacagttataacggttgttctagtgatcgccgccttcgtttactcttacaaccacggtatagtcataggcaccttcgacccgagcctcccaccgggagaaggaggctgggtagcctatcacaggtgggtcataatactagggctctacgcgctcctagctgcaagcctgcctgtctggtatctcctacagcctagggactatctaaacgcctacatactatggacgggtctgggcctagccgctatagccgccatactgcttggaacacagagcctcaagggcccagcctacacttccttccagccaaacataatcgcaggacagcccacacccttctggccagccataccgctcataatagcctgtggctcccttagcgggttccacagcctagtagcctcgggcaccactagtaagcagcttgcaagcgagctagatgccctcttcgtcggctacggtgcaatgctgctcgagggagccctctcgggcctggcagtgataatacctatatcattcgcgtggaacgcccccgagctaatacagaagggtgttatcgagaacaacatgctggatctcgccgcggttccaaggtatgctgtgggatacggctacacgctggcgaagacgtttgagatgtttggcgtaggcttcgacacgggatacagcttcttcaccctcttcgcaagcctcatgctatcgatgtatgtgctcacgactctcgacacggggacgaggctcgccaggtttgcctggcaagaactcttcgactggctcgccaacgtcgacaagaacctatactcgatagtcaccaacaagtgggtctccagcctggcagtggttataataggcagcgccctggcgtaccctgtcctcgagataggtgctggctacaaggcggcttacaacgtggtgtggccggctttcgccggggccaaccagatgttggcagcaatagccttgctgacgagcgccctctgggtatacggtgtgctgaacgttagaggagggacggggctgctgatactgctgccctccctcttcctatgggtcaccgttacagcaggcttaacatggtggctgatggtcatactgccagtgctgccggctatacagcagtttggagccggctccatgatactgttcacgctgctgctgagcctgctactcttcgccctattcataataaacttcaacaaactgagcaagcaggccggagcctcacagcaggcccaggcttaa

SEQ ID NO: 36427 - protein, 604 aa, Aeropyrum pernix K1
MSMPILLLVAVILAIYAVAYLFYGRNILQEKVVRASPERETPAIAKFDGVDYVPAHRFVLFGHHFASIAGAGPIVGPAIAMAYGWLLPLVWVLFGNVFMGAVHDYLSLMASVRYGGISIVSVGENLMGRKARYLFLIYVLFTLILVYAAFASIAASLFARDPRVATLSILFMPLALLLGIMMYRMGLGMGPSTVITVVLVIAAFVYSYNHGIVIGTFDPSLPPGEGGWVAYHRWVIILGLYALLAASLPVWYLLQPRDYLNAYILWTGLGLAAIAAILLGTQSLKGPAYTSFQPNIIAGQPTPFWPAIPLIIACGSLSGFHSLVASGTTSKQLASELDALFVGYGAMLLEGALSGLAVIIPISFAWNAPELIQKGVIENNMLDLAAVPRYAVGYGYTLAKTFEMFGVGFDTGYSFFTLFASLMLSMYVLTTLDTGTRLARFAWQELFDWLANVDKNLYSIVTNKWVSSLAVVIIGSALAYPVLEIGAGYKAAYNVVWPAFAGANQMLAAIALLTSALWVYGVLNVRGGTGLLILLPSLFLWVTVTAGLTWWLMVILPVLPAIQQFGAGSMILFTLLLSLLLFALFIINFNKLSKQAGASQQAQA

SEQ ID NO: 36428 - DNA, 1485 bp, Vibrio cholerae O1 biovar eltor str. N16961
  CDS (1)..(1485): transl_table=11
atgttgtggtttctaacctgtgtcgcagccctcgttggcggttactttatttacggagctttcgtagagaaagtatttggcatcaacgaaaagcgtcaaacccctgcccatacaaaaacggacggcgtcgactatgtaccgatgtccaccccaaaagtttatctcgtacaattactgaacatcgccggtgttggtcctatctttggtccaatcatgggtgcgctgtacggtccagccgccatgctgtggatcgtagttggctgtatcttcgcgggtgcagtacacgactacttctcaggtatgctttctatccgtaacggtggtgcttcggttccatccatcacgggtcgttacttaggcaatggcgcaaaacactttatgaacatttttgccattgtgttgctgcttctggttggtgtggtgttcgtttcagcccctgctggcatgatcactaacctgattaaccaacaaactgacttcaccgtcagcatgaccaccatggtcgtgatcatcttcgcttactatattctggcgactatcgttcctgttgataaaatcatcggccgtttctaccccctatttggtgcgctactgattttcatgtcggttggtttgatgacggcgattgcgttctcttctgagcaccaagtgctgggcggatttgaaatcagcgatatggtgaaaaacctcaacccgaatgacatgcctctgtggccggctctgttcatcaccatcgcttgtggtgctatctctggcttccacgcgactcagtctccgctgatggcacgctgtatggaaaatgagaagaacggtcgcttcgtgttttacggcgcgatgattggcgaaggcatcattgctcttatctggtgtactgttgctctctctttcttcggctcactggaagctctgtctgaagcggtgaaaaacggtggcccaggtaacgtggtttacggtgcttctttcggcctgctgggtgtgtttggtggtgtgattgctttccttggcgtggtgatcctgcctatcacttcgggtgataccgcgttccgttcaagccgtctgatcttggctgaatacttcaacatggagcaaaaaacactgcgtaaccgcctactgatggctgtacctctgttcgttatcggtgcagtgttgacccaagtcgatttcggtatcatctggcgctacttcggttttgcgaaccaagcgaccgcagtcatgatgctgtggacagccaccgcttacctgatgcgccacaacaaactgcactggatctgtacggtacctgcgctgtttatgactacagtgtgtatcagcttcatccttaacagcagcacgttaggttttggcttaccaatgcagatttcaaccattgcaggtgtactggcttctctgggtgctctggcttacgtagcgaaagtatccaaaggcaaaggggaaaccgatcttgccgatgaggagaaaccacaaggcgtgacgaaaaccgcttaa

SEQ ID NO: 36429 - protein, 494 aa, Vibrio cholerae O1 biovar eltor str. N16961
MLWFLTCVAALVGGYFIYGAFVEKVFGINEKRQTPAHTKTDGVDYVPMSTPKVYLVQLLNIAGVGPIFGPIMGALYGPAAMLWIVVGCIFAGAVHDYFSGMLSIRNGGASVPSITGRYLGNGAKHFMNIFAIVLLLLVGVVFVSAPAGMITNLINQQTDFTVSMTTMVVIIFAYYILATIVPVDKIIGRFYPLFGALLIFMSVGLMTAIAFSSEHQVLGGFEISDMVKNLNPNDMPLWPALFITIACGAISGFHATQSPLMARCMENEKNGRFVFYGAMIGEGIIALIWCTVALSFFGSLEALSEAVKNGGPGNVVYGASFGLLGVFGGVIAFLGVVILPITSGDTAFRSSRLILAEYFNMEQKTLRNRLLMAVPLFVIGAVLTQVDFGIIWRYFGFANQATAVMMLWTATAYLMRHNKLHWICTVPALFMTTVCISFILNSSTLGFGLPMQISTIAGVLASLGALAYVAKVSKGKGETDLADEEKPQGVTKTA

SEQ ID NO: 36430 - DNA, 1743 bp, Bacillus halodurans C-125
  CDS (1)..(1743): transl_table=11
gtgtacggagtattacttgcagctttaggcatgctcgtgtttgcgttagggtatcggtattattcaaagtttatcgccgaacgaatttatcgccttgaccctaattttgtaacgcctgcccatcaatttaaggatggaaaagactttgtcccaaccaacaagtttgttctgtggggacatcattttacctcagttgctggtgccgcaccgatcgtagggccagcaattgcgatttattggggctggctaccagcaattctctgggtcacccttgggacggtgtttgcagcaggtgttcatgactttggggcacttgttttatcggttcgaaacaaaggtcaatcggtcggaacgttagccgataagctcatcggtcgtcaggccaagctgttatttttatttattattttgatccttgttcttatggttaacgctgtgtttgcctgggtcatttccaacttgtttatctcaaatccttcagcggtactgtccgtttttattcaaattccattagcagtgtggattggctaccatgtatacaaacgacaaggaggaatgctcatcccgtcccttgtggcgctggcggtgatgtacgtgtcagccattgtggcaagccgagtacctgctttacaaattgaccttatccgctattttggtggggaggaaaacatcgtagcttttggtcttgatggggtcgctatgtcgttcttcgtctggattatcgtccttatgatctacgtctacatcgcctccacattaccggtttggaagctgttacagccacgggattacattaactcccatcagctcgtcgtcggtttgcttattttatacttaggtttgctgttttctaacccaaaggttacagcacctgctgtcaacggttcacctgatacgtcatggttcccgttgctgtttattaccattgcgtgtggtgcgatctccgggttccacggtctcgtttcttctgggacgacatcgaaacagctgaataaggaaacagacgcgaggtttgttgggtatttaggagcaattggtgaagggctactcgctctcatcgtaatcgtcgcagttgctacgttctttgcatcgcctcaagcattctccgaggtgtactcaagctttggtgcagcaaatcaaggcgggctaggaaacttcgttcaagccgcaggtcagcttgcgacaggtctcctcattccgcaagatatggcggcgacgatcgtggctgtgatcatcgtcagctttgccgcgaccacactggatacctctgtccgcttaatgcgatacattattgctgaactcggtcaagaatataaggtgccagcgctatctaaaacccatgtggccacttcaattgccgttgtgtcgagtgcggcgctcgttcttttaccagaaggaccaaatggatttggttcaggaggttacttgctttggccactatttggaacgtcaaatcagcttcttgcagggattaccttgctgctaataacgatttggctgaaacgtcaagggcgtaactatttaccgactttgatcccgatggttttcgttttgtttatgacgctgtatgctatgttacaacaagtcctctttcaatggtcaccatttggtggtacggggacgaacattctcttatttacgctaggttcaattattctcgtatttgcgttctggattgtcattgtcgccatctctgaaattatgaaatccaagccaagggatgattcaagaaaaagtgcgtaa

SEQ ID NO: 36431 - protein, 580 aa, Bacillus halodurans C-125
MYGVLLAALGMLVFALGYRYYSKFIAERIYRLDPNFVTPAHQFKDGKDFVPTNKFVLWGHHFTSVAGAAPIVGPAIAIYWGWLPAILWVTLGTVFAAGVHDFGALVLSVRNKGQSVGTLADKLIGRQAKLLFLFIILILVLMVNAVFAWVISNLFISNPSAVLSVFIQIPLAVWIGYHVYKRQGGMLIPSLVALAVMYVSAIVASRVPALQIDLIRYFGGEENIVAFGLDGVAMSFFVWIIVLMIYVYIASTLPVWKLLQPRDYINSHQLVVGLLILYLGLLFSNPKVTAPAVNGSPDTSWFPLLFITIACGAISGFHGLVSSGTTSKQLNKETDARFVGYLGAIGEGLLALIVIVAVATFFASPQAFSEVYSSFGAANQGGLGNFVQAAGQLATGLLIPQDMAATIVAVIIVSFAATTLDTSVRLMRYIIAELGQEYKVPALSKTHVATSIAVVSSAALVLLPEGPNGFGSGGYLLWPLFGTSNQLLAGITLLLITIWLKRQGRNYLPTLIPMVFVLFMTLYAMLQQVLFQWSPFGGTGTNILLFTLGSIILVFAFWIVIVAISEIMKSKPRDDSRKSA

SEQ ID NO: 36432 - DNA, 1545 bp, Pasteurella multocida subsp. multocida str. Pm70
  CDS (1)..(1545): transl_table=11
atgttatggttcttcttttgcgttgcaatattagttttgggctattttgtatacggcaaatttattgaaaagatctttgtgatcaacccaaaaaaagcaacacccgcttatacaatgaacgatggtgttgactacatgccaatgtcaactaaaaagatttggttgattcaattattaaacattgcaggaacaggaccaatctttggaccaattctcggtgctttatatggaccagtcgcaatgttatggattgtgatcggttgtatttttgccggtgcagtgcatgattacttctgtggtatgttaagtgtgcgtaatgggggcgcgtcaatgccaacattagcaggtcgttatttaggcgcaccagtgaaagcctttattaatatgcttgcggtagtgttattacttctcgttggtgtggttttcgttgctagcccagcaaaattattaagtactattaccatggataatttgggtgtcgtagagagcgcaggggcggctgcaaccgtatttggttatgatgctgctaccgtcttagtgatttggacaaccattatttttgtttactacatcatcgcaactttattaccgattgataaaattatcggtcgtatctatccgctattcggtgctttattactgttcatgacattcggtatgatgtttggcttagtcagcagtcatttaaatagtaatgagccaatcgagtttttccgtacagtcggtggattagaagtgggtaaattctttgagaatttacaaccaaaaggtgatttaccaatttggccattattattcttaactatctcttgtggtgcattatctggtttccatgcgacgcaatcgccattaatggcacgttgtgcacaaaatgaaaaagaaggtcgtttcattttctatggtgcgatgattgctgaaggggtgattgctttagtttggtgtgcagtaggattaagtttctatcaagacccaacagaattacaagctgcgattgcagccggttcaccgtcaaaagttgtatatgattcttcaatctacttcctcggtgctgtgggtggtgtatttgcaattcttggtgtggtggtattaccaattacctctggcgataccgcattccgtgcagcacgtttaatcattgctgagttctttaaatttgagcaaaaaacattggtgaaacgtttagtgattgctgttccattgtttgtgttagggttcattgtatcgaaaattgacttcagcgtattgtggcgttatttcagctgggcaaaccaaacgacagcaatggtgatgttatggactgccgcagcgtatttattccgttacggtaaattccactgggtttgtacgcttccagcaatgttcatcagtaccgtttgtttcacttacttagcgtataacaagatcggtttcaatttagactatcaactttctgtttatattggtattggtttaaccgtgttctgtactgtcttgttctttacgttattaaaaccaattgctaaaggtgatcctgatgccttggttgacgatttagtcaaacaataa

SEQ ID NO: 36433 - protein, 514 aa, Pasteurella multocida subsp. multocida str. Pm70
MLWFFFCVAILVLGYFVYGKFIEKIFVINPKKATPAYTMNDGVDYMPMSTKKIWLIQLLNIAGTGPIFGPILGALYGPVAMLWIVIGCIFAGAVHDYFCGMLSVRNGGASMPTLAGRYLGAPVKAFINMLAVVLLLLVGVVFVASPAKLLSTITMDNLGVVESAGAAATVFGYDAATVLVIWTTIIFVYYIIATLLPIDKIIGRIYPLFGALLLFMTFGMMFGLVSSHLNSNEPIEFFRTVGGLEVGKFFENLQPKGDLPIWPLLFLTISCGALSGFHATQSPLMARCAQNEKEGRFIFYGAMIAEGVIALVWCAVGLSFYQDPTELQAAIAAGSPSKVVYDSSIYFLGAVGGVFAILGVVVLPITSGDTAFRAARLIIAEFFKFEQKTLVKRLVIAVPLFVLGFIVSKIDFSVLWRYFSWANQTTAMVMLWTAAAYLFRYGKFHWVCTLPAMFISTVCFTYLAYNKIGFNLDYQLSVYIGIGLTVFCTVLFFTLLKPIAKGDPDALVDDLVKQ

SEQ ID NO: 36434 - DNA, 2067 bp, Pseudomonas aeruginosa PAO1
  CDS (1)..(2067): transl_table=11
atgaacaataacaatagcctgctacgtcacctcgcctggctggtggtggcgatcgtgggcgccgcggccctgggcgtcgtcgccctgcgtcgtggcgaagcgatcaacgccttgtggatcgtggtggcggcggtggccatctacctggtcgcctaccgttactacagcctgttcatcgccagcaaggtgatgcaactggaccccaaccgcgccactcccgcggtactcaacaacgatggcctggactacgtcccgaccaacaagcacatcctcttcggccaccacttcgccgccatcgccggcgccggtccgctggtcggtccggtccttgccgcgcagatgggctacctgcccggcaccctctggctgatcgccggcgtagtcctcgccggcgcggtgcaggacttcatggtcctgttcatctccagccgtcgcaacggccgctcgctgggcgagctggtgcgcgaggaaatgggccaggtggccgggaccatcgcgctgttcggcgccttcctgatcatgatcatcatcctcgcggtgctcgcgctgatcgtggtgaaggctctggccgacagcccctggggcatgttcaccgtcctcgcgaccattcccatcgcgctgttcatgggcgtctacatgcgcttcatccgccccggccggatcggcgagatctcgatcatcggggtgttcctcctgctcggttcgatctggctcggcgggcaggtcgcggccagtccggaatgggcgccgcatttcaccttcagtggaatccagatcacctggatgctgatcggctacggcgccgtcgcctcggtactgccggtgtggctgctgctggcgccgcgcgactacctgtcgaccttcctcaagatcggcaccatcatcggcctggcgatcggcatcctgatcgtcatgccggaactgaagatgccggccctgacccagttcaccgacggcaccggcccggtctggaaaggcagcctgttcccgttcctgttcatcaccatcgcctgcggcgcggtgtccggcttccacgcgctgatctcctcggggaccacgccgaagctgctcaaccgcgagcccgacgcccgctacatcggctacggcggcatgctgatggagtccttcgtggcgatcatggcgatggtcgccgcctcggtgatcgagccgggcatctacttcgccatgaacagcccgccggcggtggtcggcgccgacgtcaacgcggtggccgcgaccgtcagcagctggggcttcgccatcacgccggagcaactcacccagaccgcccaggacatcggcgagaccaccatcctggcccgtgccggcggcgcgccgaccctggcggtggggatcgcgcacatcctccaccaggtgctgccgggcgagaacaccatggccttctggtaccacttcgcgatcctcttcgaggccttgttcatcctcaccgcggtggacgccggcacccgtgccgggcgcttcatgctgcaggacctgctgggcaacttcgtgccggcgctgaagaagaccgagtcgtggaccgccaacatcatcggcaccggcggctgcgtggcgctgtggggctggctgctgtaccagggcgtggtcgacccgctgggcgggatcaataccctgtggccgctgttcggcatttccaaccagatgctcgccggcatcgcgctgatgctcgccaccgtggtcctgatcaagatgaagcgccagcagtatgtctgggtcaccatcctgccggcggcctggttgctgatctgcaccaccaccgcgggcctgatcaagatcttcgacagcaacccggcggtcggcttcgtcgctcttggcgagaagtacgccaccgcgctggatgccggccaggtgctggcgccggccaaggatatcggccagatgcagcacgtggtgctgaacgcctacatcaacgccggtctgaccgtgctgttcctgctggtggtgttcagcgtactgttctacgccatcaaggtcggcatcgcggcctggggcaagagcgagcggaccgacaaggaaaccccgttcgagcccatccccgacgcctga

SEQ ID NO: 36435 - protein, 688 aa, Pseudomonas aeruginosa PAO1
MNNNNSLLRHLAWLVVAIVGAAALGVVALRRGEAINALWIVVAAVAIYLVAYRYYSLFIASKVMQLDPNRATPAVLNNDGLDYVPTNKHILFGHHFAAIAGAGPLVGPVLAAQMGYLPGTLWLIAGVVLAGAVQDFMVLFISSRRNGRSLGELVREEMGQVAGTIALFGAFLIMIIILAVLALIVVKALADSPWGMFTVLATIPIALFMGVYMRFIRPGRIGEISIIGVFLLLGSIWLGGQVAASPEWAPHFTFSGIQITWMLIGYGAVASVLPVWLLLAPRDYLSTFLKIGTIIGLAIGILIVMPELKMPALTQFTDGTGPVWKGSLFPFLFITIACGAVSGFHALISSGTTPKLLNREPDARYIGYGGMLMESFVAIMAMVAASVIEPGIYFAMNSPPAVVGADVNAVAATVSSWGFAITPEQLTQTAQDIGETTILARAGGAPTLAVGIAHILHQVLPGENTMAFWYHFAILFEALFILTAVDAGTRAGRFMLQDLLGNFVPALKKTESWTANIIGTGGCVALWGWLLYQGVVDPLGGINTLWPLFGISNQMLAGIALMLATVVLIKMKRQQYVWVTILPAAWLLICTTTAGLIKIFDSNPAVGFVALGEKYATALDAGQVLAPAKDIGQMQHVVLNAYINAGLTVLFLLVVFSVLFYAIKVGIAAWGKSERTDKETPFEPIPDA

SEQ ID NO: 36436 - DNA, 2355 bp, Lactococcus lactis subsp. lactis Il1403
  CDS (1)..(2355): transl_table=11
atgaaagatattggaaactcttcaaactttaccgaagaagaagagctatttttgttgcgaaataaacaaggaaaaattgtcggaattaaagatttaaagcaggcaaattttcaagaaacaatgaaagactggaaaaaacatttaccaaaacctagtcttctatcaattatcatttgggtggcggtcgctttactaggtggtcttgcttggtcgttgattgctctggctcaaggagagacgattaatgcgatttggtttgttattgcagcagtttgttcttatttgattggctatcgtttttatgctttatatattcaacgtaagattatgcgtccaaatgatttacgggcaactccttcggaaagccataatgacggaaaagaattcgacccaaccaatcgagttgttttattcggtcaccattttgcttcaattgctggagctgggcctttggttggaccagttttagcggcacaaatgggttacttaccagggacaatttggattattttcggagttatttttgccggaggggtacaagatatgcttgttctctggtattctcatcgtcgtcgagcaaaatctattggggcaatggctcatgatgaagttggcagatttgctggtggcttgacttcatttattgtatttatcatgacaatgattgttcttgctgttttagctttgatttgtgtgacggcgatggcaaattctgcttgggcagtcttttcgattgggatgaccatcccaattgccttgttaatgggaatttatttgaaatatattcgcccagggcatgtgaatgaaatttcagcgattggttttattctccttttagttgctatttttggtggccgttgggtttcggaatcttcatttgcgcatattttcatgctttcgccaactgctttagtttggtgggtcatgggctatacttttattgcagccattatccccgcttggattttacttacgcctcgtgattacttatccatgtttatgaaaataggtacaattgctgttttagcaatagctgtagttggtgtgcgtccagatgttacgattccagctctgactaattttgcacataatacagatggtcctgcttttgctggttccctctttcccttcttatttgttacgattgcctgtggagccttgtctggtttccatgtaatgatgtcttctggaacaacgcctcatttgattgctaaagagtcacaaacgcgaatgattggttatggtgggatgctctttgaatcatttgttgctattatggctttagtcgctgcgatttctcttaatcctggaatttattattctatgaatacccctcaagctagtattcaaaaactcgcagcttcaagttatcaagcagataaaagtgccgaatataatgctgccaaagcaattccaaatgtagccatgatgcctgatggttcaaaactcagtattgactgggaaggaacgactggtgaaaaagcacttgagcaagtggcaaaagatgtaggtgaacaatcaatcgtttcacggactggtggtgcaccaactttagccgtttcaatgtcaaatattctacataaggttccacttattggtgggacaaatatgatgggattctggtatcattttgcgattatgtttgaggtgctctttatcctgtcagctgtttcagcggcaacaaaatcgactcgttatttacttaatgatgccctgcgtggcttcaaaaaattaggtcgcttaggtgatgatgattggttacctagtaaaattataacgacagcagtgattgttggagtttggggtgctttgcttttgatgggcgtttctgatccgaatggtggaataaaaatcatgtatccgctctttgggatttctaatcaattaattgcggcggtagctctggctattgtttgtgtcatggttatccgtaaaggttatcttaaatgggtttggattccagcacttcctttagtttgggatgtttgtgtaacttttgcggccagttggcaaaaaatcttttcaaatgatgtcaatattggttactttgcttcttattcagcagcaaaagcccaagtggcttctggtaaattatctggtctagcattaacgaatgcgcaagcaaccatgcgtaatacaatgattcaaggaagtctgtcagtcattttcttactttgtgtggctatattattagtcatctgtgcctttaaagttgctaaaattttaagaacaaatgaagttggtgataaatttagctcagaagaagtttttgaagaatcaaatctttttgaaacttcaagtttctggcctagtaagcttgaacataaggttttaaaaagtaaagttaatgaataa

SEQ ID NO: 36437 - protein, 784 aa, Lactococcus lactis subsp. lactis Il1403
MKDIGNSSNFTEEEELFLLRNKQGKIVGIKDLKQANFQETMKDWKKHLPKPSLLSIIIWVAVALLGGLAWSLIALAQGETINAIWFVIAAVCSYLIGYRFYALYIQRKIMRPNDLRATPSESHNDGKEFDPTNRVVLFGHHFASIAGAGPLVGPVLAAQMGYLPGTIWIIFGVIFAGGVQDMLVLWYSHRRRAKSIGAMAHDEVGRFAGGLTSFIVFIMTMIVLAVLALICVTAMANSAWAVFSIGMTIPIALLMGIYLKYIRPGHVNEISAIGFILLLVAIFGGRWVSESSFAHIFMLSPTALVWWVMGYTFIAAIIPAWILLTPRDYLSMFMKIGTIAVLAIAVVGVRPDVTIPALTNFAHNTDGPAFAGSLFPFLFVTIACGALSGFHVMMSSGTTPHLIAKESQTRMIGYGGMLFESFVAIMALVAAISLNPGIYYSMNTPQASIQKLAASSYQADKSAEYNAAKAIPNVAMMPDGSKLSIDWEGTTGEKALEQVAKDVGEQSIVSRTGGAPTLAVSMSNILHKVPLIGGTNMMGFWYHFAIMFEVLFILSAVSAATKSTRYLLNDALRGFKKLGRLGDDDWLPSKIITTAVIVGVWGALLLMGVSDPNGGIKIMYPLFGISNQLIAAVALAIVCVMVIRKGYLKWVWIPALPLVWDVCVTFAASWQKIFSNDVNIGYFASYSAAKAQVASGKLSGLALTNAQATMRNTMIQGSLSVIFLLCVAILLVICAFKVAKILRTNEVGDKFSSEEVFEESNLFETSSFWPSKLEHKVLKSKVNE

SEQ ID NO: 36438 - DNA, 2082 bp, Neisseria meningitidis MC58
  CDS (1)..(2082): transl_table=11
atgaaatcactcaaaaccttcctcatttggggcatagtggtactggtcggcttagcatcctttaccactctggccctcagccgaggcgaacaggtcagcgcggtatggatggtcaccgccgccatatccgtttactgcatcgcctaccgtttttacagcctctacatcgccaaccgcgtaatgcggctcgatcctgaccgcctgactccggcagaacgccacaacgacggcttggactacgttccgacgcacaaaggcgtattgttcggacaccactttgccgcaattgccggcgcgggccctttggttggtccggttttggcggcgcaaatgggttatctgcccggtactttgtggattatcttcggcgtggtatttgccggcgcggtacaggatatgatggtcttgttcgtctctatgcgccgcgacggtaagtctttgggcgatattgtgaaacaggaactcggcactgtccccggcgtgattgcctccatcggtattttgatgattatggtcatcattatggcggtgttggcgttgattgtcgtaaaagcattggttcacagcccttggggtacgttcaccattgcagcaactatgccgattgcgctgtttatgggtatttacacgcgttatatccgtccgggcaaaatcggcgagatttccatcgtcggctttattttgctgatgctggcggtaatttacggcgaagatgtggctaaaagttccatcgggcattggttcgaccttgacggcatccagctcacttgggcgattatgatttacggctttgtcgcctccgtattgcccgtatggttgctgctcactccgcgcgactatctctccaccttcctgaaaatcggtacgattgcggccttggctttgggtatcgtcatcgtcaatcccgctttgcaaatgcctgccgtaacccactttatcgacggttcgggtccggtattctcaggcgcattgttcccattcttgttcattaccatcgcctgcggtgcggtttcgggcttccacgcgctgatttcttccggcactacgccgaaaatgctggaaaacgaaacccacgtccgcatgatcggttacggcggtatgttgatggaaagtttcgtagccattatggcacttgccgctgccgcatcgcttgatcccggcgtgtacttcgccatgaacagcccagccgccctgatcggtacggatgccaataccgccgccgaagtgattaccaccaagctgcaattccctgtcgatgccgcaaccctgttgcacactgctaaagaagtcggcgaaaacaccatcctttcccgtgccggcggtgcgcccaccctcgcagtcggtatggcgcacattatgagccgcctgattccgggcgaggcgatgatggcgttctggtatcacttcgccctgttgtttgaagccttgttcatcctgaccgccgtcgatgccggtacgcgcgtcgcacgttttatgattcaagacttgggcagcatcttctacaaacctttcggcaacaccgactccatccccgccaacctgattgcgaccttcttcgccgtggcattgtggggctacttcctctacacgggcgtgaccgacccgttgggcggcatcaactcgctctggcctttgttcggcatcgccaaccaaatgctggcaggcgtagccttgattatgtgcgccgtggtgctgattaagatgaaacgcgaccgttatgtctgggtggtactcgttcccgccgtcggcgtactgttcgtaacctgctacgccggcctgcaaaaactgttccacagcgacccgcgcatcagcttccttgcccacgccggcaaatacagcgacgcattggctaaaaacgaaatccttgcgcctgccaaagacatcggcgaaatggcgcaaatcatcttcaacgacaagattaatgccggtctgaccatcctcttcttgtcggttgtcgtgattgtcgccgcgtacggtttgcgtaccgccctcaaagcacgcaaagtcggctggccgaccgccaaagaaatcccggcggtgtaccgcgacggcaaacagccggaggcacaaagtgaagcataa

SEQ ID NO: 36439 - protein, 693 aa, Neisseria meningitidis MC58
MKSLKTFLIWGIVVLVGLASFTTLALSRGEQVSAVWMVTAAISVYCIAYRFYSLYIANRVMRLDPDRLTPAERHNDGLDYVPTHKGVLFGHHFAAIAGAGPLVGPVLAAQMGYLPGTLWIIFGVVFAGAVQDMMVLFVSMRRDGKSLGDIVKQELGTVPGVIASIGILMIMVIIMAVLALIVVKALVHSPWGTFTIAATMPIALFMGIYTRYIRPGKIGEISIVGFILLMLAVIYGEDVAKSSIGHWFDLDGIQLTWAIMIYGFVASVLPVWLLLTPRDYLSTFLKIGTIAALALGIVIVNPALQMPAVTHFIDGSGPVFSGALFPFLFITIACGAVSGFHALISSGTTPKMLENETHVRMIGYGGMLMESFVAIMALAAAASLDPGVYFAMNSPAALIGTDANTAAEVITTKLQFPVDAATLLHTAKEVGENTILSRAGGAPTLAVGMAHIMSRLIPGEAMMAFWYHFALLFEALFILTAVDAGTRVARFMIQDLGSIFYKPFGNTDSIPANLIATFFAVALWGYFLYTGVTDPLGGINSLWPLFGIANQMLAGVALIMCAVVLIKMKRDRYVWVVLVPAVGVLFVTCYAGLQKLFHSDPRISFLAHAGKYSDALAKNEILAPAKDIGEMAQIIFNDKINAGLTILFLSVVVIVAAYGLRTALKARKVGWPTAKEIPAVYRDGKQPEAQSEA

SEQ ID NO: 36440 - DNA, 2112 bp, Campylobacter jejuni subsp. jejuni NCTC 11168
  CDS (1)..(2112): transl_table=11
atgactcagttaagtactaaaattttatggttgtttgttgcagctttaggcgctatttgttttggttatttagctttacaaaatggcgaaagtgtatcagcgatttatttggtggttgctgctgtatgtatttatatgataggatatagattttatgggagttttgtagcttataaggttttagaacttgataaaaatcgtgcaacaccagcacttgtagaaaatgatgggcgtgattttgtgcctacaaataaagctgtattatttggacatcattttgctgctattgcaggagcaggtccattagtaggacctatcttggccgctcaaatgggatatttgccttctatgctttggattttagtaggaggagttttagcgggtgctgtgcatgattttgttgttctttttatatctactcgtagaaaaggtagaagtcttggcgagatgattaaggatgagatgggtaaatttacaggtggagttgctatggtggcgatttttggcattatgcttattattattgccattttagctatggtggttgtaaaagctttagcagaatctccatggggtttatttactatcgcaatgacgattcctatagcaatatttatgggaatttatatgcgttttatccgtccaggtagagtaggggaggcttctataataggttttgtgcttttaattttggctattcattatggtagcgttatagctgctgatccttattgggctaaaatatttactttagaagctccaactttggcaattgttatgatggcttatggttttattgcttctgttttacctgtgtggtttttacttgctccaagagattatctttcaacttttttgaaaatcggtgttattgtggtaatggctgtagctattgttttggttgctcctgatttacaaatgccaaaagcaaatactcagtattttgatggaacaggtccagtatttgcaggtggagtgtttccatttttatttattaccattgcttgtggtgcgatcagtggttttcatgctttgatttctagtggaactactcctaaaatgcttgaaaacgaaactcatactttggctgttggatatggctctatgcttgctgagagtgctgtggcgattatggctttaatttgtgcttgtattttacatccaggtctttattttgctataaattcaagctctgctttgataggaacagatgttgtaaatgtagcacaaactatttcaagttggggatttagtattactcctgaagaaattactactttaaccacaaatataggagagtatactatactttcaagaacagggggagccccgacttttgctataggtgtagctttgatcttgcatgaactttttggcggcgtggatttgatggctttttggtatcattttgctatattgtttgaagctttatttattttaacagcggtggatgctgggacaagggcttgtcgttttatggtgcaagatatattgggtaatgtttataaacctttaggagatattcataattatccagctggacttttggctacggctttaagtgttgcaggttggggatattttctttatcaaggcgccattgatcctaagggaggaatttatacactttggcctctttttggcgtgagcaatcaaatgcttgcgggtatggctttgcttcttgctacaactatacttgtaaaaatgggcaaggcaagatatacttgggttactttagtacctgcggtatttgtcttagtggcaactctgtatggaggaattcaaaaaattatgccttatgaagaaggcaataaaatagcaaatgcggtaagtcatgtagccgccgttagcatacaaagtcaaaaaattaaagatttagaatttaaattaaataatactaaagatgaaaaagaaatttctacaattagaaaagaaatttcaatagccactcaaaataaagttggaaatttacttaatgcaattctttgtgtgttctttatgatagctaccttgcttgttataatttcttgtataggaatttgcttaggtaaaattaaaattcctcttaaagaaactaagtatattaagattgatgaatttcaaaaaatttaa

SEQ ID NO: 36441 - protein, 703 aa, Campylobacter jejuni subsp. jejuni NCTC 11168
MTQLSTKILWLFVAALGAICFGYLALQNGESVSAIYLVVAAVCIYMIGYRFYGSFVAYKVLELDKNRATPALVENDGRDFVPTNKAVLFGHHFAAIAGAGPLVGPILAAQMGYLPSMLWILVGGVLAGAVHDFVVLFISTRRKGRSLGEMIKDEMGKFTGGVAMVAIFGIMLIIIAILAMVVVKALAESPWGLFTIAMTIPIAIFMGIYMRFIRPGRVGEASIIGFVLLILAIHYGSVIAADPYWAKIFTLEAPTLAIVMMAYGFIASVLPVWFLLAPRDYLSTFLKIGVIVVMAVAIVLVAPDLQMPKANTQYFDGTGPVFAGGVFPFLFITIACGAISGFHALISSGTTPKMLENETHTLAVGYGSMLAESAVAIMALICACILHPGLYFAINSSSALIGTDVVNVAQTISSWGFSITPEEITTLTTNIGEYTILSRTGGAPTFAIGVALILHELFGGVDLMAFWYHFAILFEALFILTAVDAGTRACRFMVQDILGNVYKPLGDIHNYPAGLLATALSVAGWGYFLYQGAIDPKGGIYTLWPLFGVSNQMLAGMALLLATTILVKMGKARYTWVTLVPAVFVLVATLYGGIQKIMPYEEGNKIANAVSHVAAVSIQSQKIKDLEFKLNNTKDEKEISTIRKEISIATQNKVGNLLNAILCVFFMIATLLVIISCIGICLGKIKIPLKETKYIKIDEFQKI

SEQ ID NO: 36442 - DNA, 2082 bp, Neisseria meningitidis Z2491
  CDS (1)..(2082): transl_table=11
atgaaatcactcaaaaccttcctcatttggggcatagtggtactggtcggcttagcatcctttaccactctggctctcagccgaggcgaacaggtcagcgcggtatggatggttaccgccgccatatccgtttactgcatcgcctaccgtttttacagcctctacatcgccaaccgcgtaatgcggctcgatcctaaccgcctgactccggcagaacgccacaacgacggcttggactacgttccgacgcacaagggcgtattgttcggacaccactttgccgcgattgccggcgcgggccccttggtcggcccggttttggcggcgcaaatgggttacctgcccggtactttgtggattatcttcggcgtggtgtttgccggcgcggtacaggatatgatagtcttgttcgtctctatgcgccgcgacggtaagtctttgggcgatattgtgaaacaggaactcggcactgtccccggcgtgattgcctccatcggtattttgatgattatggtcatcattatggcggtgttggcgttgattgtcgtaaaagcacttgttcacagcccttggggtacgtttaccatcgccgccactatgccgattgccctgtttatgggtatttacacgcgctatatccgtccgggcaaaatcggcgagatttccatcgtcggctttattttgctgatgctggcggtaatttacggcgaagatgtggcgaaaagttccatcggacattggttcgaccttgacggcatccagctcacttgggcgattatgatttacggctttgtcgcctccgtattgcccgtatggttgctgctcactccgcgcgactatctctccaccttcctgaaaatcggtacgattgcggccttggctttgggcatcgtcatcgtcaatcccactttgcaaatgcctgccgtaacccactttatcgacggttcgggtccggtattctcaggcgcattgttcccgttcctcttcatcaccatcgcctgcggtgcggtttcgggcttccacgcgctgatttcctccggcaccacgccgaaaatgctggaaaacgaaacccacgtccgtatgattggttacggtggtatgttgatggaaagtttcgtagccattatggcgcttgccgccgccgcatcgcttgatcccggcgtgtacttcgccatgaacagccctgccgccctgatcggtacggatgccaacaccgccgccgaagtgattaccaccaagctgcaattccctgtcgatgcggcaaccctgttgcataccgctaaggaagtgggcgaaaacaccatcctttcccgtgcaggcggtgcgccaaccctcgcagtcggtatggcgcacattatgagccgcctgattccgggcgaggcgatgatggcgttctggtatcacttcgccctattgtttgaagccttgttcatcctgaccgccgtcgatgccggtacgcgcgtcgcacgttttatgattcaagacttgggcagcatcttctacaaacctttcggcaacaccgactccatccccgccaacctgattgcgaccttcttcgccgtggcattgtggggctactttctctacaccggcgtaaccgacccgctgggcggcatcaactcgctctggcctttgttcggcatcgccaaccaaatgctggcgggcgtggccttgattatgtgtgccgtggtgctgattaagatgaaacgcgaccgttatgtttgggtggtactcgttcccgccgtcggcgtactgttcgtaacctgctacgccggcctgcaaaaactgttccacagcgatccgcgcatcagcttccttgcccacaccggcaaatacagcgacgcattggctaaaaacgaagtccttgcgcctgccaaagacatcggcgaaatggcgcaaatcatcttcaacgacaagattaatgccggtctgaccatcctcttcttgtcggttgtcgtgattgtcgccgcgtacggtttgcgtaccgccctcaaagcacgcaaagtcggctggccgaccgccaaagaaatcccggcggtgtaccgcgacggcaaacagccggaggcacaaagtgaagcataa

SEQ ID NO: 36443 - protein, 693 aa, Neisseria meningitidis Z2491
MKSLKTFLIWGIVVLVGLASFTTLALSRGEQVSAVWMVTAAISVYCIAYRFYSLYIANRVMRLDPNRLTPAERHNDGLDYVPTHKGVLFGHHFAAIAGAGPLVGPVLAAQMGYLPGTLWIIFGVVFAGAVQDMIVLFVSMRRDGKSLGDIVKQELGTVPGVIASIGILMIMVIIMAVLALIVVKALVHSPWGTFTIAATMPIALFMGIYTRYIRPGKIGEISIVGFILLMLAVIYGEDVAKSSIGHWFDLDGIQLTWAIMIYGFVASVLPVWLLLTPRDYLSTFLKIGTIAALALGIVIVNPTLQMPAVTHFIDGSGPVFSGALFPFLFITIACGAVSGFHALISSGTTPKMLENETHVRMIGYGGMLMESFVAIMALAAAASLDPGVYFAMNSPAALIGTDANTAAEVITTKLQFPVDAATLLHTAKEVGENTILSRAGGAPTLAVGMAHIMSRLIPGEAMMAFWYHFALLFEALFILTAVDAGTRVARFMIQDLGSIFYKPFGNTDSIPANLIATFFAVALWGYFLYTGVTDPLGGINSLWPLFGIANQMLAGVALIMCAVVLIKMKRDRYVWVVLVPAVGVLFVTCYAGLQKLFHSDPRISFLAHTGKYSDALAKNEVLAPAKDIGEMAQIIFNDKINAGLTILFLSVVVIVAAYGLRTALKARKVGWPTAKEIPAVYRDGKQPEAQSEA

SEQ ID NO: 36444 - DNA, 2166 bp, Escherichia coli O157:H7
  CDS (1)..(2166): transl_table=11
atgccaggttttactatggatacgaaaaaactattcaagcacataccctgggtgattctcggaatcatcggtgcattctgcctcgcggtagttgcattacgtcggggggagcacgtcagcgccctgtggatcgtggtcgcctctgtgtcggtgtatctggtggcgtatcgctactacagtctgtacatcgcccagaaggtgatgaaactcgaccccacgcgcgcgacgcctgcggttattaacaacgacggtctgaactacgttccgaccaaccgttacgtgttgtttggtcaccacttcgccgctatcgccggtgctggtccgctggtgggaccggttctcgccgcgcagatgggctacctgcctggcacgctgtggctgctggcgggggtagtgctggccggtgcggttcaggactttatggtgctgtttatctcctctcgccgtaacggcgcatctctcggtgagatgatcaaagaagagatggggccagtaccggggactatcgcgctgtttggctgtttcttaatcatgatcatcatcctcgccgtcctggcgctgattgtggttaaagccctggcagaaagtccgtggggtgtcttcaccgtttgctcaaccgtaccaattgcgctgtttatgggtatctacatgcgctttatccgtccggggcgtgtgggtgaagtctctgttattggtatcgtgctgctggttgcctctatctacttcggtggcgtgattgctcacgatccgtactggggtccggcactgacctttaaagacaccaccattaccttcgcgctgattggctatgcgtttgtttccgcgctgctgccggtgtggctgatcctcgcaccacgcgactatctggcaaccttcctgaagatcggcgttatcgtcggcctggcgctgggtatcgtggtgctgaacccggaactgaaaatgcctgcgatgacccagtacattgacggtactggcccgctgtggaaaggcgctctgttcccgttcctgttcatcaccatcgcctgtggtgcggtatctggcttccacgcgctgatctcttccggtacgacgccgaaactgctggctaacgaaaccgacgcgcgtttcatcggctacggcgcaatgctgatggagtccttcgtggcgattatggcgctggttgctgcatccatcatcgaaccgggtctttacttcgcgatgaacaccccgcccgcgggccttggcatcaccatgcctaacctgcatgaaatgggtggcgagaacgcgccgatcatcatggcgcagctgaaagacgttaccgcacacgcggcagcgaccgtcagctcttggggcttcgtgatttcgccagagcagatcctgcaaaccgcgaaagacattggtgagccttctgtcctgaaccgtgcaggtggtgcgccgacgctggcggtaggtatcgctcatgtgttccacaaagtgctgccgatggctgacatgggcttctggtatcacttcggtattctgttcgaagccctgttcatcctgaccgcgctggatgcgggtacccgttctggccgctttatgctgcaagacctgctgggtaacttcatcccgttcctgaaaaaaaccgactctctggttgctggtatcatcggtactgcgggctgtgtgggtctgtggggctacctgctgtatcagggcgtggtcgatccgctgggcggcgttaagagcctgtggccgctgttcggtatctccaaccagatgctggcagccgtagcgctggtactgggcaccgttgtgctgattaagatgaagcgcacccaatacatctgggtaactgttgttccggctgtatggctgcttatctgcaccacctgggcgctgggtctgaaactgttcagcaccaacccgcagatggaaggcttcttctacatggcaagccagtacaaagagaagattgctaacggtactgaccttacggcgcagcagattgccaacatgaaccacatcgttgtgaacaactacaccaacgcaggcctgagtattctgttcctgattgtggtgtacagcatcatcttctacggtttcaaaacctggcttgcggtacgtaacagcgacaaacgtactgacaaagaaacaccgtacgttccaatcccggaaggcggcgtgaagatctcttcgcaccactaa

SEQ ID NO: 36445 - protein, 721 aa, Escherichia coli O157:H7
MPGFTMDTKKLFKHIPWVILGIIGAFCLAVVALRRGEHVSALWIVVASVSVYLVAYRYYSLYIAQKVMKLDPTRATPAVINNDGLNYVPTNRYVLFGHHFAAIAGAGPLVGPVLAAQMGYLPGTLWLLAGVVLAGAVQDFMVLFISSRRNGASLGEMIKEEMGPVPGTIALFGCFLIMIIILAVLALIVVKALAESPWGVFTVCSTVPIALFMGIYMRFIRPGRVGEVSVIGIVLLVASIYFGGVIAHDPYWGPALTFKDTTITFALIGYAFVSALLPVWLILAPRDYLATFLKIGVIVGLALGIVVLNPELKMPAMTQYIDGTGPLWKGALFPFLFITIACGAVSGFHALISSGTTPKLLANETDARFIGYGAMLMESFVAIMALVAASIIEPGLYFAMNTPPAGLGITMPNLHEMGGENAPIIMAQLKDVTAHAAATVSSWGFVISPEQILQTAKDIGEPSVLNRAGGAPTLAVGIAHVFHKVLPMADMGFWYHFGILFEALFILTALDAGTRSGRFMLQDLLGNFIPFLKKTDSLVAGIIGTAGCVGLWGYLLYQGVVDPLGGVKSLWPLFGISNQMLAAVALVLGTVVLIKMKRTQYIWVTVVPAVWLLICTTWALGLKLFSTNPQMEGFFYMASQYKEKIANGTDLTAQQIANMNHIVVNNYTNAGLSILFLIVVYSIIFYGFKTWLAVRNSDKRTDKETPYVPIPEGGVKISSHH

SEQ ID NO: 36446 - DNA, 2277 bp, Mycobacterium tuberculosis CDC1551
  CDS (1)..(2277): transl_table=11
gtggcagcgccgaccccgtcgaatcggatcgaagaacgctccggacacgccagctgcgtccgcgccgatgccgacctgccacccgtggccatcctcggtcgctcccccatcacgcttcggcacaagatcttcttcgtggccgttgccgtgatcggcgctctcgcctggaccgtcgtcgcgttcttccgcaacgagccggtcaacgcggtctggatcgtggtcgcagcgggctgcacctacatcatcgggttccggttttatgcgcggctgatcgaaatgaaagtcgtccgtccccgcgacgatcacgccaccccggccgaaatcctcgacgacggcaccgactacgtgcccaccgaccggcgggtggtattcggacaccacttcgccgccatcgccggtgccgggccgcttgtcggaccagtactggccacccagatgggttacttacccagcagcatctggattgtcgtcggcgcggtgctggccggatgtgtccaggactacctggtgttgtggatctccgtgcggcggcgtggccgctccctgggtcagatggttcgcgacgaactcggcgccaccgccggagtggccgccctcgttggaatcccggtcattatcaccattgtgatcgcggtgctggcgctggtggtcgtgcgggccctggccaagagcccatggggcgtcttctcgatcgccatgaccatccccatcgccatcttcatgggctgctacttgcggttcctacgtcccgggcgggtgtcggaagtttcattgatcgggatcggactgctgctgctcgccgttgtctccggtgattgggttgcccatacctcctggggcgcagcgtggttcagcttgtcaccggtgacactgtgttggcttctcatcagctatggcttcgcagcttcggtgctgccggtgtggctgctgctcgcgccacgcgactacctgtcaacgttcatgaaggtcggcaccatcgcgcttctcgcgatcggtgtttgtgcggctcacccgatcatcgaggccccagcggtgtcgaaattcgccggtagcggcaacggcccggtgttcgccggctcactgtttccattcctgttcatcaccatcgcgtgcggggcgctgtctggattcgacgcgctcatctgctcgggcacgacgccgaagatgctggagaaggaaggccagatgcgcgtgatcggctacggcggcatgatgaccgagtccttcgtcgccgtcatagcactactcaccgcggcgatcctcgaccagcacctatacttcaccctcaacgcgccgtccctgcatacccacgacagcgcagccaccgccgccaagtacgtcaacgggctcggtttgacgggctcaccggtgaccccagaccacatcagccaggccgccgccagcgtcggcgaacagacgatcgtgtcgcgcaccggcggtgcgccgacgctggcgttcggcatggcggagatgctgcatcgagtggtcggcggtgtgggcctcaaggcgttctggtatcacttcgcgatcatgtttgaggctctgttcatcctcaccaccgtcgacgccggcaccagggccgcgcgcttcatgatctccgatgcgctgggcaactttggcggtgtgctgcgcaaactgcagaatccgagctggcgtcccggtgcgtgggcttgcagtttggtggtcgtcgcggcgtggggcagcatcctgctgctcggtgtgaccgatccgctgggcggcatcaacacgctgttcccgctgttcggcattgccaaccagttgcttgccggaattgcgctgaccgtcatcaccgtcgtcgtcatcaagaaggggcgactgaagtgggcttggataccgggtattccactgctgtgggatctggcggtcaccctgaccgcatcgtggcagaagatcttctccgctgatccttctgtcggctactggactcagcatgctcactacgcggcagcccagcacgcaggcgagaccgcgttcggctcggccaccaacgccgatgagatcaacgacgtcgtccggaacacattcgtccagggcaccctgtcgatcgtcttcgtggtggtcgtcgtgctggttgttgtcgccggagtcatagtggcgctgaagacaattcgcggccgcggcataccgttggccgaggacgatccggcgccgtcgacgttgttcgcgcccgctggcctgattcctacagccgcagagcgaaagttgcaacgacgtttgggcgcgccggcctcggcttccgtcgcggcgcccgactag

SEQ ID NO: 36447 - protein, 758 aa, Mycobacterium tuberculosis CDC1551
MAAPTPSNRIEERSGHASCVRADADLPPVAILGRSPITLRHKIFFVAVAVIGALAWTVVAFFRNEPVNAVWIVVAAGCTYIIGFRFYARLIEMKVVRPRDDHATPAEILDDGTDYVPTDRRVVFGHHFAAIAGAGPLVGPVLATQMGYLPSSIWIVVGAVLAGCVQDYLVLWISVRRRGRSLGQMVRDELGATAGVAALVGIPVIITIVIAVLALVVVRALAKSPWGVFSIAMTIPIAIFMGCYLRFLRPGRVSEVSLIGIGLLLLAVVSGDWVAHTSWGAAWFSLSPVTLCWLLISYGFAASVLPVWLLLAPRDYLSTFMKVGTIALLAIGVCAAHPIIEAPAVSKFAGSGNGPVFAGSLFPFLFITIACGALSGFDALICSGTTPKMLEKEGQMRVIGYGGMMTESFVAVIALLTAAILDQHLYFTLNAPSLHTHDSAATAAKYVNGLGLTGSPVTPDHISQAAASVGEQTIVSRTGGAPTLAFGMAEMLHRVVGGVGLKAFWYHFAIMFEALFILTTVDAGTRAARFMISDALGNFGGVLRKLQNPSWRPGAWACSLVVVAAWGSILLLGVTDPLGGINTLFPLFGIANQLLAGIALTVITVVVIKKGRLKWAWIPGIPLLWDLAVTLTASWQKIFSADPSVGYWTQHAHYAAAQHAGETAFGSATNADEINDVVRNTFVQGTLSIVFVVVVVLVVVAGVIVALKTIRGRGIPLAEDDPAPSTLFAPAGLIPTAAERKLQRRLGAPASASVAAPD

SEQ ID NO: 36448 - DNA, 1779 bp, Clostridium acetobutylicum ATCC 824
  CDS (1)..(1779): transl_table=11
atgaattctatagttctcgtaattatagcagctttagtacttattataggttatagggtttatggttattttatagctgctaaggttttagtcttagatgaaacaagaacggttccatctgaaactcataatgatggacgtgattatgtacctacaaataaatgggtacttttaggtcaccattttgcagcaattgcaggtgctggtcctcttataggtcctgtactagcagcacagtttggttatcttcctggaacactttggatactccttggtggtgttcttgcaggcggcgttcacgacatgattcttttattctcctctgtaagacatgacggacaatccatagctgaaatagcaaaggatgttcttggagaaaaaatgggatttataacttctatctcagtaatatttatacttataataactatggctggacttgggctccccattgttaattcacttttcaacagtccttggggaacgtttacagtcggctttacaattcccgttgccttcttagtaggaatatatttaaaattccttcgcccaggtaagattttagaggcaacaataattggaatggcattgatattgctgggagtttatttgggaccatcaattcaacacacatttttagggaatttacttacttttaactcaaagcagctttcacttatattagctttatacggatttttagccgctgtacttcctgtatggcttctccttttaccaagggattatttaagcacatatatgaaactcggagttataggagcccttgttgttggaataatctttgtaagaccaactattcaaatgcctgctgtaacaaaattcgtatcaggaggaggccctattattcctggaaaggtatttcctttcttatttataacaatagcctgtggtgcactttcaggctttcatgctcttataagcacaggtacaactcctaaacttattaaaaatgaaagagacattcttccaataggctacggatcaatggttatagagtctttcatagctcttatggctcttattgctgcaactgttcttccaacttcagactacttcgcaataaattcagcaccagcactatttgcaaagcttcacatgattccaaaggaacttcctatgctttctcatttagttggagaaaaacttgctggaagaactggcggttcagtatctttagccgttggaatgtcctacgtattttataaaattccttatttaaaatcgcttatgtcttattggtatcacttttgcataatgtttgaagccttattcatacttacaaccatagattctggtacaagaataggaagatacctgattcaagatttattaggaaagctgtataaacctttttctaataaaaattcctggtttaatgtaatactattcagtggcattatgtcctttgcatggggttatctactttacacagggaacatatccaccatatggcctctgtttggtactgcaaaccaaatgcttgcaactatagcctttgctgtaggtacctcagtacttttaaaaatgggaaagaaaaagtatattccaataaccataattccaatggcctttgtaggtgtgaacactgttttagctgcaattgaaaacataataacctacattcctcagcataaaattcttttaacagtaatgtcctttatattaataataatgatagtaataatattaactgaaagtataagaatatggcttagagattatagttctagatccaatactaaaaatttaaaggcctaa

SEQ ID NO: 36449 - protein, 592 aa, Clostridium acetobutylicum ATCC 824
MNSIVLVIIAALVLIIGYRVYGYFIAAKVLVLDETRTVPSETHNDGRDYVPTNKWVLLGHHFAAIAGAGPLIGPVLAAQFGYLPGTLWILLGGVLAGGVHDMILLFSSVRHDGQSIAEIAKDVLGEKMGFITSISVIFILIITMAGLGLPIVNSLFNSPWGTFTVGFTIPVAFLVGIYLKFLRPGKILEATIIGMALILLGVYLGPSIQHTFLGNLLTFNSKQLSLILALYGFLAAVLPVWLLLLPRDYLSTYMKLGVIGALVVGIIFVRPTIQMPAVTKFVSGGGPIIPGKVFPFLFITIACGALSGFHALISTGTTPKLIKNERDILPIGYGSMVIESFIALMALIAATVLPTSDYFAINSAPALFAKLHMIPKELPMLSHLVGEKLAGRTGGSVSLAVGMSYVFYKIPYLKSLMSYWYHFCIMFEALFILTTIDSGTRIGRYLIQDLLGKLYKPFSNKNSWFNVILFSGIMSFAWGYLLYTGNISTIWPLFGTANQMLATIAFAVGTSVLLKMGKKKYIPITIIPMAFVGVNTVLAAIENIITYIPQHKILLTVMSFILIIMIVIILTESIRIWLRDYSSRSNTKNLKA

SEQ ID NO: 36450 - DNA, 2067 bp, Yersinia pestis CO92
  CDS (1)..(2067): transl_table=11
atgaataacatcaggaccgttgtcatatggctgacagtggcgctaatcggtgcatttgcctttgccatgttggcccttagccggggtgaacatgtcaatgccatctggttagtgattgcatccgtggcttgttacagcatcgcttatcgcttctacagtcggtttattgccaagaatgtctttgaactggatgaccgtcgtctgacgccagcagaacgacgcaatgacggtctggattatgttcctaccaacaaatgggtgttgtttggtcaccactttgctgccatcgcgggtgctgggccactggtcgggccaatcctggccgcacagatgggttttctgccggggactatctggatcctggtcggtgtaatgatggccggtgccgtacaggacttcttaatcctgtttatctccactcgccgcgatggccgctcactgggtgaaatggcaaagcaagagttgggggcatttgctggtgtgataactatgctgggtgcattgggcgtaatgattatcattttgtccgcactcgcactggtggtggtaaaagcattagctgatagcccgtggggcctgtttaccattgccgcaacgatccccattgccctctttatgggcgtttatatgcggtttatccgccctggtaaaattgctgaagtgtcattgatcggtttcgtactgatgatgtctgcaatcatttacggtgggaacatcgcggtacacccttactgggggcctttctttacgttacatggcaccacgctaacctggatattggttatctatggtttcatcgcctctgtactgccagtgtggttgctgctagcaccacgagattacttatcaaccttcctgaaaattggggtcatcattggtttagcggttggtattgtattcgccatgccagaaatgaagatgcccgcggtctcacgctttattgatggcagcggcccggtcttctccggcagcctgttcccgttcctgtttattactatcgcttgtggtgctatctctggcttccatgctctggtatccagtggcaccacaccgaaactgattgaacgcgaaagccatacccgctttatcggctacggcgcaatgttgatggagtcattcgttgccatcatggcgctaatctgtgcctcggttatcgaccctggtgtttatttcgccatgaactcacccgcggctctgattggtaccaccgtagaaagtgcctcgctggccattagtagctgggggtttgtcgttacgccagaaacactggcgatggtcgccaaagatgttggtgaaaactcgattctgtcacgggctggtggtgcaccgaccttcgctgtgggcatggcgcatatcatcagtgaaatattcaatagccgtaatatgatggctttctggtatcactttgccatcttgtttgaagccatgtttattctgactgcggtcgatgctggtacccgtgcctgccgctttatggttcaggatctggttggggtggtcgtacctcgtctggccaataaccgttcatggtttggtaacctttccggaacgacagtcgcggtagccggttggggattcttcgtttaccaaggtgttatcgacccactggggggaataaacaccttgtggccgctgttcggtattggtaaccaaatgctggcatcaatggcactgattctaggtaccgtcgtactgtttaaaatgaagaaacaacgctacgcctgggttaccatcttgccaacaatttggttatttatcacctcaatgaccgcaggttggcagaagatattccatgaaaaaccaagtattggcttccttgctcaagcaaaaaaattctctaacggcattgaacaaggggtgttaatcacacccgcgaagagctttaaagacatggaaactatcgtgtttagcaaccagatcaacgccgcgctatgtgcattctttatgctggtggcggtgacgatgctagtttctgccttctttgtgattcgtcgcgcactgaaatccagcaaaccaacaacccatgaaactgaaattgtataccgtgaggaggtcgcccgtggttaa

SEQ ID NO: 36451 - protein, 688 aa, Yersinia pestis CO92
MNNIRTVVIWLTVALIGAFAFAMLALSRGEHVNAIWLVIASVACYSIAYRFYSRFIAKNVFELDDRRLTPAERRNDGLDYVPTNKWVLFGHHFAAIAGAGPLVGPILAAQMGFLPGTIWILVGVMMAGAVQDFLILFISTRRDGRSLGEMAKQELGAFAGVITMLGALGVMIIILSALALVVVKALADSPWGLFTIAATIPIALFMGVYMRFIRPGKIAEVSLIGFVLMMSAIIYGGNIAVHPYWGPFFTLHGTTLTWILVIYGFIASVLPVWLLLAPRDYLSTFLKIGVIIGLAVGIVFAMPEMKMPAVSRFIDGSGPVFSGSLFPFLFITIACGAISGFHALVSSGTTPKLIERESHTRFIGYGAMLMESFVAIMALICASVIDPGVYFAMNSPAALIGTTVESASLAISSWGFVVTPETLAMVAKDVGENSILSRAGGAPTFAVGMAHIISEIFNSRNMMAFWYHFAILFEAMFILTAVDAGTRACRFMVQDLVGVVVPRLANNRSWFGNLSGTTVAVAGWGFFVYQGVIDPLGGINTLWPLFGIGNQMLASMALILGTVVLFKMKKQRYAWVTILPTIWLFITSMTAGWQKIFHEKPSIGFLAQAKKFSNGIEQGVLITPAKSFKDMETIVFSNQINAALCAFFMLVAVTMLVSAFFVIRRALKSSKPTTHETEIVYREEVARG

SEQ ID NO: 36452 - DNA, 2151 bp, Salmonella typhimurium LT2
  CDS (1)..(2151): transl_table=11
atggatacgaaaaagatattcaagcacataccctgggtgattctcggaatcatcggtgctttctgcctctcggtcgttgccctacgtcggggtgaacacgtgagcgccctgtggatcgtggtcgcttccgtttccgtctatctggtggcttaccgctactacagcctgtacatcgcccagaaggtcatgaaactcgacccgacgcgcgcgacgccggcggttatcaataacgacggcctgaactacgtgccgactaaccgctacgtgctgtttggtcaccacttcgccgccatcgctggcgcaggtccgctggtcgggccggtattggccgcgcagatgggctatctgccggggacactgtggttactggcgggcgtggtgctcgcgggcgcagtgcaggactttatggtgctgttcatctcttcccgccgtaacggcgcctctcttggcgagatgatcaaagaagagatgggtaccgttccaggcaccatcgcgctgttcggctgcttcttaatcatgatcatcatcctcgcggtgctggcattaatcgtggttaaagcgctggccgaaagcccgtggggcgtcttcaccgtctgctccacggtgccgattgcgctgtttatgggcatctacatgcgcttcctgcgtccgggacgcgtaggcgaagtctccgttattggtatcgtgctgctggtggcgtctatttacttcggcggcgtgattgcccacgacccttactggggcccggcgctgacctttaaagacaccaccattaccttcgcgctgatcggctacgcctttgtttccgcgctgctgccggtatggctgatccttgccccgcgcgactatctcgctaccttcctgaaaatcggcgtgatcgtcggtctggcgctggggattgtgatcctcaacccggaactaaaaatgccggcattgacgcagtatgtcgacggtaccggcccgctgtggaaaggcgctctgttcccgttcctgttcatcaccatcgcctgtggcgccgtctctggcttccacgcgctcatctcctccggcaccacgccgaaactgctggcctgtgagaccgatgcgcgttttatcggctacggcgcgatgctgatggagtcctttgttgcggtgatggcgctggtggcggcctcgatcattgaaccgggtctctacttcgcgatgaacaccccgccggcaggtctgggcattaccatgccaaacctgcacgagatgggcggcgagaacgcgccgctgattatggcgcagttgaaagacgttaccgcacatgcagcggcgaccgtcagctcctggggctttgtgatttccccggaacaaatcctgcaaactgcgaaagatatcggtgaaccgtcagtattgaaccgcgcaggcggcgcgccaacgctggcagtaggtatcgcgcatgtgttccacaaagtcctgccgatggcggatatgggcttctggtatcacttcggtattctgttcgaagcgctgtttatcctgaccgcgctggatgcgggtacccgttccggccgctttatgttgcaggatttgctgggtaacttcgtcccgttcctgaaaaaaaccgattctctggtcgcgggtatcatcggtaccgcaggctgcgtcggtttgtggggctatctgctgtatcagggcgtggtcgacccgctgggcggcgtgaagagcctgtggccgttgttcggtatctctaaccagatgctggccgccgtggcgctggtgttgagcaccgtggtactgatcaaaatgcagcgcaccaaatacatctgggtgacggtaattccggcggtatggctgctgatctgcaccacctgggcgctgggcctgaaactgttcagcgccaacccacagatggaaggtttcttctacatggcaaacctgtataaagagaagattgccaacggcgccaacctgaccgagcagcagattgccaacatgaaccatatcgtggtgaacaactacactaacgctggtttgagtattctgttcctggtggtggtgtacagtattatcttctacggtttcaccacctggatgaaggtacgcaacagcgataaacgtaccgacaaagaaaccccgtatgtgcctgtgccggaaggcggcgtgaagatctcttcacaccactaa

SEQ ID NO: 36453 - protein, 716 aa, Salmonella typhimurium LT2
MDTKKIFKHIPWVILGIIGAFCLSVVALRRGEHVSALWIVVASVSVYLVAYRYYSLYIAQKVMKLDPTRATPAVINNDGLNYVPTNRYVLFGHHFAAIAGAGPLVGPVLAAQMGYLPGTLWLLAGVVLAGAVQDFMVLFISSRRNGASLGEMIKEEMGTVPGTIALFGCFLIMIIILAVLALIVVKALAESPWGVFTVCSTVPIALFMGIYMRFLRPGRVGEVSVIGIVLLVASIYFGGVIAHDPYWGPALTFKDTTITFALIGYAFVSALLPVWLILAPRDYLATFLKIGVIVGLALGIVILNPELKMPALTQYVDGTGPLWKGALFPFLFITIACGAVSGFHALISSGTTPKLLACETDARFIGYGAMLMESFVAVMALVAASIIEPGLYFAMNTPPAGLGITMPNLHEMGGENAPLIMAQLKDVTAHAAATVSSWGFVISPEQILQTAKDIGEPSVLNRAGGAPTLAVGIAHVFHKVLPMADMGFWYHFGILFEALFILTALDAGTRSGRFMLQDLLGNFVPFLKKTDSLVAGIIGTAGCVGLWGYLLYQGVVDPLGGVKSLWPLFGISNQMLAAVALVLSTVVLIKMQRTKYIWVTVIPAVWLLICTTWALGLKLFSANPQMEGFFYMANLYKEKIANGANLTEQQIANMNHIVVNNYTNAGLSILFLVVVYSIIFYGFTTWMKVRNSDKRTDKETPYVPVPEGGVKISSHH

SEQ ID NO: 36454 - DNA, 2061 bp, Ralstonia solanacearum GMI1000
  CDS (1)..(2061): transl_table=11
atgagctttgtcaggcaacacctgatctggctggttgtcgccattcttggcgcgtttgccttttccaccgtcgcgcttgcgcgcggggaggcggtcagcgcgctgtgggtggtggtggccgccgtatgcatctacctgatcgcataccgttactacagccgctacatcgccgacaaggtgctcggcctggacggcacccgcaagacgccggcctggcgtcacaacgacgggctcgattacgttcccaccaacaagtacgtgctgttcggccaccacttcgcggccatcgccggcgccggcccgctggtcggccccgtgctcgccgcgcagatgggctacctgcctggcatgctgtggatcctggccggcgtcgtgttcgccggcgcggtgcaggacttcatcgtgctgttcatctccagccgccgcgacggccgctcgctgggcgacctggtgaaatcggaaatgggcacggtgcccggcctgatcgcgctgttcggggcgttcctcatcatgatcatcatcctcgccgtgctggcgctgatcgtggtgaaggcgctggccggttcgccgtggggcaccttcacggtggcggcgacgatcccggtcgccatcttcatgggcctgtatgtgcgcttcatccgcccgggccgggtcggcgaggtgtccatcatcggcttcgtgctgctgatgctcgccatcatcggcgggcaggccgtgcacgagagcgccacgctggcgccgctgttcacatacgacggcaaggcgctgacctggatgctgatcggctacggcttcgtcgcctcggtgctgccggtgtggctgctgctggcgccgcgtgactatctgtcgaccttcctgaagatcggcaccatcatggcgctggcgatcggcatcctgatcgtcgcgccgcagatgcagatgccgtcgctgacgcagttcgcggcgggcaacggtccggtgtggtcgggcaacctgttcccgttcctgttcatcaccatcgcgtgcggcgcggtgtcgggcttccactcgctgatctcgtcgggcaccacgcccaagatgctggagaacgaactccaagcgcgcttcatcggctacggcgcgatgctgatggaatcgttcgtcgccatcatggcgctggtggccgcctcggtcatcaacccgggcgtgtactttgcgatgaacgcgccggccgcgctggtgggcaccaccgccgacgcggtggcgcagacgctgtcgacatggggcttcgtcgtcacgccggacgtgctgctgcagaccgccaaggacgtcggcgagaacaccattctggcccgtgcgggcggcgcgccgacgttggcggtcggcatggcgcacatcctgcaccaggtggtgggcggccaggccatgatggcgttctggtaccacttcgccatcctgttcgaggcgctgttcatcctgaccgccgtggacgcgggcacgcgtgccggccgcttcatgctgcaggatctgctgggcaccttcgtgccggccctcaagcgcaccgagtcgctgacggccaacctgatcgccacggcggcgaccgtcgcgctgtggggctacttcctgtaccagggcgtggtcgatccgctgggcggcatcaatacgctttggccgctgttcggcatctccaaccagatgctggcggcgatcgcgctgacgctgggcacctgcgtgctgatcaagatgaagcgcgaccgctacgtctgggtgacgctgctgccgaccgcgtggctgctggtctgcacgctgacggccggctggcagaagctgttccacccggatccgaagatcggcttcctgtcgcacgccaacaagttcgccgacgccattgccgccggcaagctgctggctccggccaagtcgatggcgcagatgcagcagatcgtgctgaacgatcgcatcgatgccttcctgtgcggcctgttcgtgctggtggtcgtcagcattgcctggtacggcttgcgcaccgtgctgaaggcgcgcacccaggctcgcccgacggtcaacgaaacgccgtacgaagcgctgggcgccacgcactga

SEQ ID NO: 36455 - protein, 686 aa, Ralstonia solanacearum GMI1000
MSFVRQHLIWLVVAILGAFAFSTVALARGEAVSALWVVVAAVCIYLIAYRYYSRYIADKVLGLDGTRKTPAWRHNDGLDYVPTNKYVLFGHHFAAIAGAGPLVGPVLAAQMGYLPGMLWILAGVVFAGAVQDFIVLFISSRRDGRSLGDLVKSEMGTVPGLIALFGAFLIMIIILAVLALIVVKALAGSPWGTFTVAATIPVAIFMGLYVRFIRPGRVGEVSIIGFVLLMLAIIGGQAVHESATLAPLFTYDGKALTWMLIGYGFVASVLPVWLLLAPRDYLSTFLKIGTIMALAIGILIVAPQMQMPSLTQFAAGNGPVWSGNLFPFLFITIACGAVSGFHSLISSGTTPKMLENELQARFIGYGAMLMESFVAIMALVAASVINPGVYFAMNAPAALVGTTADAVAQTLSTWGFVVTPDVLLQTAKDVGENTILARAGGAPTLAVGMAHILHQVVGGQAMMAFWYHFAILFEALFILTAVDAGTRAGRFMLQDLLGTFVPALKRTESLTANLIATAATVALWGYFLYQGVVDPLGGINTLWPLFGISNQMLAAIALTLGTCVLIKMKRDRYVWVTLLPTAWLLVCTLTAGWQKLFHPDPKIGFLSHANKFADAIAAGKLLAPAKSMAQMQQIVLNDRIDAFLCGLFVLVVVSIAWYGLRTVLKARTQARPTVNETPYEALGATH

SEQ ID NO: 36456 - DNA, 1857 bp, Pyrobaculum aerophilum str. IM2
  CDS (1)..(1857): transl_table=11
atgagcagtacaataatcgcattaatagcaataatagtattttttgcggcatttaaatggtatgccagcgctattgaaagaacactgggcgttgatccgaacaggcccactccggcgcatagaaaaagagatggaattgattacgtgccgtctaacccggtggtcttattcggacaccacttcgccaccgtggcaggtctaggcccaatagcgggacccgccatagctgccgtgttcgggttcctacctgcgttcctctggatactactgggcacagtgtttatcggcgctgtacaagacatgacctcgctgtttgtctcagtacgtcacggcggcgtctcaataatgtcaatagccgggaggtacttaggggagacgttgaggaaatttttcctaggagttatgctcattttgcttattgtaataaacgcggtatttggagtattaatcgcagttttatggattggcacaacgccagagaccgccacggctacgtgggtcttcacgttaggctcagtaatcaccggcattctgctctacaggttaggggtaaatctagtagtttccacaattgtgggtttagcgtttatagtattaggggtttggcttggctatatgtatcccattaaactcggtatagtggagtggatagtcatattgatgatatatgcatatattgcgtctatcctcccggtatggctcctcctccagccccgtgactacctcaatacatttctgcttatagctggagtcggtgggggcgttataggggctttgattggaaacttcccgttgcaagcgccgttagtgaacactcaagaggcttttaaattcggccttgacatcgctaacaggcctgtttggccctatgtaagtgtgttaattgcatgcggcgcggcaagtgggttccactccttagtcagcagtggcacaacggcaaaacaattgcccaatgaaaagtatatcagacacataggctacggcgctatgctaggcgagggctttcttggaataacggcgttaatggccgtgacaacagcgctggcttgggaggagtatagtcctggcctaggctcagtcgtcactggatgggggcgcttcttaaatgtaatactgccttttattgacgttaaagtattaataacattcgccgcattagtggcaactgcctttggcttcaccaccatggactcctctatgagacttacgagatatgcacttcacgaattactggggataaagaacatatacgtggcagggtttataggctttctgctatcgctaaccatcgcattagctggcaccgccacgcccctatggacgctcttcggctctgtaaaccaagtgttagtggctcttgcgttaactactatagctgtggtattggctcacttcggcagaaggctgtggttcttaataccaggtattgcatacatgtacgcaacgacgctcactgcgttgctacatacaataactgtgtggctatacacgttgccagaagggccccagaagaatccgttaataagtgcaatttatactgaatactcacgtatatacggctctgagactggcaaggcattggccgatgccttacatctgccggccttcgcgcttatattaactcttgcggttataactgtaatactggccctccttatactattcacttcaattagatggttcactgccgcaaaaaggccgagagagccacagtatgtagatggagaaggcgttaggggcgagacggcgggcacccctacaacaacccgtttctctctgccccgcggccccttcagcgactttataagatttgcaagtgagctaaggctgtcagtgaggggtttgttcagaaagtag

SEQ ID NO: 36457 - protein, 618 aa, Pyrobaculum aerophilum str. IM2
MSSTIIALIAIIVFFAAFKWYASAIERTLGVDPNRPTPAHRKRDGIDYVPSNPVVLFGHHFATVAGLGPIAGPAIAAVFGFLPAFLWILLGTVFIGAVQDMTSLFVSVRHGGVSIMSIAGRYLGETLRKFFLGVMLILLIVINAVFGVLIAVLWIGTTPETATATWVFTLGSVITGILLYRLGVNLVVSTIVGLAFIVLGVWLGYMYPIKLGIVEWIVILMIYAYIASILPVWLLLQPRDYLNTFLLIAGVGGGVIGALIGNFPLQAPLVNTQEAFKFGLDIANRPVWPYVSVLIACGAASGFHSLVSSGTTAKQLPNEKYIRHIGYGAMLGEGFLGITALMAVTTALAWEEYSPGLGSVVTGWGRFLNVILPFIDVKVLITFAALVATAFGFTTMDSSMRLTRYALHELLGIKNIYVAGFIGFLLSLTIALAGTATPLWTLFGSVNQVLVALALTTIAVVLAHFGRRLWFLIPGIAYMYATTLTALLHTITVWLYTLPEGPQKNPLISAIYTEYSRIYGSETGKALADALHLPAFALILTLAVITVILALLILFTSIRWFTAAKRPREPQYVDGEGVRGETAGTPTTTRFSLPRGPFSDFIRFASELRLSVRGLFRK

SEQ ID NO: 36458 - DNA, 1452 bp, Clostridium perfringens str. 13
  CDS (1)..(1452): transl_table=11
atgatatcatttttattatcattagtattattaattgtgggctactttacttatggaaaatttgtagacaagacctttggtacaaatgattcaattgaaacacctgctgagtctatggcagatggagtagactatgtaccaatgagttggccaagaatttttttaattcagtttcttaatattgctgggcttggacctatatttggagccatagctggagcgttatggggacctgtagcatttttatggatagtttttggatgtatattcgcaggggctgttcatgactatttcacaggagttttatctataagaaataaaggggtatcagttgctgaacttgtaggtaaatatcttggagaaataccaagaaaaataatggttatattttctgtagtattattaattttagttggggtagttttcttaacaggcccagcagatcttttaaaaactttaacaggaatagacagagatatatttatagttattatagtagtatattatatagctgccactgttttaccagtagataaggttataggaaaaatttatcctatatttggactttgtcttttaataatggctgtaggaataggtgctggaattgtaattgaaggatataatattccagaaattcaattagcaaacttccatccagaaggaacaccaatattcccattcttatttataacaatagcttgtggagctatatctggattccatgctacacaatcacctattatggctagatgtgtaaaaaaagaatcagaggcaagaaaagtattctatggtgcaatgattgcagagggagttatagccttagtttgggcagctgcagctatgtccttctttggtgatacaaatggattacaagaaattttaaaagctggaggaccagccactgtagttaatactatttctaatacagtaatgggaaaagtaggtgccgtattagcaatattaggggtagtagcttgtcctatatcttcaggagatacagctttcagaagtgctagacttacaattgctgatgcttttaaacttaaacaagataaggttattgatagatttaaaatagccataccactatttgttgtgggtatagcattaacttttattgatttcggcataatatggagatatttctcatggtcaaatcaaactttagcaatgataatgctttgggcagcatctgcttatatgttaaaagctcataataattattggataaccttagtgccagcagttttcatgtcagcagttacttgttcatatatattacaagctcctgaaggatttagattaaatgcaacattttctaatatagcaggtgtggtatttgccttagttctttttggaattttcattaagtactgtaaaaaagaaaataatgaaaattgtgagattgtagaaattgaggaagtaaaagaagtgattaaaaataaataa

SEQ ID NO: 36459 - protein, 483 aa, Clostridium perfringens str. 13
MISFLLSLVLLIVGYFTYGKFVDKTFGTNDSIETPAESMADGVDYVPMSWPRIFLIQFLNIAGLGPIFGAIAGALWGPVAFLWIVFGCIFAGAVHDYFTGVLSIRNKGVSVAELVGKYLGEIPRKIMVIFSVVLLILVGVVFLTGPADLLKTLTGIDRDIFIVIIVVYYIAATVLPVDKVIGKIYPIFGLCLLIMAVGIGAGIVIEGYNIPEIQLANFHPEGTPIFPFLFITIACGAISGFHATQSPIMARCVKKESEARKVFYGAMIAEGVIALVWAAAAMSFFGDTNGLQEILKAGGPATVVNTISNTVMGKVGAVLAILGVVACPISSGDTAFRSARLTIADAFKLKQDKVIDRFKIAIPLFVVGIALTFIDFGIIWRYFSWSNQTLAMIMLWAASAYMLKAHNNYWITLVPAVFMSAVTCSYILQAPEGFRLNATFSNIAGVVFALVLFGIFIKYCKKENNENCEIVEIEEVKEVIKNK

SEQ ID NO: 36460 - DNA, 2280 bp, Corynebacterium glutamicum ATCC 13032
  CDS (1)..(2280): transl_table=11
gtgaccataaaacagactgacaacatcaatgacgatgatttggtgtacagcaacgctactgaccttccagtaggcgtgaagaagtcccctaaaatgtcaccgaccgcccgcgttggtctccttgtctttggggttatcgcggcggtgggttggggagcaatcgctttctcccgtggcgaaacaatcaactctgtgtggctggttttggcggcagttggttcctatatcattgcgttttctttctatgcccgactgattgaatacaaagttgttaagccgaaagatcagcgagcaaccccggcggaatacgttaatgacggcaaggactatgtcccaacggatcgtcgtgtgctttttggccaccactttgcagctattgcaggtgccggtccattggttggacctgtcatggccgcgcagatgggctacctgccaggcaccttgtggattatcctcggtgtgattttcgccggtgcagtgcaggactacctagtgctgtgggtgtctactcgtaggcgtggacgctcacttggccagatggttcgtgatgaaatgggcacggtcggtggagctgccggtatcttggcgaccatctccatcatgatcatcattatcgcggtgctcgcattgatcgtggttaatgcactggctgattcaccatggggcgttttctccatcaccatgaccatcccaattgcactgttcatgggtgtgtacttgcgttacctgcgcccaggtcgtgttactgaagtgtccatcatcggtgtggcactgctcctgctggctatcgttgctggtggttgggttgcagacacctcatggggcgtggaatggttcacctggtctaagaccactttggcgttggccttgatcggttacggaatcatggctgcgattttgccggtgtggctgctgcttgcaccgcgcgattacctgtctacctttatgaagatcggcgtcatcggtctgttggcagtgggtattttgttcgcacgtcctgaggtgcagatgccttccgtgacctccttcgcacttgagggcaacggtccggtgttctctggaagtctgttcccattcctgttcatcacgattgcctgtggtgcactgtctggtttccacgcactgatttcttcaggaaccacaccaaagcttgtggagaaggaatcccagatgcgcatgctcggctacggcggcatgttgatggaatctttcgtggcgatgatggcactgatcaccgctgttattctggatcgtcacctgtacttctccatgaacgctccgctggcactgactggtggagatccagcaaccgcagctgagtgggttaactccattgggctgacaggtgcggatatcaccccggaacagctgtcggaagctgctgaaagtgtcggagaatccactgttatttcccgtaccggtggcgcaccaaccttggcgttcggtatgtctgaaatcctctccggattcatcggcggcgctggaatgaaggcgttctggtaccacttcgccatcatgtttgaggctctgttcatcctcactactgtggatgcaggtactcgtgtggctcgctttatgatgaccgataccttgggcaatgttccaggtctgcgccgtttcaaggatccttcatggactgtcggtaactggatttctaccgtgtttgtgtgtgctctatggggtgctattttgctcatgggtgttaccgatccactgggcggcatcaacgtgcttttcccactattcggtatcgctaaccagctgctcgccgctattgcacttgctctcgtgctggttgttgtggtgaagaagggcctgtacaagtgggcgtggattccagctgttcctttggcatgggatctcattgtcacgatgactgcgtcatggcagaagattttccactctgatccggctattggctactgggctcagaacgcgaacttccgcgatgcaaagtctcaaggccttaccgaatttggtgccgctaaatctcctgaggcaatcgatgcggttatccgaaacaccatgattcagggcatcttgtccatcctgttcgcggtgctcgtcctcgttgttgtcggcgcagccattgcggtgtgcatcaagtccatcagggctcgtgcagccggaacacctttggagaccactgaagagcctgatactgaatctgagttcttcgccccaactggattccttgcatcttccagggataaggaagtccaggccatgtgggacgagcgctacccaggcggtgcgcccgtgtcttctggagggcactaa

SEQ ID NO: 36461 - protein, 759 aa, Corynebacterium glutamicum ATCC 13032
MTIKQTDNINDDDLVYSNATDLPVGVKKSPKMSPTARVGLLVFGVIAAVGWGAIAFSRGETINSVWLVLAAVGSYIIAFSFYARLIEYKVVKPKDQRATPAEYVNDGKDYVPTDRRVLFGHHFAAIAGAGPLVGPVMAAQMGYLPGTLWIILGVIFAGAVQDYLVLWVSTRRRGRSLGQMVRDEMGTVGGAAGILATISIMIIIIAVLALIVVNALADSPWGVFSITMTIPIALFMGVYLRYLRPGRVTEVSIIGVALLLLAIVAGGWVADTSWGVEWFTWSKTTLALALIGYGIMAAILPVWLLLAPRDYLSTFMKIGVIGLLAVGILFARPEVQMPSVTSFALEGNGPVFSGSLFPFLFITIACGALSGFHALISSGTTPKLVEKESQMRMLGYGGMLMESFVAMMALITAVILDRHLYFSMNAPLALTGGDPATAAEWVNSIGLTGADITPEQLSEAAESVGESTVISRTGGAPTLAFGMSEILSGFIGGAGMKAFWYHFAIMFEALFILTTVDAGTRVARFMMTDTLGNVPGLRRFKDPSWTVGNWISTVFVCALWGAILLMGVTDPLGGINVLFPLFGIANQLLAAIALALVLVVVVKKGLYKWAWIPAVPLAWDLIVTMTASWQKIFHSDPAIGYWAQNANFRDAKSQGLTEFGAAKSPEAIDAVIRNTMIQGILSILFAVLVLVVVGAAIAVCIKSIRARAAGTPLETTEEPDTESEFFAPTGFLASSRDKEVQAMWDERYPGGAPVSSGGH

SEQ ID NO: 36462 - DNA, 1425 bp, Fusobacterium nucleatum subsp. nucleatum ATCC 25586
  CDS (1)..(1425): transl_table=11
atgtatagttttataggttcaattatagcattggtacttggatattttatttatggaaaatttgttgaaggtgtttttggtatagatacttcaagagaaacacctgcaaaaagattagctgatggtgttgactatatggaaatgagttggccaaaagcatttcttattcaatttcttaacatagctggaactggaccaatatttggagctgttgcaggagcgttatggggtccagctgcatttatttggatagtgtttggttgtatttttgcaggttcagttcatgattttctaataggaatgatgtctttaagaaaagatggagcatctgtttctgaaatagtaggagaaaatttaggtatgactgcaaaacaaataatgagaattttttctgttatacttctattattagttggtgttgtatttataatgagtccagctcaaattttaactaatataacaggggttaattatacagtttggttaggagttattataatttattatctttgtgcaacagttttaccaattgatacaattataggaaaaatttatccaatatttggtttatcacttttagtaatggcatttggtataggtggaggattaataataaataatgctaatattcctgaaatagcttttgtaaatatgaatccagcaggaagatcagttttcccttatctatgcataacaatagcttgtggagcaattagtggattccatgctactcaatctcctatgatggctagatgtttaaaaacagaaaaagaaggaagaagagttttctatggtgcaatgatatcagaaggaattatagctcttatttgggctgctgctgcaatgtcattcttcggtggaatacctcaacttgctgaagcaggaactgctgctgttgttgttaataaaatatctgttggaattttaggaaaagctggaggtgttttagcactattaggagttgttgcttgtcctataacttctggggatactgcgtttagaagtgcaagacttactattgctgactctttaaaatataaacaaggacctgttgtaaatagatttgttgttgcaattcctctatttgttgttggaattgtattatgttttacaccatttgatgttatttggagatactttggttgggcaaaccaaactcttgctacaatagctctatgggcagcagtaaaatatttggcaaacagaggaaaaaattattggatagctttaattcctgcaatgtttatgacagttgttgtaacttcttatatacttgcagcaccagaaggatttgtaagattctttggagataaagatataaaagtaatagaacatattgcaatagcagtaggttgtgtagtatctttaggatgtacagctgcattctttatgtcaaataaaaaaactgatttaattactgaatag

SEQ ID NO: 36463 - protein, 474 aa, Fusobacterium nucleatum subsp. nucleatum ATCC 25586
MYSFIGSIIALVLGYFIYGKFVEGVFGIDTSRETPAKRLADGVDYMEMSWPKAFLIQFLNIAGTGPIFGAVAGALWGPAAFIWIVFGCIFAGSVHDFLIGMMSLRKDGASVSEIVGENLGMTAKQIMRIFSVILLLLVGVVFIMSPAQILTNITGVNYTVWLGVIIIYYLCATVLPIDTIIGKIYPIFGLSLLVMAFGIGGGLIINNANIPEIAFVNMNPAGRSVFPYLCITIACGAISGFHATQSPMMARCLKTEKEGRRVFYGAMISEGIIALIWAAAAMSFFGGIPQLAEAGTAAVVVNKISVGILGKAGGVLALLGVVACPITSGDTAFRSARLTIADSLKYKQGPVVNRFVVAIPLFVVGIVLCFTPFDVIWRYFGWANQTLATIALWAAVKYLANRGKNYWIALIPAMFMTVVVTSYILAAPEGFVRFFGDKDIKVIEHIAIAVGCVVSLGCTAAFFMSNKKTDLITE

SEQ ID NO: 36464 - DNA, 1440 bp, Methanosarcina acetivorans C2A
  CDS (1)..(1440): transl_table=11
atgatcagtttcctgctttctctagccgcacttgtgctgggttatttttcttatggtgcgtttgtcgaaaaagtatttggcgctgatccctcgcgaaggacacccgcacacacccgggaggatggtattgattttgttcctctcagctggcgcagcacgttccttatccagtttctcaacattgctggcttaggccctatatatggagctattctgggagctttatacggtccggctgctttcctgtggattgtcctgggcagtatttttgcaggcggggtgcatgattatttttcaggaatgttgagtgtccgtcatgaaggaaagagcatttctgagattgtggggatatacttaggcagccagatgaagagtggaatgattgcattttccgtcattttactcgtacttatagggacggtgttcatgtccggaccggcagtacttctggcaaatctggggttcccagggctgctggcccaatcgaatttctggctggctattattctcttttattacttcgtggctactgtcgttccaatcgacaggatcataggccgtatttatcccttattcggagctgtcctgttgattatggcatcaggtatcggctccatgctcctcatcaaaggatacgagatccctgaaataaccttcaggagtttccatcctgacggtcttcctctgtggcctatgcttttcataaccatcgcctgcggagccgttagcgggttccactcaacccaatcccctataatggcccgatgtctgcccgatgaaaaatatggcagacgtattttttacggtgccatgatagcagaaggggctatagcccttatctgggccgctgctgcaatgtctttctttccgggaggaatagccggccttagcgaagttaccggtgcaggaggtgctgctctggtcgtaaagaatgtgtcactgggtctgcttggatccgtgggaggaattctcgctatcctgggggttattgcctgccccatcacatccggagatacggccttcaggagtgcacgtctgaccatagctgatgcgatgagcctggaccagcgacctttaaagaacagattaacgatagctctcccaatctttgccatagggtttagtctgacccttatcgatttcagcatagtctggcgttacttctctttttcgaaccaggcactggctaccatagtcctctggacatctgcggtatatctgtcagataacgacaaatttcactggatcgctaccctccccgctacatttatgacagccgttgtaacaacgtacatcttacaggcttctgaggggttcggcttaccagccactgtctcttatcctgcaggagtagtctgtgcagccgcagcctgtggattatttgccacctttttaaggaaaagatctctatcatcagcttactcggtgagtgaacaatga

SEQ ID NO: 36465 - protein, 479 aa, Methanosarcina acetivorans C2A
MISFLLSLAALVLGYFSYGAFVEKVFGADPSRRTPAHTREDGIDFVPLSWRSTFLIQFLNIAGLGPIYGAILGALYGPAAFLWIVLGSIFAGGVHDYFSGMLSVRHEGKSISEIVGIYLGSQMKSGMIAFSVILLVLIGTVFMSGPAVLLANLGFPGLLAQSNFWLAIILFYYFVATVVPIDRIIGRIYPLFGAVLLIMASGIGSMLLIKGYEIPEITFRSFHPDGLPLWPMLFITIACGAVSGFHSTQSPIMARCLPDEKYGRRIFYGAMIAEGAIALIWAAAAMSFFPGGIAGLSEVTGAGGAALVVKNVSLGLLGSVGGILAILGVIACPITSGDTAFRSARLTIADAMSLDQRPLKNRLTIALPIFAIGFSLTLIDFSIVWRYFSFSNQALATIVLWTSAVYLSDNDKFHWIATLPATFMTAVVTTYILQASEGFGLPATVSYPAGVVCAAAACGLFATFLRKRSLSSAYSVSEQ

SEQ ID NO: 36466 - DNA, 1797 bp, Thermoanaerobacter tengcongensis MB4
  CDS (1)..(1797): transl_table=11
atgaatggcttaacactagtaatcatcacactaagcgtctacgccctggcataccgcttttatggagcatggatcggagcaaaaattttagcatttgatgaaaacaggacaactcctgcatacaggcttgaaaatggctacgattacgtgccaacaaacaaatgggttttatttggtcaccactttgcagcaatagcaggagcaggtcctcttgtaggtccagtgctcgctgcccagtttggataccttccaggagcattatggattttaatcggagccgtcctggcaggagcagtccatgacatggtaatactgtttgcatcagtccgatatgatggttcctccataatagacattgcaagaaaagaagtaggcaaagtatcaggtatagctacagctatagcagttctatttatacttgttcttgcaatggcaggacttgcactagttgtagtaaacgctttatacaacagcccgtggggtacttttacagtagcagctacaattttaatagcaatgtacatgggaattcacatgaagtatataagaaaggacgacatagtaggagctacaataataggcgttatactgcttgtattgtctgttatagcaggaccttatgttgaaaagacagcgttagggcatttcctcactttcaatgccaagcaaatgacagtgattttagcaacctacggttttgccgctgcagttttacctgtatggctgttacttgtgccaagagattacctcagcacttatctaaaattaggcgttatggcacttcttgctataggagttataattgtaaaccctgaaataaggatgcctgcaattacacagtatgtagctggaggaggtcctataatccccggaaaggtatggccttatgtgtttataacaatcgcctgcggtgcgatttcaggtttccactcgctaatatcttctggaacaacacctaagatgatcaaaaatgaaaaagacattctacctgtcgcatacggagcaatgctggcagagggctttgtcgcaatgatggccttgattgctgcaacaagcttaataccagccgactacttcgctataaacgttcccccgcaagtgtttgaaaagttaggaatgcatccagtcgagcttcaacacctctctcagatggtgggagaaaatgtcgcaggaagacctggcggcggagtgacactggcagttggaatgacttatatatttgaaaaaataccatggatagcccatttgagctcctacatctatcactttataatattgtttgaagctctattcatactgactacaatagacgccggaacaagagtagggagatacctcttgcaggaagcaggtggcttaatttacaagccttttgcagatagaaactggtggccaggaataataatcacaagctttttaatctccttctcctggggctaccttgtttacggaggaagtgtatctacaatctggcctatatttggagcttctaaccagctgcttgcaggaatagcactggcactgggtacaactgttataattaaaaaaggcaaagcccagcacgcatgggtgacatttgtgccattcctgtttgtgtcaattactactctatatgcaagttatttaaatattgtaaataactacctaccaaaaggaaattgggtactagtaattctctctgcagcagtaatgatattagccatcacaataatagtagactccttcatcaagtggtacaaatggctggttactgataaactcacaaaagagcagattgaagcaagcgtatttaattaa

SEQ ID NO: 36467 - protein, 598 aa, Thermoanaerobacter tengcongensis MB4
MNGLTLVIITLSVYALAYRFYGAWIGAKILAFDENRTTPAYRLENGYDYVPTNKWVLFGHHFAAIAGAGPLVGPVLAAQFGYLPGALWILIGAVLAGAVHDMVILFASVRYDGSSIIDIARKEVGKVSGIATAIAVLFILVLAMAGLALVVVNALYNSPWGTFTVAATILIAMYMGIHMKYIRKDDIVGATIIGVILLVLSVIAGPYVEKTALGHFLTFNAKQMTVILATYGFAAAVLPVWLLLVPRDYLSTYLKLGVMALLAIGVIIVNPEIRMPAITQYVAGGGPIIPGKVWPYVFITIACGAISGFHSLISSGTTPKMIKNEKDILPVAYGAMLAEGFVAMMALIAATSLIPADYFAINVPPQVFEKLGMHPVELQHLSQMVGENVAGRPGGGVTLAVGMTYIFEKIPWIAHLSSYIYHFIILFEALFILTTIDAGTRVGRYLLQEAGGLIYKPFADRNWWPGIIITSFLISFSWGYLVYGGSVSTIWPIFGASNQLLAGIALALGTTVIIKKGKAQHAWVTFVPFLFVSITTLYASYLNIVNNYLPKGNWVLVILSAAVMILAITIIVDSFIKWYKWLVTDKLTKEQIEASVFN

SEQ ID NO: 36468 - DNA, 2073 bp, Xanthomonas axonopodis pv. citri str. 306
  CDS (1)..(2073): transl_table=11
atgaaagggttctcgaagctggcctggggcgcgttggcgctgctggccgcgttctgcctgggtaccgttgcgctgcggcgtggcgagcacatcaacgcgttgtggatcgtggtggcggcggtatcgatctacctgatcgcctaccggttctacagcctgttcatcgccgacaaggtgatgcagctggacatcacccgcgccaccccggcagtcgccaacaacgacggcctggattacgtgcccaccaacaagcacgtgctgttcggccaccactttgctgccatcgccggcgccggccccctggtcggcccggtactcgccgcgcagatgggctacctgcccggcctgctgtggctggtggtcggcgtggtgttcgccggtgcggtgcaggacttcgtggtgctgttcctgtccagccgtcgcaacggccgctcgctaggcgacctggtgcgcgaggagatgggccaggtgcccggcaccatcgccctgttcggcgcattcctgatcatgatcatcatccttgccgtgctggcgatggtggtggtcaaggcgctggcggaaagcccgtggggcatgttcaccgtcatcgccacaatgcccatcgcgctcatgatgggcgtgtacatgcgctacatccgcgtcggcaagatcggcgagatctcggtggtggggttgatcctgctgctgggcgcgatctggctgggcggcaaggtggcggcggacccgacctggggcccggccttcaccttcactgccaagcagatcacctggatgctgatcggctacggcttcgtcgcatcggtgctgccggtgtggctgctgttggcaccgcgcgactacctgtccaccttcctcaagatcggtaccatcctggcgctggcgatcggcatcctggtggtcatgccggacctgaaaatgccggcgctcacgcaattcgcctccaccggcgatggcccggtctggaagggcggcatcttcccgttcctgttcatcaccattgcctgcggcgcggtctccggcttccatgcgttgatcgcttccggcacgacgcccaagctgctcgccaatgaaggccacatgcgctacatcggctatggcggcatgctgatggaatcgttcgtggcgatcatggcgctggtggccgcgtcgatcatcgagccgggcatctacttcgccatgaacagccctgcctcgctggtcggcagcgacactgtcgcagtcgctgccaagatcagcgagtggggcttttcgatcacaccgcaggtgctcgaggccacggcacgcgatatcggcgagcacagcatcctggcgcgcgccggcggggcaccgacgctggcggtgggcatcgcgcagatcctgcaccagttgctgccgggcgaagacaccatggcgttctggtatcacttcgccatcctgttcgaagcactgttcatcctgaccgcggtggacgccggcacgcgcgccggccgcttcatgctgcaggacctgctgggcaacttcatcccggcgttgaagaagaccgagtcgtggaccgccaatatcatcgccaccgccggctgcgtggcgctgtggggctatctgctctacaccggcgtgatcgatccgttcggcggcatccagaccttgtggccgttgttcggcatctccaaccagatgctggccgggatcgcgttgatgctgggcgcggtggtgctgttcaagatgaagcgcgaccgctacgcgtgggtcaccatcgtgccggcgctgtggctgttgctgtgcaccacctatgcggggctgatcaagatcttcgacagcaacccggcgcagggcttcctggcacaggcccacaagttccaggcggccatcgccagcaacaccatcactgcgccggccaagacggtgccgcagatgcagcagatcgtcaccaatgcctacgtcaacaccgggctgaccgtactgttcctgttcgtggtcggctcgatcctgatctattcgatcaagacgatcgtggcggcacgccgcaacccgcagcgcactgaccgcgaaaccccgtacgtggcgttgcagccgcaccagatggcagacctgtaa

SEQ ID NO: 36469 - protein, 690 aa, Xanthomonas axonopodis pv. citri str. 306
MKGFSKLAWGALALLAAFCLGTVALRRGEHINALWIVVAAVSIYLIAYRFYSLFIADKVMQLDITRATPAVANNDGLDYVPTNKHVLFGHHFAAIAGAGPLVGPVLAAQMGYLPGLLWLVVGVVFAGAVQDFVVLFLSSRRNGRSLGDLVREEMGQVPGTIALFGAFLIMIIILAVLAMVVVKALAESPWGMFTVIATMPIALMMGVYMRYIRVGKIGEISVVGLILLLGAIWLGGKVAADPTWGPAFTFTAKQITWMLIGYGFVASVLPVWLLLAPRDYLSTFLKIGTILALAIGILVVMPDLKMPALTQFASTGDGPVWKGGIFPFLFITIACGAVSGFHALIASGTTPKLLANEGHMRYIGYGGMLMESFVAIMALVAASIIEPGIYFAMNSPASLVGSDTVAVAAKISEWGFSITPQVLEATARDIGEHSILARAGGAPTLAVGIAQILHQLLPGEDTMAFWYHFAILFEALFILTAVDAGTRAGRFMLQDLLGNFIPALKKTESWTANIIATAGCVALWGYLLYTGVIDPFGGIQTLWPLFGISNQMLAGIALMLGAVVLFKMKRDRYAWVTIVPALWLLLCTTYAGLIKIFDSNPAQGFLAQAHKFQAAIASNTITAPAKTVPQMQQIVTNAYVNTGLTVLFLFVVGSILIYSIKTIVAARRNPQRTDRETPYVALQPHQMADL

SEQ ID NO: 36470 - DNA, 1485 bp, Streptococcus agalactiae 2603V/R
  CDS (1)..(1485): transl_table=11
atggtaacatttttaggaggggtagcccttttaattgttggttatttcacgtacggtagatacattgaaaagaattttcaaattgatgaaaatcgccaaacacctgcagaagcattaagggatggatatgattttgttcctatgccaaaatggaagaatgggatgattgagttattgaacatcgcaggaaccggacctatctttggccctattttaggagcactctatggtccagttgcttatatctggatagtcttaggatgtatttttgcaggggctgttcatgattatatgattggaatgatttctcttagaaataatggtgcatatcttcctgaattagctagtcgctatcttggaaagtcaatgaagcatgtgatcaacattttttcaatgctattacttattttagttgcaaccgtatttgtggtaactccagctaatcttatcctaagtattttaccagctgggacactatctttaccttggataatcggtcttattttcgtttattaccttatttctacagtcttacctattgataaagcacttggtaaagtttatcctgtattctgcgtcatcttaatggttagtacggcagcagttggcttccgtttattaactggtggctttgatatgccaaacttaacttttgaaacctttaaaaatatgcatccagctgggcttgggatattccctgctttattctttaccatttcatgtggagccatctctggtttccatgctacccaagcacctatggtctcaagaacaactgttaatgagagagaagggcgtttcactttctacggcatgatgattgcagaaggagtaattgcgatgatttgggcaggtgcttcaatgagcttgttcaaaggtcaaaatctctatgaaatgattgctgctgggacaccttctgcagttgtcaatcaagtaatgttaatgttactcggtagtgtaattggaactatcgctatcattggtgttattgttctccctgtttcatctggtttatcagctttccgtagcttacgtactatcgttgctgattatatccatgtcaaacaagatactcttccaaaaatctttgctgtaactatcccattatatgttatttcatttgtccttacacacgttgattttaatctcctatggcgttactttaactgggcaaatcaagtaactgctgttattggtttattagttgctacaagatatctcatcctaaaaagacgaaattattgggtaacatttgtaccagctatgttcatgttgtatgcagtagttgtttatattttatctcaaccaattggatttaatatgggcttaggcatcttaacttattcacttgctttagtgttaacaggtattcttgttggacttttctggaaatctggtcaaaaacaattaaaaactgttcatcctgaagcattcctgtttaacgatcatagaccaattaattattacagtagtttagattcttaa

SEQ ID NO: 36471 - protein, 494 aa, Streptococcus agalactiae 2603V/R
MVTFLGGVALLIVGYFTYGRYIEKNFQIDENRQTPAEALRDGYDFVPMPKWKNGMIELLNIAGTGPIFGPILGALYGPVAYIWIVLGCIFAGAVHDYMIGMISLRNNGAYLPELASRYLGKSMKHVINIFSMLLLILVATVFVVTPANLILSILPAGTLSLPWIIGLIFVYYLISTVLPIDKALGKVYPVFCVILMVSTAAVGFRLLTGGFDMPNLTFETFKNMHPAGLGIFPALFFTISCGAISGFHATQAPMVSRTTVNEREGRFTFYGMMIAEGVIAMIWAGASMSLFKGQNLYEMIAAGTPSAVVNQVMLMLLGSVIGTIAIIGVIVLPVSSGLSAFRSLRTIVADYIHVKQDTLPKIFAVTIPLYVISFVLTHVDFNLLWRYFNWANQVTAVIGLLVATRYLILKRRNYWVTFVPAMFMLYAVVVYILSQPIGFNMGLGILTYSLALVLTGILVGLFWKSGQKQLKTVHPEAFLFNDHRPINYYSSLDS

SEQ ID NO: 36472 - DNA, 1734 bp, Oceanobacillus iheyensis HTE831
  CDS (1)..(1734): transl_table=11
ttgaatgctatcgttgttgctctaattggtattgttatctttatattgggttatcgttattattctaagtttgttgcagaaaagatttttcggttagacccaaactatgttactcctgcacatcgctataaagatggtgtggattatgttccgacaaataagtttgttttgtgggggcatcattttacttctgtagcaggtgcagctccaatactcggtcccgcaatcgcaatctattggggatggttaccagcttttctatgggtagtattaggtacggtatttgcagcaggagttcatgatttcgggactttagcattgtctgtccgcaataaaggatattctgtcggtaccattgccgataagttaatcggtagaaaagggaagctattatttttatttattatattaatattagttttaatggtaaatgcagtatttgcatgggtaatttccaatttatttattagttatccatctagtgttttgccagtgtttattcaaataccgctagcaatctggattggatacgctgcttataaacgaagtaaaaaaatgttaatcccttctctagttgcactcgctatcatgtatttaacggcaattttagcaagtagatttgactttttacaaattgatcttgtgcgttttatgggtggagaagatggagcagggttgtttgggttaggaagtgtatcaacggcatttttaatttggattgttattctaatggtttatgtgtatattgcttcgacattgccggtatggaaattactacaaccgagagattttattaattcacatcagttagtagtaggactaggtattctttatttagggcttattttcacaaatcctagtatttcagctccagctattaatgagagcccagataaaagtctattgccgttactatttattaccatagcatgtggggctatttccggttttcatgggctggtatcttctggtacatcatcgaagcaattaaataaagaaacagatgcaagattcgtaggttattttggggctgtaggtgaaggagtacttgcacttgtatctatacttgcggtaggaacgttatttgcaaatacagatgcattttctcaagcgtatgcatcattttcagacgcaaacgcaattggactaggaaattttgttgaaggtgcagctaatctggcacaaggattatggataccaactgaaatagctacaacaatagtttctatcatagttgttagctttgcagcgacaacattagatacatccgtacgccttatgcgttatattattgcagagttaggtattgaatataatattaagccattaacaaaaacacatgttgctacctcggtagccgtgttatccagtacagctctagttctgattccagaagggccgaatggatttgggtctggtggttatctcatatggccattatttggtactgcaaaccaactcctagcagcgataagtttattccttatttcgatttggttaaaacgtagaggaagtaactatctcgtcacactcattccgatgattttcgttatatttatgaccttatatgcgatgttccaacaagtattctttgagtggtcttggtttggaagcggatcaaatatgttattatttgtattaggagcaatcatttttgtatttgctatttggattgctttaaccgcctttcatgaattaacgaaaaaacaagatgatccattcgatagagaataa

SEQ ID NO: 36473 - protein, 577 aa, Oceanobacillus iheyensis HTE831
MNAIVVALIGIVIFILGYRYYSKFVAEKIFRLDPNYVTPAHRYKDGVDYVPTNKFVLWGHHFTSVAGAAPILGPAIAIYWGWLPAFLWVVLGTVFAAGVHDFGTLALSVRNKGYSVGTIADKLIGRKGKLLFLFIILILVLMVNAVFAWVISNLFISYPSSVLPVFIQIPLAIWIGYAAYKRSKKMLIPSLVALAIMYLTAILASRFDFLQIDLVRFMGGEDGAGLFGLGSVSTAFLIWIVILMVYVYIASTLPVWKLLQPRDFINSHQLVVGLGILYLGLIFTNPSISAPAINESPDKSLLPLLFITIACGAISGFHGLVSSGTSSKQLNKETDARFVGYFGAVGEGVLALVSILAVGTLFANTDAFSQAYASFSDANAIGLGNFVEGAANLAQGLWIPTEIATTIVSIIVVSFAATTLDTSVRLMRYIIAELGIEYNIKPLTKTHVATSVAVLSSTALVLIPEGPNGFGSGGYLIWPLFGTANQLLAAISLFLISIWLKRRGSNYLVTLIPMIFVIFMTLYAMFQQVFFEWSWFGSGSNMLLFVLGAIIFVFAIWIALTAFHELTKKQDDPFDRE

SEQ ID NO: 36474 - DNA, 1425 bp, Oceanobacillus iheyensis HTE831
  CDS (1)..(1425): transl_table=11
atgataacactatttacagcgattattttattaattattgcatattttacgtatggaaaatttatagaaaagttatttggaccgtcagataagagacaaactccagcagtatcacagaatgatggagtagattaccttccaatgcataaacaaaaaaatgctttaattcaattattaaatattgccggtacaggaccaatattcggacctattatgggggctttatttggaccagttgcttttttatggattgtcattggatcaattttcgcaggagcggtgcatgactatttaactggtatgatttctatacgaaatcgtggtgcacacatcccgcaacttgcaggaaagtttttaggaagcttttcaaggcatattgttaatgctttttctcttcttttattaatcttagttggaaccgttttcttaactactccagcttcattgattgatattttactagatggacaagttgcatttatatatatattagcagctattttactctattactttctatcaacgatcttaccaattgataaaattattggtagaatttatcccttttttggagcaatcttattaataggaacagtgttaattggtgtagctctagtattctcggattataaaataccggaactgacaattcaaaatatgcatcctgataacttaccaattttccctatattattctttacgattacctgtggggctttatctggattccatgcaacacaatctccaattatatccagaacaacccaaaaagaatcacaggggagatatatattttatggaatgatgattgcagaaggaattattgcaatgatttgggcagcggcagcgatgagtatttttgatggccaaacactaagtcaagttattgcagaaggaacagcttcagcagctgttagtgaaattgctattactttactaggtgctgttgcgggtacgatagcggtaattggtgtgattattttacctattacttcaggggacacggcatttcgtgcagcaagaactattattgcggactatttaaatattaaccaaaagaaagttgctaatcgtctcatgattgctatgccattattcgttatcgcctacttcttaactacgattgattttaatgtgctatggagatatttctcttgggcaaaccaagcaacagcaatgcttgcattatggattgcaacaatgtatctctatgtaaaagggaaaaacttcttcgtatccatggtaccagccatttttatgacatacatggttcttgtatatatccttaatgcgaagattggattccaattagatttgaatatatcctttataattggacttgtattaacagtaatcttaaccatattattctttattaaagcaaaaagtaataaaaagaataaccttcaagtagacatggagtaa

SEQ ID NO: 36475 - protein, 474 aa, Oceanobacillus iheyensis HTE831
MITLFTAIILLIIAYFTYGKFIEKLFGPSDKRQTPAVSQNDGVDYLPMHKQKNALIQLLNIAGTGPIFGPIMGALFGPVAFLWIVIGSIFAGAVHDYLTGMISIRNRGAHIPQLAGKFLGSFSRHIVNAFSLLLLILVGTVFLTTPASLIDILLDGQVAFIYILAAILLYYFLSTILPIDKIIGRIYPFFGAILLIGTVLIGVALVFSDYKIPELTIQNMHPDNLPIFPILFFTITCGALSGFHATQSPIISRTTQKESQGRYIFYGMMIAEGIIAMIWAAAAMSIFDGQTLSQVIAEGTASAAVSEIAITLLGAVAGTIAVIGVIILPITSGDTAFRAARTIIADYLNINQKKVANRLMIAMPLFVIAYFLTTIDFNVLWRYFSWANQATAMLALWIATMYLYVKGKNFFVSMVPAIFMTYMVLVYILNAKIGFQLDLNISFIIGLVLTVILTILFFIKAKSNKKNNLQVDME

SEQ ID NO: 36476 - DNA, 2400 bp, Bifidobacterium longum NCC2705
  CDS (1)..(2400): transl_table=11
atgaccaccgccgcagcccaggccccggcacctggcaagttggaattcaaggacgattacacgccggacgaagccgaacgtgtgattcgcaattcgaagggactgcccgtaggcgtgcgtcccaaaatggtatggacatggaagaaggccctgctgtgggccgccatcgccatcgtatgtgcctgcggatgggcgattctggccgtctcgcgcggtgagcagatctccgccatctggttcctggtcgtggcgctgagctcctacgccatcgcctaccgcttctatgcctattacatccagatcaagatcatgcgcaccgacgacgcgaacgccaccccggccgagcgcgtgcatgacggcgcgaacttcgaacgcaccgaccgccgcgtgctcttcggccagcactttgccggcatctccggcgccggaccgctcgtcggcccgatcctggccgcgcagatgggctacctgccctccactctgtggatcatcctcggcgtgattttcgccggcgccgtgcaggacatgctggtgctgtggatctccgccaagcgccgcggtcgctctctgggccagatggccactgatgaaatgggtaagttcggcggtatgatcctatccatcttcctcgtggtgatgaccgccatcgccatggcatttctggcgctcgtggccatcaaggccatggccgcctcgccgtgggccgtgttctccatcggtatgaccatcccgatcgccctgatcatgggctgctaccagcgtttcctgcgccccggccgtgtcattgagaccacgctgctcggtttcgtgctgctcgtgctcgacatcgtcgccggcggatggatcgcctctatcccggccgtggccgccgtgttcacactggacgccaagcagctcgtcatcgccctggtgatctactcgttcgccgccgccgcgctgccgcactggctgctcgtcaccccgcgcgactacctgtccacgctgatgaagatcggcacgctcgtgctgctcgtcatcggcatcatcatcgccaacccgtccgtcaaggtgccgggtctgaccgaactggcctccacctccaccggcccgaccttctccggcaacctattcccgttcctgttcatcaccatcgcctgcggcgccctctccggcttccacggcgcggtgagctccggcctgaccccgaaggccgtggagaaggagaaccagattcgcatgatcggctacggttcgatgctcgtcgaatcgttcaccgccgtcatcgcgctgatcgccgcgatcaccatctcgcagggcgtgtacttctccaccaacatgtccgccgcacagatcaccgccgcatccggcgtgagcatctccgccacctccacgccgggcgaacaggccgatgccgccgtcaaggccgtggagtcgatgaaggtctccgacatcgaaggcaaccagatgcaggtcacctgggattccgtggacgagaacggcgcggccaagacctacgaaggcgccgcggcgcttgagcaggccgccgccgacatcggcgagacctccatcgtctcccgcaccggtggcgccaccacgttcgccatgggcatggccaacttcctcaagtcctacctgggcggccacgactcgatggccttctggtaccacttcgccatcatgttcgaagccctgttcatcctgaccaccgtggacaacggcacccgcgtggcccgctaccaaatcggcgaaatgctcggcaacgtgcgcaagctcaagaagttcgccgacccgacctggaagcccggcaacatcatcaccacgctgatcgccaccgcgctgtggggcggactgctgtggatgggcgtgtccgacgcgaacggcggcatcaacgcgatggtgcctatcttcggcatctccaaccagctgctcgccgccgcctgcttcgtgctgatcaccgtgtgtgtggccaagatgggctactggaagcacctgtggataccggtggtaccgctcgtgtgggacatcgccgtgaccttcaccgccgacttccagaagatcttcgggccgctgagctacttcaccaccgcctccaagtatcaggcgcagatcgactccggcgagctgaccggcgaggcgctgaccaacgccaaggccgcgctgtccaacgcgtatctggacggcgtgctctccgtgttcttcctggtcatgatgggcgtcttcgtggtagtcggcatcgtggtcgtggcgcgcacgttcgccgctggcaagtacggtgccgaaacgacgtccgaggagccgttcgtggaatcccagtggttcgcgccctccagcctggtcgccaccgcgcttgagaagaaggtgcagcgcgaatacagcgccaagctgcatgagcttgtgcggaacgggcaggttgcagcgtag

SEQ ID NO: 36477 - protein, 799 aa, Bifidobacterium longum NCC2705
MTTAAAQAPAPGKLEFKDDYTPDEAERVIRNSKGLPVGVRPKMVWTWKKALLWAAIAIVCACGWAILAVSRGEQISAIWFLVVALSSYAIAYRFYAYYIQIKIMRTDDANATPAERVHDGANFERTDRRVLFGQHFAGISGAGPLVGPILAAQMGYLPSTLWIILGVIFAGAVQDMLVLWISAKRRGRSLGQMATDEMGKFGGMILSIFLVVMTAIAMAFLALVAIKAMAASPWAVFSIGMTIPIALIMGCYQRFLRPGRVIETTLLGFVLLVLDIVAGGWIASIPAVAAVFTLDAKQLVIALVIYSFAAAALPHWLLVTPRDYLSTLMKIGTLVLLVIGIIIANPSVKVPGLTELASTSTGPTFSGNLFPFLFITIACGALSGFHGAVSSGLTPKAVEKENQIRMIGYGSMLVESFTAVIALIAAITISQGVYFSTNMSAAQITAASGVSISATSTPGEQADAAVKAVESMKVSDIEGNQMQVTWDSVDENGAAKTYEGAAALEQAAADIGETSIVSRTGGATTFAMGMANFLKSYLGGHDSMAFWYHFAIMFEALFILTTVDNGTRVARYQIGEMLGNVRKLKKFADPTWKPGNIITTLIATALWGGLLWMGVSDANGGINAMVPIFGISNQLLAAACFVLITVCVAKMGYWKHLWIPVVPLVWDIAVTFTADFQKIFGPLSYFTTASKYQAQIDSGELTGEALTNAKAALSNAYLDGVLSVFFLVMMGVFVVVGIVVVARTFAAGKYGAETTSEEPFVESQWFAPSSLVATALEKKVQREYSAKLHELVRNGQVAA

SEQ ID NO: 36478 - DNA, 2106 bp, Leptospira interrogans serovar Lai str. 56601
  CDS (1)..(2106): transl_table=11
atgcttcctttaattgcagtccttgtatgttttctagtttattttctcggatataaattttactcgggttatatttctaaatctatctttgatttaaaaaacggtctaaacgatactcccgctcataaactaaacgacggggtagattatcttcctacaaaaccagtcgtattatttggccatcattatgcgtccattgccggattggctccagtgcttggacctgcggtagcagtaatttggggttggcttcctgcaatgctttgggttgtatttggaagtatttttgtgggttgtgtgcatgattttggagcgcttgtagtttcggttcgcaatcaaggaaaaagtatcggtcaagtggcggaagatcttttaggtcaccgagctagaagtttgtttcacgcgatcattttctttttagtttcattggcaatgggagtttttgttcttgtacttgcggaaatgttttctgcggatccaaaggtggacctatttccttctctaaacacggctgataaaataattccttctataaaaaattctagagatcagaatgttttaaaacaaccaagttctttaatcttaaaagaagaagaaaaacaacgtgcttctgtaaactcagcgtctcatacggtcacgaaagaaaaaaaatctagttccgtgacgacttcgaaacataaatcaatttcggataacgtatattctaattctattgatttaaagaagaaatctactttaacaaactccacccaagcacaaaattctacgattacaaattctgaaaccgcaaacgaaaaagttcaccatcaccctggagaaatcagaacggaagaaaaaccatccatccggttgagaagtcattttccggaagcggtcattccatctgcggtgattatgattcttgcagtaattatgggatatttacattacaaaaaaggaatgaatttaactcctcttactgtgtttagcgtatttggaacgttaggttccatgatcttaggaatgcaagattcagttctttcttggaccggactcaatcatgtagaaacttctccttctaccggaacttggaaatacatacttttattttatgcgtttttagcttcggtaactccggtctggttgttactacaaagtagggactatattaattctttcttattgtatttaggaattgtattgatttatctaggattttttacggggggaattttacaaaactttcattcttttaacgcggaagtaatacgaactacaacgatcggactcgatttgattccattcgtatttattacgattgcttgtggagcggtttctggatttcacgcgttagtcagttcgggaactactgctaaacaattggataaagaaacagacgcaagaccaatcggttatggaggaatgatcggagaatcattgcttggtttgtctgctgtgattgcgtgtacgataggatttacttcttcggaagaatggtctggtttttatcgttcttggtctggtatacaaggtttggctccacaagtaggggcttacatttatggaaccggaagatttttactgcaaataggaattccagaaactttcggacaaggatttattgcactcatcgtaatcagctttgcattgacttctttggattcagctacaagacttcttagatacaacatcgaagagattgcagaatcaactcgtatttcttggattcaaacttttgtaggaaacagatatgtttccagtctaatcgcttgtattgcgataggattctttgcgtttttagaaattgaacaagatggaaaaaagaaacctgcaggacttgcgctctggaaactttttggaacaacgaaccagctactagccgggcttgcacttttggtagtaactattttccttttaaagttgaagaaaaaaatcaaagtttcttttataccgatgttattcgtattatcagtgactctttgggctatgatcaaaaactttttagattttttaaccggaccttctcccaatttgcttcttgctacggtaggagggaccttgatcttcttgacactttggttattgttggaagcggtattaacttggaatcgcattagaaaagtatga

SEQ ID NO: 36479 - protein, 701 aa, Leptospira interrogans serovar Lai str. 56601
MLPLIAVLVCFLVYFLGYKFYSGYISKSIFDLKNGLNDTPAHKLNDGVDYLPTKPVVLFGHHYASIAGLAPVLGPAVAVIWGWLPAMLWVVFGSIFVGCVHDFGALVVSVRNQGKSIGQVAEDLLGHRARSLFHAIIFFLVSLAMGVFVLVLAEMFSADPKVDLFPSLNTADKIIPSIKNSRDQNVLKQPSSLILKEEEKQRASVNSASHTVTKEKKSSSVTTSKHKSISDNVYSNSIDLKKKSTLTNSTQAQNSTITNSETANEKVHHHPGEIRTEEKPSIRLRSHFPEAVIPSAVIMILAVIMGYLHYKKGMNLTPLTVFSVFGTLGSMILGMQDSVLSWTGLNHVETSPSTGTWKYILLFYAFLASVTPVWLLLQSRDYINSFLLYLGIVLIYLGFFTGGILQNFHSFNAEVIRTTTIGLDLIPFVFITIACGAVSGFHALVSSGTTAKQLDKETDARPIGYGGMIGESLLGLSAVIACTIGFTSSEEWSGFYRSWSGIQGLAPQVGAYIYGTGRFLLQIGIPETFGQGFIALIVISFALTSLDSATRLLRYNIEEIAESTRISWIQTFVGNRYVSSLIACIAIGFFAFLEIEQDGKKKPAGLALWKLFGTTNQLLAGLALLVVTIFLLKLKKKIKVSFIPMLFVLSVTLWAMIKNFLDFLTGPSPNLLLATVGGTLIFLTLWLLLEAVLTWNRIRKV

SEQ ID NO: 36480 - DNA, 2067 bp, Pseudomonas putida KT2440
  CDS (1)..(2067): transl_table=11
atgaacaacaataatagcctgctacgccatattccgtggctggcgctggcagtcataggcgcctgcgcactgggtgtggttgccctgcgtcgcggcgaggcgatcaacgccttgtggatcgtggtcgcggcagtggccatctacctggtcgcctatcgttactacagcctgttcatcgccaccaaggtgatgcaactcgacccgcgccgtgccaccccggcggtgctcaacaacgacggcctggactacgtcccgaccaacaaacacattcttttcggtcaccacttcgctgccatcgccggcgcaggccccttggtcgggccggtactcgccgcgcaaatgggctacctgcccggcacgctctggctgatcgccggcgtggtgctggccggtgcggtgcaggacttcatggtcctgttcctgtctacccgccgcaacgggcgctcgctgggcgacatggtgcgcgaggaaatgggcagaatcccgggcaccatcgccctgttcggctgtttcctgatcatgatcatcatcctcgcggtgctggcgttgatcgtggtcaaggccctggccgaaagcccatggggcatgttcacggtgatggcgaccatcccgatcgcgatgttcatgggcatctacatgcgctacatccgtccgggccgtattggcgaaatctcggtcgttggtgtggtactgctgctggcctcgatctggctgggcggcgtgatcgctgcggacccggtgtggggcccggcgttcacgttcaccggcgtgcagatcacctggatgctggtgggctacggttttgtcgccgccgtgctgccagtgtggctggtgctggcgccgcgtgactacctgtcgaccttcctcaagatcggcacgatccttggcctggccatcggtatcctgatcatcgcacctgagctgaaaatgccggcgctgacccagttcaccgacggtacgggcccggtgtggaagggtaccctgttcccgttcctgttcatcaccattgcctgtggtgcggtgtccggcttccacgcgctgatttcctcggggaccacccccaagctgctggataacgaaaccaacgcccgctatatcggctacggcggcatgctgatggaatcgttcgtcgccatcatggccatggttgcggcctcggtgatcgaaccgggcgtgtacttcgccatgaacagcccggcggcagtggtcggtaccgatgtcgcgtcggtggcgcagactgtcagcagttggggcttcctgattacacccgagcagctcgaagccgttgcccgtgacatcggcgagcacaccatcctggcccgtgccggcggtgcgccaaccctggcggtcggtatcgcgcagatcctgcaccaggtgttgccaggtgaaaacaccatggccttctggtaccacttcgcgatcctgttcgaggcgctgttcattctcacggcggtagacgctggtacccgtgccgggcgcttcatgctgcaggacctgctgggcagcttcgtgcctgcgctcaaacgcaccgaatcgtggggggcaaacctgcttgccactgctggctgcgtggcgctctggggctatctgctgtaccagggcgtcatcgacccgctgggtggcatcaacaccctgtggccgctgtttggtatctccaaccagatgctggccggtatcgccttgatgctcggtactgtggtgctgatcaagatgaagcgtcagcgctacatctgggtcaccctgctgccggccgtatggctgctgatctgcaccacggctgcaggcctgatcaagctgttcgaccccaacccggctgtcggcttcctggccttggccaagaagtacagcactgcgctggacgccggccaggtactggccccggccaaggacatcgggcagatgcagcacgtgatcttcaacgcctacaccaacgcgggcctgacgatcttgttcctgctggtggtcttcagcatcctgttcttcgccatcaaggtcggctacgccgccttgggccgcaaagaacgcagcgacaaggaaaccccgttccaggcgttgcctgacgcgtaa

SEQ ID NO: 36481 - protein, 688 aa, Pseudomonas putida KT2440
MNNNNSLLRHIPWLALAVIGACALGVVALRRGEAINALWIVVAAVAIYLVAYRYYSLFIATKVMQLDPRRATPAVLNNDGLDYVPTNKHILFGHHFAAIAGAGPLVGPVLAAQMGYLPGTLWLIAGVVLAGAVQDFMVLFLSTRRNGRSLGDMVREEMGRIPGTIALFGCFLIMIIILAVLALIVVKALAESPWGMFTVMATIPIAMFMGIYMRYIRPGRIGEISVVGVVLLLASIWLGGVIAADPVWGPAFTFTGVQITWMLVGYGFVAAVLPVWLVLAPRDYLSTFLKIGTILGLAIGILIIAPELKMPALTQFTDGTGPVWKGTLFPFLFITIACGAVSGFHALISSGTTPKLLDNETNARYIGYGGMLMESFVAIMAMVAASVIEPGVYFAMNSPAAVVGTDVASVAQTVSSWGFLITPEQLEAVARDIGEHTILARAGGAPTLAVGIAQILHQVLPGENTMAFWYHFAILFEALFILTAVDAGTRAGRFMLQDLLGSFVPALKRTESWGANLLATAGCVALWGYLLYQGVIDPLGGINTLWPLFGISNQMLAGIALMLGTVVLIKMKRQRYIWVTLLPAVWLLICTTAAGLIKLFDPNPAVGFLALAKKYSTALDAGQVLAPAKDIGQMQHVIFNAYTNAGLTILFLLVVFSILFFAIKVGYAALGRKERSDKETPFQALPDA

SEQ ID NO: 36482 - DNA, 2166 bp, Escherichia coli CFT073
  CDS (1)..(2166): transl_table=11
atgccaggttttactatggatactaaaaagatattcaagcacataccctgggtgattctcggaatcatcggtgcattctgcctcgcggtagttgcattacgtcggggggagcacgtcagcgccctgtggatcgtggtcgcctctgtgtcggtgtatctggtggcgtatcgctactacagtctgtacatcgcccagaaggtgatgaaactcgaccccacgcgcgcgacgcctgcggttattaacaacgacggtctgaactacgttccgaccaaccgttacgtgttgtttggtcaccacttcgccgctatcgccggtgctggtccgctggtgggtccggttctcgccgcgcagatgggctacctgcctggcacgctgtggctgctggcgggggtcgtgctggccggtgcggttcaggactttatggtgctgtttatctcctctcgccgtaacggcgcatctcttggtgagatgatcaaagaagagatggggccagtaccggggactatcgcgctgtttggctgtttcttaatcatgatcatcatcctcgccgtcctggcgctgattgtggttaaagccctggccgaaagtccgtggggtgtcttcaccgtttgctcaaccgtaccgattgcgctgtttatgggtatctacatgcgctttattcgtccggggcgtgtgggtgaagtctctgtcattggtatcgtgctgctggttgcctctatctacttcggtggcgtgattgctcacgatccgtactggggtccggcactgacctttaaagacaccaccattaccttcgcgctgattggctatgcgtttgtttccgcactgctgccagtgtggctgatcctcgcaccgcgcgactatttggcaaccttcctgaaaatcggcgttatcgtcggcctggcgctgggtatcgtggtgctgaacccggaactgaaaatgcctgccatgacccagtacattgacggtactggcccgctgtggaaaggcgctctgttcccgttcctgttcatcaccatcgcctgtggtgcggtatctggcttccacgcgctgatctcttccggtacgacgccgaaactgctggctaatgaaaccgacgcgcgtttcatcggctacggcgcaatgctgatggagtccttcgtggcgattatggcgctggttgctgcgtccatcatcgaaccgggtctttacttcgcgatgaacaccccgcctgctggccttggcatcaccatgcctaatctgcatgaaatgggtggcgagaacgcgccgatcatcatggcacagctgaaagacgttaccgcacacgcggcagcgaccgtcagctcctggggcttcgtgatttcgccagagcagatcctgcaaaccgcgaaagacattggtgagccttctgtcctgaaccgtgcaggtggtgcgccaacgctggcggtaggtatcgctcacgtgttccacaaagtgctgccgatggctgacatgggcttctggtatcacttcggtattctgttcgaagccctgttcatcctgaccgcgctggatgcgggtacccgttctggccgctttatgctgcaagacctgctgggtaacttcatcccgttcctgaaaaaaaccgactctctggttgccggtatcatcggtactgcgggctgtgtgggtctgtggggctacctgctgtatcagggcgtggtcgatccgctgggcggcgttaagagcctgtggccgctgttcggtatctccaaccagatgctggcagccgtggcgctggtactgggcaccgttgtactgattaagatgaagcgcacccaatacatctgggttaccgttatcccggcagtatggctgcttatctgcaccacctgggcgctgggcctgaaactgttcagcaccaacccgcagatggaaggcttcttctacatggcaagccagtacaaagagaagattgctaacggtactgacctgacggcgcagcagattgccaacatgaaccacatcgttgtgaacaactacaccaacgcaggcctgagcattctgttcctgattgtggtgtacagcatcatcttctacggtttcaaaacctggctgaaggtgcgtaacagcgacaaacgtactgacaaagaaacaccgtacgttccaatcccggaaggcggcgtgaagatctcttcgcaccactaa

SEQ ID NO: 36483 - protein, 721 aa, Escherichia coli CFT073
MPGFTMDTKKIFKHIPWVILGIIGAFCLAVVALRRGEHVSALWIVVASVSVYLVAYRYYSLYIAQKVMKLDPTRATPAVINNDGLNYVPTNRYVLFGHHFAAIAGAGPLVGPVLAAQMGYLPGTLWLLAGVVLAGAVQDFMVLFISSRRNGASLGEMIKEEMGPVPGTIALFGCFLIMIIILAVLALIVVKALAESPWGVFTVCSTVPIALFMGIYMRFIRPGRVGEVSVIGIVLLVASIYFGGVIAHDPYWGPALTFKDTTITFALIGYAFVSALLPVWLILAPRDYLATFLKIGVIVGLALGIVVLNPELKMPAMTQYIDGTGPLWKGALFPFLFITIACGAVSGFHALISSGTTPKLLANETDARFIGYGAMLMESFVAIMALVAASIIEPGLYFAMNTPPAGLGITMPNLHEMGGENAPIIMAQLKDVTAHAAATVSSWGFVISPEQILQTAKDIGEPSVLNRAGGAPTLAVGIAHVFHKVLPMADMGFWYHFGILFEALFILTALDAGTRSGRFMLQDLLGNFIPFLKKTDSLVAGIIGTAGCVGLWGYLLYQGVVDPLGGVKSLWPLFGISNQMLAAVALVLGTVVLIKMKRTQYIWVTVIPAVWLLICTTWALGLKLFSTNPQMEGFFYMASQYKEKIANGTDLTAQQIANMNHIVVNNYTNAGLSILFLIVVYSIIFYGFKTWLKVRNSDKRTDKETPYVPIPEGGVKISSHH

SEQ ID NO: 36484 - DNA, 1485 bp, Vibrio vulnificus CMCP6
  CDS (1)..(1485): transl_table=11
atgatgtggtttcttacctgtgtcgcagccctgattggcggatacttcatctacggtgctttcgttgagaaagtatttggtatcaatgaaaatcgccgtacccctgcccatacaaaaaccgacggcgttgactatgtgccaatgtcgacccaaaaagtctacttagtgcaactccttaacattgctggcgttggccctatctttggtccaatcatgggtgccctatacggccctgcggcgatgctttggattgttgtcggctgtatcttcgctggtgcagtacacgattacttctctggcatgctttctgtgcgtaacggtggtgcttctgtaccgaccatcacaggtcgctaccttggcaatggcgcgaaacactttatgaacatttttgccattgtcttgctgctgcttgttggtgtggtattcgtttccgccccggctggcatgatcaccaatctgatcaatgaccaaaccagcttctctgtgagcatgacaaccatggtggtggtgatttttgcttactacatcatcgcgaccatcgtaccggttgataaaatcatcggtcgcttctacccactgtttggtgcgttactgattttcatgtctgttggtctgatgacggcgattgcattctcttctgagcacacggtgatgggtgatttccaagtcagcgacatgttcactaacttgaacccgaatgatatgcctctgtggccagctctgttcatcactattgcttgtggtgcgatctctggcttccacgcaacgcaatcacctttgatggctcgttgtatggaaaatgagaaaaacggccgctttgtcttctacggcgcgatgattggtgaaggtgttatcgcactgatctggtgtgctatcgcactctcgttcttcggcacacttgaaggactagcagaagcggtgaaaaacggtggccctggcaacgtggtttacagcgcatcatttggtctgcttggcgtatttggtggcgtgattgccttcctaggtgtggtgattctgcctatcacttcgggtgacacggcgttccgctctagccgtttgattcttgctgaatacttcaacatggaacagaaaaccctacgtaaccgcctgttgatggccgtaccactgttcgtactgggtggcattctgactcaagtcgatttcggcatcatctggcgctacttcggttttgccaaccaaaccaccgcagtcatgatgttgtggacagcatcagcttacctactgcgtcacaacaagctacattggatcaccacagtgcccgctttcttcatgacaacggtttgtgtgacctttatcctcaacaacagcgcgctgggctttggtttgccaatgcaactctccaccattgctggcgtaatcttcgcggcagcggtaaccggttacgtgattaaaacatcaaaaggcaaaggcgaaacggaccttgccgatgaggaaaaacctcaaggcgtcactgaaaccgcgtaa

SEQ ID NO: 36485 - protein, 494 aa, Vibrio vulnificus CMCP6
MMWFLTCVAALIGGYFIYGAFVEKVFGINENRRTPAHTKTDGVDYVPMSTQKVYLVQLLNIAGVGPIFGPIMGALYGPAAMLWIVVGCIFAGAVHDYFSGMLSVRNGGASVPTITGRYLGNGAKHFMNIFAIVLLLLVGVVFVSAPAGMITNLINDQTSFSVSMTTMVVVIFAYYIIATIVPVDKIIGRFYPLFGALLIFMSVGLMTAIAFSSEHTVMGDFQVSDMFTNLNPNDMPLWPALFITIACGAISGFHATQSPLMARCMENEKNGRFVFYGAMIGEGVIALIWCAIALSFFGTLEGLAEAVKNGGPGNVVYSASFGLLGVFGGVIAFLGVVILPITSGDTAFRSSRLILAEYFNMEQKTLRNRLLMAVPLFVLGGILTQVDFGIIWRYFGFANQTTAVMMLWTASAYLLRHNKLHWITTVPAFFMTTVCVTFILNNSALGFGLPMQLSTIAGVIFAAAVTGYVIKTSKGKGETDLADEEKPQGVTETA

SEQ ID NO: 36486 - DNA, 1467 bp, Clostridium tetani E88
  CDS (1)..(1467): transl_table=11
atggtaacatttattttatctattatcgcattaatagttggttattttatttatggtactgttgttgaaaagattttcggaatcgatgaaaatcgagagacaccagcagtaagacttgaagatggtgtggattatgttcctatgccagaatggaagatatttttaatacagtttttaaatatagcaggtttgggacctatatttggagctatattaggagctatgtttggaccagctgcatttttgtggattgtatttggttctatatttgcaggaggagttcatgactacttctcaggtatgctttcagtaagacataatggtgcaagtgtaccagaaatcgtgggtaagtatttgggacaaggctttagaaattttatgagagtattttcagtagtacttttaatattagttggagtagtatttgttatgggacctgcagaccttctagcaggattaacaccagaaaagtttggtagaaacttttggttatatattattttcttttactatatattagctactttattacctgttgataaaataataggaaagatttaccctattttcgggatatgtttacttttaatggctgttggtgtagcggcaatgcttattataaaaggttatccaattccagaagcgactcctgcaaatttatataatatgcatagtaaagctagtacaatgccaatattcccggtattatttgtaactattgcctgtggtgctatttcaggattccactctacccaatcaccactaatggccagatgtataacaaatgaaaggcaaggaagaagagtattttatggatcgatgattgcagaaggaatagttgcattaatatgggcagcagcagctatgagcttctttgcaggtccaggtggaactaatggtgtgggaaagtttaacgaaattatggcatctaatggaaataatgcagcttgggtagtaaacgaagtgtgtaattcgctattaggtaaagtaggaggaattcttgcaatattaggagtagttgcatgtcctataacttcaggggatacagcttttagaagtgctagattaactatagcagattcattaaaatataaacaagaagatattaaaaatagactatctataagtattcctttatttataataggatttgtattaacaagaatagattttaatataatttggagatactttgcatggtcaaaccaagcattggctacagtattactttgggcatctgctgtatatcttgtaacaattaaaaaaatccattggatcgcatctttaccagcaacatttatgactgctgtaagtgtaacttatataatggttgctccagagggttttaaattatcaacatcaataggatatccaataggtataatatcagcaatagtagtatttgcaatatttttatccaaagcaaaaaaagaaaaaatgaaaatctctaattcaaaaaccgcttag

SEQ ID NO: 36487 - protein, 488 aa, Clostridium tetani E88
MVTFILSIIALIVGYFIYGTVVEKIFGIDENRETPAVRLEDGVDYVPMPEWKIFLIQFLNIAGLGPIFGAILGAMFGPAAFLWIVFGSIFAGGVHDYFSGMLSVRHNGASVPEIVGKYLGQGFRNFMRVFSVVLLILVGVVFVMGPADLLAGLTPEKFGRNFWLYIIFFYYILATLLPVDKIIGKIYPIFGICLLLMAVGVAAMLIIKGYPIPEATPANLYNMHSKASTMPIFPVLFVTIACGAISGFHSTQSPLMARCITNERQGRRVFYGSMIAEGIVALIWAAAAMSFFAGPGGTNGVGKFNEIMASNGNNAAWVVNEVCNSLLGKVGGILAILGVVACPITSGDTAFRSARLTIADSLKYKQEDIKNRLSISIPLFIIGFVLTRIDFNIIWRYFAWSNQALATVLLWASAVYLVTIKKIHWIASLPATFMTAVSVTYIMVAPEGFKLSTSIGYPIGIISAIVVFAIFLSKAKKEKMKISNSKTA

SEQ ID NO: 36488 - DNA, 1179 bp, Shewanella oneidensis MR-1
  CDS (1)..(1179): transl_table=11
atgatgtggttcctgctctgcgtcggtctattgatcggcggctactttatctacggtacttttgttgaaaaagtatttggtatcaatgaaaaacgtcaaacaccggcatttagccaaaccgacggcgtggactttgttccgatgtcaaagggaaaagtctatttaatccaattactgaatatcgcgggtgtcggtccaatcttcggtcctatcctaggtgcgctctacggcccttcagctatgctctggattgtgatcggctgtatcttcggcggagcggtgcacgattacttctctggtatgttgtcagtacgtaatggtggccaatctgtcccaaaccttgcgggcaagtatttaggcaaaagtgctaaacactttatgaacgtgttcgctatcgtcttattgctgctggtaggtgtagtgtttatctctgcaccagcaggtttgttaggtaagctgacgggcttagatgtgagtatcttcgtgggtataatcttcgtttactacctgattgccactgtagtgcctatcgacaagattattggccgcctctaccccttcttcggcgcactgctattcttcatgtcattcggcttagcctttgcgattatgttttctagcgaacatacgctgcttcctaatgtgcaagcgggagattttttcaaaaacttaaaccctgacgatatgccactttggcccgcgctgtttatcaccattgcctgtggagccatttcaggctttcacgctacacaatcaccactgatggcacgttgtgttgaaaatgaaaagaacggccgtttcgtgttctttggcgccatgatcggtgaaggcgttatcgccctgttgtggtgtgctattgccctgtcttacttccatggtgttgaaggtttaaacacaggcatggccggtaaccctgcaaacgtggtatatgaagcatcgacaggcttattaggcgctgtgggtggttttatggcgattctgggtgtgattattctgccgattacctctggcgataccgcattccgctctgctcgtctgattttggctgagttctttaaaatgccacaggtgactttgccaaaacgtttagtgctggctattccattgtttgtgattggtggcttactcactcaagtcgactttggtgtgatctggcgttactttggtgtggccaactaa

SEQ ID NO: 36489 - protein, 392 aa, Shewanella oneidensis MR-1
MMWFLLCVGLLIGGYFIYGTFVEKVFGINEKRQTPAFSQTDGVDFVPMSKGKVYLIQLLNIAGVGPIFGPILGALYGPSAMLWIVIGCIFGGAVHDYFSGMLSVRNGGQSVPNLAGKYLGKSAKHFMNVFAIVLLLLVGVVFISAPAGLLGKLTGLDVSIFVGIIFVYYLIATVVPIDKIIGRLYPFFGALLFFMSFGLAFAIMFSSEHTLLPNVQAGDFFKNLNPDDMPLWPALFITIACGAISGFHATQSPLMARCVENEKNGRFVFFGAMIGEGVIALLWCAIALSYFHGVEGLNTGMAGNPANVVYEASTGLLGAVGGFMAILGVIILPITSGDTAFRSARLILAEFFKMPQVTLPKRLVLAIPLFVIGGLLTQVDFGVIWRYFGVAN

SEQ ID NO: 36490 - DNA, 2076 bp, Pseudomonas syringae pv. tomato str. DC3000
  CDS (1)..(2076): transl_table=11
atgaaaaataataatagcctgatgcgccacgttccctggctcatcgtcgcaattgtcggggcatgtgcccttggggtcgtggccttgcgccgcggagaggcgatcaacgccttgtggatagtggtcgctgcggtggccatttatctggttgcttatcgttactacagtcttttcatcgccacgcacgtcatgcagctcgatccgctgcgggcgacaccggcggtggtcaacaacgatggtctggactacgtgccgaccaacaaacacatcctgttcggtcaccactttgccgccatcgctggcgcaggcccgctggtcggccctgtcctggctgcgcagatggggtatctgcccggtacgctgtggctgattgccggggtggtactggccggtgcggtgcaggacttcatgatcctgttcctctccacgcgccgtgacggtcgctcgctgggcgatatggttcgcgaggaaatgggccgcattcccggcaccatcgccttgttcggctgcttcctgatcatgatcatcatcctcgcggtgctggcgctgatcgtggtcaaggccctggccgaaagcccgtggggcatgttcacggtcatggcgacgattccgattgcgatgttcatgggcatttacatgcgttacatccgcccgggccgtatcggtgaaatctcgctggtgggcgtgctgctgttgctcggttcgatctgggtcggcggcatggttgcggccgacccgacctgggggccgatgtttaccttcaccggcatccagatcacctggatgctggtgggttacggctttgtggctgcgatgctgccggtctggctgctgttggcaccgcgtgactacctgtcgacgttcctgaaaatcggcaccattctggcgctggcaatcggcatcctgattctggcacccgagctgaagatgccggccctgacccagttcaccgacggcaccggtccggtctggaagggcgcgctgttcccgttcctgttcatcaccattgcctgcggcgcggtatcgggtttccacgcactgatctcctcgggcaccacgcccaagctgctggataacgagaaaaacgcccgttatatcggttatggcggcatgttgatggagtcgttcgtggccatcatggcaatggtcgccgcttcggtgatcgagccaggcgtctacttcgccatgaacagcccggccgctgtggtcggcagcgatgtggtgaccgtcgcgcagacagtgtccagctggggctttgccatcacgccggagcaactgaccgccgtggccaaggacatcggtgaaaacaccatcctggcccgtgccggtggtgcgccgacgcttgctgtggggatcgcgcagatcctccatcaggtactgccgggtgaaaacaccatggcgttctggtatcacttcgcgattctgttcgaggcgctgtttatcctgacggcggttgacgccggtacacgtgccgggcgcttcatgcttcaagacctgctgggcagcttcgttccggccctcaaacgcacagaatcctggacggccaacgctatcggcacaggggggtgcgtggcgctgtggggttatctgctttatcaaggcgtcatcgacccgctgggcggcatcaataccttgtggccgttgttcggtatctccaaccagatgcttgccggtatcgcgttgatgctggccagcgtcgtgctgatcaaaatgaagcgtcagcgctatgtgtgggtcaccatgctgcctgccgtctggctgttgatctgcactgtgacggcgggcctgatcaagctgttcgatgccaaccctgcggtcggcttcctggccctggccaagaaatacagcgcagcggcagatgccggccagattctggcgccggcaaaaaccatggaccagatgcagcacgtgattttcaacgcgtacaccaactccgggttgaccatactgttcctgtttgtggtgttcagcattctgttctacgccatcaaggtgggccgtgcggcctggacgaccgaggcgcgtaccgacaaggaagctccttaccaggccatgccgcccgcgtcgcaggtgtga

SEQ ID NO: 36491 - protein, 691 aa, Pseudomonas syringae pv. tomato str. DC3000
MKNNNSLMRHVPWLIVAIVGACALGVVALRRGEAINALWIVVAAVAIYLVAYRYYSLFIATHVMQLDPLRATPAVVNNDGLDYVPTNKHILFGHHFAAIAGAGPLVGPVLAAQMGYLPGTLWLIAGVVLAGAVQDFMILFLSTRRDGRSLGDMVREEMGRIPGTIALFGCFLIMIIILAVLALIVVKALAESPWGMFTVMATIPIAMFMGIYMRYIRPGRIGEISLVGVLLLLGSIWVGGMVAADPTWGPMFTFTGIQITWMLVGYGFVAAMLPVWLLLAPRDYLSTFLKIGTILALAIGILILAPELKMPALTQFTDGTGPVWKGALFPFLFITIACGAVSGFHALISSGTTPKLLDNEKNARYIGYGGMLMESFVAIMAMVAASVIEPGVYFAMNSPAAVVGSDVVTVAQTVSSWGFAITPEQLTAVAKDIGENTILARAGGAPTLAVGIAQILHQVLPGENTMAFWYHFAILFEALFILTAVDAGTRAGRFMLQDLLGSFVPALKRTESWTANAIGTGGCVALWGYLLYQGVIDPLGGINTLWPLFGISNQMLAGIALMLASVVLIKMKRQRYVWVTMLPAVWLLICTVTAGLIKLFDANPAVGFLALAKKYSAAADAGQILAPAKTMDQMQHVIFNAYTNSGLTILFLFVVFSILFYAIKVGRAAWTTEARTDKEAPYQAMPPASQV

SEQ ID NO: 36492 - DNA, 1485 bp, Vibrio parahaemolyticus RIMD 2210633
  CDS (1)..(1485): transl_table=11
atgatgtggtttctaacttgtgtcgctgccctcatcggcggatacttcatctacggcgctttcgttgagaaaattttcggcatcaatgagaaacgccaaacccctgcacacaccaaaacggatggtgttgactttgttccaatgtcaacaaagaaggtttacctagttcagctacttaacatcgctggtgtaggtcctatctttggcccaatcatgggtgcactttacggcccagccgcaatgctttggattgttgtaggttgtatctttgcaggtgccgtacacgattacttctcaggtatgctttcagtgcgtaacggcggtgcatcagtgccaacgattactggtcgctacctaggtaatggcgcaaaacactttatgaatatctttgccattgtcctgttgcttcttgttggtgtggtattcgtatcagcgccagcgggcatgatcacaaacctaatcaatgatcaaaccagcctaaacgtaagcatgacaacaatggttgtggttatttttgcttactacatcatcgcgacaatcgttccagtagataagatcatcggtcgtttctaccctctatttggcgcactacttatcttcatgtcggttggtctaatgactgcggttgctctatctagcgagcacacagtaatgggtgatttccaagtaacagacatgttctctaacctaaacccaaatgacatgcctttatggcctgcactgttcatcactatcgcttgtggtgcaatctctggcttccacgcaactcagtctccactaatggcgcgttgtatggaaaacgagaaaaacggtcgcttcgtattctacggtgcaatgattggtgaaggtgttatcgctctaatctggtgtgctatcgccctatcattcttcggctctctagaagcgctttctgaagcagtgaaaaacggtggtcctggtaacgtggtatacagcgcgtcatttggtctactaggtgtattcggcggtatcattgctttcctaggtgtggttatcctaccaatcacttcaggtgacacagcgttccgctcaagccgtctaatccttgctgaatacttcaacatggaacagaaaacactacgtaaccgtctactaatggctgtgccgctattcgttatcggtggtgtgttgactcaagtagactttggcatcatctggcgttacttcggcttcgcaaaccaaacaacagcagtaatgatgttgtggactgcgtcagcttacctactgcgtcacaacaaactgcactggattacaactatccctgcaatgttcatgaccacggtatgtgtgactttcatcctaaacaacagctcactaggtttcggcctaccaatgcaagtgtcgactatcgcgggtgtcatcttctccctagtcgttacaggttacgttatcaaaacctctaaaggtaaaggcgaatctgaactggcggatgaagagaaaccacaagcagtaacagaaactgcataa

SEQ ID NO: 36493 - protein, 494 aa, Vibrio parahaemolyticus RIMD 2210633
MMWFLTCVAALIGGYFIYGAFVEKIFGINEKRQTPAHTKTDGVDFVPMSTKKVYLVQLLNIAGVGPIFGPIMGALYGPAAMLWIVVGCIFAGAVHDYFSGMLSVRNGGASVPTITGRYLGNGAKHFMNIFAIVLLLLVGVVFVSAPAGMITNLINDQTSLNVSMTTMVVVIFAYYIIATIVPVDKIIGRFYPLFGALLIFMSVGLMTAVALSSEHTVMGDFQVTDMFSNLNPNDMPLWPALFITIACGAISGFHATQSPLMARCMENEKNGRFVFYGAMIGEGVIALIWCAIALSFFGSLEALSEAVKNGGPGNVVYSASFGLLGVFGGIIAFLGVVILPITSGDTAFRSSRLILAEYFNMEQKTLRNRLLMAVPLFVIGGVLTQVDFGIIWRYFGFANQTTAVMMLWTASAYLLRHNKLHWITTIPAMFMTTVCVTFILNNSSLGFGLPMQVSTIAGVIFSLVVTGYVIKTSKGKGESELADEEKPQAVTETA

SEQ ID NO: 36494 - DNA, 1431 bp, Bacteroides thetaiotaomicron VPI-5482
  CDS (1)..(1431): transl_table=11
atgattacatttaccctgtgcctgctggcgttgatagcaggctatttcacgtatggacgcctgatggagcgcgtctttggtccggacgaccgtaaaacaccggctcttaccaaagccgacggagtagactatattccgttgcctacttggaaaatattcatgattcaattccttaatatcgccggactgggtccgatattcggtgcgattatgggagcgaagttcggtacttcttcttatttatggattgtattgggaagtatttttgcaggcgctgttcatgattactttgccggaatgctttctttacgtcatgggggagagagtcttcccgaaatcataggccgttatctgggactgactaccaaacagataatgcgtggatttactgttcttctgatgattctcgtcggttccgtctttgtagccggacctgccggactattggccaaactgactccggaaagtctggacgctactttttggattgtcgtggtcttcctatattatattctggctaccctgcttccggtcgataagatcatcggtaaaatatatccgttgtttgcagtagccttgctgtttatggcagtcggtatcctggtaatgctttatgtcaatcaccctgttttgcccgaactatgggacggcttgcagaataccaatccggatgccagtgaactgccgatcttcccgattatgtttgtgagtatcgcctgtggtgccatatccggtttccatgccacgcagagtcctttaatggcccgctgcatgacttcggaacgtcatggacgtccggttttctatggtgcaatgattaccgaaggcatcgttgctttgatatgggcggcagccgctacttatttcttccatgaaaatggaatggaagaaagtaatgcttccgtgatagtagacgctatcactaaagactggctgggagctatcggtggagtgctcgccattcttggagtaattgcggctcccattacttcgggagataccgctttccgttccgcccgtctgattgtggcggactttctgggactggaacaaaaaagtatgcgccgtcgtttatacatttgtattccgatgttcgcagtagctatcggtctgcttctttatagcttgcgtgacgcggacggatttaacatgatctggcgttactttgcctgggccaaccagacattggcggtgttcaccctctgggctatcacagtctaccttgtggtagccaaaaagccttattggattacgctgatccccgccttatttatgacgagtgtttgttctacttatatatgtattgctcccgaagggctgggactctcgcatatagtttcctactgcatcggtataggatgcgtagtggtagctattgcctggttctttatctggctgggaaaacaaaaaactagaaaactatcagaatga

SEQ ID NO: 36495 - protein, 476 aa, Bacteroides thetaiotaomicron VPI-5482
MITFTLCLLALIAGYFTYGRLMERVFGPDDRKTPALTKADGVDYIPLPTWKIFMIQFLNIAGLGPIFGAIMGAKFGTSSYLWIVLGSIFAGAVHDYFAGMLSLRHGGESLPEIIGRYLGLTTKQIMRGFTVLLMILVGSVFVAGPAGLLAKLTPESLDATFWIVVVFLYYILATLLPVDKIIGKIYPLFAVALLFMAVGILVMLYVNHPVLPELWDGLQNTNPDASELPIFPIMFVSIACGAISGFHATQSPLMARCMTSERHGRPVFYGAMITEGIVALIWAAAATYFFHENGMEESNASVIVDAITKDWLGAIGGVLAILGVIAAPITSGDTAFRSARLIVADFLGLEQKSMRRRLYICIPMFAVAIGLLLYSLRDADGFNMIWRYFAWANQTLAVFTLWAITVYLVVAKKPYWITLIPALFMTSVCSTYICIAPEGLGLSHIVSYCIGIGCVVVAIAWFFIWLGKQKTRKLSE

SEQ ID NO: 36496 - DNA, 2067 bp, Bacillus cereus ATCC 14579
  CDS (1)..(2067): transl_table=11
ttgaaatcgatcttactttggggcgttattacagcagtaggagcaggtgcttttggggtaatagctttatcacaaggtgaaaccattaatgctgtatggctcttagtagctgccgtatgtgtatatgcagttgcttatcgcttttatagtagatttatagcgagaaaggtttttaatttagatgataatcggcaaacaccagcccatacattaaatgatgggaaagactatgttccaacaaataagtgggtattgtttggacatcactttgcagcgattgctggagcgggacctttagtaggaccgattttagcggcacaaatggggtatttaccagggaccatttggattattgttggggtagttgttgcgggggctgtccaagattttgttattttatttgcttcaatgagacgtaatggtaaatcgttaggagaaatgattaaagatgagattggacctgttacaggactaattgcaatgataggtattttaggaattatgattattttattagcagtattagcgttggtcgtagtaaaggcactaatcggaagtccttggggaatgtttacgatagcagcaacgattcctatcgctattttaatgggagtttatatgcgctatattaggcctggtcgtgttggagaaggatcagtaattggtattatcctacttattttatctcttgttggaggacagtatgtagcagaaaatccaacacttgcaagtatgttcacatttagtggtgaaacaattgctattatgcttattgtatatggatttattgcatctgcattaccagtttggatgcttttagcaccacgtgattatttaagtacatttttaaaagtcggaacaattgtagggttagcaatcggtatcttaattgtagcaccagatttacaaatgccagcagtttcgaaatttattgatggaactggtcctgtgttctctggaaacctattccctttcttatttattactattgcttgtggtgcagtgtctggattccatgctcttgtttcatcaggtacgacgccgaagatgattgagcaagagggacacgcacagccaatcggttatggagcaatgttaatggagtcgtttgtagcagcgatggcgatgattgcagcttgtgtattaacaccgggaacgtattttgcaattaatagtcccgcagcacttatcggtacagatgtctcgcaggcagctcaagttatttcctcatggggatttgctattacaccaaatgaactaaaagatctcgctgtaaatgttggagagcaaacgattttatcacgtacaggtggtgcgccaacattagcgataggtatggcatatattttctcacaagtaataggtggaacggccatgatggcattttggtatcattttgcgattctctttgaagccctatttattttaacaacgattgatgccggaacgcgtgtcggccgatttatgattcaagatattttagggcatgtatataagccatttgggaaaacggattctacattagcaaatgtaatcgctacaacattatgtgtattagggtggggatatttcttataccaaggggtaatagatccgctcggtggaattaatacattatggccacttttcggtattgcaaatcaaatgctagcaggtattgcattattacttggaacgacaattttgttcaaaatgggaaaaaaggcgtacgtttgggtaacacttattccaactgtcgggttgctgattgtaacaatgacggcggggtatcaaaagctatttcatgaaaatcctaaaattggatttctatcgcatgcaaaggtatttcagagagcattagatgagggaaaagtgttagcgccagctaaaaatgtcgctcaaatgaagcaaattattttcaatgattatattgatgcagcgctttgtgggatttttatgatagttgtaatcgctgtgttaatttcagcacttcgaatttggatacaagtattaagaaataagccaatgccgttaaaagaggcaccatatattcctagagatgaaagtgagtcgaggaactatgcttaa

SEQ ID NO: 36497 - protein, 688 aa, Bacillus cereus ATCC 14579
MKSILLWGVITAVGAGAFGVIALSQGETINAVWLLVAAVCVYAVAYRFYSRFIARKVFNLDDNRQTPAHTLNDGKDYVPTNKWVLFGHHFAAIAGAGPLVGPILAAQMGYLPGTIWIIVGVVVAGAVQDFVILFASMRRNGKSLGEMIKDEIGPVTGLIAMIGILGIMIILLAVLALVVVKALIGSPWGMFTIAATIPIAILMGVYMRYIRPGRVGEGSVIGIILLILSLVGGQYVAENPTLASMFTFSGETIAIMLIVYGFIASALPVWMLLAPRDYLSTFLKVGTIVGLAIGILIVAPDLQMPAVSKFIDGTGPVFSGNLFPFLFITIACGAVSGFHALVSSGTTPKMIEQEGHAQPIGYGAMLMESFVAAMAMIAACVLTPGTYFAINSPAALIGTDVSQAAQVISSWGFAITPNELKDLAVNVGEQTILSRTGGAPTLAIGMAYIFSQVIGGTAMMAFWYHFAILFEALFILTTIDAGTRVGRFMIQDILGHVYKPFGKTDSTLANVIATTLCVLGWGYFLYQGVIDPLGGINTLWPLFGIANQMLAGIALLLGTTILFKMGKKAYVWVTLIPTVGLLIVTMTAGYQKLFHENPKIGFLSHAKVFQRALDEGKVLAPAKNVAQMKQIIFNDYIDAALCGIFMIVVIAVLISALRIWIQVLRNKPMPLKEAPYIPRDESESRNYA

SEQ ID NO: 36498 - DNA, 2073 bp, Nitrosomonas europaea ATCC 19718
  CDS (1)..(2073): transl_table=11
atgaatcagttaagcaagtgggtaggttggtcactgttttccctgctgggtgcggcagctttcggtgtcattgccctcaaccgaggtgaatcgattagtgcaatctggattgttattgcggcagtgtgtgtgtatttgatcgcctttcgtttctatagtcagttcattgccaatcgggtattgaagctggatacaacgcgtatgactccagcatataagcacaatgatggactggatcatgttccaaccaataaatatgtattgttcgggcatcattttgctgcgattgccggagccgggccactggttgggccgattttggcagcacaaatggggtatttgccgagtatgttgtggctgcttgctggagtcgtattcgccggtgcagtgcaggatttcatcgtactgttcatatcgatgcggcgtaatgcccggtcactcggtgatctgatcaaatccgaactggggcatgttcccggtatgatcgcattgttcggtgcgttcttcatcatgctgattttacttgctgtattgtcgctgattgtcgtcaaggcattggctgaatcaccatgggggacattcaccgttgcggcgacgatccctatcgcaatgttcatggggatttattcgcgttatttccggccgtgtgcaattgctgagatatcgctgatcggatttacgctgctgattctgtcgatcatagccggccagtatgttcaggaggaccctgcatgggcagcggtgttctcggcaaccggtgaacaactgacctgggtattgattggctatggctttattgcctcagtattgccggtatggttgttgctggcgccacgcgattatctgtcgacttttcttaaaattggcacaatcgttggtttggcaatcggtgtcattattctttcaccggaattgaaaatgcctgcgctgacacaattcattgatggttcaggcccggtctggtcgggtgatctgtttccgttcctgttcgtgacagtagcctgtggtgcggtttccggtttccattcgttgatcgcatccggcactacacccaaaatgatccagaatgaaactgatgcacgtttcattggttacggcgcaatgttgatggaatcgtttgtcgcgatcatggcgctggttgccgcagcagcacttgagcccggtatttattttgccatgaatagtccggcggcgatcatcggcactacggtggaatcggctgtacaaacgatttcccagtgggggttccatatcactccggaaatgatcacacaaactacacagaacgtcggtgaacacagcatcatctcgcgaacgggcggtgcgccaacgctggcggtgggtatggcgcagattttgtcgggagtgatcggtgatactgcgatgatggcgttctggtatcactttgctattttatttgaagcattatttattctgacggcggttgatgccgggacgcgtgccgggcgttttatgttgcaggatctgctcggttcattcattccggcgatgaaacggactgattcgctgacagcaagcctgatagctacaggtatctgtgtatccggctgggggtatttcctgtatcagggcgtgatcgatccattggggggtatcaataccctgtggccgctgttcgggatcgccaaccagatgctcgccggtatcgcactgatcctgtgcacatgtgtgctgttcaggatgaagctcgatcgctttgcctggattacagtgattccggcagtatgggtttgcatttgtacactgactgctgcctggcaaaaaatatttcatgataatccgcggatcggttttctcgcgcatgcagaaaaatatcaggatgcagtgatacaagatattgtgctggcacctgcccggtcgatcgggcaaatgcaacaggttatatttaatgactatatcaacgttacactgacggcattgttcatggcggtactcatcagcatactgatgttcggtattcgaactattctgcaggcacgtatcatccttcatccgacaactcgggaagcgccgttcgaactgttacctgcttatgcatctattgagaaataa

SEQ ID NO: 36499 - protein, 690 aa, Nitrosomonas europaea ATCC 19718
MNQLSKWVGWSLFSLLGAAAFGVIALNRGESISAIWIVIAAVCVYLIAFRFYSQFIANRVLKLDTTRMTPAYKHNDGLDHVPTNKYVLFGHHFAAIAGAGPLVGPILAAQMGYLPSMLWLLAGVVFAGAVQDFIVLFISMRRNARSLGDLIKSELGHVPGMIALFGAFFIMLILLAVLSLIVVKALAESPWGTFTVAATIPIAMFMGIYSRYFRPCAIAEISLIGFTLLILSIIAGQYVQEDPAWAAVFSATGEQLTWVLIGYGFIASVLPVWLLLAPRDYLSTFLKIGTIVGLAIGVIILSPELKMPALTQFIDGSGPVWSGDLFPFLFVTVACGAVSGFHSLIASGTTPKMIQNETDARFIGYGAMLMESFVAIMALVAAAALEPGIYFAMNSPAAIIGTTVESAVQTISQWGFHITPEMITQTTQNVGEHSIISRTGGAPTLAVGMAQILSGVIGDTAMMAFWYHFAILFEALFILTAVDAGTRAGRFMLQDLLGSFIPAMKRTDSLTASLIATGICVSGWGYFLYQGVIDPLGGINTLWPLFGIANQMLAGIALILCTCVLFRMKLDRFAWITVIPAVWVCICTLTAAWQKIFHDNPRIGFLAHAEKYQDAVIQDIVLAPARSIGQMQQVIFNDYINVTLTALFMAVLISILMFGIRTILQARIILHPTTREAPFELLPAYASIEK

SEQ ID NO: 36500 - DNA, 2277 bp, Mycobacterium bovis AF2122/97
  CDS (1)..(2277): transl_table=11
gtggcagcgccgaccccgtcgaatcggatcgaagaacgctccggacacgccagctgcgtccgcgccgatgccgacctgccacccgtggccatcctcggtcgctcccccatcacgcttcggcacaagatcttcttcgtggccgttgccgtgatcggcgctctcgcctggaccgtcgtcgcgttcttccgcaacgagccggtcaacgcggtctggatcgtggtcgcagcgggctgcacctacatcatcgggttccggttttatgcgcggctgatcgaaatgaaagtcgtccgtccccgcgacgatcacgccaccccggccgaaatcctcgacgacggcaccgactacgtgcccaccgaccggcgggtggtattcggacaccacttcgccgccatcgccggtgccgggccgcttgtcggaccagtactggccacccagatgggttacttacccagcagcatctggattgtcgtcggcgcggtgctggccggatgtgtccaggactacctggtgttgtggatctccgtgcggcggcgtggccgctccctgggtcagatggttcgcgacgaactcggcgccaccgccggagtggccgccctcgttggaatcccggtcattatcaccattgtgatcgcggtgctggcgctggtggtcgtgcgggccctggccaagagcccatggggcgtcttctcgatcgccatgaccatccccatcgccatcttcatgggctgctacttgcggttcctacgtcccgggcgggtgtcggaagtttcattgatcgggatcggactgctgctgctcgccgttgtctccggtgattgggttgcccatacctcctggggcgcagcgtggttcagcttgtcaccggtgacactgtgttggcttctcatcagctatggcttcgcagcttcggtgctgccggtgtggctgctgctcgcgccacgcgactacctgtcaacgttcatgaaggtcggcaccatcgcgcttctcgcgatcggtgtttgtgcggctcacccgatcatcgaggccccagcggtgtcgaaattcgccggtagcggcaacggcccggtgttcgccggctcactgtttccattcctgttcatcaccatcgcgtgcggggcgctgtctggattccacgcgctcatctgctcgggcacgacgccgaagatgctggagaaggaaggccagatgcgcgtgatcggctactgcggcatgatgaccgagtccttcgtcgccgtcatagcactactcaccgcggcgatcctcgaccagcacctatacttcaccctcaacgcgccgtccctgcatacccacgacagcgcagccaccgccgccaagtacgtcaacgggctcggtttgacgggctcaccggtgaccccagaccacatcagccaggccgccgccagcgtcggcgaacagacgatcgtgtcgcgcaccggcggtgcgccgacgctggcgttcggcatggcggagatgctgcatcgagtggtcggcggtgtgggcctcaaggcgttctggtatcacttcgcgatcatgtttgaggctctgttcatcctcaccaccgtcgacgccggcaccagggccgcgcgcttcatgatctccgatgcgctgggcaactttggcggtgtgctgcgcaaactgcagaatccgagctggcgtcccggtgcgtgggcttgcagtttggtggtcgtcgcggcgtggggcagcatcctgctgctcggtgtgaccgatccgctgggcggcatcaacacgctgttcccgctgttcggcattgccaaccagttgcttgccggaattgcgccgaccgtcatcaccgtcgtcgtcatcaagaaggggcgactgaagtgggcttggataccgggtattccactgctgtgggatctggcggtcaccctgaccgcatcgtggcagaagatcttctccgctgatccttctgtcggctactggactcagcatgctcactacgcggcagcccagcacgcaggcgagaccgcgttcggctcggccaccaacgccgatgagatcaacgacgtcgtccggaacacattcgtccagggcaccctgtcgatcgtcttcgtggtggtcgtcgtgctggttgttgtcgccggagtcatagtggcgctgaagacaattcgcggccgcggcataccgttggccgaggacgatccggcgccgtcgacgttgttcgcgcccgctggcctgattcctacagccgcagagcgaaagttgcaacgacgtttgggcgcgccggcctcggcttccgtcgcggcgcccgactag

SEQ ID NO: 36501 - protein, 758 aa, Mycobacterium bovis AF2122/97
MAAPTPSNRIEERSGHASCVRADADLPPVAILGRSPITLRHKIFFVAVAVIGALAWTVVAFFRNEPVNAVWIVVAAGCTYIIGFRFYARLIEMKVVRPRDDHATPAEILDDGTDYVPTDRRVVFGHHFAAIAGAGPLVGPVLATQMGYLPSSIWIVVGAVLAGCVQDYLVLWISVRRRGRSLGQMVRDELGATAGVAALVGIPVIITIVIAVLALVVVRALAKSPWGVFSIAMTIPIAIFMGCYLRFLRPGRVSEVSLIGIGLLLLAVVSGDWVAHTSWGAAWFSLSPVTLCWLLISYGFAASVLPVWLLLAPRDYLSTFMKVGTIALLAIGVCAAHPIIEAPAVSKFAGSGNGPVFAGSLFPFLFITIACGALSGFHALICSGTTPKMLEKEGQMRVIGYCGMMTESFVAVIALLTAAILDQHLYFTLNAPSLHTHDSAATAAKYVNGLGLTGSPVTPDHISQAAASVGEQTIVSRTGGAPTLAFGMAEMLHRVVGGVGLKAFWYHFAIMFEALFILTTVDAGTRAARFMISDALGNFGGVLRKLQNPSWRPGAWACSLVVVAAWGSILLLGVTDPLGGINTLFPLFGIANQLLAGIAPTVITVVVIKKGRLKWAWIPGIPLLWDLAVTLTASWQKIFSADPSVGYWTQHAHYAAAQHAGETAFGSATNADEINDVVRNTFVQGTLSIVFVVVVVLVVVAGVIVALKTIRGRGIPLAEDDPAPSTLFAPAGLIPTAAERKLQRRLGAPASASVAAPD

SEQ ID NO: 36502 - DNA, 2172 bp, Helicobacter hepaticus ATCC 51449
  CDS (1)..(2172): transl_table=11
atgaacaaaattgtaagtataggaatttggggacttatctcacttttaggcgcttggtgctttggtgttttagcattgcatacaggagaaagtatttcagctgtatggattgtcgtagcagcagtatgtatttatgcaatagcatatcgttactattcaaagtatattgctcataaggtgcttgagcttgatgataatcgtgcaactcctgccgttgtcaataatgatggacgtgatttttgcccgacaaataaaatagtgctttttggacatcattttgctgcaattgctggagctggtccacttgtgggtccaattttggcagcgcaaatgggatatttgccaagtatgatttggattgtggtaggtgtggtgcttgctggtgcagttcacgatttcacagtgctttttatctctatgcgccgcaatggtaaatctctaggtgaaattattaaattagagcttggtaagcctgtaggctctattgcaatgatagggattctaggtattatgatgcttattattgcaattttggcacttgtcgtagtaaatgcacttgcagaatctccttggggattatttacgattgcgatgacgattcctattgctatttatatgggaattcatatgagattcttacgtccgggtaaaattggcgaagcaagtattattggatttgttcttttgcttcttgcgttgttttatggacgcgatgttgcggctcaccctgaacttgctgaattttttacactcacacccattcagcttacctatgtaatgattgtatatggatttgttgcggcaatcctgcctgtttggtttttgcttgcacctcgtgattatttaagcacatttttgaaaatcggtgtgattgtattaatggcagggggtatcttagtagttgctcctgatgtgcaattcccaagtacaactaagtttgttgatggcacgggaccagtatttagcggggagcttttcccatttctttttataacaattgcgtgtggagcgattagcggatttcacgcacttatttcaagtgggacaacaccaaaaatgctagaaaaagaatctcacgcgagaatggtaggctatggttctatggttatggaatctgcagttgcagttatggcacttgtagctgctgtgattcttactccgggcttgtatttttctatcaatgttgctcctgcagcgcttggaacagcaggcgtaaaagatgtcgcagaagctgcagcaatagctgcacagacaattagccaatggggatttgtgattactcctgaacaaattttgcacacagcacaagagattggcgaaaatagtattttaagtaaaacaggtggtgcgcctacatttgcgattggtttagccactattatttctcaagtgccactttttaatcaaggttctatggcattttggtatcactttgcgattttgtttgaagcactctttattttaactgctgttgatgcaggcacaagagcaggacgctttatggtgcaagatgtattaggaaatgtatataaacctattggaaacattcactcaatgttttggggtgttgtggcaacactcatttgtgtagttggttggggatatatcctttatcaaggtatcacagacccacaaggtggagtaaaatcgctttggacactctttggcgtatcgaatcaaatgcttgcaggtatggcattactcacggttattgtggtgcttttcaaaatgggtaaagcaaaacaagcgtgggttgctatacttcctgcagcgtgggtgctttttagcacaatgtatgctggtgtatgtaaacttcttcctgcaaatggcgaaaaagtccatgatgcagtttctcatattgcattgtggcaaatcaatggtcaaaaggctgcagcaaaaatgcaagaaattgcagaagcaaaggcttcagggcttgatgttgatatgattgcaaatttaagtgctgaagcaacaaaatttgctacaattgccaataataacttaatcaatgctttcctttgcggattgtttatgtttattacttgtcttgttcttattcaatgtgtgaggatttgtttgcgctgttctaaaggcacaaatgatattccacttgctgaaactccttatcgtaaagcaagtgaatttgaaaggagtatggcaagtatacactag

SEQ ID NO: 36503 - protein, 723 aa, Helicobacter hepaticus ATCC 51449
MNKIVSIGIWGLISLLGAWCFGVLALHTGESISAVWIVVAAVCIYAIAYRYYSKYIAHKVLELDDNRATPAVVNNDGRDFCPTNKIVLFGHHFAAIAGAGPLVGPILAAQMGYLPSMIWIVVGVVLAGAVHDFTVLFISMRRNGKSLGEIIKLELGKPVGSIAMIGILGIMMLIIAILALVVVNALAESPWGLFTIAMTIPIAIYMGIHMRFLRPGKIGEASIIGFVLLLLALFYGRDVAAHPELAEFFTLTPIQLTYVMIVYGFVAAILPVWFLLAPRDYLSTFLKIGVIVLMAGGILVVAPDVQFPSTTKFVDGTGPVFSGELFPFLFITIACGAISGFHALISSGTTPKMLEKESHARMVGYGSMVMESAVAVMALVAAVILTPGLYFSINVAPAALGTAGVKDVAEAAAIAAQTISQWGFVITPEQILHTAQEIGENSILSKTGGAPTFAIGLATIISQVPLFNQGSMAFWYHFAILFEALFILTAVDAGTRAGRFMVQDVLGNVYKPIGNIHSMFWGVVATLICVVGWGYILYQGITDPQGGVKSLWTLFGVSNQMLAGMALLTVIVVLFKMGKAKQAWVAILPAAWVLFSTMYAGVCKLLPANGEKVHDAVSHIALWQINGQKAAAKMQEIAEAKASGLDVDMIANLSAEATKFATIANNNLINAFLCGLFMFITCLVLIQCVRICLRCSKGTNDIPLAETPYRKASEFERSMASIH

SEQ ID NO: 36504 - DNA, 1905 bp, Rhodopirellula baltica SH 1
  CDS (1)..(1905): transl_table=11
atgagcactcttgtcattgcgatcctgtcgatggtcgcgtttgtcgtcgcctaccacacctatggtcgctatctcgccacgaagttgtttcgtctgagtggtgacgaaccgatgcccagcgtttcgttgcgggatgacgtcgactttgtgccaacggatcggtcgattgtttttggccatcatttcaccagcatcgctgggacgggcccaatcgttgggccagcactggcggttttttggggatggttgccggcgttgctttgggttgtgttcggctccattttgatcggcggcgtgcacgacctggccgctttggtgatttcgattcgaaatcgaggtgagtcgatcgggcaggcagcggggcgattgatatcgccacgagccaaggttctgttcttgattgtcttggcattggcactgtcgattgttttggccgtgttcgggttggtgatcgcgaacatattcaagctgtatcccgaatcggttttgtctgtttggacggcgatgccggtggcggcgttcatcggttgggcggtgattcggcgcggaggcaatttggttctgccgtgtttgattggcctcggaattctctatctgacggtttatttgggaacgacgacgttgccgttggatctagctgaggtgttgcctgcggatgcggtctacatgacccccgtggtcgtttggactttgcttttattgatttatgcctttttcgcatcggtgttgccggtttggttgttgcttcagcctcgcgacttcttgaacagtttgcagttgggtgtggctttgatcctgttggtggctggtttggcagttgcatcgctgaacgggcaagccaacctggccactgcggcacccgcgatcgccaaacaagtacccgcggacgctccgccgatgttgccgtttttgttcatcaccattgcctgcggtgcttgcagtggatttcattgcttggtcagcagtggaacgacgagcaagcaactcaagaacgctcgcgatgctcagatgattggatatggatccatgctgggcgaaggcatgttggccgtgttggtgatcttggcctgttgcgcgggagtcggcatgggccggttaactcgcgacacgtcatcgggatcgatcgagatcacacgtcaagaacccatcgccatggcggaggtttctgcggaagaagccgcgttggatggctcggcagcgtggcgttcttactaccgaacgggcaggacgaccgctgatgggactgccgccgcgggtggcggatggaaggggcaagggctcgacaaaaagctggctgctttcatcgacggtggcgctaacttcatttcggcaatcggtatcccgctgaagtatggcgttgcaatcatggcggtgatggtcgcgtgtttcgccgcgacaacactggatactgcgactcgtttgcaacgctatgtgatcagtgaactcgcctcttcagctggttggcatgccggtaccaacaaatacgtcgcaacaacgatcgctgtgggcattggaatggccatcgccgttttcgcgggcgacagccccggtaaaggtggtttgatgttgtggccgttgtttggtgcaaccaatcagctgttggctggtttggctttgatggtcgccgttttctatcttgcgcgacgcagccggcccgttgccgttctggcgatcccgatggggatgatgttgttgttgcccgcgtgggccatggtctttgatttggttaacaattggtggccgcagcgagactacgtgctgattggatttgggaccttggttctgatcctacaggcttggatggttggcgaagcggtttcgctatggcgacgtttgcccgaagtgatgaaggaagccaaggcgaatggcgaaccggcaagcactgatccgctcgcagcgccttga

SEQ ID NO: 36505 - protein, 634 aa, Rhodopirellula baltica SH 1
MSTLVIAILSMVAFVVAYHTYGRYLATKLFRLSGDEPMPSVSLRDDVDFVPTDRSIVFGHHFTSIAGTGPIVGPALAVFWGWLPALLWVVFGSILIGGVHDLAALVISIRNRGESIGQAAGRLISPRAKVLFLIVLALALSIVLAVFGLVIANIFKLYPESVLSVWTAMPVAAFIGWAVIRRGGNLVLPCLIGLGILYLTVYLGTTTLPLDLAEVLPADAVYMTPVVVWTLLLLIYAFFASVLPVWLLLQPRDFLNSLQLGVALILLVAGLAVASLNGQANLATAAPAIAKQVPADAPPMLPFLFITIACGACSGFHCLVSSGTTSKQLKNARDAQMIGYGSMLGEGMLAVLVILACCAGVGMGRLTRDTSSGSIEITRQEPIAMAEVSAEEAALDGSAAWRSYYRTGRTTADGTAAAGGGWKGQGLDKKLAAFIDGGANFISAIGIPLKYGVAIMAVMVACFAATTLDTATRLQRYVISELASSAGWHAGTNKYVATTIAVGIGMAIAVFAGDSPGKGGLMLWPLFGATNQLLAGLALMVAVFYLARRSRPVAVLAIPMGMMLLLPAWAMVFDLVNNWWPQRDYVLIGFGTLVLILQAWMVGEAVSLWRRLPEVMKEAKANGEPASTDPLAAP

SEQ ID NO: 36506 - DNA, 1587 bp, Haemophilus ducreyi 35000HP
  CDS (1)..(1587): transl_table=11
atgttatggtttttcttttgtgtagcaatgcttttagttggctactttatttacggaaaagtggttgaacggatctttacgatcaatccccaaaaaatgacccctgctcatgcaatgagtgatggtgttgattatatgccaatgtcaaaaaccaaaatttggctgattcaattattaaatatcgcaggcaccggtcctattttcggaccaatcttaggtgcattatatggtcctgttgcaatgctttggattgttctaggttgtatcttcgcaggtgcagtacatgattatttctctggtatgttaagcgtccgtaacggcggtgcaacaatgcctgtattagccggcaaatacttaggccgtcctgtcaaagtcttcatcaatataatggcattacttttattattactcgttggtgttgtattcgttgctagccctgcgcaattaatggccactattacaatggatgtattaggtggtactagtggtgcattacagttaaatgatgctgaaacagttcaccaatcattacaaacaacaggtttaacggtttggggaatggataaagcgacgattatttccgtttggacgctcatcatcttctgttactacattttagcgacattattgcctgtagataaaatcatcggccgtatttacccgctatttggtgcattactattatttatgtctatcggtatggtatatggcttagtatctgcacactttagcgcacaagatccaattgatttcttccggactattaatgctgatggtcaaggattaacgtgggaaaaattcacgcagaatttccaagttaaaggtgatgttcctatatggcctttattgttccttactatttcttgtggtgcattgtcaggcttccatgcaacacaatcacctttaatggcgcgttgtgctaacaacgaaagtgacggtcgtttcattttctacggcgcaatgatcactgaaggcttaattgcattagtatggtgtactgttgggctttcattctatgaaaatccacaaatgctacaagatgctatttcagcaggctcaccatctaaagttgtttatgatagttcattacatttcttaggttttattggtggtatttttgcagtattaggtgtggtggtattgccaatcacttcgggtgatactgcattccgtgcagcacgtttacaattagcggaaatcttcaaaattgagcaacgttcattaactaaacgcctaatgattgcaatcccattatttacgcttggttttatcgtttcaaaaatcgactttagtgtattatggcgctacttcacgtgggcgaatcaaacaacagcaatgattatgttatggacagcagcagcctacctttatcgttataaaaaattccattgggtatgttcaattccagcttggtttattacaaccgtttgttcaacatacttattctataacaaaatcggcttcggcttagattatcagctttctgtttatcttggctttgccacaaccattatctgcattgtgatgttcttcaaattacttaaaccactaagtgataacgatgaaacaacaccagtagaaaactaa

SEQ ID NO: 36507 - protein, 528 aa, Haemophilus ducreyi 35000HP
MLWFFFCVAMLLVGYFIYGKVVERIFTINPQKMTPAHAMSDGVDYMPMSKTKIWLIQLLNIAGTGPIFGPILGALYGPVAMLWIVLGCIFAGAVHDYFSGMLSVRNGGATMPVLAGKYLGRPVKVFINIMALLLLLLVGVVFVASPAQLMATITMDVLGGTSGALQLNDAETVHQSLQTTGLTVWGMDKATIISVWTLIIFCYYILATLLPVDKIIGRIYPLFGALLLFMSIGMVYGLVSAHFSAQDPIDFFRTINADGQGLTWEKFTQNFQVKGDVPIWPLLFLTISCGALSGFHATQSPLMARCANNESDGRFIFYGAMITEGLIALVWCTVGLSFYENPQMLQDAISAGSPSKVVYDSSLHFLGFIGGIFAVLGVVVLPITSGDTAFRAARLQLAEIFKIEQRSLTKRLMIAIPLFTLGFIVSKIDFSVLWRYFTWANQTTAMIMLWTAAAYLYRYKKFHWVCSIPAWFITTVCSTYLFYNKIGFGLDYQLSVYLGFATTIICIVMFFKLLKPLSDNDETTPVEN

SEQ ID NO: 36508 - DNA, 2067 bp, Chromobacterium violaceum ATCC 12472
  CDS (1)..(2067): transl_table=11
atgcaacagatcaaacagtgcgcggtctggctgctggtggcgctggcgggggcgacggccttcgccatggtggcgctcaaccgcggcgagacgatcaacgcggtgtggctggtggtggccgccttgtcggtgtacgcgatcgcctaccgcttctatggccgtttcatcgccgacaaggtgctggagctcgacccgcgccggctgacgccggcggaaaagttcaacgacgggctcgattatgtgcccaccaacaaatgggtggtgttcggccaccacttcgccgccatcgccggcgccggtccgctggtggggccggtcctggccgcgcagatgggctatctgcccggcacgttgtggattctggtcggcgtgatgctggccggcgcggtgcaggacttcctgaccctgttcctgtcgatgcgtcgcgacggcaagtcgctgggcgagatgatacgccaggagatgggcgacgtggccggcgtgatcgcgtcgataggcgtgctgatgatcatggtgatcctgctggcggtgctggcgctggtggtggtcaaggcgctggccgacagcccgtggggcaccttcaccatcgcctgcacgataccgatcgcgctgttcatgggcgtgtacacccgcttcatccgtccgggcaagatcggcgaggtgtcggtgctgggcttcatcctcttgatcctggccatcgtctatggcggcgacgtcgccaagagcgcgacgctggcgccgctgttcacgctgaagggcaccacgctggcctggacgctgattggctacggcttcgtcgcctcggtgctgccggtgtggctgctgctggcgccgcgcgactacctgtccaccttcctcaagatcggcaccatcgtcggcctggccatcggcatcctggtggtggcgccgccgctgcacatgccgtcggtcaccaagttcatcgacggcagcggcccggtgttcgccggcaacctgttccccttcctgttcatcaccatcgcctgcggcgcggtgtccggcttccactcgctggtggcttccggcaccacgcccaagctgatcgagaacgaatcccacgcccgcatgatcggctacggcgcgatgctggtggaaagcttcgtcgccatcatggcgctgatcgccgcctgcgtgctggatccgggcgtctatttcgcgatgaacagcccggcggcgctgatcggcaagaccgcggcggatgccgcccaggtgatttcgggctggggcttcgtcattacgccggacgcgctgacccagctggcggccgacgtcggcgagcacaccgtgctgtcgcgcgccggcggcgcgccgacgctggcggtgggcatggcccatatcctgtccggtgtgatcggcggcaagacgatgatggcgttctggtaccacttcgccatcctgttcgaggccttgttcatcctcaccacggtggacgccggcacccgcgtgctgcgattcatgatccaggacctgctgggcctagtggtcaaaccgatggccaacaccgagtcgtgggcggccaacttcgtcgccaccggcctcgcggtcggggcctggggctatttcctgtaccagggcgtggtggatccgctgggcggcatcaacacgctgtggccattgttcggcatcgccaaccagatgctggccggcatcgcgctgaccctggccaccgtggtgctggtgaaaatgcggaaaacccgctacgtgtgggtgaccgcgctgcccaccctctggctgctgctggccacgctgaccgccggctggcagaagctgttccattccagccccaagatcagcttcctgacgcatgccgacaagttctccgcggcggcggccaagggcgaggtgctggcgccggccaagaacatggcgcaaatgcagcagatcatcttcaatgattatgtggacgccacgctgactgccctgttcatggcggtggtgctggcgatgctggtgttcggcatctacgtgatccgcaaatcgctggcggtgaagtgggcgacggcgaaggaagtgccggcgatataccggcaggagggcgccaatggctga

SEQ ID NO: 36509 - protein, 688 aa, Chromobacterium violaceum ATCC 12472
MQQIKQCAVWLLVALAGATAFAMVALNRGETINAVWLVVAALSVYAIAYRFYGRFIADKVLELDPRRLTPAEKFNDGLDYVPTNKWVVFGHHFAAIAGAGPLVGPVLAAQMGYLPGTLWILVGVMLAGAVQDFLTLFLSMRRDGKSLGEMIRQEMGDVAGVIASIGVLMIMVILLAVLALVVVKALADSPWGTFTIACTIPIALFMGVYTRFIRPGKIGEVSVLGFILLILAIVYGGDVAKSATLAPLFTLKGTTLAWTLIGYGFVASVLPVWLLLAPRDYLSTFLKIGTIVGLAIGILVVAPPLHMPSVTKFIDGSGPVFAGNLFPFLFITIACGAVSGFHSLVASGTTPKLIENESHARMIGYGAMLVESFVAIMALIAACVLDPGVYFAMNSPAALIGKTAADAAQVISGWGFVITPDALTQLAADVGEHTVLSRAGGAPTLAVGMAHILSGVIGGKTMMAFWYHFAILFEALFILTTVDAGTRVLRFMIQDLLGLVVKPMANTESWAANFVATGLAVGAWGYFLYQGVVDPLGGINTLWPLFGIANQMLAGIALTLATVVLVKMRKTRYVWVTALPTLWLLLATLTAGWQKLFHSSPKISFLTHADKFSAAAAKGEVLAPAKNMAQMQQIIFNDYVDATLTALFMAVVLAMLVFGIYVIRKSLAVKWATAKEVPAIYRQEGANG

SEQ ID NO: 36510 - DNA, 1809 bp, Chromobacterium violaceum ATCC 12472
  CDS (1)..(1809): transl_table=11
atggatcacgcattgacttttgtgatcggcagcctgtgcattcttgcgatctgctaccgcctgtacggggtattcttcacgcgcaaggtgctgggcgtcgacgacagcgccgtcaccccctctcacgaactgaaggacggcaaggactacgtgcccaccagcaagtgggtggccttcggcggccacttcgccgccatcgccgccgccggcccgctggtgggcccggtgctggccgcccagtacggctatctgcccagcatggtctggctgctgatcggctgtgtgatcggcggcgcggtgcacgacaccgtggtgctgttcgcgtcgatgaagcaccatggcaagtcgctgtccgaagtggccaaggccgaactcggcccggtggccggctggtgcaccgggctggccatgctgttcatcatcaccatcaccatggctggtctgtccatggtggtggtgcacgcgctggagcgcaacccgtggggcgctttcgccgtgttcatgaccatccccatcgccatagccgtcggcctgtgggagcgcgtcaccggaagcatgaagaatgccagctatgtgggcatcgccgccatcatggcctgcgtgttcgccggcccttacatccagcacaccgcgctgggcgaatggctgtcgctgaaggcatccaccgtgtcgttgctgctgcctatctacgccttcttcgccaccgcgctgccggtctggatgctgctgaccccgcgcgcctgcctgtccagcttcatgaagataggcgtgttcggcctgttggtggccggcgtggtgttcatcaacccgcagatccagttcccggcggtgacgcagttcatccatggcggcggcccggtgctgtccggcccggtatggccgttcatctccatcaccatcgcctgcggcgccatttccggcttccacgccttcatcggctccggcaccacgcccaagcagatcgacaagtggagcgacatcctgccggtgggcttcggcgccatgctggccgaatgcgtagtcggcgtgatggccttgatcgccgccaccgccttgcatccggctgattacttcgccatcaactccgccccggccgtgttccacaccctgggcatggacgtggtgaatctgcccaagctgtccgaggagatcggcctcgatctgtacggccgcaccggcggcgcggtgacgctggcggtgggcatggcggacatcttcacccgcatcccgtggttcagcaatctggcgtcctatttcttccaattcatggtgatgttcgaagccgtgttcatcctcaccgccatcgattccggcacccgcgtcgcccgttacctgatccaggacttcgtcggcgatctgtgggcgccgctgaagcgcaccgactggatgcccggcgccatcggcgcttccgtcgtggcctgcgtgatgtggggatacctgctgaactccggcgacatcaactcggtatgggcgctgttcggcgtgtccaaccagctgatggcctccatcggcctgatcatcggcgccaccatcatcctgcggctgtcgcacaagcgcagctacatgctgacctgcctggtgccgctggcctacctgtacgtcaccgtcaactacgccggctactggatggttaagaacgtgtacctgaacccggccgccaagggctacaacctgttcaacgccggcatctccatcgtgatgctggccctggggctggcgatcctggtctccgccgtccgccgctggaaggcgctgttgggccgtccggcgcctcaagccgccctggagcccgccgccgccaaagcctga

SEQ ID NO: 36511 - protein, 602 aa, Chromobacterium violaceum ATCC 12472
MDHALTFVIGSLCILAICYRLYGVFFTRKVLGVDDSAVTPSHELKDGKDYVPTSKWVAFGGHFAAIAAAGPLVGPVLAAQYGYLPSMVWLLIGCVIGGAVHDTVVLFASMKHHGKSLSEVAKAELGPVAGWCTGLAMLFIITITMAGLSMVVVHALERNPWGAFAVFMTIPIAIAVGLWERVTGSMKNASYVGIAAIMACVFAGPYIQHTALGEWLSLKASTVSLLLPIYAFFATALPVWMLLTPRACLSSFMKIGVFGLLVAGVVFINPQIQFPAVTQFIHGGGPVLSGPVWPFISITIACGAISGFHAFIGSGTTPKQIDKWSDILPVGFGAMLAECVVGVMALIAATALHPADYFAINSAPAVFHTLGMDVVNLPKLSEEIGLDLYGRTGGAVTLAVGMADIFTRIPWFSNLASYFFQFMVMFEAVFILTAIDSGTRVARYLIQDFVGDLWAPLKRTDWMPGAIGASVVACVMWGYLLNSGDINSVWALFGVSNQLMASIGLIIGATIILRLSHKRSYMLTCLVPLAYLYVTVNYAGYWMVKNVYLNPAAKGYNLFNAGISIVMLALGLAILVSAVRRWKALLGRPAPQAALEPAAAKA

SEQ ID NO: 36512 - DNA, 1704 bp, Wolinella succinogenes DSM 1740
  CDS (1)..(1704): transl_table=11
atgaacgctttatggctgttagtgattggcgtcctcatgtatctggcggggtggtttttctactccaagtttgtcgcttcaaagattttgaagctaaacgatgagtttaaaacccctgcgcacgagtttaaggataacatcgattatgtgcccaccaataagtttgtgctttgggggcatcacttcacgaccgtagcgggagccgcacccattgtcgggccagcgattgcggtgcaatggggttggctacctgcttttttgtgggtggtctttgggacggtcttttttgcgggaattcatgacatgagtgccctttgggcgagtgtgcgcaatcagggtaaatcaattggtacgatttgccagcgatacatcggctccaaggttggtcagctctttatgatcgtcatctttttggtgcttttgatggttaatgctgcttttggtgtcatcatcgcccaggaatcagtgcgataccccaccaccatcatccccgcgtggggcgccattgctattgcacttgtgatgggacaggcaatctacaaattcaagatgaatcttgcacttgtcacagtgatcgcagtcacggcgctctatgcgcttgtacctctaggtgtggcggtgcctgtgagtctgcccgagagtttcatggggcttgattcttttagacagtggattgtcattctcttcatctattgcggaatcgcctcgattcttcctgtttggatgctccttcaaccaagggattatgtgaatggaatccagctcttcgtgggcttggcgctcctttatgtctctgtggttatcgtgagccccaccgtggttgctccaagcctcatccctgcaattaaagagccgggtggttggagcatcatcgtgccgattctctttgtcaccgtggcgtgcggagcgatcagcggattccatggaattgtctctagcggcaccacttctaagcaggtggacaaggagagcgatgttcgatttgttggttatctaggggcggtgggcgagggctctctttcgcttgcaacgatcattgcatgcgttgcaggcgtggggcttttagcaagcggaggcgacctcaatccctcttcatgggcgagcctctacaaaggcggtgcggtcaactttgccaatggaggcggggcgatcatgagcgagggaatcggactcccctttggtgtctcgcaaaccctgctttcgcttatgttgattctttttgcggcgactacgatggattcgggaatcagactccagcgctacatcatccaagagtggggcgaaatctataaaattcctgcacttcgcggcaaagggatagcgactatcgtagcagtggcactctctttctttttggcgatcaatggcgtgggtgcagggggcaaaaatgaggtggcgatttggcctctctttggagcgactaaccagcttcttgcctctctcacgcttttaacggtttcggtgattcttattaagagcaagcgccttggtggatcgctagtgaccctcatcccgatgagttttgttttgactatgtctttttgggcagcccttgtgaagctcggagactatttcaaagcgcaaaactggctcctctttggaatcaatattgtggtgattgctgtcactgtgatggtcgtcctctcggcgctttcgaccattgctcagatcttgcgcgaacagaaaaatgaagctcattcataa

SEQ ID NO: 36513 - protein, 567 aa, Wolinella succinogenes DSM 1740
MNALWLLVIGVLMYLAGWFFYSKFVASKILKLNDEFKTPAHEFKDNIDYVPTNKFVLWGHHFTTVAGAAPIVGPAIAVQWGWLPAFLWVVFGTVFFAGIHDMSALWASVRNQGKSIGTICQRYIGSKVGQLFMIVIFLVLLMVNAAFGVIIAQESVRYPTTIIPAWGAIAIALVMGQAIYKFKMNLALVTVIAVTALYALVPLGVAVPVSLPESFMGLDSFRQWIVILFIYCGIASILPVWMLLQPRDYVNGIQLFVGLALLYVSVVIVSPTVVAPSLIPAIKEPGGWSIIVPILFVTVACGAISGFHGIVSSGTTSKQVDKESDVRFVGYLGAVGEGSLSLATIIACVAGVGLLASGGDLNPSSWASLYKGGAVNFANGGGAIMSEGIGLPFGVSQTLLSLMLILFAATTMDSGIRLQRYIIQEWGEIYKIPALRGKGIATIVAVALSFFLAINGVGAGGKNEVAIWPLFGATNQLLASLTLLTVSVILIKSKRLGGSLVTLIPMSFVLTMSFWAALVKLGDYFKAQNWLLFGINIVVIAVTVMVVLSALSTIAQILREQKNEAHS

SEQ ID NO: 36514 - DNA, 1455 bp, Photorhabdus luminescens subsp. laumondii TTO1
  CDS (1)..(1455): transl_table=11
atgttgtggttcctcctctgtatcggccttcttctggctggatattttatatatggcaagattgtcgaaaagatattcactattcgaccagaaagaaaaacccccgctctttctatggctgatggtgttgattacgttgcgatgtctaccccaaaagtttggttaattcagttactcaatattgccggcgttggccctattttcggcccaattcttggtgccctctatggcccacttgccatgctgtggattgtattcggctgtatctttgctggtgcagtacacgattacttctccggtatgctcagtgtgcgtgcccgcggtgcatccgtgcccgttatcgttggtaacgaactgggcaaaaccatgaagcatttcatgaacatatttgcggttattctgctgatgctagttggagtcgtctttgttttgagtccagccggcttactgaataacttgctgaaagaggcaatgggttgggataacattgctatctgggtcggtgttatctttgcttactatattctcgcaacgctggtgcctattgataaaatcatcggtcgcctttacccactgtttggtgcattgctgctgtttatgtctgttgcgctgatggtcggtttagcgatgagcgataaacctttctattcacaaggattggatttcaccactaacttcaacccgaaagatctgccgatctggccattgctgtttgtcacgattgcttgtggtgctatttctggtttccacgccactcagtctccgctgatggcacgttgtatgcagaatgaaaaaaatggccgtttcgttttctacggtgcaatgattggtgaaggtattatcgcactaatctggtgtacattgggcctgagcttctatgaagatactaacgcattacaagccgtgattgatcaaggtacggcctctctggttgttcacgaagtgtccacgtctctgttaggtactgtcggcggtattctggcaatcctcggtgtggtgattttgccaattacttctggcgataccgcattccgttctgcccggcttattattgctgaattcctgaatattcctcagcaacaaatgaccaaacgtctgttattaagtgtgccaatgtttattgtcggttatctgattaccaaaaccgatttcaatattatctggcgttatttcggttgggcaaaccaaaccacagcaatggtcatgttatgggcggcttccgcatggctgctgcgccgtaataaattccattggattactaccctaccagccatgtttatgactgcggtgtgcttcacctatctggcatttgcaccagaaggttttgcgctaaactggaatatctctgttgttatcggcctggcagcaatggcggttgtcacaatgactttctttgcaaaagtccgctcccaatcagcttccgataatataaaagctaaagcattaaatgagtaa

SEQ ID NO: 36515 - protein, 484 aa, Photorhabdus luminescens subsp. laumondii TTO1
MLWFLLCIGLLLAGYFIYGKIVEKIFTIRPERKTPALSMADGVDYVAMSTPKVWLIQLLNIAGVGPIFGPILGALYGPLAMLWIVFGCIFAGAVHDYFSGMLSVRARGASVPVIVGNELGKTMKHFMNIFAVILLMLVGVVFVLSPAGLLNNLLKEAMGWDNIAIWVGVIFAYYILATLVPIDKIIGRLYPLFGALLLFMSVALMVGLAMSDKPFYSQGLDFTTNFNPKDLPIWPLLFVTIACGAISGFHATQSPLMARCMQNEKNGRFVFYGAMIGEGIIALIWCTLGLSFYEDTNALQAVIDQGTASLVVHEVSTSLLGTVGGILAILGVVILPITSGDTAFRSARLIIAEFLNIPQQQMTKRLLLSVPMFIVGYLITKTDFNIIWRYFGWANQTTAMVMLWAASAWLLRRNKFHWITTLPAMFMTAVCFTYLAFAPEGFALNWNISVVIGLAAMAVVTMTFFAKVRSQSASDNIKAKALNE

SEQ ID NO: 36516 - DNA, 1803 bp, Photorhabdus luminescens subsp. laumondii TTO1
  CDS (1)..(1803): transl_table=11
atgcaacacgctctcacatttgtcattgcaacgttgtgtattctggttatctgctaccgcttgtacggcgtattctttgttaaaaaggtactgaaagcagatgacagcgaggttacaccttcccatttattggaagacggtaaagattatgtacccacgaaaaaatgggtcaattttggtagccacttcgccgcaatcgcagccgcaggaccgctggttggccctgtgttagcagcccaatacggttatttgccaagtatgttatggttattaatcggctgtgttatcggcggggccgtgcatgatacggttgttttattcgcctcaatgaaacatagcggtaagtccctgtcagaagttgccaaaacagaacttggcccaattgctggttggtgcaccggccttgcaatgctgttcatcattactattactatggcaggtctgtccatggtggttgttcacgcgctagagcgtaacccttgggggacatttgcagtatttatgaccattccagtcgcaatcggtgtcggtctatgggagcgcttcacaggtaatatgcgcggagcaacatgggtaggtattattaccattatggcttgtgtgattgtcggcccttacattcaagcatccgccttcggtgaatggctgagcctgcgtacatcaactgtcagcttggcactgccaatctatgcattttttgcaaccgctctgccagtatggatgctactgactccccgtggttatctttctagttttatgaaaatcggcgtattcggcgcgctagttgtgggagtcatctttattaacccggagatccagttcccggcagtcactgaatttattcatggcaatggccctgtactggctggtccggtgtggccttttatctccatcaccattgcgtgtggtgctatttctggttttcatgcatttatcggctctggcacaacaccaaaacagatcgataagtggagtgatattctgccagtgggtttcggtgcaatgctggcagaatgtgtcgttggtgtcatggcgttgatcgctgccacttccctatatcctgctgactatttcgctattaactcctccccagaggtctttgctacattgggtatggatgttatccatctaccaaaactgagtcaggaaattggtttggatctgtatggccgtaccggtggtgcagtcacattggcggttggtatggcagatatcttcacccgcatcccttggttcagccagctagcatcctactttttccagttcgtcgtcatgtttgaagccgtatttatcctgacagcagttgattccggtacgcgtgttgcccgctacctactgcaagatttcctgggcgatatatgggcacctctgaaacgtatcgactggttaccgggttccattggttgcagtatcgttgcctgtttactgtggggctacctactgaattccggcgatatcaattcagtctgggcactattcggggtatccaatcaactgatggcctccatcggcctgatgattggtgcaacaattatcctacgtctgtctgaaaaacgctggtatatgctgacctgcctgataccactcgcttacctgtacgttactgtgaactacgcagcttactggatggtgaagaatgtttacttcaactccgcaacaaaaggtttcaatatcttcaacggaacaatctccattgtgatggttatcctcggcattgtgattatggtctcttccattattcaatggctgaaactgtggcgtgtccgcagtacaagtaattcagttgaagtactaactaactga

SEQ ID NO: 36517 - protein, 600 aa, Photorhabdus luminescens subsp. laumondii TTO1
MQHALTFVIATLCILVICYRLYGVFFVKKVLKADDSEVTPSHLLEDGKDYVPTKKWVNFGSHFAAIAAAGPLVGPVLAAQYGYLPSMLWLLIGCVIGGAVHDTVVLFASMKHSGKSLSEVAKTELGPIAGWCTGLAMLFIITITMAGLSMVVVHALERNPWGTFAVFMTIPVAIGVGLWERFTGNMRGATWVGIITIMACVIVGPYIQASAFGEWLSLRTSTVSLALPIYAFFATALPVWMLLTPRGYLSSFMKIGVFGALVVGVIFINPEIQFPAVTEFIHGNGPVLAGPVWPFISITIACGAISGFHAFIGSGTTPKQIDKWSDILPVGFGAMLAECVVGVMALIAATSLYPADYFAINSSPEVFATLGMDVIHLPKLSQEIGLDLYGRTGGAVTLAVGMADIFTRIPWFSQLASYFFQFVVMFEAVFILTAVDSGTRVARYLLQDFLGDIWAPLKRIDWLPGSIGCSIVACLLWGYLLNSGDINSVWALFGVSNQLMASIGLMIGATIILRLSEKRWYMLTCLIPLAYLYVTVNYAAYWMVKNVYFNSATKGFNIFNGTISIVMVILGIVIMVSSIIQWLKLWRVRSTSNSVEVLTN

SEQ ID NO: 36518 - DNA, 1485 bp, Vibrio vulnificus YJ016
  CDS (1)..(1485): transl_table=11
atgatgtggtttcttacctgtgtcgcagccctgattggcggatacttcatctacggtgctttcgttgagaaagtatttggtatcaatgaaaatcgccgtacccctgcccatacaaaaaccgacggcgttgactatgtgccaatgtcgaccaaaaaagtctacttagtgcaactccttaacattgctggcgttggccctatctttggtccaatcatgggtgctctatacggccctgcggcgatgctttggattgttgtcggctgtatcttcgctggtgcagtacacgattacttctctggcatgctttctgtgcgtaacggtggtgcttcagtaccgactatcacaggtcgctacctcggcaatggcgcgaaacactttatgaacatttttgccattgtcttgctgctgcttgttggtgtggtcttcgtttccgcgcctgctggcatgatcaccaatctgatcaatgaccaaaccagcttctctgtgagcatgaccaccatggttgtggtgatttttgcttactacatcatcgcgaccatcgtaccagttgataaaatcatcggtcgcttctacccactgtttggtgcgttgctgattttcatgtctgttggtctgatgacggcgattgcattctcttctgagcacacggtgatgggtgatttccaagtcagcgacatgttcactaacttaaacccgaatgatatgcctctatggcctgctttgttcatcactattgcctgtggtgcgatctctggcttccacgcaacgcaatcacctttgatggctcgttgtatggaaaatgagaaaaacggccgctttgtcttctacggtgcaatgattggtgaaggtgtgatcgcattgatctggtgtgctatcgcactctcgttcttcggcacacttgaaggactcgcagaagcggtgaaaaacggtggccctggcaacgtggtttacagcgcatcatttggtctgcttggcgtatttggcggcgtaattgccttcctaggtgtggtcattcttcctattacttcgggtgacacagcgttccgctctagccgtttgatccttgctgaatacttcaacatggaacagaaaaccctacgtaaccgcctgttgatggccgtaccactgttcgtacttggtggcattctgactcaagtcgatttcggcatcatctggcgctacttcggttttgccaaccaaaccaccgcagtcatgatgttgtggaccgcatcagcttacctactgcgtcacaacaagctacattggatcaccacagtacctgctttcttcatgacaacagtttgtgtgacctttatcctcaacaacagcgcgttgggctttggtttgccaatgcaactctccaccattgctggcgtactcttcgcggcagcggtaaccggttacgtgattaaaacatcaaaaggcaaaggcgaaacggaccttgccgatgaggaaaaacctcaaggcgtcactgaaaccgcttaa

SEQ ID NO: 36519 - protein, 494 aa, Vibrio vulnificus YJ016
MMWFLTCVAALIGGYFIYGAFVEKVFGINENRRTPAHTKTDGVDYVPMSTKKVYLVQLLNIAGVGPIFGPIMGALYGPAAMLWIVVGCIFAGAVHDYFSGMLSVRNGGASVPTITGRYLGNGAKHFMNIFAIVLLLLVGVVFVSAPAGMITNLINDQTSFSVSMTTMVVVIFAYYIIATIVPVDKIIGRFYPLFGALLIFMSVGLMTAIAFSSEHTVMGDFQVSDMFTNLNPNDMPLWPALFITIACGAISGFHATQSPLMARCMENEKNGRFVFYGAMIGEGVIALIWCAIALSFFGTLEGLAEAVKNGGPGNVVYSASFGLLGVFGGVIAFLGVVILPITSGDTAFRSSRLILAEYFNMEQKTLRNRLLMAVPLFVLGGILTQVDFGIIWRYFGFANQTTAVMMLWTASAYLLRHNKLHWITTVPAFFMTTVCVTFILNNSALGFGLPMQLSTIAGVLFAAAVTGYVIKTSKGKGETDLADEEKPQGVTETA

SEQ ID NO: 36520 - DNA, 2286 bp, Corynebacterium diphtheriae NCTC 13129
  CDS (1)..(2286): transl_table=11
atgagcaatcctgtaccaaccctctcccctccaccaccaggcgtggactacatcgagtcctccaaggtgcccctccccgtgggcgtagacgacaagcgaccaatgtcgctcaaagcacgcatcaccttcatcatcatcgccttgttcgccgccgccggctggggcatgatcgcctttgcccgaggcgaaacaatcaacgccgtctggatcgtcttcgcagcagtgggctcttacttcatcgcctactccttctggggtcgcctcattgaatacaaggtggtcaaaccgcgcgacgaccgcgccaccccagccgaatacatcaacgacggccaagacttcgttcccaccgaccgccgtgtgctgttcggacaccacttcgccgccatcgccggcgccggccccctcgtcggccctgttatggcagctcaaatgggctaccttcctggcaccctgtggatcgtgctcggcgtgatcttcgctggcgctgtgcaggactacctcgtgctatgggtatctacgcgccgccgcggccgctcccttggccagatgattcgcgacgaaatgggcaccgtaggtggtgccgccggtatcctcgccgtgatcaccatcatggtcatcatcatcgccgtgctggcactcgttgtggtcaacgcgttggccgattccccatggggcgtgttctccatctccatgaccatcccgatcgccatcttcatgggcctgtacatgcgctacctgcgcccaggccgcgttactgaagtctccgttatcggcgttgttctcctgctgctggccatcatctccggtggctgggtagcctccaccgactggggtgtggaatggttcacgtggtccaagctcaccttggcatgggtactgatcggctacggtatcgttgccgccatcctgccagtgtggctgctgctcgcgcctcgcgattacctctctacctttatgaaggtcggcgtgattggcctgctcgccatcgccatcgtggtggatcacccagacgttcacatgcccgctgtgaccaccttcgcccacaccggcgacggcccagtgttcgcaggtaacctcttcccattcctatttatcaccatcgcttgtggtgcactctccggcttccacgcgttgatctccgcgggtaccaccccgaagctgattgagaaggaatcccaaatgcgcatgatcggctacggctccatgctgatggaatccttcgtggccatcatggctttgatcaccgccgtggtgatcgaccgccacatgtacttcgtgatgaactcccccgctaccctaaccgcactggatccacagcaggctgccgactttgttaacagccttggcctgcccggttctggcattactgccgacgccctcacgcaggccgcagaagcagtgggcgaacacaccatcatttcccgtaccggtggcgcgcctaccctggccttcggtatgtcgcagatcctgaccgacatcatcggccaccccggcatgcagtccttctggtaccactttgccatcatgttcgaggcactcttcatcctcaccaccgtggacgctggtacccgcgtggcccgcttcatgatgaccgacaccttggcaaacgtcccagggcttaagaagttcgccgacccaagctggaccttcggccactggatctccaccatcttggtctgtgccctctggggttccatcctcatcatgggtgtgaccgatccactaggcggcattaacgtcttgttcccgctgttcggtattgctaaccagctgctcgcagctattgcactctcgctcgtgctggtcgtcgtggtcaagaagggcctgtacaagtgggcctggatcccaggtgttccactggtatgggacgtgatcgtcaccatgaccgcctcgtggcagaagattttctccgacaatccgaagatcggctactgggcacagcacaaccgttacaaggatgctcttgctgagggcaagaccaccttcggtaccgctaagtccaccgaggctatggaggctgttgttcgtaacaccgcagttcagggcttcttgtccgtactgttcgccggccttgtcatcgtggttcttatcgctgctgctcgcgcctgtatcaccgcgatcttgcaacgcagccgtggaatcgatgtaccatcgtcggaggaaccattccacgagtccgcattctttgccccatcgtcgctgggtgccacggatgccgagaaggtacttgttgccgcatggaacgagtacgagccaccgtcatcgcacggacatcatcactactaa

SEQ ID NO: 36521 - protein, 761 aa, Corynebacterium diphtheriae NCTC 13129
MSNPVPTLSPPPPGVDYIESSKVPLPVGVDDKRPMSLKARITFIIIALFAAAGWGMIAFARGETINAVWIVFAAVGSYFIAYSFWGRLIEYKVVKPRDDRATPAEYINDGQDFVPTDRRVLFGHHFAAIAGAGPLVGPVMAAQMGYLPGTLWIVLGVIFAGAVQDYLVLWVSTRRRGRSLGQMIRDEMGTVGGAAGILAVITIMVIIIAVLALVVVNALADSPWGVFSISMTIPIAIFMGLYMRYLRPGRVTEVSVIGVVLLLLAIISGGWVASTDWGVEWFTWSKLTLAWVLIGYGIVAAILPVWLLLAPRDYLSTFMKVGVIGLLAIAIVVDHPDVHMPAVTTFAHTGDGPVFAGNLFPFLFITIACGALSGFHALISAGTTPKLIEKESQMRMIGYGSMLMESFVAIMALITAVVIDRHMYFVMNSPATLTALDPQQAADFVNSLGLPGSGITADALTQAAEAVGEHTIISRTGGAPTLAFGMSQILTDIIGHPGMQSFWYHFAIMFEALFILTTVDAGTRVARFMMTDTLANVPGLKKFADPSWTFGHWISTILVCALWGSILIMGVTDPLGGINVLFPLFGIANQLLAAIALSLVLVVVVKKGLYKWAWIPGVPLVWDVIVTMTASWQKIFSDNPKIGYWAQHNRYKDALAEGKTTFGTAKSTEAMEAVVRNTAVQGFLSVLFAGLVIVVLIAAARACITAILQRSRGIDVPSSEEPFHESAFFAPSSLGATDAEKVLVAAWNEYEPPSSHGHHHY

SEQ ID NO: 36522 - DNA, 1929 bp, Geobacter sulfurreducens PCA
  CDS (1)..(1929): transl_table=11
atgcttgcaaagggattctggctggttgtctcgctggttgccgcctgttcactggccgtggtggccggggtggtgaatccggcggaaaaggtgaacgccctctggctggtgaccgcggcggcctgtttctacatggtcgcctaccggttctacggggccttcctggcggcccgggtcctctccctggatccggcgctccgcaccccggcccggcgtctggccgacgggatggatttccaccccaccaaccgctgggtcctcttcggccatcatttcgcggccattgccggggcgggccccctcatcggccccatgctggcggcccagttcggctatctccccggcttcctctggattctgatcggctcggtgctggtgggggccgtgcacgacatggtcatcctgggggcgtcggtgcggcgcaacggccgctccctggcccagatcgccaaggacgagatcggcccggtgggggggctggccgcctccctggccattctcttcatcctgatcgtggccttggccggcctgggcctggcggtggtcaactccctggccaagagcccctgggggacctttaccatctttctcaccatccccatcgccctctttatggggctctacctgtacaagatccgaccgggcagggtgggcgaggtgagcgccatcggcttcgtactgctcttggctgcggtctttgccggccactacattcccggctcacccatcgaaccgtatttcaacctctccaagcacggcctggtggtggccatggcggcctacggctttgtggcctccattctgccggtctggatgctcctctgcccccgcgactacctctccacctatatgaagatcgggacggtgctgctgctggcctgcggggtcatcttcatggccccgaccctccagatgccgccggtgacccggttcgtgagcgggggagggccgatcatccccggcacgctcttccccttcatgttcatcaccatcgcctgcggggccatttcggggttccactccctgatctcctcgggcaccacccccaagatgatcacctccgagcgcgagatcccgatgatcggctatggcgccatgctggccgagggattcgtggcggtcatggcgctggtggcggccaccatcctgatccccggcgactacttcgccatcaacaccaagctctccttcgacgccatcgcggcgctcggcttcccggttgagcgggtgcgggagctgtcggccttggtggggaccgatgtggccggtcgtcccggcggagcggtttccctggccgtggggatggcttccattctttcctcgctcccgggcatggcggggctcatgccctactggtacaatttcgccctcatgttcgaggctctgttcatcctcaccaccgtggacaccggcacccgcgtggcccgtttcctcctccaggagctggggagccgggtctacgctcccctggggcaaccccgctggctgccgggtatcatcgccacgagcctgatggtggtggttgcctggtcgtacctgatctggtccggcaacgtctccaccatctggcccatgttcggggtttccaaccagctgctggcggcgatcgccctgggcatcggcaccacggtcctgatcaaggggggcaaggtccgatatgcctggactacggctctgcccatggcgttcatgtatgtcaccacctttgccgcctcctggcagctgaccggctcattcctgcgcaaggcggcaacggcccccaccgcggccgaggctctcaccttcaggatcaacggcgggctggtggcggtcatggcgatcctggcggtagtgaccctgggcgacatgctccacaagtggtacggatacctcacctccacccgcccggtggtcacgagcgaggtcctggagtacgaagaggcggcgtaa

SEQ ID NO: 36523 - protein, 642 aa, Geobacter sulfurreducens PCA
MLAKGFWLVVSLVAACSLAVVAGVVNPAEKVNALWLVTAAACFYMVAYRFYGAFLAARVLSLDPALRTPARRLADGMDFHPTNRWVLFGHHFAAIAGAGPLIGPMLAAQFGYLPGFLWILIGSVLVGAVHDMVILGASVRRNGRSLAQIAKDEIGPVGGLAASLAILFILIVALAGLGLAVVNSLAKSPWGTFTIFLTIPIALFMGLYLYKIRPGRVGEVSAIGFVLLLAAVFAGHYIPGSPIEPYFNLSKHGLVVAMAAYGFVASILPVWMLLCPRDYLSTYMKIGTVLLLACGVIFMAPTLQMPPVTRFVSGGGPIIPGTLFPFMFITIACGAISGFHSLISSGTTPKMITSEREIPMIGYGAMLAEGFVAVMALVAATILIPGDYFAINTKLSFDAIAALGFPVERVRELSALVGTDVAGRPGGAVSLAVGMASILSSLPGMAGLMPYWYNFALMFEALFILTTVDTGTRVARFLLQELGSRVYAPLGQPRWLPGIIATSLMVVVAWSYLIWSGNVSTIWPMFGVSNQLLAAIALGIGTTVLIKGGKVRYAWTTALPMAFMYVTTFAASWQLTGSFLRKAATAPTAAEALTFRINGGLVAVMAILAVVTLGDMLHKWYGYLTSTRPVVTSEVLEYEEAA

SEQ ID NO: 36524 - DNA, 2244 bp, Mycobacterium avium subsp. paratuberculosis K-10
  CDS (1)..(2244): transl_table=11
gtggcaatcaccgagcgcgacgacggcgtcagctacgtgcacaccgaccacaacctgccacccgtcgccatcgtcgaccgctccccgatcacggcccggcaccggatcgtgttcgcggtcatcgcgttcgcccggggcgagccggtcaacgcggtgtggttcgtcgtcgcggcgatctgcagctacctgatcggattccggttctatgcccggctgatcgaacgcaagatcgtgcacccgcgcgacgatcacgccacgccggccgaaatcctggacgacggcgccgattacgtgccgaccgatcgccgggtgctgttcggccaccacttcgccgccatcgccggggccgggccgctggtcggcccggtgctggccgcccagatgggctacctgccgtgcaccatctggatcgtcgccggggcggtgttcgccggggcggtgcaggactacctggtcttgtggatctccacccggcggcgcgggcgttcgctgggccagatggcccgcgacgagctgggcgcctccggcgggctggccgcgctgctcggagcgttcgtcatcatggtgatcatcatcgcggtgctggcgctggtggtggtgcggggactggcccaaagcccgtggggcgtgttctccatcgccatgaccatccccatcgcggtgttcatgggctgctacctgcgcttcctgcggccgggccgggtggccgaggtgtcggtcctcggcttcgcgctgctgctgatcgccgtggccaccggcagctgggtcgccgaaacaccttggggcgcatcgtggttgagcctgtcgccggtgacggtgtcgtggttgatcatcggctacggtttcgtggcgtcggtgctgccggtgtggctgctgctggcgccgcgcgattacctgtcgaccttcatgaaggtcggcgccatcgccttgctggcggtcggcatctgcatcgcgcgaccggtcatgcaggcgcccgcggtgtcgcacttcgcctcccgcggcgacgggccggtgttctccggcgcgctgttcccgttcctgttcatcaccatcgcctgcggggcgctgtccggattccacgcgctgatctcgtcggggacgacgcccaagctgctggagaaggaaagccagatgcggctgatcggctacggcggcatgctgaccgagtcgttcgtggccgtcatggcgctgatcagcgcggccgtcctcgaccagcatctctacttcaccctcaacgccccggccgcgcagaccggcggcaccgcggccaccgccgcgcactacgtcaacgggctcggattgcccggcgccccaacgactgtcgaccagctgaaccgggccgcggccgcggtcggcgagaagtccatcgtgtcgcgcaccggcggggcgcccacgctggcggtcggcatggccgaggtgctgtaccgggtgttcggcggcgccgggctcaaggcgttctggtaccacttcgcgatcatgttcgaggcgctgttcatcctcaccgccgtggacgccggcacccgggtcgcgcggttcatgctctccgacaccctgggcaacctcggcggcccgctggcgcggctgcgcaacccgagttggcggcccggtgtctggctgtgcagcctcgcggtggcggcgggctggggcggcatcctgctgatgggggtgaccgacccgctgggcggcatcaacacgctgttcccgctgttcggcatcgccaaccagctgctggcggcgatcgcgctgaccgtcatcaccgtgatcgtcgtcaagaaggggctgctgaagtgggcgtggattcccggggcgccgctgctctgggatctggtggtgacgctgagcgcgtcgtggcagaagatcttctccgccgaccccgccgtcggctactggacccaacacttccaatacctggccgcgaagagcgccggccggacgtcgttcgggtcggcccgcaacgcgcatcaactcgaccaggtcatccgcaataccttcatccagggcagcctgtccatcgcgttcgcggcggccgtggtcgtcgtggtgatcgccggggtgctggccgcgctcggcgcgattcgcgggccggccagccggctgagccggccgctgaccgaggacgagccggtgccgtcggcgttgttcgcgccgtcgggtctgatcgccaccgccgccgagcgggaggtgcaacggcgttgggacgcgcccggcggaaaggtcgtgcccaagccggcgccgcggtcctaa

SEQ ID NO: 36525 - protein, 747 aa, Mycobacterium avium subsp. paratuberculosis K-10
MAITERDDGVSYVHTDHNLPPVAIVDRSPITARHRIVFAVIAFARGEPVNAVWFVVAAICSYLIGFRFYARLIERKIVHPRDDHATPAEILDDGADYVPTDRRVLFGHHFAAIAGAGPLVGPVLAAQMGYLPCTIWIVAGAVFAGAVQDYLVLWISTRRRGRSLGQMARDELGASGGLAALLGAFVIMVIIIAVLALVVVRGLAQSPWGVFSIAMTIPIAVFMGCYLRFLRPGRVAEVSVLGFALLLIAVATGSWVAETPWGASWLSLSPVTVSWLIIGYGFVASVLPVWLLLAPRDYLSTFMKVGAIALLAVGICIARPVMQAPAVSHFASRGDGPVFSGALFPFLFITIACGALSGFHALISSGTTPKLLEKESQMRLIGYGGMLTESFVAVMALISAAVLDQHLYFTLNAPAAQTGGTAATAAHYVNGLGLPGAPTTVDQLNRAAAAVGEKSIVSRTGGAPTLAVGMAEVLYRVFGGAGLKAFWYHFAIMFEALFILTAVDAGTRVARFMLSDTLGNLGGPLARLRNPSWRPGVWLCSLAVAAGWGGILLMGVTDPLGGINTLFPLFGIANQLLAAIALTVITVIVVKKGLLKWAWIPGAPLLWDLVVTLSASWQKIFSADPAVGYWTQHFQYLAAKSAGRTSFGSARNAHQLDQVIRNTFIQGSLSIAFAAAVVVVVIAGVLAALGAIRGPASRLSRPLTEDEPVPSALFAPSGLIATAAEREVQRRWDAPGGKVVPKPAPRS

SEQ ID NO: 36526 - DNA, 1455 bp, Treponema denticola ATCC 35405
  CDS (1)..(1455): transl_table=11
atgattacattctttatctgtttggcaatacttattgtaggacattttgtttatggaaaatatgtccaaaaagtatttggtatttcttctgcacctacgccggcaatatctaagcaggacggggtagactatgttcctctgtcgacgggccgtgtattcttgattcaattattgaatatagcaggattggggccgatttttggagcaatttcaggagctctttggggtgcttctgctttcttttggataggacttggaacgatttttgcgggaggagtgcatgattacctttcgggaatgatttccgaaagacatgacggtgccagtatttcagagctttcaggcgtatatttgggcccgattatgaaatttatcatgagagtttttgccgttgttttacttatatttgtaggtacggtttttatgaaaggacctgctgatcttttagcaaaactcacaccggaaaaattcggctcgaatttttggctgattattgttcttgcttattatttccttgctacaattttaccggtagataagattatcggaaagatttatccggttttcggtattgttcttataattatggccttgggtatcggcgccggtattcttttcaatgctttccgcggaacaatgactatacccgaattttcattggctaatgttcatccttccaatttaccgcgttggcccttgctgtttatcaccattgcctgcggcgctatttcaggattccatgcaacccagtcccctttaatggcccgttgtattaaatctgaagctgacggacacaaggtgttttatggcgcaatggtaggcgaaggaattattgcccttgtttgggcagctgccggtatgacattctattatggaacaggcggcttacaagaagctcttaacacattgggcggtcctgcaggtgttgtttacgatatttccttcaagttattgggaggtattggtggtttcttggcagtattgggtgttattgcatgccctataacatcaggagatacggcatttaggagcgcccgtttaactcttgccgactggttcaaggtagatcaaaaaccgattaataaaagacttttattggctattcctcttttagctataggaggtcttctatcccaaataaactttaatattatttggagatattttgcatggtcaaatcaaactttggcaatgattgcattatgggtaggagcaatgtatctattcttaaataagaagaattttatcattgccctggttccggcaacttttatgacagctgtttcggttacatatattttaatggctcctgaaggattcaagcttgataagatgatttcttatcccataggaattgctgctgctcttatttgtctgggcgcctttatatttgtaattatgagaaaaaagaaaaacggtacggatgtgccgcctataccggccccatcagtttaa

SEQ ID NO: 36527 - protein, 484 aa, Treponema denticola ATCC 35405
MITFFICLAILIVGHFVYGKYVQKVFGISSAPTPAISKQDGVDYVPLSTGRVFLIQLLNIAGLGPIFGAISGALWGASAFFWIGLGTIFAGGVHDYLSGMISERHDGASISELSGVYLGPIMKFIMRVFAVVLLIFVGTVFMKGPADLLAKLTPEKFGSNFWLIIVLAYYFLATILPVDKIIGKIYPVFGIVLIIMALGIGAGILFNAFRGTMTIPEFSLANVHPSNLPRWPLLFITIACGAISGFHATQSPLMARCIKSEADGHKVFYGAMVGEGIIALVWAAAGMTFYYGTGGLQEALNTLGGPAGVVYDISFKLLGGIGGFLAVLGVIACPITSGDTAFRSARLTLADWFKVDQKPINKRLLLAIPLLAIGGLLSQINFNIIWRYFAWSNQTLAMIALWVGAMYLFLNKKNFIIALVPATFMTAVSVTYILMAPEGFKLDKMISYPIGIAAALICLGAFIFVIMRKKKNGTDVPPIPAPSV

SEQ ID NO: 36528 - DNA, 2106 bp, Leptospira interrogans serovar Copenhageni str. Fiocruz L1-130
  CDS (1)..(2106): transl_table=11
atgcttcctttaattgcagtccttgtatgttttctagtttattttctcggatataaattttactcgggttatatttctaaatctatctttgatttaaaaaacggtctaaacgatactcccgctcataaactaaacgacggggtagattatcttcctacaaaaccagtcgtattatttggccatcattatgcgtccattgccggattggctccagtgcttggacctgcggtagcagtaatttggggttggcttcctgcaatgctttgggttgtatttggaagtatttttgtgggttgtgtgcatgattttggagcgcttgtagtttcggttcgcaatcaaggaaaaagtatcggtcaagtggcggaagatcttttaggtcaccgagctagaagtttgtttcacgcgatcattttctttttagtttcattggcaatgggagtttttgttcttgtacttgcggaaatgttttccgcggatccaaaggtggaactatttccttctctaaacacggctgataaaataattccttctataaaaaattctagagatcagaatgttttaaaacaaccaagttctttaatcttaaaagaagaagaaaaacaacgtgcttctgtaaactcagcgtctcatacggtcacgaaagaaaaaaaatctagttccgtgacgacttcgaaacataaatcaatttcggataacgtatattctaattctattgatttaaagaagaaatctactttaacaaactccacccaagcacaaaattctacgattacaaattctgaaaccgcaaacgaaaaagttcacgatcaccctggagaaatcagaacggaagaaaaaccatccatccggttgagaagtcattttccggaagcggtcattccatctgcggtgattatgattcttgcagtaattatgggatatttacattacaaaaaaggaatgaatttaactcctcttactgtgtttagcgtatttggaacgttaggttccatgatcttaggaatgcaagattcagttctttcttggaccggactcaatcatgtagaaacttctccttctaccggaacttggaaatacatacttttattttatgcgtttttagcttcggtaactccggtctggttgttactacaaagtagggactatattaattctttcttattgtatttaggaattgtattgatttatctaggattttttacggggggaattttacaaaactttcattcttttaacgcggaagtaatacgaactacaacgatcggactcgatttgattccattcgtatttattacgattgcttgtggagcggtttctggatttcacgcgttagtcagttcgggaactactgctaaacaattggataaagaaacagacgcaagaccaatcggttatggaggaatgatcggagaatcattgcttggtttgtctgctgtgattgcgtgtacgataggatttacttcttcggaagaatggtctggcttttatcgttcttggtctggtatacaaggtttggctccacaagtaggggcttacatttatggaaccggaagatttttactgcaaataggaattccagaaactttcggacaaggatttattgcactcatcgtaatcagctttgcattgacttctttggattcagctacaagacttcttagatacaacatcgaagagattgcagaatcaactcgtatttcttggattcaaacttttgtaggaaacagatatgtttccagtctaatcgcttgtattgcgataggattctttgcgtttttagaaattgaacaagatggaaaaaagaaacctgcaggacttgcgctctggaaactttttggaacaacgaaccagctactagccgggcttgcacttttggtagtaactattttccttttaaagttgaagaaaaaaatcaaagtttcttttataccgatgttattcgtattatcagtgactctttgggctatgatcaaaaactttttagattttttaaccggaccttctcccaatttgcttcttgctacggtaggagggactttgatcttcttgacactttggttattgttggaagcggtattaacttggaatcgcattagaaaagtatga

SEQ ID NO: 36529 - protein, 701 aa, Leptospira interrogans serovar Copenhageni str. Fiocruz L1-130
MLPLIAVLVCFLVYFLGYKFYSGYISKSIFDLKNGLNDTPAHKLNDGVDYLPTKPVVLFGHHYASIAGLAPVLGPAVAVIWGWLPAMLWVVFGSIFVGCVHDFGALVVSVRNQGKSIGQVAEDLLGHRARSLFHAIIFFLVSLAMGVFVLVLAEMFSADPKVELFPSLNTADKIIPSIKNSRDQNVLKQPSSLILKEEEKQRASVNSASHTVTKEKKSSSVTTSKHKSISDNVYSNSIDLKKKSTLTNSTQAQNSTITNSETANEKVHDHPGEIRTEEKPSIRLRSHFPEAVIPSAVIMILAVIMGYLHYKKGMNLTPLTVFSVFGTLGSMILGMQDSVLSWTGLNHVETSPSTGTWKYILLFYAFLASVTPVWLLLQSRDYINSFLLYLGIVLIYLGFFTGGILQNFHSFNAEVIRTTTIGLDLIPFVFITIACGAVSGFHALVSSGTTAKQLDKETDARPIGYGGMIGESLLGLSAVIACTIGFTSSEEWSGFYRSWSGIQGLAPQVGAYIYGTGRFLLQIGIPETFGQGFIALIVISFALTSLDSATRLLRYNIEEIAESTRISWIQTFVGNRYVSSLIACIAIGFFAFLEIEQDGKKKPAGLALWKLFGTTNQLLAGLALLVVTIFLLKLKKKIKVSFIPMLFVLSVTLWAMIKNFLDFLTGPSPNLLLATVGGTLIFLTLWLLLEAVLTWNRIRKV

SEQ ID NO: 36530 - DNA, 1422 bp, Desulfovibrio vulgaris subsp. vulgaris str. Hildenborough
  CDS (1)..(1422): transl_table=11
atgccatcaatgatgtatttcttcttgagcgtcgctgcgctcatcggcgggtacatggtctacagccgtgtcgtcgaacgcatgttcggcgtcgacaactgcaaggccacaccagcctgcaccatggcagacggcgtcgactatgtgaaactgcctcccagcaagatctttctcatccagttgctgaacatcgcaggcctaggcccggtgttcggccccattctcggtgcgttgtacgggccatgggcgctggtctggatcgtactcggctccatcttcgcggggggcgtgcacgactacttctcggggatgctgtcggtgcgctacgagggcaagtccgtgcccgacatcgtgggctacaacctcggcaacggcttcaagcagttcatgcgcttcttctcggtcgtgcttctgctgctggtgggcgtggtcttcgtcaccggccccgccaagctgctcgccaacctgaccgacatgacgctgatgacatgggtcatcatcatcttcgcctactacttcctcgccacggttctgcccatcgaccagatcatcggccgtatctacccgctctttgcggtcatcctcgtcatcatggccgtgggtctcactggggcgatgatcgtgaagggctacgagttctatccctctgcccatttcgtgaaccagcatcccacggggctgcccctgtggccgctgatgttcatcaccatcgcctgcggcgccatctcgggcttccacgccacgcagtcgcccatgatggcgcgctgcgtgcctgacgagaactgcggtcgtcccatcttctacggttcgatgatcgccgaaggcgtcatcgccctcatctgggcgacgctgggcatgagcttctaccccacccccgaggcgctcaacgccgccatcgccgccggtggccccggcaaggtcgtcaatgacgtgtccatgacgctcatgggcccggtgggcggcatcctcgccatcctcggcgtggtcgtgttgcctgtcacctccggcgacacggcgttccgctcggcccgcctgaccatcgccgacgtgctgaacttctcgcagaagggcaacggtgcccgtctgatgatcgcactgccactgttcgtcatcggtgcggtgctgtcgcaggtgaacttcgacatcatctggcgctacttcggctgggccaaccagacgctggcgaccatcgtactgtgggcgtctgcggcctacctcgtgcgtcgcggcatgctccactggattgccagcgtgcccgccacgttcatgacgtgcgtgtgcgtgacgtacatctgctacgccaagatcggcctgaacatcccgctggacatctccacgtggataggcatcgccgccgcggtgggttcgttgggcctcttcctcgtgaagcgtccggcgttcgcggcgaatcccgtcgcctag

SEQ ID NO: 36531 - protein, 473 aa, Desulfovibrio vulgaris subsp. vulgaris str. Hildenborough
MPSMMYFFLSVAALIGGYMVYSRVVERMFGVDNCKATPACTMADGVDYVKLPPSKIFLIQLLNIAGLGPVFGPILGALYGPWALVWIVLGSIFAGGVHDYFSGMLSVRYEGKSVPDIVGYNLGNGFKQFMRFFSVVLLLLVGVVFVTGPAKLLANLTDMTLMTWVIIIFAYYFLATVLPIDQIIGRIYPLFAVILVIMAVGLTGAMIVKGYEFYPSAHFVNQHPTGLPLWPLMFITIACGAISGFHATQSPMMARCVPDENCGRPIFYGSMIAEGVIALIWATLGMSFYPTPEALNAAIAAGGPGKVVNDVSMTLMGPVGGILAILGVVVLPVTSGDTAFRSARLTIADVLNFSQKGNGARLMIALPLFVIGAVLSQVNFDIIWRYFGWANQTLATIVLWASAAYLVRRGMLHWIASVPATFMTCVCVTYICYAKIGLNIPLDISTWIGIAAAVGSLGLFLVKRPAFAANPVA

SEQ ID NO: 36532 - DNA, 1422 bp, Desulfovibrio vulgaris subsp. vulgaris str. Hildenborough
  CDS (1)..(1422): transl_table=11
atgccgtcaatgatgtatttttttctgagcgtggcagcgctcatcggcgggtacatggtctacagccgtgtcgtcgagcgtctgttcggcgtagacaactgcaaggcgaccccggcttgcaccatggccgacggggtggactatgtgaaactgccgcccagcaaggtgttcctcatccagttgctgaacatcgcgggcctcggcccggtgttcggccccatcctcggcgccctgtacggcccgtgggctctggtgtggatcgtgctcggctccatcttcgcggggggtgtgcacgactatttttcggggatgctgtcggtacgctacgagggcaagtccgtgcccgacatcgtaggctacaacctcggcaacggcttcaagcagttcatgcgcttcttctcggtgctgctgcttctgctggtgggtgtggtcttcgtcaccggccccgccaagctgcttgccagcatgaccgacctcaacctgctcacgtgggtcgtcatcatcttcgcctactacttcctcgccaccgttctgcccgtggacaagatcatcggccgtatctatccgctcttcgccatcatcctcgtggtcatggccgtgggtctcaccggtgcgatgatcgtgaagggctacgagttctaccccgcggcccatttcgtgaaccagcaccccacgggtctgcccctgtggccgctgatgttcatcaccatcgcctgcggcgccatctcgggcttccacgccacgcagtcgcccatgatggcgcgctgcgtgcctgacgagaactgcggtcgtcccatcttctacggttcgatgatcgccgaaggcgtcatcgccctcatctgggcgacgctgggcatgagcttctaccccacccccgaggcgctcaacgccgccatcgccgccggtggccccggcaaggtcgtcaatgacgtggccatgacgctcatgggcccggtgggcggcgtcctcgccatcctcggcgtggtcgtgctgcctgtcacttccggcgacacggccttccgttcggcccgcctgaccatcgccgacgtgctgaacttctcgcagaagggcaacggtgcccgcctgatgatcgcactgccgctgttcgtcatcggtgcggtgctgtcgcaggtgaacttcgacatcatctggcgctacttcggctgggccaaccagacgctggcgaccatcgtgctgtgggcgtctgcggcctacctcgtgcgtcgcggcatgttccactggatagccagcgtgcccgccacgttcatgacgtgcgtgtgcgtgacgtacatctgctacgccaagatcggtctgaacatcccgctggacatctccacgtggataggcatcgccgccgcggtgggttcgctgggcctcttcctcgtgaagcgtccggtgttcgcggcgaatcccgtagcctag

SEQ ID NO: 36533 - protein, 473 aa, Desulfovibrio vulgaris subsp. vulgaris str. Hildenborough
MPSMMYFFLSVAALIGGYMVYSRVVERLFGVDNCKATPACTMADGVDYVKLPPSKVFLIQLLNIAGLGPVFGPILGALYGPWALVWIVLGSIFAGGVHDYFSGMLSVRYEGKSVPDIVGYNLGNGFKQFMRFFSVLLLLLVGVVFVTGPAKLLASMTDLNLLTWVVIIFAYYFLATVLPVDKIIGRIYPLFAIILVVMAVGLTGAMIVKGYEFYPAAHFVNQHPTGLPLWPLMFITIACGAISGFHATQSPMMARCVPDENCGRPIFYGSMIAEGVIALIWATLGMSFYPTPEALNAAIAAGGPGKVVNDVAMTLMGPVGGVLAILGVVVLPVTSGDTAFRSARLTIADVLNFSQKGNGARLMIALPLFVIGAVLSQVNFDIIWRYFGWANQTLATIVLWASAAYLVRRGMFHWIASVPATFMTCVCVTYICYAKIGLNIPLDISTWIGIAAAVGSLGLFLVKRPVFAANPVA

SEQ ID NO: 36534 - DNA, 1443 bp, Bacillus anthracis str. Sterne
  CDS (1)..(1443): transl_table=11
gtgattacattcttagtatcaattgtagtattgataattggttattttacatacggaaagtttattgaaaagatatttggagtcaattacaaaagaaagacaccagcctatgtaaatcaagatggagtagattatgtacctatggataggcgaaagaattctatgattcaattattaaatattgcaggtactggacctatatttggaccaatattaggtgctttatatggaccgattgcatttgtttggattgtaataggggctatttttgcaggggctgttcatgattatcttacagggatgatttctattcgaaataaaggagcgcatattcctgaattagcagggaagtttttaggaaatgcaatgaggcacattgtaaatgttttttcactgttgctgttagtattagtaggaactgtgtttattacaacaccagcatcattacttgatattgtattgcaagggaaagtgtcaataactattattttatccgttattttcgtatattacattttatctacaatcttgccgattgataaaattattggaaagatttatccggtattaggtgcattattgctaataagtgctattggcatagggggaatgatgataataaaaggttctcctatcccagaattaacgtttgaaaatatgcatccagataatgcgccgatttttccattattaatgctgacaattacatgtggtgctttatcaggatttcatgcaacacaatcaccaattatttcacggacacttcaaactgaaaagcacggtagatatgtattttttggcatgatggttgcagaagcgattattgcaatgatctgggcagcagctgcgatgagtattttctcatacggtgaattaaatgagttaattaaatcaggtacacctgctgcggttgtaagtgaaatctcgaagacaatgctaggtgctgtcggcggaacaatcgctgttatcggagtaattgtattaccaattacatctggtgataccgcattccgtgcggcacgttctatcattgcggactattttaactttgagcaaacgaaattgaaaaaccgcttaatgattgcaattccgttgtttgtaattgcatatggtttaacgaaaattgatttcacaatattatggagatatttttcttgggctaatcaatcgactgcagcaattgcgttatggattggaacgatgtatttattcataaaaggaaagccgtatgttgtttccttaattccagcgatatttatgacgcttatgactgttatttatattttaaatgcgaaaattggttttaatatcccgttaaacacatcttatattataggtgcagttattaccgttatattaactgctatattctttatgaaagccatgaaaaataaaaatgagaatattgaagtagatgtgcaattagagaaggaagctgtgtag

SEQ ID NO: 36535 - protein, 480 aa, Bacillus anthracis str. Sterne
MITFLVSIVVLIIGYFTYGKFIEKIFGVNYKRKTPAYVNQDGVDYVPMDRRKNSMIQLLNIAGTGPIFGPILGALYGPIAFVWIVIGAIFAGAVHDYLTGMISIRNKGAHIPELAGKFLGNAMRHIVNVFSLLLLVLVGTVFITTPASLLDIVLQGKVSITIILSVIFVYYILSTILPIDKIIGKIYPVLGALLLISAIGIGGMMIIKGSPIPELTFENMHPDNAPIFPLLMLTITCGALSGFHATQSPIISRTLQTEKHGRYVFFGMMVAEAIIAMIWAAAAMSIFSYGELNELIKSGTPAAVVSEISKTMLGAVGGTIAVIGVIVLPITSGDTAFRAARSIIADYFNFEQTKLKNRLMIAIPLFVIAYGLTKIDFTILWRYFSWANQSTAAIALWIGTMYLFIKGKPYVVSLIPAIFMTLMTVIYILNAKIGFNIPLNTSYIIGAVITVILTAIFFMKAMKNKNENIEVDVQLEKEAV

SEQ ID NO: 36536 - DNA, 1443 bp, Bacillus thuringiensis serovar konkukian str. 97-27
  CDS (1)..(1443): transl_table=11
gtgattacatttttagtatcaatcgttgtattgataattggttattttacatatggaaagtttattgaaaagatatttggagtcaattacaaaagaaagacaccagcctatgtaaatcaagatggagtagattatgtacctatggataggcgaaagaattctatgattcaattattaaatattgcaggtactggaccgatatttgggccaatattaggtgctttatatggaccggttgcatttgtttggattgtaataggggctatttttgcaggggctgttcatgattatcttacagggatgatttctattcgaaataaaggagcacatattcctgaattagcagggaagtttttaggaaatgcaatgagacacattgtaaatgttttttcactgttgctgttagtattagtaggaactgtatttattacaacaccagcatcattacttgatattgtattgcaagggaaagtgtcaataactattattttatccgttattttcgtatattacattttatctacaatcttgccgattgataaaattattggaaagatttatccggtattaggtgcattattgctaataagtgctattggcatagggggaatgatgataataaaaggttctcctatcccagaattaacgtttgaaaatatgcatccagataatgcgccgatttttccattattaatgctgacaattacatgtggtgctttatcaggatttcatgcaacacaatcaccaattatttcacggacacttcaaactgaaaagcacggcagatatgtattttttggcatgatgattgcggaagcgattattgcgatgatctgggcagcggccgcgatgagtattttctcatacggtgaattaaatgagttaattaaatcaggtacaccagctgcggttgtaagcgaaatctcgaagacaatgttaggtgctgtcggcggaacgatcgctgttatcggagtaattgtattaccaattacatctggtgataccgcattccgtgcggcacgttctatcattgcggactattttaactttgagcaaacgaaattgaaaaaccgcttaattattgcaattccgttgtttgtaattgcatatggtttaacgaaaattgatttcacactattatggagatatttctcttgggctaatcaatcgactgcagcaattgcgttatggattggaacgatgtatttattcataaaaggaaagccgtatgttgtttccttaattccagcgatatttatgacgcttatgactgttatttatattttaaatgcgaaaattggttttaatatcccgttaaacacatcttacattataggtgcagttattaccgttatattaactgctatattctttatgaaagccatgaaaaataaaaatgagaatattgaagtagatgtgcaattagagaaggaagctgtgtag

SEQ ID NO: 36537 - protein, 480 aa, Bacillus thuringiensis serovar konkukian str. 97-27
MITFLVSIVVLIIGYFTYGKFIEKIFGVNYKRKTPAYVNQDGVDYVPMDRRKNSMIQLLNIAGTGPIFGPILGALYGPVAFVWIVIGAIFAGAVHDYLTGMISIRNKGAHIPELAGKFLGNAMRHIVNVFSLLLLVLVGTVFITTPASLLDIVLQGKVSITIILSVIFVYYILSTILPIDKIIGKIYPVLGALLLISAIGIGGMMIIKGSPIPELTFENMHPDNAPIFPLLMLTITCGALSGFHATQSPIISRTLQTEKHGRYVFFGMMIAEAIIAMIWAAAAMSIFSYGELNELIKSGTPAAVVSEISKTMLGAVGGTIAVIGVIVLPITSGDTAFRAARSIIADYFNFEQTKLKNRLIIAIPLFVIAYGLTKIDFTLLWRYFSWANQSTAAIALWIGTMYLFIKGKPYVVSLIPAIFMTLMTVIYILNAKIGFNIPLNTSYIIGAVITVILTAIFFMKAMKNKNENIEVDVQLEKEAV

SEQ ID NO: 36538 - DNA, 2106 bp, Acinetobacter sp. ADP1
  CDS (1)..(2106): transl_table=11
atggataaaattcaaaggaaatcgaccctcagttcaaaactaggttggagtatagtcgccattattggcgcagtatcatttggaatactcgcagtaagtcgaggcgagcacgtcaatgcagtgtggttggttctagctgctatctgtgtttacagtattgcatatcgtttttatagtttgtttattgcaacaaaggtatttgagttaaattcgagacgtttaacgcctgcacatcgtttggccgatggtctagattatgtgccaacaaataaatacgttctatttggacatcatttcgcagcaattgctggcgctgggccactagtcggaccaattctggcagcgcaaatgggctatttacctggtacgatctggcttctggtcggggttgtactagcgggcgctgttcaagactttttagtgctatttatttcaactcgtcgtgatggacgctcattgggagaaatggcaaaacaggagcttggctcatttgctggaattgtggtaatgcttggtgcgttgggggtgatggtcatcattctggcagtattggcacttgttgtggttaaggcattggcacacagtccgtggggtgtgtttagtattgctgccacaattccaattgcactctttatgggtgtgtatatgcgttatttacgcccaggcaagattgcagaagtctccatcattggctttgtactgatgatgctggccattgtgtatggtggacacattgcagccgatccatattggggacctttcttcaccctgacaggcacgcagcttacttggtgcttgattatctatggttttattgcatctgttttacccgtttggttgctacttgcaccacgtgactatttatcaacgttcttaaaaattggtgtaattgctggtctggcaatcgggattatggtggcattaccagaactcaaaatgccagccgttacacattttattgatggtacagggccagtattctctggaagtttatttccatttctgtttattaccattgcttgtggtgcaatctctggtttccatgctttggtatcaagtggcaccacacctaaactggtcgataacgaagttaacattcgtatgattggttacggtggcatgttaatggagtcctttgttgcgatcatggctatgatctgtgcaactgtacttgatccaggtgtatattttgcaatcaacgcaccagcagcagtattaggtacaagcgttgaaactgcggctgaggcagtacgtaatttgggctttgtagtcacacctgaagcattaactttacttgctcaagaagtgggtgagtcaaccattttgtcccgcacaggtggtgcacctacttttgcaattggtatggcgcacatcatctctgagattttcaataatcgctctatgatggcattttggtatcactttgcgatcttatttgaagctttattcatcttgactgctgttgacgcgggtacccgtgcttgtcgtttcatggttcaagatactgtcggaattgtggttcctgcaatcaaaaaatcaggttcttttgtcggtaatatcattggcaccgctgttgcagtaggtggttggggcttcttcgtttatcaaggcgtcgttgatccactcggtggtattaactcgttgtggccactcttcggtgtaggtaaccaaatgttggctgccatggcactgattctgggaactgtcatcttgtttaagatgaaaaaagaaaaatacgtttgggttacaattattccaaccattttcttgcttgtgacctgtatgacggctggctggcagaaaatctttcatgagaatcctaaaattggtttcttggcacaggctaatcgtttttccgatgcaattgctcgtggtgaaatcttaaaaccagcgaaaactttagctgagatgcagacggttgtgttatctaatcagattaatgcagtactttgtggtttctttatgattgtagcaattgtgatggtgattgcatcatttggtgtggtgcgccgtgctttggcgagcaaagtgccgacagttaatgaagcgcctgcaatttatgaagatcctgagatagttgtatcaccaagttcacaaggaaaataa

SEQ ID NO: 36539 - protein, 701 aa, Acinetobacter sp. ADP1
MDKIQRKSTLSSKLGWSIVAIIGAVSFGILAVSRGEHVNAVWLVLAAICVYSIAYRFYSLFIATKVFELNSRRLTPAHRLADGLDYVPTNKYVLFGHHFAAIAGAGPLVGPILAAQMGYLPGTIWLLVGVVLAGAVQDFLVLFISTRRDGRSLGEMAKQELGSFAGIVVMLGALGVMVIILAVLALVVVKALAHSPWGVFSIAATIPIALFMGVYMRYLRPGKIAEVSIIGFVLMMLAIVYGGHIAADPYWGPFFTLTGTQLTWCLIIYGFIASVLPVWLLLAPRDYLSTFLKIGVIAGLAIGIMVALPELKMPAVTHFIDGTGPVFSGSLFPFLFITIACGAISGFHALVSSGTTPKLVDNEVNIRMIGYGGMLMESFVAIMAMICATVLDPGVYFAINAPAAVLGTSVETAAEAVRNLGFVVTPEALTLLAQEVGESTILSRTGGAPTFAIGMAHIISEIFNNRSMMAFWYHFAILFEALFILTAVDAGTRACRFMVQDTVGIVVPAIKKSGSFVGNIIGTAVAVGGWGFFVYQGVVDPLGGINSLWPLFGVGNQMLAAMALILGTVILFKMKKEKYVWVTIIPTIFLLVTCMTAGWQKIFHENPKIGFLAQANRFSDAIARGEILKPAKTLAEMQTVVLSNQINAVLCGFFMIVAIVMVIASFGVVRRALASKVPTVNEAPAIYEDPEIVVSPSSQGK

SEQ ID NO: 36540 - DNA, 2154 bp, Erwinia carotovora subsp. atroseptica SCRI1043
  CDS (1)..(2154): transl_table=11
atgaagagcaattccattcttaaacacatcccctggatgattcttggaatcattggggctgcctgcctcggcgtagtcgcactacgtcgcggtgagcatgtcagtgccttatggattattgttgcttctgtcgccgtttacctcgtggcctatcgatactacagcctgtatatcgcacaaaaagtcatgcagttggatccgaccagagcaacccccgccgttgtcaataacgacggtcttaactatgtaccgacgaaccgtaacgttctgttcgggcaccactttgctgctatcgcaggtgcggggccgctggttgggccggtactggccgcgcaggtcggctacctgccgggcaccttatggttgctgggcggcgtggtgctggcgggtgccgtgcaggacttcatggtgctgtttatttcgacccgccgtaacggtgcgtcgttaggcgaaatcgttaagaaagaactcggcccagtaccgggtacgattgcgctgttcggctgcttccttatcatgatcatcattcttgccgtactggcgctgattgtggtgaaagcgctggcagaaagtccgtggggcgtctttaccgtttgttctacggtaccgatcgcgctctttatgggcgtctacatgcgctttatccgtccgggtaaagtcggtgaaatttcggtgatggggatcgtgctgctggtgctggcgatctggtttggtggcgtagtggcacatgacccgtactggggtccggcgctgaccttcaaagatacgaccattacttatacgctgattggctatgccttcgtgtctgcactgctgccagtatggttgattctggctccgcgtgactatctggcgaccttcctgaaaatcggtgtgatcgtcggtctggcgattggtattgtgatacttaatcccgatctgaaaatgccagcgataacgcagtttgtggatggcaccggtccggtctggaaaggtacgctgttcccattcctgtttattactatcgcctgtggtgcggtgtctggcttccacgcattgattgcttccggtactacgccgaaattgatggctaacgaaaaagatgcacggttcatcggttacggtgcaatgttgatggaatctttcgtggcgatcatggctttggttgcggcgtctatcatcgaaccgggtctctactttgcgatgaataccccgccagcggcgttgggtattacgatgccggatctgcatcgactgggcactgcggatgcgccgatgattttggcacagttacaagatgtatctgcacacgcggcagcaaccgtcagctcctggggcttcgtaatttctcctgagcagattatgcaaacggcgaaagacatcggtgaaccttccgttcttaaccgcgcaggtggtgcaccaacgctggctgtcggcattgcacacgtgttccaccagatcattcctggcgccaatatgggcttctggtatcacttcggtattctgtttgaagcgctgtttattctgacagctctggatgcgggtacgcgtgctggtcgcttcatgttgcaggatctgttgggtaacttcgttcctttcctgaagaaaacggattcgctgattgctggtatgatcggtacggcgggttgtgtcggtctgtggggctacctgctgtatcaaggtgtggttgatccgctgggcggcgtgaagagcctgtggccgctgttcggtatctctaaccagatgctggctgcggtggcgctggtactgggtaccgtcatcctgattaagatgaaacgtacacagtacatttgggtcacattggttccggcggtttggctgctgatctgtaccacttgggcgctgggtctgaaactgttcagcgacaacccacagttggaaggcttcttctacatggcgaacatgttcaagggcaaaattgcagaaggcggtgccgatctgagcgcgcagcagatttcgaacatgaaccatatcgtgaccaacaactataccaacgccggtctgagcattctgttcctgatcgtggtgtacagcatcatagcgtacggtattaaagcggcattggctgcacgtaaagtggctgaacgtaccgatcaggaaacgccgtatgttccggttcctgaaggtggcgtgaaactctcttccggtcactaa

SEQ ID NO: 36541 - protein, 717 aa, Erwinia carotovora subsp. atroseptica SCRI1043
MKSNSILKHIPWMILGIIGAACLGVVALRRGEHVSALWIIVASVAVYLVAYRYYSLYIAQKVMQLDPTRATPAVVNNDGLNYVPTNRNVLFGHHFAAIAGAGPLVGPVLAAQVGYLPGTLWLLGGVVLAGAVQDFMVLFISTRRNGASLGEIVKKELGPVPGTIALFGCFLIMIIILAVLALIVVKALAESPWGVFTVCSTVPIALFMGVYMRFIRPGKVGEISVMGIVLLVLAIWFGGVVAHDPYWGPALTFKDTTITYTLIGYAFVSALLPVWLILAPRDYLATFLKIGVIVGLAIGIVILNPDLKMPAITQFVDGTGPVWKGTLFPFLFITIACGAVSGFHALIASGTTPKLMANEKDARFIGYGAMLMESFVAIMALVAASIIEPGLYFAMNTPPAALGITMPDLHRLGTADAPMILAQLQDVSAHAAATVSSWGFVISPEQIMQTAKDIGEPSVLNRAGGAPTLAVGIAHVFHQIIPGANMGFWYHFGILFEALFILTALDAGTRAGRFMLQDLLGNFVPFLKKTDSLIAGMIGTAGCVGLWGYLLYQGVVDPLGGVKSLWPLFGISNQMLAAVALVLGTVILIKMKRTQYIWVTLVPAVWLLICTTWALGLKLFSDNPQLEGFFYMANMFKGKIAEGGADLSAQQISNMNHIVTNNYTNAGLSILFLIVVYSIIAYGIKAALAARKVAERTDQETPYVPVPEGGVKLSSGH

SEQ ID NO: 36542 - DNA, 2064 bp, Erwinia carotovora subsp. atroseptica SCRI1043
  CDS (1)..(2064): transl_table=11
atgagtaacataaagagcattgtgatctggctgctagtcggactggcgggcgctttttcgttcgctatgctggcgctaagccgaggtgagcacgtcaatgcggtatggttggttatcgccgcagtatcgtgttacagcatcgcttatcggttttacagcctgtttatcgccaaaaaagtgtttgagctcgacgatcgccgactaacaccggctgaacgtcataacgacggcctagattacgttcccaccaataaatgggtactgttcggacaccacttcgccgctatcgctggggcaggtccgctggttgggccgattctcgccgcacagatgggttttcttcccggcacaatctggattttggtcggcgtgatgctggcgggtgccgtgcaggattttctggtgctgtttatctccacacgtcgtgacggtcgttcgctgggggaaatggcaaaacaggaactgggcacgttcgcgggtattatcaccatgctcggcgcgctgggcgtcatgatcatcattctttcggcgctggcactggttgtcgttaaagcgctggcggaaagcccgtgggggttgtttacgatcgccgccaccatccccatcgcgctcttcatgggcatttacatgcgctttttacgtccaggtaaaatcgctgaagtgtccatcatcggctttgtgctaatgatgctggcgattgtctacggcggcaacatcgccgcacacccatactggggcccattcttcacgctgaaaggcacatcgctcacctgggtgctggttatctacggcttcgtggcgtcagtcctgcccgtctggctgctgctggcaccgcgtgattacctctctacgttcctgaaaattggggttattatcgggctggccttcggtatcgtgttcgccatgccggaaatgaaaatgcccgctgtttctcgctttattgatggcagcggccccgtattctcaggttctctgttccccttcttatttattaccatcgcctgcggcgcgatttccggcttccacgccctcgtttccagcggcactacgccgaagttaatcgagcgtgagagccatatccgttttatcggatatggtgccatgttgatggagtccttcgtggcaatcatggcgctgatttgtgcatcggtcatcgagccgggcatttactttgccatgaactcacccgccgcactgatcggcaccacggttgagagcgcctcgctggccattaacaactgggggtttgtgattaccccgcaggaattgagtgccattgccaatgatgtcggcgaaatctctattctttcccgtgctggcggcgcgccaaccttcgcggtgggcatggcctatatcatcacggaaatctttaatagccgggcgatgatggcattctggtatcacttcgcgattctgtttgaagccctgttcattctgaccgccgttgatgccgggacgcgcgcctgtcgcttcatggtgcaagatctggtcggtattgcgattccaagattagctaacagccgttcctggatggggaatttggccggtacgaccgttgccgtttctggctggggattcttcgtatatcaaggtgtaatcgacccgttgggaggtattaacacgctctggccactgttcggtatcggtaaccagatgctcgcatcgatggcgctgattctcggcaccgtggtgttgtttaagatgaagaaacagcgctatgcgtgggtgactatcgtaccgaccgtctggctgtttattacgtcgatgacggcgggttggcaaaaaatcttccatgaaaaaccgagcatcggctttctggctcaagcgaaacgcttcgctgcgggtattgaacagaacacgctgatcgcaccggctaaatcgattaaagacatggaaaccatcgtcttcagtaaccagatcaacgccgcactgtgcgggttcttcatgctggtggcagtgacgatgctggtttccgcgttcttcgtcattcgtcgtgcactcaacagcaatgtgccaacgacaaaagagacgccgattgtcttacgggacggcgctcagccttaa

SEQ ID NO: 36543 - protein, 687 aa, Erwinia carotovora subsp. atroseptica SCRI1043
MSNIKSIVIWLLVGLAGAFSFAMLALSRGEHVNAVWLVIAAVSCYSIAYRFYSLFIAKKVFELDDRRLTPAERHNDGLDYVPTNKWVLFGHHFAAIAGAGPLVGPILAAQMGFLPGTIWILVGVMLAGAVQDFLVLFISTRRDGRSLGEMAKQELGTFAGIITMLGALGVMIIILSALALVVVKALAESPWGLFTIAATIPIALFMGIYMRFLRPGKIAEVSIIGFVLMMLAIVYGGNIAAHPYWGPFFTLKGTSLTWVLVIYGFVASVLPVWLLLAPRDYLSTFLKIGVIIGLAFGIVFAMPEMKMPAVSRFIDGSGPVFSGSLFPFLFITIACGAISGFHALVSSGTTPKLIERESHIRFIGYGAMLMESFVAIMALICASVIEPGIYFAMNSPAALIGTTVESASLAINNWGFVITPQELSAIANDVGEISILSRAGGAPTFAVGMAYIITEIFNSRAMMAFWYHFAILFEALFILTAVDAGTRACRFMVQDLVGIAIPRLANSRSWMGNLAGTTVAVSGWGFFVYQGVIDPLGGINTLWPLFGIGNQMLASMALILGTVVLFKMKKQRYAWVTIVPTVWLFITSMTAGWQKIFHEKPSIGFLAQAKRFAAGIEQNTLIAPAKSIKDMETIVFSNQINAALCGFFMLVAVTMLVSAFFVIRRALNSNVPTTKETPIVLRDGAQP

SEQ ID NO: 36544 - DNA, 2286 bp, Propionibacterium acnes KPA171202
  CDS (1)..(2286): transl_table=11
gtggacactgtcccaccccgtacgtacaacaactcaaacttccccgaaggtctgcccgccgtcagcctgtcggacgaggagcgagcccgtcagcaacgatggacaccgctgcgcgtgacgatctggatcctcatctccgctatcgccgggctgggctggtggatgctcgccgtacgacgcggcgaaacggtcaacggcatctggttcgtcttcgcggccatcggttcgtatttcatcggctaccggttctacgccaagtacattcaggacaagctcgtccatcccgacgacagccgggctacccccgccgagtatgactacaatggacgagatttcgtccccacggatcgccgcatcctctacggccaccacttcgccgccatcgctggtgccggccccctcgtcggcccggtactctcagctcagatgggctatctcccaagcacgatctggatcatcgtcggcgtcatcttggcaggagccgtccaggattaccttgttctcgtcatctcgatgagacgcggtggacggtccctcggacagatggccagagaggaattggggcgcttcggaggcatcgcggcgctcatcgccactctcacgatcatgctcatcatcgtggccatcctggctatggtcgtcgtcaactccctggccgcctcctcatggggtgtgtggagcgtcggactgactatccccatcgccctgctcatgggcttctacctgcgttatctgcgccctggcaaagtatttgaggtctcgatcatcggcatcgtcctgctcgtgctggccattgcctcgggggcctggatcgagaacactgccgttgccagtgctctccacttgagcaagccgtttttggcctgggccatcatcatttacggattcatcgccgcagtactccccgtatggatgctgctggctccccgtgactacttgtctaccttcatgaaggtcggcgtgatcgcgatgttggcgatctcgatcgtcatcgtccgcccggtcatcaacgtgccagcaatgacggtctatgccaccaacggtgcgggccccgtgttctccggaaaactcttccccttcctcttcgtaactatcgcgtgtggagcgctatcgggattccacgccacgatctcctctggaaccaccccaaagctcatcgaaaaggaatcccaggcacgtctcatcggctacggcggcatgctcatggagtccttcgtagcaatcatggctctggtggccgccctgtcggtggaccggggcatttacttcgctatgaattccccagccggtgcgacgggcaataccgtcaagtccgccatcgcttacgtcaattctttgggcttgtcgggtgtgcacgccaacgctaacactctcacgacgacagccaagctcgtcggcgaaacatcgatcgtcagtcgaaccggtggcgcccccaccctggctgttggtctagcgacgatcatgcacaagatctttggtggcgaggccatgatgagcttctggtaccacttcgcgatcatgttcgaggccctgttcatcctcacctcggtcgacgctggcacccgcgtcgcccggttcatgctctccgatgcgctgggtaacttctggccgcgcctcaaggaccactcgtggaaggttggctcctggctgactaccgcgatcatggtggctggctggggctcgattctgctcatgggcgtcaccgacccgttggggggcatcaacactctcttcccgctcttcggcattgccaaccagctgctggcagctgtcgccctgtcgatctgcttggtgatcttcgcccgggctggtcacacgtggcggctgctcatcatcttcgtaccgatgctcttcaccgccattatcacggtttacgggtcctggttgaagatcttctcccccgacccgaagctcggttactgggccaatcacatgacctacaagcgggccatcgctgacggcaagacctcgctggggcaagccaagaacattgacgaaatgcacaccgtcgtcggcaacaccgccattcaaggaacgatgtcgatcatcttcgtcgtctgcgccctcatcgtcatgatcgtggcctgtatccgcactgttcaggcgctgcgtggtcgcaacatcatcgacaccgaagacccagccaagccgtccaaaatcttcgctcccagtggtctcatgcccaccaaggctgagagggatctgcaggttgagtgggacgccttctacgaggagcaccctgagcttgacctggaaagtgtccacaaggacaaggagcacgcgtga

SEQ ID NO: 36545 - protein, 761 aa, Propionibacterium acnes KPA171202
MDTVPPRTYNNSNFPEGLPAVSLSDEERARQQRWTPLRVTIWILISAIAGLGWWMLAVRRGETVNGIWFVFAAIGSYFIGYRFYAKYIQDKLVHPDDSRATPAEYDYNGRDFVPTDRRILYGHHFAAIAGAGPLVGPVLSAQMGYLPSTIWIIVGVILAGAVQDYLVLVISMRRGGRSLGQMAREELGRFGGIAALIATLTIMLIIVAILAMVVVNSLAASSWGVWSVGLTIPIALLMGFYLRYLRPGKVFEVSIIGIVLLVLAIASGAWIENTAVASALHLSKPFLAWAIIIYGFIAAVLPVWMLLAPRDYLSTFMKVGVIAMLAISIVIVRPVINVPAMTVYATNGAGPVFSGKLFPFLFVTIACGALSGFHATISSGTTPKLIEKESQARLIGYGGMLMESFVAIMALVAALSVDRGIYFAMNSPAGATGNTVKSAIAYVNSLGLSGVHANANTLTTTAKLVGETSIVSRTGGAPTLAVGLATIMHKIFGGEAMMSFWYHFAIMFEALFILTSVDAGTRVARFMLSDALGNFWPRLKDHSWKVGSWLTTAIMVAGWGSILLMGVTDPLGGINTLFPLFGIANQLLAAVALSICLVIFARAGHTWRLLIIFVPMLFTAIITVYGSWLKIFSPDPKLGYWANHMTYKRAIADGKTSLGQAKNIDEMHTVVGNTAIQGTMSIIFVVCALIVMIVACIRTVQALRGRNIIDTEDPAKPSKIFAPSGLMPTKAERDLQVEWDAFYEEHPELDLESVHKDKEHA

SEQ ID NO: 36546 - DNA, 1431 bp, Desulfotalea psychrophila LSv54
  CDS (1)..(1431): transl_table=11
atgcttttcttttttacctgtgttggcctgttgatcttgggctacttcacctacggggtctttgttgaaaagatctttggcattgaccgcaaccgggcaaccccctgtagcaccaaggaagagggcgttgactatatcgccatgccgacctggaaggtgttcttcatccagctccttgatattgcgggacttggccccatattcggaccaatcctcggtgctctatacggcccatctgccctcatctgggtagttattggctgtatctttggcggcgctgtccacgactattttagtggtatgctttctctgcgtagcggcggaaagtctatccctgaggtagttggtgacattatgggaatgccggcacgacagaccctgcgcatattttccatcgtcctcctcctccttgttggtgttgttttcatcctgggaccggcaaagcttctccaccagctgacgggagtcaatgttcagatactgatcggctgtatcttcttttactatttcatcgccaccatcctccccatcgacaagatcattggtcgtctctatccatttttcggcgccctcctcatattcatgacctttggcgttattggcggtttgatcttccacggctatgagattctgccaaaccttgattttttcaccaatactcacccggcagacaagcctatctggcctcttctcttcatcaccctgtcctgcggtgcgatcagtggttttcactccacccaatcaccgctgatggcacgttgcgtacaaaatgagtcccacggccgatccgtcttctatggttcaatgatcatggagggtattatcgcccttgtctgggttaccattggtctctccttctaccagacccccgaggcactcagtgctgtaattgctaccggctcccctgccgcagtggtcaatgaagcatgtaacaccctgctgggccccgtcggtggttttctggcaatcatgggcgttatcatcctgcctatctccagtggtgatacggcctttcgatccacccgtttgattattgcagagatcgttaatatcaagcagaaccgacctggcctgcgactgataattgccatccccctctttgccgtggcctttgccatcagtaatgtcgagttcaccaccgtatggcgctactttggttggtccaaccagatgctctccatgatgatgctctggacggcagccatctatctggtcaaaaagagaaaacttcactggatatgcaccatccctgccacctttatgaccgcggttgatgcagcattcatcctccaggccaagatcggttttgagctggactctaccctgtcaaatatcgctggcgtagttattgccatagcggtcctcgtcgccttcctcatctacaccaagcccctggaagagggcgcgcatctttggaagatagaagagtaa

SEQ ID NO: 36547 - protein, 476 aa, Desulfotalea psychrophila LSv54
MLFFFTCVGLLILGYFTYGVFVEKIFGIDRNRATPCSTKEEGVDYIAMPTWKVFFIQLLDIAGLGPIFGPILGALYGPSALIWVVIGCIFGGAVHDYFSGMLSLRSGGKSIPEVVGDIMGMPARQTLRIFSIVLLLLVGVVFILGPAKLLHQLTGVNVQILIGCIFFYYFIATILPIDKIIGRLYPFFGALLIFMTFGVIGGLIFHGYEILPNLDFFTNTHPADKPIWPLLFITLSCGAISGFHSTQSPLMARCVQNESHGRSVFYGSMIMEGIIALVWVTIGLSFYQTPEALSAVIATGSPAAVVNEACNTLLGPVGGFLAIMGVIILPISSGDTAFRSTRLIIAEIVNIKQNRPGLRLIIAIPLFAVAFAISNVEFTTVWRYFGWSNQMLSMMMLWTAAIYLVKKRKLHWICTIPATFMTAVDAAFILQAKIGFELDSTLSNIAGVVIAIAVLVAFLIYTKPLEEGAHLWKIEE

SEQ ID NO: 36548 - DNA, 1818 bp, Yersinia pseudotuberculosis IP 32953
  CDS (1)..(1818): transl_table=11
atgctcatgcaacatgcgattacctttgttatcgcttccgcgtgtatccttacgatctgctaccgtttatacggtatcttttttgttcgtaaggtgctgcgcgtcgatgacagtgaagttaccccttcccatacctttgaagatggcaaagattacgttccgactaaaaagtgggtgaactttggtagccacttcgccgcaatcgcggcggcaggccccttggttggcccggtgttggctgctcaatacgggtatttacccggcttcttatggcttttgatcggttgtgttatcggcggtgccgtacacgatacggtcgtcttgtttgcctcaatgaaacatcaggggaaatccctgtcagaagtcgctaaatccgaacttggcccagttgctggctggtgtaccggcctggcgatgttgttcattatcactattaccatggccgggttatcgatggtggtcgtacatgctctggaacgtaacccttgggggactttcgcagtgttcatgaccatccctatcgccatctgtgttggcttgtgggaacgcatgactggcagcatgaaaggggcttcgtatgtgggtattgccgctatcatggtgtgcgtatttgtcggcccgtatattgaaggcacttggcttggtgaatggttaatgctgaaagctgatacggtcagtattattctgccaatgtatgctttctttgcaaccgcactgcctgtctggatgttgttaaccccacgtggttacctttccagctttatgaagatcggtgtgttcggtgcactgattgttggtgttgtcttcattaatcctgaaattcaattccctgcggttacgcagtttattcacggcggtggcccagttcttgcgggaccggtttggccgtttatctctattactattgcctgtggtgctatctctgggttccatgcctttatcggttcgggtacgacaccgaaacagattgataaatggagcgatatcttgcccgtcggttttggtgcgatgctggcagaatgtatggttggggttatggcccttatcgccgcaacctctttgcatcctgctgactactttgccattaactcctctgctgaagcctggagtgcgcttggtatggaggttgtgaacctgccaaaattgagtgaagaaattggtttggacctgtatggccgtaccggtggtgctgtcactctggctgtagggatgaccgatatcttcattcgtgtgccatggtttaatagtttggctgcttacttcttccaatttgttgttatgtttgaagcggtgtttatcctgactgcggttgattcaggtacccgtgttgcccgttatttactgcaagattttctgggcgatatctgggctccactgaaacggaccgattggttaccaggaacattggtttgtagtgttattgcctgtgcattgtggggttacctccttaactcaggtgatattaactctgtctgggcattgttcggagtatcgaaccaattaatggcttctgttggcttaatcattggtgccacgattatcctgcgcttggcgaccaagcgtgtgtatatgctgacctgtgttattcctctggcttacctgtttgtcacagtaaattacgccggctattggatgatcactcacgtgtactttaattcagcggctaaaggctacaacctgttcaatggtatcatctcaattatcatgatgaccttgggtgtaatcatcttgatctccgcgctgaggaaatggcgtgagctatggatccgcaggtctgctgagatggctggcaacaaagtggttactgccaacgcctga

SEQ ID NO: 36549 - protein, 605 aa, Yersinia pseudotuberculosis IP 32953
MLMQHAITFVIASACILTICYRLYGIFFVRKVLRVDDSEVTPSHTFEDGKDYVPTKKWVNFGSHFAAIAAAGPLVGPVLAAQYGYLPGFLWLLIGCVIGGAVHDTVVLFASMKHQGKSLSEVAKSELGPVAGWCTGLAMLFIITITMAGLSMVVVHALERNPWGTFAVFMTIPIAICVGLWERMTGSMKGASYVGIAAIMVCVFVGPYIEGTWLGEWLMLKADTVSIILPMYAFFATALPVWMLLTPRGYLSSFMKIGVFGALIVGVVFINPEIQFPAVTQFIHGGGPVLAGPVWPFISITIACGAISGFHAFIGSGTTPKQIDKWSDILPVGFGAMLAECMVGVMALIAATSLHPADYFAINSSAEAWSALGMEVVNLPKLSEEIGLDLYGRTGGAVTLAVGMTDIFIRVPWFNSLAAYFFQFVVMFEAVFILTAVDSGTRVARYLLQDFLGDIWAPLKRTDWLPGTLVCSVIACALWGYLLNSGDINSVWALFGVSNQLMASVGLIIGATIILRLATKRVYMLTCVIPLAYLFVTVNYAGYWMITHVYFNSAAKGYNLFNGIISIIMMTLGVIILISALRKWRELWIRRSAEMAGNKVVTANA

SEQ ID NO: 36550 - DNA, 2067 bp, Yersinia pseudotuberculosis IP 32953
  CDS (1)..(2067): transl_table=11
atgaataacatcaggaccgttgtcatatggctgacagtggcgctaatcggtgcatttgcctttgccatgttggcccttagccggggtgaacatgtcaatgccatctggttagtgattgcatccgtggcttgttacagcatcgcttatcgcttctacagtcggtttattgccaagaatgtctttgaactggatgaccgtcgtctgacgccagcagaacgacgcaatgacggtctggattatgttcctaccaacaaatgggtgttgtttggtcaccactttgctgccatcgcgggtgctgggccactggtcgggccaatcttggccgcacagatgggttttctgccggggactatctggatcctggtcggtgtaatgatggccggtgccgtacaggacttcttaatcctgtttatctccactcgccgcgatggccgctcactgggtgaaatggcaaagcaagagttgggggcatttgctggtgtgataactatgctgggtgcattgggcgtaatgattatcattttgtccgcactcgcactggtggtggtaaaagcattagctgatagcccgtggggcctgtttaccattgccgcaacgatccccatagccctctttatgggcgtctatatgcggtttatccgccctggtaaaattgctgaagtatcattaatcggtttcgtactgatgatgtctgcaatcatttacggtgggaacatcgcggtacacccttactgggggcctttctttacgttacatggcaccacgctaacctggatattggttatctatggtttcatcgcctctgtactgccagtgtggttgctgctagcaccacgagattacttatcaaccttcctgaaaattggggtcatcattggtttagcggttggtattgtattcgccatgccagaaatgaagatgcccgcggtctcacactttattgatggcagcggcccggtcttctccggcagcctgttcccgttcctgtttattactatcgcttgtggtgctatctctggcttccatgctctggtatccagtggcaccacaccgaaactgattgaacgcgaaagccatacccgctttatcggctacggcgcaatgttgatggagtcattcgttgccatcatggcgctaatctgtgcctcggttatcgaccctggtgtttatttcgccatgaactcacccgcggctctgattggtaccaccgtagaaagtgcctcgctggccattagtagctgggggtttgtcgttacgccagaaacactggcgatggtcgccaaagatgttggtgaaaactcgattctgtcacgggctggtggtgcaccgaccttcgctgtgggcatggcgcatatcatcagtgaaatatttaatagccgtaatatgatggctttctggtatcactttgccatcttgtttgaagccatgtttattctgactgcggtcgatgctggtacccgtgcctgccgctttatggttcaggatctggttggggtggtcgtacctcgtctggccaataaccgttcatggtttggtaacctttccggaacgacagtcgcggtagccggttggggattcttcgtttaccaaggtgttatcgatccactggggggaataaacaccttgtggccgctgttcggtattggtaaccaaatgctggcatcaatggcactgattctaggtaccgtcgtactgtttaaaatgaagaaacaacgctacgcctgggtcaccatcctgccaacaatttggttatttatcacctcaatgaccgcaggttggcagaagatattccatgaaaaaccaagtattggcttccttgctcaagcaaaaaaattctctaacggcattgaacaaggggtgttaatcgcacccgcgaagagctttaaagacatggaaactatcgtgtttagcaaccagatcaacgccgcgctatgtgcattctttatgctggtggcggtgacgatgctagtttctgccttctttgtgattcgtcgcgcactgaaatccagcaaaccaacaacccatgaaactgaaattgtataccgtgaggaggtcgcccgtggttaa

SEQ ID NO: 36551 - protein, 688 aa, Yersinia pseudotuberculosis IP 32953
MNNIRTVVIWLTVALIGAFAFAMLALSRGEHVNAIWLVIASVACYSIAYRFYSRFIAKNVFELDDRRLTPAERRNDGLDYVPTNKWVLFGHHFAAIAGAGPLVGPILAAQMGFLPGTIWILVGVMMAGAVQDFLILFISTRRDGRSLGEMAKQELGAFAGVITMLGALGVMIIILSALALVVVKALADSPWGLFTIAATIPIALFMGVYMRFIRPGKIAEVSLIGFVLMMSAIIYGGNIAVHPYWGPFFTLHGTTLTWILVIYGFIASVLPVWLLLAPRDYLSTFLKIGVIIGLAVGIVFAMPEMKMPAVSHFIDGSGPVFSGSLFPFLFITIACGAISGFHALVSSGTTPKLIERESHTRFIGYGAMLMESFVAIMALICASVIDPGVYFAMNSPAALIGTTVESASLAISSWGFVVTPETLAMVAKDVGENSILSRAGGAPTFAVGMAHIISEIFNSRNMMAFWYHFAILFEAMFILTAVDAGTRACRFMVQDLVGVVVPRLANNRSWFGNLSGTTVAVAGWGFFVYQGVIDPLGGINTLWPLFGIGNQMLASMALILGTVVLFKMKKQRYAWVTILPTIWLFITSMTAGWQKIFHEKPSIGFLAQAKKFSNGIEQGVLIAPAKSFKDMETIVFSNQINAALCAFFMLVAVTMLVSAFFVIRRALKSSKPTTHETEIVYREEVARG

SEQ ID NO: 36552 - DNA, 1776 bp, Symbiobacterium thermophilum IAM 14863
  CDS (1)..(1776): transl_table=11
atgagctcaccggccctgttcgttctgcttgcgctggttgcctatggcatcgcgtacttcgggtacggcaagtggttcgaccggaacgtgtggaaaccggatcccaagcggacgacgccggcccacatgtatacggacggggtggagtacttcccggtcagcaagtacgtcctgtggggttaccagttcaagagcgtcgccgcgctcggtcccatcctgggtccgtacatcgccatccaatacggctgggccccggcgctggcgtggatcatcctgggcaacttcttcatcggctggctccaggactacggcgccatcatgctctccatccgcaaccagggacgctctttcggacccatcacctacgagttcaccggcaacaccggccgaaacaccctcctgggcttcatcctgttctatctcctgatcatctccgcgaccttcatctacttcatcgccctgttctggcacacgttcccgtccacctttgcggccaccgtcggcatcctgctggtcggcgtgctggccggacagatgctctacaagatgcgggccaacgtggtgacggccacggcgctgtccatcgtcctcatggccctggtcatctgggccgccgcctccttcccgttcctgcagacgccccagggcgcctggccgccgaaccccgcccagggcgtggaggcgggcggcatcgccggcccgtggtccctgctgatctggtgcatcgtcgcctgcgtcgtcctgtacctcgcgtcggtcctgccgctgcccacgttcatccagccggtcaactacgtctccttcttccccaccttcctggcggtgatcctgatcctcatcggcgccctcgtctccaacttcaccggcgtccggctggagcagccggcctggatcggcttcaaccccaccggcaataacccgatgtggccactgatgttcgtggccatcgcctgcggctccatctcgggctggcacagcctggtttccagctcttccaccgccaagcagctggacatcgagaccgacgcccacccggtcggcgccggcgccatgctctccgaggggctgctggccctggcctccctggccgcctacatgatcatcccgcgggagcagctcaccggcaacgtgggctcctgggtggccggcgccatcaagttcaccgccccgttcctgggaggcgaggccgcggtgggcttcttgcgggcgtacttcggcgtgtgcctcatcctctacgccctgacggtacaggccctggtcacccgcttctggcggctggtctccaccgaggtcttccagggccgactggccatcctgggccagaagcacgtcgccaccttcatcggcctgctgatcccgctggcctttgcggccaccggctcctggaacaacctgtggctctacttcggcggctccaaccagctcctcgcgggcctggcgctgatgctcatcaccatccatctcgcccgcgtgcaggcgcccacggtctacaccctgatcccggcgaccttcatgatggtcaccaccatcaccgccatcggctggcaggtggtgaaggtctacctcccggccttcctgggcacaacccccacgctggtgcagtacccgttcaaccagtacccggggttcagccgggccatggacggcatcttcgtcctggtgggggtcgcgctcttcgtcctgggcctggtgatggcctacaagacctactcggcctacgccgaggcccggcgggggctgggctccagcccgcgggtcgccaccagcggggattag

SEQ ID NO: 36553 - protein, 591 aa, Symbiobacterium thermophilum IAM 14863
MSSPALFVLLALVAYGIAYFGYGKWFDRNVWKPDPKRTTPAHMYTDGVEYFPVSKYVLWGYQFKSVAALGPILGPYIAIQYGWAPALAWIILGNFFIGWLQDYGAIMLSIRNQGRSFGPITYEFTGNTGRNTLLGFILFYLLIISATFIYFIALFWHTFPSTFAATVGILLVGVLAGQMLYKMRANVVTATALSIVLMALVIWAAASFPFLQTPQGAWPPNPAQGVEAGGIAGPWSLLIWCIVACVVLYLASVLPLPTFIQPVNYVSFFPTFLAVILILIGALVSNFTGVRLEQPAWIGFNPTGNNPMWPLMFVAIACGSISGWHSLVSSSSTAKQLDIETDAHPVGAGAMLSEGLLALASLAAYMIIPREQLTGNVGSWVAGAIKFTAPFLGGEAAVGFLRAYFGVCLILYALTVQALVTRFWRLVSTEVFQGRLAILGQKHVATFIGLLIPLAFAATGSWNNLWLYFGGSNQLLAGLALMLITIHLARVQAPTVYTLIPATFMMVTTITAIGWQVVKVYLPAFLGTTPTLVQYPFNQYPGFSRAMDGIFVLVGVALFVLGLVMAYKTYSAYAEARRGLGSSPRVATSGD

SEQ ID NO: 36554 - DNA, 1797 bp, Bacillus licheniformis ATCC 14580
  CDS (1)..(1797): transl_table=11
atgaatgcaataacaattgtgatcgcttccatctgtattttggcgatcgcctatcgtttgtacggaacatttatgatggtgaaagtgttgaaggttgatgacgacaagccgactcctgcccatcttcagaaagacggcaaagattatgtgccgacgaacaaatgggtgtctttcggccaccactttgcggccatcgcagccgcggggccgcttgtcgggccgatcttggcggcgcagttcggctacttgccggggctgttgtggctcctgatcggagcggtcatcgggggcgccgtgcatgatattgttgttttatttgcgtcgatgcggaggaagggaaagtcgctttcagaagtggcgaaagaagagctcgggcctgttgcgggattttgcacggggcttgcgatgctgtttattattacaatcacgatggcggggctgtcgatggttgtgcttcatgcgcttgaacgcaatccgtgggggacgttcgccgttgcgattacaattccgatcgcgatgggggtcggcttattttataaaaagacaggcaacttaaaattagcgtctaccggcggatttattttgctgatggccggtgtcttcatcgggccctccattgcagagacgccgcttggagacgccttgacgctcgatacgaaaacgcttgctgtcgcacttcctgtctatgcattttttgcagcggcgctgcctgtatggctgctgctcgcaccgcgcgattatttgagcagctttatgaaaatcggggtgtttatcgctttgattgccggggttttcgttgtcaatccggcgattccgtttccggcgtttaccgagttcacgggcggagggggacctgtttcgcctggtccggtctggccgttcatttcaattacgatcgcctgcggtgcgatttccggtttccatgcgtttgtcggttcaggcacgacgccgaagatgcttgacaagtggagcgacatgaaattcgtcggcttcggagcgatgctcgttgagtgtcttgtcggcatcatggctttaatcgcggcaacggcgttgcagccgggcgattattttgccatcaacagttcgccagaagtctttcggacgcttggcatgaatgtcgtccatctgcctgaactcagccgcgaaatcggtctcgatcttgaaggaagaacaggcggagctgttacccttgccgtcggcatggcttatattttcacggatattccgtttttcagccatttggcctcttactttttccaatttgtcatcatgtttgaagctgtctttattttaacggcgatcgatgccggtacaagggtggcgcgttatttgattcaagactttttcggggaagtgtacaaaccgctgaaaaaaacggactggcttccgggttcggtcgcagcgagcgcccttgcctgtttcatgtggggatatttgctgtactcaggcgatatcagctcgatttgggcgctgtttggcgtatccaaccagctgatggcatccgtcggtttaattatcggagcgacggtcattttaaaaattgcggacaaacggcgttatatgctgacatgtctcattccgctcgcttatttgtatgtgacggtcaactatgcgggatactggatgatcaaaaacgtttattttaatgcggaagctgccggtttcagcgttttaaacggcattttatcgatcattatgcttgtgttgggacttgtgatcatggctgcagccattaaaaaatggacggagatttggcgcgatccggcattgcggatggagccttctatacctggatga

SEQ ID NO: 36555 - protein, 598 aa, Bacillus licheniformis ATCC 14580
MNAITIVIASICILAIAYRLYGTFMMVKVLKVDDDKPTPAHLQKDGKDYVPTNKWVSFGHHFAAIAAAGPLVGPILAAQFGYLPGLLWLLIGAVIGGAVHDIVVLFASMRRKGKSLSEVAKEELGPVAGFCTGLAMLFIITITMAGLSMVVLHALERNPWGTFAVAITIPIAMGVGLFYKKTGNLKLASTGGFILLMAGVFIGPSIAETPLGDALTLDTKTLAVALPVYAFFAAALPVWLLLAPRDYLSSFMKIGVFIALIAGVFVVNPAIPFPAFTEFTGGGGPVSPGPVWPFISITIACGAISGFHAFVGSGTTPKMLDKWSDMKFVGFGAMLVECLVGIMALIAATALQPGDYFAINSSPEVFRTLGMNVVHLPELSREIGLDLEGRTGGAVTLAVGMAYIFTDIPFFSHLASYFFQFVIMFEAVFILTAIDAGTRVARYLIQDFFGEVYKPLKKTDWLPGSVAASALACFMWGYLLYSGDISSIWALFGVSNQLMASVGLIIGATVILKIADKRRYMLTCLIPLAYLYVTVNYAGYWMIKNVYFNAEAAGFSVLNGILSIIMLVLGLVIMAAAIKKWTEIWRDPALRMEPSIPG

SEQ ID NO: 36556 - DNA, 1503 bp, Mannheimia succiniciproducens MBEL55E
  CDS (1)..(1503): transl_table=11
atgttgtggttcttgttatgtgtggcaattttgctattaggttattttatctacggtaaaattgtcgaaaaaatctttgttatcaatcctgatcgtaaaacgccggcttattccttaagagacggagtggattacgtgccgatgaccaagaaaaaaatctggttaatccaattattgaatattgccggtacgggtccgattttcggtccgattttaggtgcgctatacgggccggtggcgatgctctggatcgtattcggttgcgtatttgccggtgcggtgcacgattatttcagcggtatgttgagtattcgtaacggcggggcgaacgtgccgtatttagcgggtaaatatttaggtcgcccggctaaacattttatgaatattattgctattttattattgttattagtgggtgtggtattcgtagcaagcccagcgtcactgttaaccaatattaccagcgatttaatgaattcgggttctgtcggcgcggcggccgtaaatgatgaagcgggtgcggcaaaaggcaatattctgattatgtggactgctgtaattttcatttattacattatcgccacattagtaccaattgataaaattataggtcgtatttatccgttcttcggtgccttattgttgtttatgacctgcggtatgttattcggtcttttctttgaaggcattccgttcttcagaacactcggcggcgatatcagcttagcggattttttcactaatatgcatccgaaaaatgcgccgatttggccgttgctgttcattaccattgcctgtggtgcgatttccggtttccatgcaacccaatctccgttaatggcgcgttgtactgagaacgaaagagaaggacgtttcattttctacggcgcaatgatcggtgagggtatcattgcattaatctggtgtatggtgggattaagtttctacaacgatcaggctggacttgccgaagcaatccaaatcggtacaccgtctaaagtggtttatgatgccgcaatcggtatgttaggcgtgtttggcggtattttagcagtattgggcgtggtggtattacctattacttccggtgatacggcattccgtgctgcgcgtttattaattgcggatttctttaaatatgatcaacgtaatcttactaaacgtttgactattgcacttccgttattcgctatcggcttctgggtttcaaccattgacttctccgttttatggcgttatttcggttgggcgaaccaaaccactgcaatggtaatgttatggactgcggcggcatatttattccgtcatcaaaaattccactgggtatgtacgattcctgcggtgtttatgactctggtttgttcaacattcttactcaacgcaccaatcggtttcggcttggattaccaactttccgtatggttaggcggtgcggtaacggcggtagcggttattgctttcttcatgttgctaaaaccgatttctgcagatgaacaagattaa

SEQ ID NO: 36557 - protein, 500 aa, Mannheimia succiniciproducens MBEL55E
MLWFLLCVAILLLGYFIYGKIVEKIFVINPDRKTPAYSLRDGVDYVPMTKKKIWLIQLLNIAGTGPIFGPILGALYGPVAMLWIVFGCVFAGAVHDYFSGMLSIRNGGANVPYLAGKYLGRPAKHFMNIIAILLLLLVGVVFVASPASLLTNITSDLMNSGSVGAAAVNDEAGAAKGNILIMWTAVIFIYYIIATLVPIDKIIGRIYPFFGALLLFMTCGMLFGLFFEGIPFFRTLGGDISLADFFTNMHPKNAPIWPLLFITIACGAISGFHATQSPLMARCTENEREGRFIFYGAMIGEGIIALIWCMVGLSFYNDQAGLAEAIQIGTPSKVVYDAAIGMLGVFGGILAVLGVVVLPITSGDTAFRAARLLIADFFKYDQRNLTKRLTIALPLFAIGFWVSTIDFSVLWRYFGWANQTTAMVMLWTAAAYLFRHQKFHWVCTIPAVFMTLVCSTFLLNAPIGFGLDYQLSVWLGGAVTAVAVIAFFMLLKPISADEQD

SEQ ID NO: 36558 - DNA, 1428 bp, Bacteroides fragilis YCH46
  CDS (1)..(1428): transl_table=11
atgattacattcacgatttgcctgctggctctgattgcaggttactttatttacggacggttggtggagcgtgtctttggccccgacgaccgaaagaccccggcactgacacatgccgacggagtggattatattccccttcctacctggaaaatcttcatgattcaatttttaaacatagccggtctcggccccatcttcggagctattatgggagcgaagttcggtactgcttcctatctgtggattgtgttgggaagtatctttgccggtgccacacacgattatttcgccggaatgctctctctgcgtaacggtggtgagagcttgcctgaaattgtcggccgttttctggggatgactaccaagcaggtgatgcggggttttaccgttgtcctgatgattctggtaggtgcggtctttgtggcaggaccggcaggactgctggcgaagttgactcccgacagtctcgacactactttctggatcattgtggtgttcatctattatattcttgccactctgcttccggtcgataaaatcatcggaaagatatatcccttgttcgctgcagctttgttgtttatggcagtgggtatcctggtgatgctttatgttcatcatccggtcatcccggagttgtgggacggattacagaatactaatccggaagcagccgtgttacctattttcccgattatgtttgtcagtatcgcctgtggagccatctccggatttcatgctacgcaaagtcccctgatggcacgttgcatgacttctgagcgtcatggacgtcctgtcttttacggtgccatgattaccgagggcattgtggcgctgatctgggctgccgccgcgacttatttttatcgtgaacacggtatggaagagaacaatgcctctgtcattgtagacgctataacgaaagattggctcggtgcggtaggtggggtgcttgccattctgggagtgattgcggcgcctattacatcgggcgacaccgcgtttcgttcggcacgtctgatcgtagccgattttctgaaactggaacaaaaaagcatgcgtcgccgtttgtatatttgtgtgccgatgttcattgtcgccatcgggctgttgctttacagtttgcgtgataaagacgggttcgacatgatctggcgctattttgcctgggccaaccagaccttatcggtctttactctctgggccatcacagtctacttggcgcgtgcccgcaagtggtatggtttgacattggttcccgctctgtttatgacagctgtctgttccacttatatctgcatcgcccccgaaggattaggattgtcacattgggtttcgtatgtgacaggagggggttgtacactgattggagccgtttggtttattgtttggaaaaaagggattggatactcgtataaaaaataa

SEQ ID NO: 36559 - protein, 475 aa, Bacteroides fragilis YCH46
MITFTICLLALIAGYFIYGRLVERVFGPDDRKTPALTHADGVDYIPLPTWKIFMIQFLNIAGLGPIFGAIMGAKFGTASYLWIVLGSIFAGATHDYFAGMLSLRNGGESLPEIVGRFLGMTTKQVMRGFTVVLMILVGAVFVAGPAGLLAKLTPDSLDTTFWIIVVFIYYILATLLPVDKIIGKIYPLFAAALLFMAVGILVMLYVHHPVIPELWDGLQNTNPEAAVLPIFPIMFVSIACGAISGFHATQSPLMARCMTSERHGRPVFYGAMITEGIVALIWAAAATYFYREHGMEENNASVIVDAITKDWLGAVGGVLAILGVIAAPITSGDTAFRSARLIVADFLKLEQKSMRRRLYICVPMFIVAIGLLLYSLRDKDGFDMIWRYFAWANQTLSVFTLWAITVYLARARKWYGLTLVPALFMTAVCSTYICIAPEGLGLSHWVSYVTGGGCTLIGAVWFIVWKKGIGYSYKK

SEQ ID NO: 36560 - DNA, 2079 bp, Burkholderia pseudomallei K96243
  CDS (1)..(2079): transl_table=11
atgaatcgggcttccggttatttggtctggatcgcggtcgcgctgctcggcgcgttcgcgttcggcacgatcgcgctcgcgcacggcgagcggatcagcgcgctatggatcgtgatcgccgccgtttgcgtgtatttgatcgcgtaccgcttctacagccgcttcatcgcgagcaaggtcgtccagctcgacggcctgcgcatgacgcccgccgtcaagtacaacgacggcctcgattacgtgccgaccaacaaatacgtgctgttcggccatcatttcgccgcgatcgccggcgcgggcccgctcgtcggcccggtgctcgccgcgcagatgggctacacgcccggcatgctgtggattctcgcgggcgtcgtgttcgcgggcgcggtgcaggacttcatcgtgctgttcatctcgacgcgccgcgacggccgctcgctcggcgacctcgtcaagatggagctcggcacggtgcccggcgtgatcgcgctgttcggcgcgttcctgatcatggtgatcattctcgcggtgctcgcgctgatcgtcgtgaaggcgctcgccaattcgccgtggggcacgttcaccgtcgccgcgacgattccgatcgcgctgttcatgggcgtctacacgcgctacatccggccgggccggatcggcgaagtgtcgatcatcggcttcgtgctgctgatggcgtcgatcgcgtacggccagcacgtgcacgattcggccgcgctcgccgcgtggttcacgttcagcggcacgcagctcacgtggatcctgatcggttacggcttcgtcgcgtcggtgctgccggtgtggctgctgctcgcgccgcgcgactacctgtcgacgttcctgaagatcggcacgatcgtcggcctcgcgatcggcatcctgatcgtcgcgccggagctgaagatgccggcgctcacgaagttcgtcgacggcacgggcccggtctggtcgggcaacctgttcccgttcctgttcatcacgatcgcgtgcggcgcggtgtcgggcttccattcgctgatctcgtcgggcacgacgccgaagctgctcgacaacgaaaccaacgcgcgcttcatcggctatggcgcgatgctgatggaatcgttcgtcgcgatcatggcgctcgtcgccgcgtgcgtgatcgagccgggcgtctacttcgcgatgaacgcgccggccgccgtgctcggcacgacgccggaagcggtcgcgcacaccgtcacgcagtggggcttcatgctgacgcccgacatgctcacgcagacggcgaaggccgtcggcgagacgacgatcatcgcgcgcgccggcggcgcgccgacgctcgcggtcggcatggcgcagatcctgcaccaggtgatcggcggcgaggcgatgatggcgttctggtatcacttcgcgatcctgttcgaggcgctgttcatcctgaccgcggtcgacgcgggcacgcgcgcgggccgcttcatgctgcaggatttgctcggcacgttccacccggcgctcaagcgcaccgaatcgctgccggcgaacctgaccgcgaccgcgctgtgcgtggccgcgtggggttacttcctgtatcagggcgtggtcgatccgctcggcggcatcaatacgctgtggccgctgttcggcatctcgaaccagatgctcgccgcgatcgcgctggtgctcggcaccgtcgtgctgttcaagatgaagcgcgagcgctacgcgtgggtgacgatcgtgccgacggcgtggctgctgatctgcacgctgacggccggctggcagaaggtgttcgattcgaatccgaaggtgagcttcctcgcgcacgcggcgaagctgcaggcggccgcggccgacggcaaggtgctcgcgccggcgaagtcgctcgcgcagatgcagcggatcatcttcaacgactacgtggacgcggcgctctcggcgctgttcatcctggtcgtcgtgagcatcgcggtgtacggcgtggttgcggtcgtgcgcgcgcggcgcgcggtgcagcccacgtcgcgcgaaacgccgtacgaaccgatgccggtcgcgcaggcgctcggcagcggacgctga

SEQ ID NO: 36561 - protein, 692 aa, Burkholderia pseudomallei K96243
MNRASGYLVWIAVALLGAFAFGTIALAHGERISALWIVIAAVCVYLIAYRFYSRFIASKVVQLDGLRMTPAVKYNDGLDYVPTNKYVLFGHHFAAIAGAGPLVGPVLAAQMGYTPGMLWILAGVVFAGAVQDFIVLFISTRRDGRSLGDLVKMELGTVPGVIALFGAFLIMVIILAVLALIVVKALANSPWGTFTVAATIPIALFMGVYTRYIRPGRIGEVSIIGFVLLMASIAYGQHVHDSAALAAWFTFSGTQLTWILIGYGFVASVLPVWLLLAPRDYLSTFLKIGTIVGLAIGILIVAPELKMPALTKFVDGTGPVWSGNLFPFLFITIACGAVSGFHSLISSGTTPKLLDNETNARFIGYGAMLMESFVAIMALVAACVIEPGVYFAMNAPAAVLGTTPEAVAHTVTQWGFMLTPDMLTQTAKAVGETTIIARAGGAPTLAVGMAQILHQVIGGEAMMAFWYHFAILFEALFILTAVDAGTRAGRFMLQDLLGTFHPALKRTESLPANLTATALCVAAWGYFLYQGVVDPLGGINTLWPLFGISNQMLAAIALVLGTVVLFKMKRERYAWVTIVPTAWLLICTLTAGWQKVFDSNPKVSFLAHAAKLQAAAADGKVLAPAKSLAQMQRIIFNDYVDAALSALFILVVVSIAVYGVVAVVRARRAVQPTSRETPYEPMPVAQALGSGR

SEQ ID NO: 36562 - DNA, 2076 bp, Methylococcus capsulatus str. Bath
  CDS (1)..(2076): transl_table=11
atgccctctcgcaagctcaccgtcgtcctgacttggtccgccgtcgcgctgctcggtgcctccgcactgggaggaatcgcgctaaaccgcggtgagtcggtcaacagcctctggttcgtgaccgcggcggtctgcgtctacgccctgggttatagattctacagtgcctttgttgcaacccgcgtgctgctgctggatgccggccgcgccacacccgccgaacgcttcaacgacggccgcgacttcgtacccacccaccggtgggtcgtgttcggccaccacttcgccgcgatcgccggccccgggccgctgatcggcccgaccctggcggcccagttcggctatctgcccggcacgctttggatactgatcggcgctgtgttcggcggctgcgtgcaggacttcgtggtgctggtgtgctctatccgccgcgacggccgttcgctcggccagatggcccgcgacgagttgggccccatcggcggctcggcggcgctcgtcggtgtgatggcgatcatgatcatcctgatcgcggtgctcggcctggtcgtggtcaacgccatgaagcacagcccctgggcgacttcgacggtggcggcgacgattcccatcgcggtgctgatcggcctctacatgcgcgagatccgccccgggcgggtgatcgaggcgacgctgatcggcgtcaccctgctgatcctctcggtcgccggcggcggctggatcgaccaccatccggcgatccggacctggttcgactacgacgcccccaccctggcgctgatgatcatcgcctacggtttcgccgctgccgtattgccggtgtggctgctgctggcgccgcgcgactacctctctaccttcatgaaactgggtaccatcgccgccctcgccgtcgccatcctgatcctgcatcccgacatcaggatgccggcgctcacggccttcatcgacggcaccgggccgatcttcggcggcaagctgtttccgttcgtgttcatcaccatcgcctgcggcgcgatctccggtttccacgccctgatctcctccggcaccacgcccaagctgctggccaacgaggccgacgcccgcttcatcggctatggggcgatgatgatggaatccttcgtggccatcatggccatgatcgcggcgaccgtgctcgaccccggcatctatttcgccatcaacagcccggccggcgtggtcggcaaggaagcggccgacgcggtggcgacgatctcgtcctggggcttcccggtcgacgtcgggcaaatggcgaccctggcccgggagatgggcgaggcgagcctgttcgcccgcaccggcggcgccccttcgctggccgtgggcatggcatccttgttcgccagcgcgttcggcgacggcctgctggctctgtggtaccacttcgccatcatgttcgaggcactgttcatcctgacgacgctggacgccggcacccgcgtcgcccgcttcatgctgcaggatatgctgggcaactggcatcccgtgctgggacggaccggctggtatcccggcgtactgttctcctcggcgctggtcgtcgccggctggggctatttcctgtacatgggcaccatcgacccgctgggcggcatcaacagcctgtggccgctgttcggcatcgccaaccagatgctggccgccatcgccctgtgcgtcgccaccaccatcctggtcaagaccggcaaggcttcctacgcctggatcaccgccctgccgctgtcctggctgatcgtggtcaccagcagcgcggcctgggaaaaactgttcagccccgaactgcgcgtgggcttcctggcgcatgcccgcgacctgggcgacaagctggcggccggcctgctttcggcggaccaggccgccaaggcgccgcagctgatcttcaacgactatctggatgccaccctgaccgcggttttcatggggctgagctggatcctggcggcggacacgacgagggtctgctactgcgtgctcgccgggcgcccgcatccgcccagcagcgagtcgccccgcatcccgagccggcttacggaaaactgggtcagagactga

SEQ ID NO: 36563 - protein, 691 aa, Methylococcus capsulatus str. Bath
MPSRKLTVVLTWSAVALLGASALGGIALNRGESVNSLWFVTAAVCVYALGYRFYSAFVATRVLLLDAGRATPAERFNDGRDFVPTHRWVVFGHHFAAIAGPGPLIGPTLAAQFGYLPGTLWILIGAVFGGCVQDFVVLVCSIRRDGRSLGQMARDELGPIGGSAALVGVMAIMIILIAVLGLVVVNAMKHSPWATSTVAATIPIAVLIGLYMREIRPGRVIEATLIGVTLLILSVAGGGWIDHHPAIRTWFDYDAPTLALMIIAYGFAAAVLPVWLLLAPRDYLSTFMKLGTIAALAVAILILHPDIRMPALTAFIDGTGPIFGGKLFPFVFITIACGAISGFHALISSGTTPKLLANEADARFIGYGAMMMESFVAIMAMIAATVLDPGIYFAINSPAGVVGKEAADAVATISSWGFPVDVGQMATLAREMGEASLFARTGGAPSLAVGMASLFASAFGDGLLALWYHFAIMFEALFILTTLDAGTRVARFMLQDMLGNWHPVLGRTGWYPGVLFSSALVVAGWGYFLYMGTIDPLGGINSLWPLFGIANQMLAAIALCVATTILVKTGKASYAWITALPLSWLIVVTSSAAWEKLFSPELRVGFLAHARDLGDKLAAGLLSADQAAKAPQLIFNDYLDATLTAVFMGLSWILAADTTRVCYCVLAGRPHPPSSESPRIPSRLTENWVRD

SEQ ID NO: 36564 - DNA, 2277 bp, Nocardia farcinica IFM 10152
  CDS (1)..(2277): transl_table=11
atggcgacaatcgaatatctgcggaccgaccccgacctgcccccggtgggcgtggtcgaccgatcccccatgaccccggccaagaaggccgtcctcgccgggatcgcgatactcggcgccgtcgcctggtcgatcctcgccctcgcgcgcggcgagaacgtcaacgcggtgtggatcgtcatcgcggcggtgtgtacgtatgtgatcgcctaccgcctctacgcgcggttcatcgaatggaagatcaccaagccgcgcgacgacctcgccaccccggccgaaatcctggagaacggcaaggatttcatgccgatggaccgccgggtcctctacggccaccacttcgcggccatcgcgggcgcgggtccgctggtcggcccggtgctggcggcgcagatggggtatctgccgggcaccatctggatcgtggtcggcgtctgcctggccggtgcggtgcaggactacctggtgctgtgggcttcgacgaaacggcgcgggcgcagcctcgggcagatggcgcgcgacgagctcggcgtggtcggcggtgtcgcggccatcgccgcgatcatcgtgatcatgatgatcctgctggcggtgctggcgctggtcgtcgtgaacgcgctcggcgagagcccgtggggtgtgttctccatcgccatgaccatccccatcgccctgttcatgggcatctacctgcggttcctgcggccgggcaaggtgggcgaggtgtcggtgatcggcatcgcgctgctgttgctggccatcgtcgccggtggctgggtgtcggaaaccgactggggcaccgactggttcacgctctcgcgcaccaccatcgcctggctgctgatcggctacggcttcctcgcctcggtgctgccggtgtggctgctgttggcgccgcgcgactacctgtcgacgttcatgaagatcggcaccatcggcctgctggccatcggcatcctggtcaccatgccggtgctgaaggcgcccgcgatctccgaattcgccaccagcggcaccggtcccgccttcgcgggcagcctgttcccgttcctgttcatcaccatcgcctgcggcgcgctctcgggcttccacgcgctgatctcctccggcaccactcccaaactgctggagaaggaatcgcacgcgaagatgatcggctacggcggcatgctgatggagtcgttcgtcgcggtgatggccatcatcaccgccaccatcatcgaccagcacctctacttcggcatgaacgcgccgctcgggctcaccggcggcacacccgagaaggcggcccaatacaccaactcgctcggcctgtccggtccgcccgccaccgcggagaccttcgcgggtgcggccgccgacgtcggtgagaacaccatcatctcccgcaccggcggcgcgccgaccctggccgtcggcatctccgaggtgttccaccgcttcctcggcggggagagcatgaagtcgttctggtaccacttcgcgatcatgttcgaggcgctgttcatcctcaccaccatcgacgcgggcacccgcgtcgcgcggttcatggtctcggacgcgttgggcaacttcggtggtccgctgcgcaagttcaaggacccgtcgtggcgggtgggcgcctgggtctgctcggtggtcgtggtcgccgcgtggggctcgatcctgctgatgggcgtgaacgatccgctgggcggcatcaacgccctctacccgctgttcggcatcgccaaccagctgctggccgcggtggcgctgaccgtcgtgctgaccatcatcgtgaagaagggcctggtgaaatgggcctggattcccggcatcccgctggtgtgggatctgctggtgacgatgacggcctcctggcaaaagatcttctccgccgacccgaaggtcggctactggaagcagcacagcctgtgccagcaggcgcaggaggccggcacactctgcctgacggccaagacgccgcaggaggtggacgtggtggtgcgcaacaccttcatccagggcacgctctcgatcgtgttcgcggtgctggtgctggtggtggccgtcgtcggcaccatcgtgtgcctgcgggcctggcgggccggggagagtccgaccaccgagtcgccggaggagccgtcgaagatcttcgcgcccagcggcttcatcgccacacccgccgagcgggaggtgcagaaggagtgggacgcgctgatcgcggcgggcaaggtgcgcgcgcccggcgcggcgcaccaggcgcccgacaaggcggaatcgagggcgtga

SEQ ID NO: 36565 - protein, 758 aa, Nocardia farcinica IFM 10152
MATIEYLRTDPDLPPVGVVDRSPMTPAKKAVLAGIAILGAVAWSILALARGENVNAVWIVIAAVCTYVIAYRLYARFIEWKITKPRDDLATPAEILENGKDFMPMDRRVLYGHHFAAIAGAGPLVGPVLAAQMGYLPGTIWIVVGVCLAGAVQDYLVLWASTKRRGRSLGQMARDELGVVGGVAAIAAIIVIMMILLAVLALVVVNALGESPWGVFSIAMTIPIALFMGIYLRFLRPGKVGEVSVIGIALLLLAIVAGGWVSETDWGTDWFTLSRTTIAWLLIGYGFLASVLPVWLLLAPRDYLSTFMKIGTIGLLAIGILVTMPVLKAPAISEFATSGTGPAFAGSLFPFLFITIACGALSGFHALISSGTTPKLLEKESHAKMIGYGGMLMESFVAVMAIITATIIDQHLYFGMNAPLGLTGGTPEKAAQYTNSLGLSGPPATAETFAGAAADVGENTIISRTGGAPTLAVGISEVFHRFLGGESMKSFWYHFAIMFEALFILTTIDAGTRVARFMVSDALGNFGGPLRKFKDPSWRVGAWVCSVVVVAAWGSILLMGVNDPLGGINALYPLFGIANQLLAAVALTVVLTIIVKKGLVKWAWIPGIPLVWDLLVTMTASWQKIFSADPKVGYWKQHSLCQQAQEAGTLCLTAKTPQEVDVVVRNTFIQGTLSIVFAVLVLVVAVVGTIVCLRAWRAGESPTTESPEEPSKIFAPSGFIATPAEREVQKEWDALIAAGKVRAPGAAHQAPDKAESRA

SEQ ID NO: 36566 - DNA, 1527 bp, Photobacterium profundum SS9
  CDS (1)..(1527): transl_table=11
ttgggtataagcgttatcaaattcccaacatcacagcgagaaaacaaaatgacttggttcttactctgcgttgctgcactagtcggtggttacttcatctacggtgcctttattgaaaaaatatttggcataaatgaaaatcgccaaacaccagcatatagtaaacaagatggcgtagattatgtgccaatgtcgaacaagaaggtttaccttgttcagttattaaacatcgcgggtgtgggtccgatttttggtccgattatgggtgcgctatatggcccagcagccatgttatggattgtattagggtgtatcttcgccggcgcagtacatgattacttctcgggtatgctgtcgattcgtaataatggtgcatcagtacctacgattacgggacgctacctaggcaacggtgcaaaacattttatgaatatctttgctatcgtactgttgctattagtgggtgtggtattcgtatcggcacctgctggcatgatcactaaccttgtgaacgaacaaactggcattgatatgtcaatgacaacaatggttgtgattatttttgcttattacatcatcgcgaccattgttcctgttgataaaatcatcggtcgtttctacccattatttggcgcattacttatctttatgtctgtggggctgattaccgctatcgcattctctagtgagcacacgctactgggtgattacgagatgagccagatgttcaccaacatgaacccgaatgacttacctctttggcctgcactgtttatcactatcgcttgtggtgctatctctggtttccacgcaacccagtcgccactgatggctcgctgtcttcaaaatgaaaagaacggtcgcttcgtattttacggtgcaatgattggtgaaggtattatcgcattaatttggtgtgctcttgcattgtctttcttcggctctgttgaagcgctatcagaagcaatatctactggtggccctggtagtgtggtatacaactcatctatcggtctactgggtgtgtttggcggtattattgctttcttaggtgtggttatcttaccgattacctcaggtgacactgcattccgttcaagccgtctaattcttgctgaatatttcaatatggatcagaaagccctgcgtaaccgcctactaatggcattaccattgtttgttcttggtggcattctaacgcaagtcgacttcggtattatctggcgctacttcggctttgcaaaccaaacaacagccgtaatgatgctgtggacagcctctgcttacttactgcgtcacaataaactgcactgggtagcgactgtaccagcaatgttcatgacaacggtttgtattaccttcatcttaaacaacagccaactaggctttggtttatcgatgatgacatcaacgattacgggtcttgtagcaatgctagccattacaggctacgtcattaagaaatcgaaaggtaaaggcgaaactgaccttgccaatgaagaagacggtaggttagaaactgtataa

SEQ ID NO: 36567 - protein, 508 aa, Photobacterium profundum SS9
MGISVIKFPTSQRENKMTWFLLCVAALVGGYFIYGAFIEKIFGINENRQTPAYSKQDGVDYVPMSNKKVYLVQLLNIAGVGPIFGPIMGALYGPAAMLWIVLGCIFAGAVHDYFSGMLSIRNNGASVPTITGRYLGNGAKHFMNIFAIVLLLLVGVVFVSAPAGMITNLVNEQTGIDMSMTTMVVIIFAYYIIATIVPVDKIIGRFYPLFGALLIFMSVGLITAIAFSSEHTLLGDYEMSQMFTNMNPNDLPLWPALFITIACGAISGFHATQSPLMARCLQNEKNGRFVFYGAMIGEGIIALIWCALALSFFGSVEALSEAISTGGPGSVVYNSSIGLLGVFGGIIAFLGVVILPITSGDTAFRSSRLILAEYFNMDQKALRNRLLMALPLFVLGGILTQVDFGIIWRYFGFANQTTAVMMLWTASAYLLRHNKLHWVATVPAMFMTTVCITFILNNSQLGFGLSMMTSTITGLVAMLAITGYVIKKSKGKGETDLANEEDGRLETV

SEQ ID NO: 36568 - DNA, 1896 bp, Haloarcula marismortui ATCC 43049
  CDS (1)..(1896): transl_table=11
atgacacaggtaatctggatcgtcctggcagtactggtgacgttcagcgtggggtatctggggtattcgaagtacctcgcgcggttcctcgaactcgacgacgacaacgagacaccggcgcacaagtacgaagacgggcaagaatacgtcccgtcgaagaaaccggtgttgctgggtcaccactactccagtatcgcgggtggggcaccgattgtcggaccgattacggcgggcgctgtgtgggggtgggttcccgcactcctgtggattgccatcggtaacccgctgatggggagcgtccacgacttcgtctcgctgtcggggtcgctcagacacgaggggaagtcaatcggctacattattggtgagtacatcggggaagggggcaagaacatgctgctgtggttcgcgttcctgaccatcatcctcgtcgtcgcggtgttcgcgctggtggtcgccatcgtgttcgacgcgttcccacaggtgacgaccgcgagcttcgtttacatcgtactggcgctggtgtttggcgtgtatctctaccagttgaacggaccgttcctcccgggaacagttctgttcgtcgctggtgtgttcgccggcgtgtacgtgggaattctgaaccccgttgcgctgttcccggccgtcggcgagacgagctaccccgcaggcacgctcgtgctcgcggacgtgctgaacctcggcactggacagtggattcccgggtcgtctgcgacggcgatgaaccccaaccgtgcggcgtgggtgccgataatcatggtgtacgcgggcattgcgagcgcgctcccggtgtgggtgctgctccagccgcgtgactacctctcgtcgttcctgctgtacgccggcgtcggcggttcgctggtggctgtcatcgtcggcacgattttcggcacggctgccaccgagaccggctcgctggtcatcgcggactcgatgggtgcattcaacggcttctggggtgtcgagggcgcgggcctcgcaccgctgttcccgctgctgttcattaccatcgcctgcgggacgatcagtggcttccactcgctggtgtcctctgggacgacagccaagcagctgaacaaggagaccgacgcccgcctcatcgggtacggtgggatgctcggcgagggactgctggccgccgtcgcactgtcgacgctcgccgtggccggcttcgctgatcccgccggcggtatcggtgctgcgttgccgaacttcgcgacgggtggcggcatcatcttcaccagtctcggcatcccccagaccttcggcgcaccgttcatggcgctcgtattggtgagtttcctgctgacctccacggacacggccgtccgactcggccggtacatgatggaggagatcgtcgggctccgggcgggcgaaacggcttccggattcaacgtcggcggcggcatccgttcgaccctcggcgaaatcgggcgcggccgctacacgaacccgctcgtgcaggccatcccggcctatctgatggttatctccggcgagtggctcacgctctgggccctgttcggcggtgcgaaccagctgctcgcggcgctggcgctgctgaccgcgactgtctggctcgcgaactgggacgacaacaagcagctgtactccacgggcgtgccgatggccatcatgacgactatcactattctggggctgtcttggctggcgttctacagcaacctctaccagaacctcattcagggcggtgccgaggggactgcggccatcgcgtcctcgaccgtccagatggtactggcgctggtcctcatcggcctcgcgctggccctcgtgaagaaagggtacgacaacatcagcacggtccgtgaccgtgggcccgccagcgcggtcgaaccaggcgacgactga

SEQ ID NO: 36569 - protein, 631 aa, Haloarcula marismortui ATCC 43049
MTQVIWIVLAVLVTFSVGYLGYSKYLARFLELDDDNETPAHKYEDGQEYVPSKKPVLLGHHYSSIAGGAPIVGPITAGAVWGWVPALLWIAIGNPLMGSVHDFVSLSGSLRHEGKSIGYIIGEYIGEGGKNMLLWFAFLTIILVVAVFALVVAIVFDAFPQVTTASFVYIVLALVFGVYLYQLNGPFLPGTVLFVAGVFAGVYVGILNPVALFPAVGETSYPAGTLVLADVLNLGTGQWIPGSSATAMNPNRAAWVPIIMVYAGIASALPVWVLLQPRDYLSSFLLYAGVGGSLVAVIVGTIFGTAATETGSLVIADSMGAFNGFWGVEGAGLAPLFPLLFITIACGTISGFHSLVSSGTTAKQLNKETDARLIGYGGMLGEGLLAAVALSTLAVAGFADPAGGIGAALPNFATGGGIIFTSLGIPQTFGAPFMALVLVSFLLTSTDTAVRLGRYMMEEIVGLRAGETASGFNVGGGIRSTLGEIGRGRYTNPLVQAIPAYLMVISGEWLTLWALFGGANQLLAALALLTATVWLANWDDNKQLYSTGVPMAIMTTITILGLSWLAFYSNLYQNLIQGGAEGTAAIASSTVQMVLALVLIGLALALVKKGYDNISTVRDRGPASAVEPGDD

SEQ ID NO: 36570 - DNA, 2076 bp, Geobacillus kaustophilus HTA426
  CDS (1)..(2076): transl_table=11
gtgaaggggctaaaatcgattttgttatggggcctgatttccgtccttggggccgcagcgtttgccattttggctttaagccgcggcgaatcggtcaacgccatgtggcttatcgtcgccgccgtctgcacgtatgcggtcgcttatcggttttacagccggtttatcgcccgcaaagtgtttggtcttgatgataaccggaaaacgccagcggaagtgttcaatgacgggaaggactatgttccgacgaacaaatgggtgctatttggccatcactttgccgctattgcgggtgcgggaccgcttgtcggaccgattttggccgcgcagatgggctatctgcctgggacgctttggattgtgatcggcgttgtgctcggcggagcggtgcaagactttgtcattttgttcgcttcgatgcgccgcaacgggaagtcgctcggcgaaatgattaaggaagaaatgggtccggtgacgggctttatcgcagcgcttggcattttgggcattatgattattttattggccgtattggcgctcgttgtcgtgaaagcgcttgtcggaagcccgtgggggatgtttacgatcgccgcgacgattccgattgcgattttgatgggcatttacatgcgcttcatccgtccagggcgcgttgctgaagcgtcgcttgggggatttgtgctgttgattttgtcgatcgtggtcgggcaatatgtcgcggagcacccgacgctctcggcgatgtttacgctaaaaggggaaacgatcgccatcttaatgatcatttatggctttgtcgcttcggcgttgccggtatggctgttgttggcgccgcgcgactatttgagcacgttcttgaaaatcggcacgattgtcggattggcgctcggcattttcgtcgtcatgccggacttgcaaatgccggcagtgacgaaatttatcgatggcaccgggccggtgtttgcaggcaacttgttcccgttcttgttcattacgatcgcttgcggcgcggtgtctggattccacgcgctcgtttcatccggcacaacgccgaagatgattgagcttgaaagccatgcgcggccgatcggctacggtgcgatgctgatggagtcgttcgtcgctgtcatggcgatggtggcggcttgcgtcttgacgccaggggcgtattttgccatcaacagcccggctgctgtcatcggaaccgatgtggcgcaggcggcaaaagtggtatcgtcatggggcttcaccgtcacgccggatatgcttgcgcagttggcgaaagacgtcggcgaacaaacggtgttgtcacgcacgggcggggcgccgacgttggcgatcgggatggcgcacattttatcgagcgtcatcggcggcaaggcgcttatggcgttctggtatcactttgccatcctgtttgaagcgctgttcatcttgacgacgattgacgccggcacgcgcgtcggccgtttcatgatccaagacattatgggcacgttttacaaaccgctcggcaaaacggattcgcttgcctcgaacttgatcgctacgaccctttgcgtactggcgtggggttacttcctgtaccaaggcgtcgtcgacccgctcggcggcatcaacacgctatggccgctgtttggcatcgccaatcaaatgttggctggcatcgccttgttgtttgcgacgacggttctatttaaaatgggcaaaaaggcatatgtttgggtcacgctcgtgccgacaacatggcttttggtcgtcacgctgacagccgggtatcaaaaactgttccacgaaaatgtcaaaattggtttcttgtcgcatgcgaaaatgttccaagacagcttgagccaaggcaaaattttggcgccggcaacgaatgaggcgcaaatgcggcaaattattatgaacgattacattgatgcgacattgtgcgcgattttcatgctcgttgtgatcgcgatgctgatctcggcgttgaacatttggatcaaagtattgcaaaacaaacatgtgccgctcaaggaagcgccgtacgtgccgcgcgatggagaaggagcgaagcactatgcctaa

SEQ ID NO: 36571 - protein, 691 aa, Geobacillus kaustophilus HTA426
MKGLKSILLWGLISVLGAAAFAILALSRGESVNAMWLIVAAVCTYAVAYRFYSRFIARKVFGLDDNRKTPAEVFNDGKDYVPTNKWVLFGHHFAAIAGAGPLVGPILAAQMGYLPGTLWIVIGVVLGGAVQDFVILFASMRRNGKSLGEMIKEEMGPVTGFIAALGILGIMIILLAVLALVVVKALVGSPWGMFTIAATIPIAILMGIYMRFIRPGRVAEASLGGFVLLILSIVVGQYVAEHPTLSAMFTLKGETIAILMIIYGFVASALPVWLLLAPRDYLSTFLKIGTIVGLALGIFVVMPDLQMPAVTKFIDGTGPVFAGNLFPFLFITIACGAVSGFHALVSSGTTPKMIELESHARPIGYGAMLMESFVAVMAMVAACVLTPGAYFAINSPAAVIGTDVAQAAKVVSSWGFTVTPDMLAQLAKDVGEQTVLSRTGGAPTLAIGMAHILSSVIGGKALMAFWYHFAILFEALFILTTIDAGTRVGRFMIQDIMGTFYKPLGKTDSLASNLIATTLCVLAWGYFLYQGVVDPLGGINTLWPLFGIANQMLAGIALLFATTVLFKMGKKAYVWVTLVPTTWLLVVTLTAGYQKLFHENVKIGFLSHAKMFQDSLSQGKILAPATNEAQMRQIIMNDYIDATLCAIFMLVVIAMLISALNIWIKVLQNKHVPLKEAPYVPRDGEGAKHYA

SEQ ID NO: 36572 - DNA, 2151 bp, Salmonella enterica subsp. enterica serovar Paratyphi A str. ATCC
  CDS (1)..(2151): transl_table=11
atggatacgaaaaagatattcaagcacataccctgggtgattctcggaatcatcggtgctttctgcctctcggtcgttgccctacgtcggggtgaacacgtgagcgccctgtggatcgtggtcgcttccgtttccgtctatctggtggcttaccgctactacagcctgtacatcgcccagaaggtcatgaaactcgacccgacgcgcgcgacgccggcggttatcaataacgacggcctgaactacgtgccgactaaccgctacgtgctgtttggtcaccacttcgccgccatcgccggcgcaggtccgctggtcgggccggtattggccgcgcagatgggctatctgccggggacactgtggctgctagcgggcgtggtgctcgcgggcgcagtgcaggactttatggtgctgttcatctcttcccgccgtaacggcgcctctcttggcgagatgatcaaagaagagatgggtaccgttccaggcaccatcgcgctgttcggctgcttcttaattatgatcatcatcctcgcggtgctggcattaatcgtggttaaagcgctggccgaaagcccgtggggcgtcttcaccgtctgctcaacggtgccgattgcgctgtttatgggcatctacatgcgcttcctgcgtccgggacgcgtaggcgaagtctccgttattggtatcgtgctgctggtggcgtctatttacttcggcggcgtgattgcccacgacccgtactggggcccggcgctgacctttaaagacaccaccattaccttcgcgctgatcggctacgcatttgtttccgcgctgctgccggtatggctgatcctcgccccgcgcgactatctcgctaccttcctgaaaatcggcgtgatcgtcggtctggcgctggggattgtgatcctcaacccggaactgaaaatgccggcgttgacgcagtacgtcgacggtaccggcccgctgtggaaaggtgctctgttcccgttcctgttcatcaccatcgcctgtggcgccgtctctggcttccacgcgctcatctcttccggtaccacgccgaaactgctggcctgtgagaccgatgcgcgttttatcggctacggtgcgatgctgatggagtcctttgttgcggtgatggcgctggtggcggcctcgatcattgaaccgggtctctacttcgcgatgaacaccccgccggcaggtctgggcattaccatgccaaacctgcacgagatgggcggcgagaacgcgccgctgattatggcgcagttgaaagacgttaccgcacatgcagcggcgaccgtcagctcctggggctttgtgatttccccggaacaaatcctgcaaactgcgaaagatatcggtgaaccgtcagtattgaaccgcgcaggcggcgcgccaacgctggcagtaggtatcgcgcatgtgttccacaaagtcctgccgatggcggatatgggcttctggtatcacttcggtattctgttcgaagcgctgtttatcctgaccgcactggatgcgggtacccgttccggccgctttatgttgcaggatttactgggtaacttcgtcccgttcctgaaaaaaaccgattctctggtcgcgggtatcatcggtaccgcaggctgcgtcggtttgtggggctatctgctgtatcagggcgtggtcgacccgctgggcggcgtgaagagcctgtggccgctgttcggtatctctaaccagatgctggccgccgtggcgctggtgttgagcaccgtggtactgatcaaaatgcagcgcaccaagtacatctgggtgacggtaatcccggcggtatggctgctgatctgcaccacctgggcgctgggcctgaaactgttcagcgccaacccacagatggaaggtttcttctacatggcaaacctgtataaagagaagattgccaacggcaccaacctgaccgcgcagcagattgccaatatgaaccatatcgtggtgaacaactacactaacgctggtttgagtattctgttcctggtggtggtgtacagtattatcttctacggtttcaccacctggatgaaggtacgcaacagcgataaacgtaccgacaaagaaaccccgtatgtgcccgtgccggaaggcggcgtgaagatctcttcacaccactaa

SEQ ID NO: 36573 - protein, 716 aa, Salmonella enterica subsp. enterica serovar Paratyphi A str. ATCC
MDTKKIFKHIPWVILGIIGAFCLSVVALRRGEHVSALWIVVASVSVYLVAYRYYSLYIAQKVMKLDPTRATPAVINNDGLNYVPTNRYVLFGHHFAAIAGAGPLVGPVLAAQMGYLPGTLWLLAGVVLAGAVQDFMVLFISSRRNGASLGEMIKEEMGTVPGTIALFGCFLIMIIILAVLALIVVKALAESPWGVFTVCSTVPIALFMGIYMRFLRPGRVGEVSVIGIVLLVASIYFGGVIAHDPYWGPALTFKDTTITFALIGYAFVSALLPVWLILAPRDYLATFLKIGVIVGLALGIVILNPELKMPALTQYVDGTGPLWKGALFPFLFITIACGAVSGFHALISSGTTPKLLACETDARFIGYGAMLMESFVAVMALVAASIIEPGLYFAMNTPPAGLGITMPNLHEMGGENAPLIMAQLKDVTAHAAATVSSWGFVISPEQILQTAKDIGEPSVLNRAGGAPTLAVGIAHVFHKVLPMADMGFWYHFGILFEALFILTALDAGTRSGRFMLQDLLGNFVPFLKKTDSLVAGIIGTAGCVGLWGYLLYQGVVDPLGGVKSLWPLFGISNQMLAAVALVLSTVVLIKMQRTKYIWVTVIPAVWLLICTTWALGLKLFSANPQMEGFFYMANLYKEKIANGTNLTAQQIANMNHIVVNNYTNAGLSILFLVVVYSIIFYGFTTWMKVRNSDKRTDKETPYVPVPEGGVKISSHH

SEQ ID NO: 36574 - DNA, 1680 bp, Idiomarina loihiensis L2TR
  CDS (1)..(1680): transl_table=11
atgaacgcaatcgtaatgatggttctgggtttaggcgcaatgtttctcggttatgttttttactctaaatttattgctgagaaaatttttaagcttgatccgaacttcagaacacccgctcacgaattagaagacggagtcgacttcgtccctaccaataaatacgttctgtggggccaccactttacttctgtagccggtgcggcacctattattggtcctgccattgcggttatctggggttgggtacctgctttcttatgggttattttcggtaccatattttttgctggcgtacacgacgctggcgcgatctgggcaagtaaccgtaataaagccaaatctattggtaacttgactggcgatgttgttggcaaacgctctcaaacgctgttcatgatcgttatcttccttgtcttactaatggtcaacgcggttttcgctactgctatttcaggtctgttgattaaattctccagctcagtagtgccagtttggggtgctatttttgtcgcacttattatcggacaaattattttccgtaaatggatgggcttaggtgcaatatccattatcggtgtactggcactgtacgcacttatctgggcaggtccctcatttccaatagaattgccagaaacggtaatgggtatcagtgacaacgcgcaatgggttcttatcctgtttggctacgccgctatcgcttcattactgcctgtttggatgttgcttcagccacgtgactacatcaacggtctgcagctcttcattggtcttattttgctttacggtgccacgttattactggctccggaaatttcagctccggccttcaatagcaataccccagaaggcaccccgtcaatgttgccgctgttattcgtcaccatagcctgtggggcaatttcgggcttccacggtctggttgcatcgggtacaacctcgaagcaacttgataaagaaaccgacgcccgttttgtcggatactttggtgcggttggtgaaggctcattgtcgctggcgactatcatcgccgccacagccggttttgcaacattagccgactgggaagcggtctactcatctttcggacaaggcggcgtatcagcctttgttgaaggtggcgccaacattattagtcaggggctaggcctggacattggcgtatcagaaaccctgctgacggtaatggctgtgctttttgccggtaccacaatggatactggattacgtctgcaacgctatattttccaggaatggggaaacttgtataacattaactggatgcaaaaagcctttccggcaacgatgctagctgtaggaagctgcttattgttagccttcggtgctggcggcgcagacggttccggcggcttagttatctggcctctgttcggtaccacaaaccagttattagcagggttgaccttgttggttattacggtcatgttggtgcgcttaggccgaccaatgtattacaccttaataccgttaattttcctgttgataatgacagtcttcgctcttattgttcagcttaaagatttctataacagcggtgactggttcttaatgggtctggatttagtggtgctggttgccgctatctggattgctcttgaagctagcgcaggcttaactaaaatccgtaaggaacaaaaagcccagaagcagcaataa

SEQ ID NO: 36575 - protein, 559 aa, Idiomarina loihiensis L2TR
MNAIVMMVLGLGAMFLGYVFYSKFIAEKIFKLDPNFRTPAHELEDGVDFVPTNKYVLWGHHFTSVAGAAPIIGPAIAVIWGWVPAFLWVIFGTIFFAGVHDAGAIWASNRNKAKSIGNLTGDVVGKRSQTLFMIVIFLVLLMVNAVFATAISGLLIKFSSSVVPVWGAIFVALIIGQIIFRKWMGLGAISIIGVLALYALIWAGPSFPIELPETVMGISDNAQWVLILFGYAAIASLLPVWMLLQPRDYINGLQLFIGLILLYGATLLLAPEISAPAFNSNTPEGTPSMLPLLFVTIACGAISGFHGLVASGTTSKQLDKETDARFVGYFGAVGEGSLSLATIIAATAGFATLADWEAVYSSFGQGGVSAFVEGGANIISQGLGLDIGVSETLLTVMAVLFAGTTMDTGLRLQRYIFQEWGNLYNINWMQKAFPATMLAVGSCLLLAFGAGGADGSGGLVIWPLFGTTNQLLAGLTLLVITVMLVRLGRPMYYTLIPLIFLLIMTVFALIVQLKDFYNSGDWFLMGLDLVVLVAAIWIALEASAGLTKIRKEQKAQKQQ

SEQ ID NO: 36576 - DNA, 1626 bp, Bacillus clausii KSM-K16
  CDS (1)..(1626): transl_table=11
gtgaattttgtgacgcttatgcttatttgcgttgccttgttaattgtcgcctatttcacttatggaaaatacttggagcgtcgcttaaaaattgacggacaacggacaacgcctgcacatacgttctatgacggacaggagtatattccgacgaaaacgcctgtactgcttggccatcatttcacgacaattgcaggcggcggtccgattactgggccaattgccgcgattgtgttcggctggctgcctgccgttctatggattataatcggcagcatttttgtaggcggcacccatgattatgcatctttgcaagcttccattcgccataaagctaagtcgattggcgaagtcattaaagaacatatggggaaacgtgggcagttaatgttcttagccttttcgatagcgacgttaattttgatcattggcgtctttatcattctagttgcaaatacgtttgtgtcctttccaggcgcagccactgcttcccttttgtttattgctgtcgcgatgggtttcggcgttcttgtcaaccaagtgcgcatccatttagcgcttgcaacgttgcttggcgtcgtcgccatggcactatcggtttggattggcctaagctttccaatcacccttagtgctactgcttggtcgctcattttaatcgtttacgcctatttcgcgtccgtgttgcctgtctggtttttactacaaccccgtgattacttaaattcatttttgctctattttctaattggtggcgcatttttaggtttgttaatcgctaggcctactattcaaatgcctgcctttaccggtttttataatgatacgctcggctttttgtttcccattttgtttattacaattgcatgtggggcgatttccggcttccattcactcgtttcgtcgggaacaacgtccaaacagctgaataacgaaaagaatggccgctttgtcgcttacggttccatgttaatcgaagcatttgttgccatcatcgcgattggttccgttgcttatttaacacttgaccaatttaatgcgcttatggccgaactgaatgatccgattagtgtgttttccgtgggcattggacactttatgaacacgtggggattgcctgtggcagctggtgttacgtttacggcactcgctgcatcggcattcttaatgacaacacttgactcggccacgcggctcatgcgttatgctgttacggaactaggcgaaagcatcaacgtgcagttgcttcgtaataagcatacggcaaccgtactcggcttaataggagcaacgacgcttgccctttccggcacatggcaaagcgtatggccgctgtttggcgccgccaaccaaatgcttggggcgttggctctccttgccattaccttatggcttgtgaaaacaaaatcgaaagcattgtttgtgatcatccctatggtgtttatgtttattgtcaccacatcagcgcttctcgttatgatgcattccaattttcttgccggtgattacttgctcgttgttgcttctttcatcctatttgtgatgtgcgtattcctcggcatcgagggggcccgcagtgttacaaaacctaaaaacaagcaaaaaccaactgatttaaacgcataa

SEQ ID NO: 36577 - protein, 541 aa, Bacillus clausii KSM-K16
MNFVTLMLICVALLIVAYFTYGKYLERRLKIDGQRTTPAHTFYDGQEYIPTKTPVLLGHHFTTIAGGGPITGPIAAIVFGWLPAVLWIIIGSIFVGGTHDYASLQASIRHKAKSIGEVIKEHMGKRGQLMFLAFSIATLILIIGVFIILVANTFVSFPGAATASLLFIAVAMGFGVLVNQVRIHLALATLLGVVAMALSVWIGLSFPITLSATAWSLILIVYAYFASVLPVWFLLQPRDYLNSFLLYFLIGGAFLGLLIARPTIQMPAFTGFYNDTLGFLFPILFITIACGAISGFHSLVSSGTTSKQLNNEKNGRFVAYGSMLIEAFVAIIAIGSVAYLTLDQFNALMAELNDPISVFSVGIGHFMNTWGLPVAAGVTFTALAASAFLMTTLDSATRLMRYAVTELGESINVQLLRNKHTATVLGLIGATTLALSGTWQSVWPLFGAANQMLGALALLAITLWLVKTKSKALFVIIPMVFMFIVTTSALLVMMHSNFLAGDYLLVVASFILFVMCVFLGIEGARSVTKPKNKQKPTDLNA

SEQ ID NO: 36578 - DNA, 1458 bp, Bacillus clausii KSM-K16
  CDS (1)..(1458): transl_table=11
atgtatacatttttgggagcgcttgcactattaataattgggtatttcacttacggaagatttgtcgaaaaagtgttccagccaaaggcggaaaggacgacgcctgcctatacgaaacacgatggcgtcgactatttgccgatgggcaaaaagaaaaacgcattgattcagttgattagcattgctggggtagggccgatttttgggccgattatgggtgcgctttacgggcctgtcgccttcatctggatcgtactcggctgtatttttgcaggtgcagtccatgactatttgacagggatgatttcgattcgaaatggcggcgcccacttgcctgagctagcgggaaagtttctagggaaagcgatgaaacacgtggtcaacgcattctcgatcttgcttttgctgctcgtcggtaccgtctttgtcgcctcgccagctgacttgctttatgatctggtcaatggttctgtgccagttgttgtctttgttgtcctcatctttttctattttctattggcaacgatcctgccgatcaataaaatcattggcagcatttatccttatatcggtgccttgctgctgtttagcacggtaggaattggcttggcccttgtttggaaccaagcgccgattccagaattgtcccttgccaatacccatcccgagggagcggcaatttttccgctgttgttcttgacgatttcttgtggggcgctatctggtttccacgccacgcaatcgccaatcatttcgcggacgacacaaaatgaaagccaagggcgcaacattttttatgggatgatgattgcagagggcatgatagcgatgatttgggcagcggcagcaatgagtttatttgatggccctgtcacgcttaacgaattaatctccacgataggcacaggcggcattgtgtctgaaatttctacaatgatgctaggcccaattgttggcacactagcgattctcggcgtcattattttgccgattacatctggcgataccgcttttcggagtgcgcgaatgattattgccgattatatcaacgtgccgcaaaagaaagtgatgaaccgcatttggattgccgcgccattgttcattacgtctatcattttaacgacagtagacttcacaatgctgtggcagtactttaactgggcgaaccaatcgaccgccgtcatcgccctttggatcggcgccatgttcttatacattgcccgccgaaattactggattgcgatttttccagcctggtttatgagtgtgacggcagcgacctatatcgtcaatgcgccaatcggctttaacttgccaatgcaagcatccgttatcatcggcgtaggctttaccgtccttttgactgttttattttttaaagcagcccataaacgccggagcgaaaacctcccgattgaagaagatatttccgaatgggaaaacaaacaaagcgcgtaa

SEQ ID NO: 36579 - protein, 485 aa, Bacillus clausii KSM-K16
MYTFLGALALLIIGYFTYGRFVEKVFQPKAERTTPAYTKHDGVDYLPMGKKKNALIQLISIAGVGPIFGPIMGALYGPVAFIWIVLGCIFAGAVHDYLTGMISIRNGGAHLPELAGKFLGKAMKHVVNAFSILLLLLVGTVFVASPADLLYDLVNGSVPVVVFVVLIFFYFLLATILPINKIIGSIYPYIGALLLFSTVGIGLALVWNQAPIPELSLANTHPEGAAIFPLLFLTISCGALSGFHATQSPIISRTTQNESQGRNIFYGMMIAEGMIAMIWAAAAMSLFDGPVTLNELISTIGTGGIVSEISTMMLGPIVGTLAILGVIILPITSGDTAFRSARMIIADYINVPQKKVMNRIWIAAPLFITSIILTTVDFTMLWQYFNWANQSTAVIALWIGAMFLYIARRNYWIAIFPAWFMSVTAATYIVNAPIGFNLPMQASVIIGVGFTVLLTVLFFKAAHKRRSENLPIEEDISEWENKQSA

SEQ ID NO: 36580 - DNA, 2112 bp, Campylobacter jejuni RM1221
  CDS (1)..(2112): transl_table=11
atgactcagttaagtactaaaattttatggttgtttgttgcaactttaggcgctatttgttttggttatttagctttacaaaatggcgaaagtgtatcagcgatttatttggtggttgctgctgtatgtatttatatgataggatatagattttatgggcgttttgtagcttataaggttttagaacttgataaaaatcgtgcaacaccagcacttgtagaaaatgatgggcgtgattttgtgcctacaaataaagctgtattatttggacatcattttgctgctattgcaggagcaggtccattagtaggacctatcttggctgctcaaatgggatatttgccttccatgctttggattttagtaggaggagttttagcgggtgctgtgcatgattttgttgttctttttatatctactcgtagaaaaggtagaagtcttggcgagatgattaaggatgagatgggtaaatttacaggtggagttgctatggtggcgatttttggcattatgcttattattattgccattttagctatggtggttgtaaaagctttagcagaatctccatggggtttatttactatcgcaatgactattcctatagcaatatttatgggcatttatatgcgttttatccgtccaggtagagtaggggaggcttctataataggttttgtgcttttaattttggctattcattatggtagcgttatagctgctgatccttattgggctaaaatatttactttagaagctccaattttggcaattgttatgatggcttatggttttattgcttctgttttacctgtgtggtttttacttgctccaagagattatctttcaacttttttgaaaatcggtgttattgtggtaatggctgtagctattgttttggttgctcctgatttacaaatgccaaaagcaaatactcagtattttgatggaacaggtccagtatttgcaggtggagtgtttccatttttatttattaccattgcttgtggtgcgatcagtggttttcatgctttgatttctagtggaactactcctaaaatgcttgaaaacgaaactcatgctttggctgttggatatggctctatgcttgctgagagtgctgtggcgattatggctttaatttgtgcttgtattttacatccaggtctttattttgctataaattcaagctctgctttgataggaacagatgttgtaaatgtagcacaaactatttcaagttggggatttagtattactcctgaagaaattactactttaaccacaaatataggagagcatactatactttcaagaacagggggagccccgacttttgctataggtgtagctttgatcttacatgaactttttggcggcgtggatttgatggctttttggtatcattttgctatattgtttgaagctttatttattttaacagcggtggatgctgggacaagggcttgtcgttttatggtgcaagatatattgggtaatgtttataaacctttaggagatattcataattatccagctggacttttggctacggctttaagtgttgcaggttggggatattttctttatcaaggtgccattgatcctaagggaggaatttatacgctttggcctctttttggcgtgagtaatcaaatgcttgcgggtatggctttgcttcttgctacaactatacttgtaaaaatgggcaaggcaagatatacttgggttactttagtacctgcggtatttgtcttagtggcaactctgtatggaggaattcaaaaaattatgccttatgaagaaggcaataaagtagcaaatgcggtaagtcatgtagccgccgttagcatacaaagtcaaaaaattaaagatttagaatttaaattaaataatactaaagatgaaaaagaaatttctgtaattaaaaaagaaatttcaatagccactcaaagtaaagttggaaatttgcttaatgcaattctttgtgtgttctttatgatagctaccttgcttgttataatttcttgtataggaatttgtttaggtaaaattaaaattcctcttaaagaaactaagtatattaagattgatgaatttcaaaaaatttaa

SEQ ID NO: 36581 - protein, 703 aa, Campylobacter jejuni RM1221
MTQLSTKILWLFVATLGAICFGYLALQNGESVSAIYLVVAAVCIYMIGYRFYGRFVAYKVLELDKNRATPALVENDGRDFVPTNKAVLFGHHFAAIAGAGPLVGPILAAQMGYLPSMLWILVGGVLAGAVHDFVVLFISTRRKGRSLGEMIKDEMGKFTGGVAMVAIFGIMLIIIAILAMVVVKALAESPWGLFTIAMTIPIAIFMGIYMRFIRPGRVGEASIIGFVLLILAIHYGSVIAADPYWAKIFTLEAPILAIVMMAYGFIASVLPVWFLLAPRDYLSTFLKIGVIVVMAVAIVLVAPDLQMPKANTQYFDGTGPVFAGGVFPFLFITIACGAISGFHALISSGTTPKMLENETHALAVGYGSMLAESAVAIMALICACILHPGLYFAINSSSALIGTDVVNVAQTISSWGFSITPEEITTLTTNIGEHTILSRTGGAPTFAIGVALILHELFGGVDLMAFWYHFAILFEALFILTAVDAGTRACRFMVQDILGNVYKPLGDIHNYPAGLLATALSVAGWGYFLYQGAIDPKGGIYTLWPLFGVSNQMLAGMALLLATTILVKMGKARYTWVTLVPAVFVLVATLYGGIQKIMPYEEGNKVANAVSHVAAVSIQSQKIKDLEFKLNNTKDEKEISVIKKEISIATQSKVGNLLNAILCVFFMIATLLVIISCIGICLGKIKIPLKETKYIKIDEFQKI

SEQ ID NO: 36582 - DNA, 1740 bp, Thermococcus kodakarensis KOD1
  CDS (1)..(1740): transl_table=11
atgaactctgctgtaattgttctggtggccgctgcaatatacgtggccatgtatttcacctacggtaagagccttcagaacaaggttgttaaggccgaccccaacagaccaacgccggcccacaagctatacgacggcgttgactacgtcccagcacacccgctcgtcctatatggacaccacttcgcttcgatagcaggtgcgggaccaatcgtcggtcctgcggtggcaatggcctggggttggctgccgggactgatctgggtctggtttggaaacgtcttcattggtgccgtccatgactacctcgcactgatgtcatctgtccgctatgatggtaagtccgtccagtggattgcaggaaagctcatgagcaagaggactggagtggcgttcgaactttacatatggtttaccctcctgctcgttgtagctgcgttcgtcgcggtaactgccaaactcctgacaataacccccgaggcggcaactgcaaccctgctcttccttctggtggcagtcatcctcggatggttgctctacaagatgaagatgaacttcacagtggcaacgataataggacttgtgctgctggccatatctgtctggataggccttaaccacccgcttgtcttcgttaacggtcagaccgacacaacctccgccgcctacaccaccgcataccactactggaacataatcctgctggtttatattatcgtagccgcttccctccctgtgtggattctcctccagcccagagactacctcaacgcatacatcctttggttcggcctgctcttcggaggcatagcctttgtactgctcgccaaggactttaccgcacccgcatacacatcttggagcgcctacgtaatcaagggtactgaggcagttccctcaccgttctggccaacggtgccgcttgtaatagcgtgtggtgcactcagcggcttccactccctcgtcggctccggaacttcaagcaagcaacttgacaacgagattcacggtctcctcgttggctatggtggcatgtttacagagggcttcctctcaaccattgtcataacggccatagcggtctacggcgtccagcttacaggtcttgaacctgccaagtgggcaacggaatacattaccaagggcggtcttggaaccttcatcggaggctacgctaagggcgtcagcgagttctacggcgtaagcgagacctttggaaagaccttcgctaccctctgggtctcggccttcacactgacttccctcgacaccgccacaagacttggaaggttcgcctggcaagagctcttcggaatgatcgccgacacgagccagggtatatggaagactatcaccaataagtgggttgcctcaataatcatagccggtctcggcacctggcttgcctggggtgcaagttacaaggttctctggccggctttcgcaggaatgaaccagctcttagcaagcatagcaatgatgactgcagccctttgggccgccaaggtccagagggccggaaagtggtcctgggccgtcctcctgccagcactgttcctctggataaccgtgactgcagcactgatatggtacatagcagtagtgccgctgagcggaagcaccctcatagcagtcaagggatcgctcctcatcggcctgctcctgaacttcctcctggcatgggacttctacattgcctggaagaggccagaagaggagtacgctgcagctgcggcctga

SEQ ID NO: 36583 - protein, 579 aa, Thermococcus kodakarensis KOD1
MNSAVIVLVAAAIYVAMYFTYGKSLQNKVVKADPNRPTPAHKLYDGVDYVPAHPLVLYGHHFASIAGAGPIVGPAVAMAWGWLPGLIWVWFGNVFIGAVHDYLALMSSVRYDGKSVQWIAGKLMSKRTGVAFELYIWFTLLLVVAAFVAVTAKLLTITPEAATATLLFLLVAVILGWLLYKMKMNFTVATIIGLVLLAISVWIGLNHPLVFVNGQTDTTSAAYTTAYHYWNIILLVYIIVAASLPVWILLQPRDYLNAYILWFGLLFGGIAFVLLAKDFTAPAYTSWSAYVIKGTEAVPSPFWPTVPLVIACGALSGFHSLVGSGTSSKQLDNEIHGLLVGYGGMFTEGFLSTIVITAIAVYGVQLTGLEPAKWATEYITKGGLGTFIGGYAKGVSEFYGVSETFGKTFATLWVSAFTLTSLDTATRLGRFAWQELFGMIADTSQGIWKTITNKWVASIIIAGLGTWLAWGASYKVLWPAFAGMNQLLASIAMMTAALWAAKVQRAGKWSWAVLLPALFLWITVTAALIWYIAVVPLSGSTLIAVKGSLLIGLLLNFLLAWDFYIAWKRPEEEYAAAAA

SEQ ID NO: 36584 - DNA, 1467 bp, Vibrio fischeri ES114
  CDS (1)..(1467): transl_table=11
atgctttggtttttaacttgtgttgcagcacttatcggtggttactttctgtatggtgcttttatagaaaaagtattcggtattaaagtagaccgtcaaactcccgctcatacaaaaacagacggtgttgattatgttccaatgtcgacaccaaaagtatacttagttcaacttcttaatattgcaggtgtcggcccaatttttggcccaatcatgggtgccctttacggccctgcagctatgttatggattgtgctaggttgtgtttttgcaggtgcagttcacgattacttctcaggtatgttatctgttcgtaatggtggtgcttctgtaccaagtattactggtaaatacttaggtaatggcgcaaaacactttatgaatgtatttgcaattgtactgctgcttcttgttggtgttgttttcgtatcagcccctgcaagcatgttaactaacctaatgaatgaccaatttaatttaggcattaccatgacagcaatggtagttatcattttcgcctactacattattgcgacaattgttcctgtagataaaatcattggtcgtttctacccactctttggtggcctactcatcttcatgtctgttggtcttatttcagcgattgcgatttctagtgaccattcagtattaggtggttacgaaccaagtcaaatgttcaccaacatgaaccctaatgatttgccattatggcctgcgctattcattaccattgcttgtggtgctatctctggcttccacgcgacacaatcgccattaatggctcgttgtatggaaaatgaaaagaacggtcgtttcgtattctacggtgcgatgattggtgaaggtattatcgctcttatctggtgtgctatcgctctatcattctttgatggtatggaagcacttcaagcagcggttgctaacggtggcccaggtaatgtggtatacagctctgcatttggtctattaggtacattcggtggcatcattgctttcttaggtgtggtaattctaccaatcacttctggtgacacagcattccgttcaagccgtctaatccttgctgaatacttcaacatggaacaaaaaacattacgtaaccgtctattaatggcactaccactgtttgttatcggtggcattctaactcaagtagatttcggtattatctggcgctacttcggttttgctaaccaaacgactgcggtaatgatgctttggacagcaacggcttacctagttcgtcataacaaactacactggatcacaaccgttcctgcagtatttatgacaagtgtttgtattactttcattctaaacaacagtcagttaggttttggtttaccaatgacgctatcaacgattacaggtgtagtatcagcggtagccattgcagctcttgtaattattaaatcaagaaacagtggcgaagttgattctgaagaagaaagccttcaatcttaa

SEQ ID NO: 36585 - protein, 488 aa, Vibrio fischeri ES114
MLWFLTCVAALIGGYFLYGAFIEKVFGIKVDRQTPAHTKTDGVDYVPMSTPKVYLVQLLNIAGVGPIFGPIMGALYGPAAMLWIVLGCVFAGAVHDYFSGMLSVRNGGASVPSITGKYLGNGAKHFMNVFAIVLLLLVGVVFVSAPASMLTNLMNDQFNLGITMTAMVVIIFAYYIIATIVPVDKIIGRFYPLFGGLLIFMSVGLISAIAISSDHSVLGGYEPSQMFTNMNPNDLPLWPALFITIACGAISGFHATQSPLMARCMENEKNGRFVFYGAMIGEGIIALIWCAIALSFFDGMEALQAAVANGGPGNVVYSSAFGLLGTFGGIIAFLGVVILPITSGDTAFRSSRLILAEYFNMEQKTLRNRLLMALPLFVIGGILTQVDFGIIWRYFGFANQTTAVMMLWTATAYLVRHNKLHWITTVPAVFMTSVCITFILNNSQLGFGLPMTLSTITGVVSAVAIAALVIIKSRNSGEVDSEEESLQS

SEQ ID NO: 36586 - DNA, 2082 bp, Neisseria gonorrhoeae FA 1090
  CDS (1)..(2082): transl_table=11
atgaaatcactcaaaaccttcctcatttggggcatagtggtactggtcggcttagcatcctttaccactctggccctcagccgaggcgaacaggtcagcgcggtatggatggttaccgccgccatatccgtttactgtatcgcctaccgtttttacagcctctacatcgccaaccgcgtgatgcggctcgatccgaaccgtctcacgcccgccgagcggcacaacgacggcttggactacgttccgacgcacaaaggcgtattgttcggacaccactttgccgcgattgccggcgcgggccctttggtcggtccggttttggcggcgcaaatgggttatctacccggtactttgtggattatcttcggcgtggtatttgccggcgcggtacaggatatgacggtcttgttcgtctctatgcgccgcgacggtaagtctttgggcgatattgtgaaacaggaactcggcactgtccccggcgtgattgcctccatcggtattttgatgattatggtcatcattatggcggttttggcgttgattgtcgtaaaagcattggttcacagcccttggggtacgttcaccattgccgcaacgatgccgattgcgctgtttatgggtatttacacgcgccatatccgtccgggcaaaatcggcgagatttccatcgtcggctttattttgctgatgttggcggtaatttacggcgaagatgtggcgaaaagctccatcgggcattggtttgaccttgacggcatccagctcacttgggcgattatgatttacggtttcgtggcttcggttttgccggtctggctcttgctgaccccgcgcgactatctctccaccttcctgaaaatcggtacgattgcggccttggctttgggtatcgtcatcgtcaatcccgctttgcaaatgcctgcggttacccactttatcgacggttcgggcccggtattctcaggcacattgttcccgttcttgttcattaccatcgcctgcggtgcggtttcgggcttccacgcactgatttcttccggcaccacgccgaaaatgctggaaaacgaaacccacgtccgtatgatcggttacggcggtatgttgatggaaagtttcgtggcgattatggcgcttgccgccgccgcatcgctcgatcccggcgtgtatttcgcgatgaacagccccgccgcactgatcggtacggatgccaacaccgccgccgaagtaattaccaccaagctgaacttccctgtcgatgccgcaaccctgttgcacaccgctaaggaagtgggcgaaaacaccatcttgtcccgcacaggcggtgcgcctaccctcgcagtcggtatggcgcacattatgagccgtctgattccgggcgaggcgatgatggcattctggtatcacttcgccctgttgtttgaagccttgttcatcctgaccgccgtcgatgccggtacgcgcgtcgcacgttttatgattcaagacttgggcagcatcttctacaaacctttcggcaacaccgactccatccccgccaacctgattgcgaccttcttcgccgtggcattgtggggctacttcctctacaccggcgtaaccgacccgctgggcggcatcaactcgctctggcctttattcggcatcgccaaccaaatgctggcaggcgtagccttgattatgtgtgccgttgtgctgattaagatgaaacgcgaccgttatgtctgggtggcactcgttcctgccgtcggcgtactgcttgtaacctgctacgccggtctgcaaaaactgttccacaacgacccgcgcgccagcttccttgcccacgcaggcaaatacagcgacacattggctaaaaacgaagtccttgcgcccgctaaagacatcggcgaaatggcgcaaatcatcttcaacgacaagattaatgccggtctgaccatcctcttcttgtcggttgtcgtgactgttgccgcgtacggtttgcgtaccgccctcaaagcacgcaaagtcggctggccgaccgccaaagaaatcccggcggtgtaccgcgacggcaaacaaccggaggaacaaagtgaagcataa

SEQ ID NO: 36587 - protein, 693 aa, Neisseria gonorrhoeae FA 1090
MKSLKTFLIWGIVVLVGLASFTTLALSRGEQVSAVWMVTAAISVYCIAYRFYSLYIANRVMRLDPNRLTPAERHNDGLDYVPTHKGVLFGHHFAAIAGAGPLVGPVLAAQMGYLPGTLWIIFGVVFAGAVQDMTVLFVSMRRDGKSLGDIVKQELGTVPGVIASIGILMIMVIIMAVLALIVVKALVHSPWGTFTIAATMPIALFMGIYTRHIRPGKIGEISIVGFILLMLAVIYGEDVAKSSIGHWFDLDGIQLTWAIMIYGFVASVLPVWLLLTPRDYLSTFLKIGTIAALALGIVIVNPALQMPAVTHFIDGSGPVFSGTLFPFLFITIACGAVSGFHALISSGTTPKMLENETHVRMIGYGGMLMESFVAIMALAAAASLDPGVYFAMNSPAALIGTDANTAAEVITTKLNFPVDAATLLHTAKEVGENTILSRTGGAPTLAVGMAHIMSRLIPGEAMMAFWYHFALLFEALFILTAVDAGTRVARFMIQDLGSIFYKPFGNTDSIPANLIATFFAVALWGYFLYTGVTDPLGGINSLWPLFGIANQMLAGVALIMCAVVLIKMKRDRYVWVALVPAVGVLLVTCYAGLQKLFHNDPRASFLAHAGKYSDTLAKNEVLAPAKDIGEMAQIIFNDKINAGLTILFLSVVVTVAAYGLRTALKARKVGWPTAKEIPAVYRDGKQPEEQSEA

SEQ ID NO: 36588 - DNA, 2151 bp, Salmonella enterica subsp. enterica serovar Choleraesuis str
  CDS (1)..(2151): transl_table=11
atggatacgaaaaagatattcaagcacataccctgggtgattctcggaatcatcggtgctttctgcctctcggtcgttgccctacgtcggggtgaacacgtgagcgccctgtggatcgtggtcgcttccgtttccgtctatctggtggcttaccgctactacagcctgtatatcgcccagaaggtcatgaaactcgacccgacgcgcgcgacgccggcggtcatcaataacgacggcctgaactacgtgccgactaaccgctacgtgctgtttggtcaccacttcgccgccatcgccggcgcaggtccgctggtcgggccggtattggccgcgcagatgggctatctgccggggacactgtggttactggcgggcgtggtgctcgcgggcgcagtgcaggactttatggtgctgttcatctcttcccgccgtaacggcgcctctcttggcgagatgatcaaagaagagatgggtaccgttccaggcaccatcgcgctgttcggctgcttcttaatcatgatcatcatcctcgcggtgctggcattaatcgtggttaaagcgctggccgaaagcccgtggggcgtcttcaccgtctgctccacggtgccgattgcgctgtttatgggcatctacatgcgcttcctgcgtccgggacgcgtaggcgaagtctccgttattggtatcgtgctgctggtggcgtctatttacttcggcggcgtgattgcccacgacccttactggggcccggcgctgacctttaaagacaccaccattaccttcgcgctgatcggctacgcctttgtttccgcgctgctgccggtatggctgatcctcgccccgcgcgactatctcgccaccttcctgaaaatcggcgtgatcgtcggtctggcgctggggattgtgatcctcaacccggaactgaaaatgccggcattgacgcagtatgtcgacggtactggcccgctgtggaaaggcgctctgttcccattcctgttcatcaccatcgcctgtggcgccgtctctggcttccacgcgctcatctcttccggtaccacgccgaaactgctggcctgtgagaccgatgcgcgttttatcggctacggcgcgatgctgatggagtcctttgttgcggtgatggcgctggtggcggcctcgatcattgaaccgggtctctacttcgcgatgaacaccccgccggcaggtctgggcattaccatgccaaacctgcacgagatgggcggcgagaacgcgccgctgattatggcgcagttgaaagacgttaccacacatgcagcggcaaccgtcagctcctggggctttgtgatttccccggaacaaatcctgcaaactgcgaaagatatcggtgaaccgtcagtattgaaccgcgcaggcggcgcgccaacgctggcagtaggtatcgcgcacgtgttccacaaagtcctgccgatggcggatatgggcttctggtatcacttcggtattctgttcgaagcgctgtttatcctgaccgcactggatgcgggtacccgttccggccgctttatgttgcaggatttgctgggtaacttcgtcccgttcctgaaaaaaaccgattctctggtcgcgggtatcatcggtaccgcaggctgcgtcggtttgtggggctatctgctgtatcagggcgtggtcgacccgctgggcggcgtgaagagcctgtggccgctgttcggtatctctaaccagatgctggccgccgtggcactggtgttgagcaccgtggtactgatcaaaatgcagcgcaccaagtacatctgggtgacggtgatcccggcggtatggctgctgatctgcaccacctgggcactgggcctgaaactgttcagcgccaacccacagatggagggtttcttctacatggcaaacctgtataaagagaagattgccaacggcaccaacctgaccgcgcagcagattgccaacatgaaccatatcgtggtgaacaactacactaacgctggtttgagtattctgttcctggtggtggtgtacagtattatcttctacggtttcaccacctggatgaaggtacgcaacagcgataaacgtaccgataaagaaaccccgtatgtgcccgtgccggaaggcggcgtgaagatctcttcacaccactaa

SEQ ID NO: 36589 - protein, 716 aa, Salmonella enterica subsp. enterica serovar Choleraesuis str
MDTKKIFKHIPWVILGIIGAFCLSVVALRRGEHVSALWIVVASVSVYLVAYRYYSLYIAQKVMKLDPTRATPAVINNDGLNYVPTNRYVLFGHHFAAIAGAGPLVGPVLAAQMGYLPGTLWLLAGVVLAGAVQDFMVLFISSRRNGASLGEMIKEEMGTVPGTIALFGCFLIMIIILAVLALIVVKALAESPWGVFTVCSTVPIALFMGIYMRFLRPGRVGEVSVIGIVLLVASIYFGGVIAHDPYWGPALTFKDTTITFALIGYAFVSALLPVWLILAPRDYLATFLKIGVIVGLALGIVILNPELKMPALTQYVDGTGPLWKGALFPFLFITIACGAVSGFHALISSGTTPKLLACETDARFIGYGAMLMESFVAVMALVAASIIEPGLYFAMNTPPAGLGITMPNLHEMGGENAPLIMAQLKDVTTHAAATVSSWGFVISPEQILQTAKDIGEPSVLNRAGGAPTLAVGIAHVFHKVLPMADMGFWYHFGILFEALFILTALDAGTRSGRFMLQDLLGNFVPFLKKTDSLVAGIIGTAGCVGLWGYLLYQGVVDPLGGVKSLWPLFGISNQMLAAVALVLSTVVLIKMQRTKYIWVTVIPAVWLLICTTWALGLKLFSANPQMEGFFYMANLYKEKIANGTNLTAQQIANMNHIVVNNYTNAGLSILFLVVVYSIIFYGFTTWMKVRNSDKRTDKETPYVPVPEGGVKISSHH

SEQ ID NO: 36590 - DNA, 2076 bp, Pseudomonas syringae pv. syringae B728a
  CDS (1)..(2076): transl_table=11
atgaaaaataataatagtctgatgcgccatgttccctggctcatcgttgcaattgtcggggcatgtgcccttggggtcgtggccttgcgccgcggagaggcgatcaacgccttgtggatagtggtcgctgcggtagctatctacctggttgcctatcgttactacagtcttttcatcgccactcacgtcatgcagctcgatccgctgcgcgcgacaccggcggtggtcaacaacgacggtctggactatgtgccgaccaacaaacacattctcttcggacaccactttgccgccatcgctggcgcaggcccgctggtcggcccggtactggcagcgcaaatgggctatctgcccggcacgctctggctgatcgcaggcgtggtgctggccggtgcggtgcaggacttcatgatcctgttcctctccacgcgccgtgacggacgctcgctgggtgacatggttcgcgaggaaatgggccgtattcccggcaccatcgcgctgttcggctgcttcctgatcatgatcatcatcctggcggtgctggcgctgatcgtggtcaaggccctggccgagagcccgtggggcatgttcacggtcatggcgacgatcccgatcgcgatgttcatgggcatttatatgcgctacatccgtccggggcgcattggtgaaatctccatcgtcggtgtcattctgttgctcggttcgatctgggtcggcgggatggtagcggcggatccgacctgggggccgatgttcacgttcaccggtgtgcagatcacctggatgctggtcggttacggctttgtagcggccatgctgccggtctggctgctgcttgcgccccgtgactacctgtcgaccttcctgaaaatcggcaccattctggcactcgcgatcggcatcctgatcctggcgcccgagctgaaaatgccggccctgacccagttcaccaacggcacaggcccggtctggaagggcgcattgttcccgttcctgttcatcaccattgcctgcggtgcagtgtcgggtttccacgcactgatctcctcgggcaccacgcccaagctgctggataacgagaagaacgcccgttacatcggttacggcggcatgttgatggagtccttcgtggccatcatggcgatggttgccgcttcggtgatcgagccgggcgtgtacttcgccatgaacagcccggctgccgtggtcggcagtgacgtggtgaccgtcgcgcagacggtgtccagctggggctttgccatcacgccggagcaactgacggctgtggcgaaagacattggtgaaaacaccgtgctggcgcgggctggtggtgctccgacgctggccgtcggtatcgcacagatcctccatcaggtgctgccgggtgaaaacaccatggcgttctggtaccactttgcgattctgttcgaggcgctgttcatcctgaccgccgtcgacgccgggacacgtgccggacgcttcatgctgcaggacctgctgggcagcttcgttccggccttgaaacgcaccgagtcgtggacggccaacgccatcggcaccggcggttgcgtggcgctgtggggctatctgctctatcagggcgtcatcgacccgctgggcggcatcaataccttatggccgctgttcggtatctccaaccagatgctcgccggtatcgccctgatgctggccagcgtggtgctgatcaagatgaagcgtcagcgctacgtctgggtgaccatgctgcctgccgtctggctgctgatctgcaccgtgaccgctggcttgatcaagctgttcgacgccaaccctgcggtaggtttcctggccctggccaagaaatacagcgcggcggccgatgccggtcagattctggccccggccaagaccatggaccagatgcagcacgtgatcttcaacgcttacaccaacgccgggctgaccgtgctgttcctgttcgtggtgttcagcatcctgttctacgccattaaagtcggccgtgcggcctggagcaccaaggagcgcaccgacaaggaagcgccattccaggccatgccgccagcgtcgcaggtgtga

SEQ ID NO: 36591 - protein, 691 aa, Pseudomonas syringae pv. syringae B728a
MKNNNSLMRHVPWLIVAIVGACALGVVALRRGEAINALWIVVAAVAIYLVAYRYYSLFIATHVMQLDPLRATPAVVNNDGLDYVPTNKHILFGHHFAAIAGAGPLVGPVLAAQMGYLPGTLWLIAGVVLAGAVQDFMILFLSTRRDGRSLGDMVREEMGRIPGTIALFGCFLIMIIILAVLALIVVKALAESPWGMFTVMATIPIAMFMGIYMRYIRPGRIGEISIVGVILLLGSIWVGGMVAADPTWGPMFTFTGVQITWMLVGYGFVAAMLPVWLLLAPRDYLSTFLKIGTILALAIGILILAPELKMPALTQFTNGTGPVWKGALFPFLFITIACGAVSGFHALISSGTTPKLLDNEKNARYIGYGGMLMESFVAIMAMVAASVIEPGVYFAMNSPAAVVGSDVVTVAQTVSSWGFAITPEQLTAVAKDIGENTVLARAGGAPTLAVGIAQILHQVLPGENTMAFWYHFAILFEALFILTAVDAGTRAGRFMLQDLLGSFVPALKRTESWTANAIGTGGCVALWGYLLYQGVIDPLGGINTLWPLFGISNQMLAGIALMLASVVLIKMKRQRYVWVTMLPAVWLLICTVTAGLIKLFDANPAVGFLALAKKYSAAADAGQILAPAKTMDQMQHVIFNAYTNAGLTVLFLFVVFSILFYAIKVGRAAWSTKERTDKEAPFQAMPPASQV

SEQ ID NO: 36592 - DNA, 2073 bp, Xanthomonas campestris pv. campestris str. 8004
  CDS (1)..(2073): transl_table=11
atgaaaggtatctcgaagctggcctggggcgcgctggcgctgctggccgcgttctgcttgggcaccgtggcgctgcggcgcggcgaacacatcaacgcgttgtggatcgtggtggcggcggtgtcgatctatctgatcgcctaccgcttctatggcctgttcatcgccgacaaggtgatgcagctcgaccccacccgcgccaccccggcggtgaccaataacgacggtctggactacgtgcccaccaacaagcacgtgctgttcgggcaccacttcgccgcgatcgccggcgccgggccgttggtcggcccggtgctcgccgcgcagatgggctacctgcccggcctgctgtggctggtggttggcgtggtgctggccggcgcggtgcaggacttcatggtgctgttcctgtccacgcgccgcaacggccgctcgctcggcgacctggtgcgcgaagagatgggccaggtgcccggcaccatcgcgctgttcggcgccttcctgatcatgatcatcatcctggcggtgctggcgatggtggtggtcaaggccttggccgagagcccgtggggcatgttcacggtgatcgcgacgatgcccatcgcgatcatgatgggcgtgtacatgcgctacatccgccccggcaagatcggcgagatttcggtggtgggattgatcctgctactgggtgcgatctggctaggtggccaggtggccgccgacccgacctggggccctgccttcaccttcaccgccaagcagatcacctggatgttgatcggctacggcttcatcgcctcggtgctgccggtatggctgctgctggcaccgcgcgactatctgtccaccttcctcaagatcggcaccatcctgggcctggcgatcggcatcctgatcgtgatgcccgacctcaagatgccggcgctcacccagttcgctgccagcggcgatggcccggtgtggaagggcggcatcttcccgttcctgttcatcaccatcgcctgcggtgcggtgtccggcttccatgcgttgatcgcctccggcaccacgcccaagctgctcgccaacgaagcgcacatgcgctacatcggctacggcggcatgttgatggaatcgttcgtggcgatcatggcgctggtggccgcgtcgatcatcgaacccggcatctatttcgccatgaatagcccggcctcgttggtcggcagcgataccgtcgcagtggctgccaaggtcagcgaatggggctttgcaatcaccccggaagtgctggaagccaccgcgcgcgacatcggcgagcacagcatcctggcgcgcgccggtggtgcacccacgctggcggtaggcatcgcgcagatcctgcaccacgtgctgccgggcgagaacacgatggcgttctggtaccacttcgcgatcctgttcgaagcgttgttcatcctcaccgcagtggacgcgggcacgcgtgccggccgcttcatgctgcaggacctgctgggcaacttcatcccggcactgaagaagaccgaatcgtggaccgccaacatcatcgccaccgccggttgcgtggcgctgtggggctacctgctctacaccggcgtgatcgatccgttcggcggtatccagacgctgtggccgttgttcggcatctccaaccagatgctggccggcatcgcgttgatgctgggcacagtggtgctgttcaagatgaagcgtgaccgctacgcctgggtcaccatcgtgccggcgctgtggctgctgttgtgcaccacctacgccgggctgatcaagatcttcgacagcaacccggcgcagggtttcctggcgcaggcgcacaagttccaggccgccatcgccagcaacaccatcaccgcaccggccaagaccgtgccgcagatgcagcagatcgtcaccaacgcctacgtcaacaccgggctgacggtgctgttcctgttcgtggtgggctcgatcctgatctacgcagtcaaaacgatcgtggtcgcccgccgcagcccgcagcgcagcgatcgcgaaaccccgtacgtggcactgcagccacaccagatggcggatctgtaa

SEQ ID NO: 36593 - protein, 690 aa, Xanthomonas campestris pv. campestris str. 8004
MKGISKLAWGALALLAAFCLGTVALRRGEHINALWIVVAAVSIYLIAYRFYGLFIADKVMQLDPTRATPAVTNNDGLDYVPTNKHVLFGHHFAAIAGAGPLVGPVLAAQMGYLPGLLWLVVGVVLAGAVQDFMVLFLSTRRNGRSLGDLVREEMGQVPGTIALFGAFLIMIIILAVLAMVVVKALAESPWGMFTVIATMPIAIMMGVYMRYIRPGKIGEISVVGLILLLGAIWLGGQVAADPTWGPAFTFTAKQITWMLIGYGFIASVLPVWLLLAPRDYLSTFLKIGTILGLAIGILIVMPDLKMPALTQFAASGDGPVWKGGIFPFLFITIACGAVSGFHALIASGTTPKLLANEAHMRYIGYGGMLMESFVAIMALVAASIIEPGIYFAMNSPASLVGSDTVAVAAKVSEWGFAITPEVLEATARDIGEHSILARAGGAPTLAVGIAQILHHVLPGENTMAFWYHFAILFEALFILTAVDAGTRAGRFMLQDLLGNFIPALKKTESWTANIIATAGCVALWGYLLYTGVIDPFGGIQTLWPLFGISNQMLAGIALMLGTVVLFKMKRDRYAWVTIVPALWLLLCTTYAGLIKIFDSNPAQGFLAQAHKFQAAIASNTITAPAKTVPQMQQIVTNAYVNTGLTVLFLFVVGSILIYAVKTIVVARRSPQRSDRETPYVALQPHQMADL

SEQ ID NO: 36594 - DNA, 1602 bp, Haemophilus influenzae 86-028NP
  CDS (1)..(1602): transl_table=11
ttgaggagccttcctatgttatggtttttcttttgtgtagccgtgttgattatcggttactttatttatggaaaaattatcgaaaaaatttttgtgattaatccaaaacgtcaaacacctgcttaccaagtaaatgatggtgtggactatatgccaatgtctaaaacgaaaatttggctaattcaattgttaaatattgcgggaacaggccctatttttggccctattcttggtgcattatatggacctgttgcaatgctttggattgttattggttgtatttttgcgggcgcagtacacgattatttctgtggtatgttaagtattcgtcacggtggcgcaacaatgccatatttggcgggtaagtttttaggtcgtcccgttaaagtctttatcaatacattagcacttgtgttgcttttacttgtcggtgttgtgtttgtggcaagcccagctcaattaatgggtaccattacaatggatgtatttggtgcttcgcaaagtgcgttagtgcttggtgatgcagaggcagttcatcattctgttgaagctggtgggattaaagtatggggaatggataaagcaacagtggttgctctgtggacagcaattatttttgcttattatattcttgcaaccttacttccagttgataagattattggtcgaatttatccactctttggtgcgttattactctttatgtcagttggtatggtatacggattagttgtttcacattttagtgcaacagatccaattgagtttttccgtacaatcaatgctgatggcgagggtttaacttgggcgaaatttacacaaaatttccaagtgaaaggtgatgttccaatttggccacttttattcttaactatctcttgtggcgcattatcaggtttccacgcaacgcaaactccattaatggcgcgttgtacagaaaatgaaagtgaaggtcgcttcattttctacggtgcaatgattactgagggggtaattgcattagtatggtgtatggttggtcttgcattctatgaaaatccacaagcgttacaagatgcaatttcagcaggttctccatctaaagttgtgtatgatagttcgttacatttcttaggttttattggtggtatttttgccatattaggcgtgattgttcttcctattacttctggcgatactgcattccgtgctgcgcgtttacagatagccgaaatttttaatgttgatcaacgttcattacctaaacgtttattaattgctgtgccgttgtttgtattaggttattttatttcaaccattgatttcagcgtattatggcgttatttcacttgggcaaaccaaatgacagcaatggtaatgttatggactacagcgggatatttatatcgttatcataaattccactgggttgcgtctcttcctgcgtggtttatcacaacagtatgtgcaacttatttgttctacaacaaaattggtttcggcttagattatcagctttctgtgtatcttggtttagcaacaaccatcgtttgtatcgtattgttcttcacaatgcttaaaccattaggtacgcgagatgaagaagcttatataaataattag

SEQ ID NO: 36595 - protein, 533 aa, Haemophilus influenzae 86-028NP
MRSLPMLWFFFCVAVLIIGYFIYGKIIEKIFVINPKRQTPAYQVNDGVDYMPMSKTKIWLIQLLNIAGTGPIFGPILGALYGPVAMLWIVIGCIFAGAVHDYFCGMLSIRHGGATMPYLAGKFLGRPVKVFINTLALVLLLLVGVVFVASPAQLMGTITMDVFGASQSALVLGDAEAVHHSVEAGGIKVWGMDKATVVALWTAIIFAYYILATLLPVDKIIGRIYPLFGALLLFMSVGMVYGLVVSHFSATDPIEFFRTINADGEGLTWAKFTQNFQVKGDVPIWPLLFLTISCGALSGFHATQTPLMARCTENESEGRFIFYGAMITEGVIALVWCMVGLAFYENPQALQDAISAGSPSKVVYDSSLHFLGFIGGIFAILGVIVLPITSGDTAFRAARLQIAEIFNVDQRSLPKRLLIAVPLFVLGYFISTIDFSVLWRYFTWANQMTAMVMLWTTAGYLYRYHKFHWVASLPAWFITTVCATYLFYNKIGFGLDYQLSVYLGLATTIVCIVLFFTMLKPLGTRDEEAYINN

SEQ ID NO: 36596 - DNA, 2067 bp, Pseudomonas fluorescens Pf-5
  CDS (1)..(2067): transl_table=11
atgaaaaataataatagcctgttgcgccatgttccttggctgctgctggcaatcgtaggagcttgcgcccttggcgtagttgcattgcgtcgcggcgaggcgatcaacgccttgtggattgtggtcgccgccgtggccatctatctggtggcgtaccggtattacagtctgttcattgccaacaacgtgatgcagctggacccgggccgggccacgcccgccgtggtcaacaatgatggtctggactacgtcccgaccaacaagcacatcctcttcggtcaccacttcgcggccattgccggcgcaggtcccctggtgggcccggtgctggcggcgcagatgggctacctgcccggcaccctgtggctgattgccggggtggtcctggccggtgcggtgcaggacttcatggtgctgttcctgtccacccggcgtaacggccgttccctgggcgacatggtccgtgaggaaatgggccgtatcccggggaccatcgcgctgttcggctgcttcctgatcatgatcatcatcctcgcggtgctggcgctgatcgtggtcaaggccctggccgagagcccgtggggcatcttcacggtgatggcgaccatcccgatcgcggtgttcatgggcgtgtacatgcgctacatccgcccgggccgcattggtgagatctcgttgatcggcgtgctgctgttgctcggctccatctggctgggtggccaggtggcggcggatccggtgtggggcaagatgttcaccttcaccggcgtgcagatcacctggatgctgatcggctacggtttcgtcgcggcagtactgccggtgtggctgatcctggcaccgcgggactacctgtcgaccttcctcaagatcggcaccatcatcgctctggcgatcggcatcctgatcaccatgcccgagctgaagatgccggccctgacccagttcaccgacggcaccggcccggtgtggaaaggcggcctgttccccttcctgttcatcaccattgcctgcggtgcggtctccggcttccatgcgctgatctcctcgggcaccacgcccaagctgctggataacgaagccaacgcccgctacatcggctacggcggcatgctcatggagtccttcgtggcgatcatggccatggtcgcggcctcggtgatcgagccgggcgtgtacttcgccatgaacagtccggcggccatcgtcggcggcgacgtggtggcggtagcccagactgtcagcagctggggctttgcgatcagcccggaccaactgcaggcggtggccaaggacatcggtgaaaacaccatcctggcccgtgccggcggcgcgccgaccctggcagtggggatcgcgcagatcctccaccatgtattgccgggtgagaacaccatggccttctggtaccacttcgcgatcctgttcgaagccctgttcatcctcactgcggtggacgccggtacccgtgccgggcgcttcatgctccaggacctgctgggttccttcgttccggcgctgaaacgcaccgagtcgtggaccgccaacctgattgccaccgcaggctgcgtggcgctctggggctacctgctgtaccagggcgtgatcgatcctctgggcggcatcaacaccctgtggccgctgttcggcatctccaaccagatgctggccggtatcgccctgatgctgggtaccgtggtgctgatcaagatgaagcgccagcgctacatctgggtcaccctgctgccggctgtgtggctgctgatctgcaccaccaccgcaggcttcatcaagctgttcgacgccaacccggcgatcggcttcctgtcgctggcgaagaaatacagcgatgcaatggccaacggccagatcatcgctccggccaaggacatcacgcagatgcagcacgtgatcttcaacgcctacaccaacgcgaccctgacagccctgttcctgctggtggtgttcagcatcctgttctacgcgctcaaggtcggcatcgccgcctggggcagcaaggagcgtacggataaagaatcgccctatcaggccgtgccggacgcgtaa

SEQ ID NO: 36597 - protein, 688 aa, Pseudomonas fluorescens Pf-5
MKNNNSLLRHVPWLLLAIVGACALGVVALRRGEAINALWIVVAAVAIYLVAYRYYSLFIANNVMQLDPGRATPAVVNNDGLDYVPTNKHILFGHHFAAIAGAGPLVGPVLAAQMGYLPGTLWLIAGVVLAGAVQDFMVLFLSTRRNGRSLGDMVREEMGRIPGTIALFGCFLIMIIILAVLALIVVKALAESPWGIFTVMATIPIAVFMGVYMRYIRPGRIGEISLIGVLLLLGSIWLGGQVAADPVWGKMFTFTGVQITWMLIGYGFVAAVLPVWLILAPRDYLSTFLKIGTIIALAIGILITMPELKMPALTQFTDGTGPVWKGGLFPFLFITIACGAVSGFHALISSGTTPKLLDNEANARYIGYGGMLMESFVAIMAMVAASVIEPGVYFAMNSPAAIVGGDVVAVAQTVSSWGFAISPDQLQAVAKDIGENTILARAGGAPTLAVGIAQILHHVLPGENTMAFWYHFAILFEALFILTAVDAGTRAGRFMLQDLLGSFVPALKRTESWTANLIATAGCVALWGYLLYQGVIDPLGGINTLWPLFGISNQMLAGIALMLGTVVLIKMKRQRYIWVTLLPAVWLLICTTTAGFIKLFDANPAIGFLSLAKKYSDAMANGQIIAPAKDITQMQHVIFNAYTNATLTALFLLVVFSILFYALKVGIAAWGSKERTDKESPYQAVPDA

SEQ ID NO: 36598 - DNA, 1680 bp, Psychrobacter arcticum 273-4
  CDS (1)..(1680): transl_table=11
atgaatagtgcaattgtgctattgtttgctgttgccgctatgcttggcggttatgtgttttactcaaaatttatcgccactaaaattttagcattagataatagcatccccacgccagcacataccatgaaagatggggtagattatatcccaaccaataaatatgtgttatggggacaccattttacttcagtcgcaggggcagctccgattattggtcctgccattgcagttatttggggctgggtacctgccatcatctgggtggtattgggcaccatttttatggcgggtgtccacgacatgtcagccatttgggcaagtatgcgcaatcgaggtcagtcgattggctcgattgccggtaccgtcatgggtacacgtgtacgtagcttaatgatgatcgtcatctttttattattactgatggtgaatgcagtattcggcgtcgctattgcgaatatgatgataaaaaccccctccgctgtgttgcccgtttggggtgctttgatagtggcctttatcattggtcagtgtatttatcgctataagatgagtctggtttgggtatcaatcattggggtcaccgctttatatgggcttatctatcttggtcctatgttccctatcgtgttacctgagacattcttaggcttacctgataatgccgtttggattattattttatttgcctatgcggcaatcgcttctttgttacctgtttggatgctcttgcaaccgcgagattacatcaatggcttgcagttatttgtcggtctgattttattgtacgccgccatctttattgctacgccgaatattgtcgcgccagcaataaacacggcattgccaatcggcacaccatctatgttacctttattgtttgtgaccattgcttgtggtgcaatctcaggctttcatggtttggtagcgacaggtacgacgtctaagcagattgataaagaagaagatgtgcgattcgttggttatttcggtgccatgggtgagggtatgctggcacttggtgcgatacttgcggcaaccgcaggctttgcaacccttggcgactggcaagcagtttatcaaaaatttggtgacggctctattggtgcctttattgatggcggcgcgaccatcttgaatgctggcgttggcattgatatggttttatcacagacgatgcttacggtaatggcagcattgttcgctggtaccacgatggatactggggtacgtctgcaacgttatatcttccaagagtttggtgagatttataaactgcccgtactgaataaaagtgtggtagcaacgttgcttgccgttggcagctgtctgttattagcatttggtgccggtggcatcgatggtgctggtggcatgattatctggccgctatttggcacgacaaatcagctaatggcagcattaaccttgatgattgtcacagtcatcttgttacgtaagggcagaccagtatggtatactttaggacccttatctttcttactagtcatgactgtttttgcgttattaattcagctaaaaacttttttcaatgacggtaattggctacttgtcattatggatatcattattttggtcgccacgattttagtgacgtttgagagtctatcagtactacgcaaagaatggtcgatacacaagggcaaaagtaacctctaa

SEQ ID NO: 36599 - protein, 559 aa, Psychrobacter arcticum 273-4
MNSAIVLLFAVAAMLGGYVFYSKFIATKILALDNSIPTPAHTMKDGVDYIPTNKYVLWGHHFTSVAGAAPIIGPAIAVIWGWVPAIIWVVLGTIFMAGVHDMSAIWASMRNRGQSIGSIAGTVMGTRVRSLMMIVIFLLLLMVNAVFGVAIANMMIKTPSAVLPVWGALIVAFIIGQCIYRYKMSLVWVSIIGVTALYGLIYLGPMFPIVLPETFLGLPDNAVWIIILFAYAAIASLLPVWMLLQPRDYINGLQLFVGLILLYAAIFIATPNIVAPAINTALPIGTPSMLPLLFVTIACGAISGFHGLVATGTTSKQIDKEEDVRFVGYFGAMGEGMLALGAILAATAGFATLGDWQAVYQKFGDGSIGAFIDGGATILNAGVGIDMVLSQTMLTVMAALFAGTTMDTGVRLQRYIFQEFGEIYKLPVLNKSVVATLLAVGSCLLLAFGAGGIDGAGGMIIWPLFGTTNQLMAALTLMIVTVILLRKGRPVWYTLGPLSFLLVMTVFALLIQLKTFFNDGNWLLVIMDIIILVATILVTFESLSVLRKEWSIHKGKSNL

SEQ ID NO: 36600 - DNA, 2076 bp, Pseudomonas syringae pv. phaseolicola 1448A
  CDS (1)..(2076): transl_table=11
atgaaaaataataatagtcttatgcgccatgttccctggctcatcgtcgcaattgtcggggcatgtgcccttggggtcgtggccttgcgtcgcggagaagcgatcaacgctttgtggatagtggtcgctgcggtggctatctatctggttgcctatcgttactacagtctgttcatcgccacccatgtcatgcagctcgatccgctgcgcgcgacaccggcggtggtcaacaacgatggtctggactacgtgccgaccaacaaacacatccttttcggtcatcactttgctgccatcgccggtgcaggcccgctggtcggcccggtactggccgcgcaaatgggttatctgcccggtacgctctggctgatcgccggtgtggtgctggccggtgcggtacaggatttcatgatcctgttcctctccacgcgccgtaacggtcgctcgctgggcgacatggttcgcgaggaaatgggccgtattcccggcaccatcgccctgttcggctgtttcctgatcatgatcatcatcctggcggtgctggcgctgatcgtggtcaaggccttggccgagagcccgtggggcatgttcacggtcatggcgacgatcccgatcgcgatgttcatgggcatctatatgcgctacatccgcccgggtcgtatcggtgaaatctctattatcggtgtcattctgctactcggttcgatctgggtcggcggcatggtagcggccgatccgacctgggggccgatgttcaccttcaccggcgtgcagatcacctggatgttggtgggctatggttttgtagcagcgatgctgccggtctggctgctgcttgcgccacgtgactacctgtcgaccttcctgaaaatcggcaccattctggcactggcaatcggcatcctgattctggctcccgagctgaaaatgccggccctgacccagttcaccaacggcacaggcccggtctggaagggcgcactgttcccgttcctgttcatcactatcgcttgcggtgcggtatcgggtttccacgcgctgatctcttcgggcaccacgcccaagctgctggataacgaaaagaacgctcgttacatcggttacggcggcatgctgatggagtcgttcgtggccatcatggcaatggttgccgcctcggtgatcgagccaggcgtgtacttcgctatgaacagcccggctgcggtggttggcagtgacgtggtgactgtcgcgcagactgtctccagctggggctttgccatcacgccggagcaattgactgctgtcgcgaaagacatcggtgaaaacactgtgctggcgcgtgccggtggtgcgccgacgctggcggttggtatcgcgcagatcctccatcaggtgctgccgggtgaaaacaccatggcgttctggtaccacttcgcgattctgttcgaggcgttgttcattctgaccgcagtcgacgccggtacacgagccggacgcttcatgctgcaggatctgctgggcagtttcgttccggctttgaaacgcaccgagtcgtggacggccaacgctatcggcaccggtggttgcgtggcgctgtggggctatcttctgtaccaaggtgtaatcgacccgctgggcggcatcaataccctgtggccgctgttcggcatctccaaccagatgctcgccggtattgccctgatgctggccagcgtcgtgctgatcaagatgaagcgtcagcgctatgtgtgggtgaccatgctgcctgccacctggctgctgatctgcaccgtgacggctggtctgatcaagctgttcgacgccaatcctgcggtgggctttctggccctggccaagaaatacagcgcggcggcggatgccggccagatcctggccccggccaagaccatggaccagatgcagcatgtgatcttcaacgcttacaccaatgccgggctgaccgtgctgttcctgttcgtggtgttcagcattctgttctacgcccttaaagtaggccgtgcggcgtggaccaccaaggcgcgtaccgacaaggaagctccttaccaggccatgccgccagcgtcgcaggtgtga

SEQ ID NO: 36601 - protein, 691 aa, Pseudomonas syringae pv. phaseolicola 1448A
MKNNNSLMRHVPWLIVAIVGACALGVVALRRGEAINALWIVVAAVAIYLVAYRYYSLFIATHVMQLDPLRATPAVVNNDGLDYVPTNKHILFGHHFAAIAGAGPLVGPVLAAQMGYLPGTLWLIAGVVLAGAVQDFMILFLSTRRNGRSLGDMVREEMGRIPGTIALFGCFLIMIIILAVLALIVVKALAESPWGMFTVMATIPIAMFMGIYMRYIRPGRIGEISIIGVILLLGSIWVGGMVAADPTWGPMFTFTGVQITWMLVGYGFVAAMLPVWLLLAPRDYLSTFLKIGTILALAIGILILAPELKMPALTQFTNGTGPVWKGALFPFLFITIACGAVSGFHALISSGTTPKLLDNEKNARYIGYGGMLMESFVAIMAMVAASVIEPGVYFAMNSPAAVVGSDVVTVAQTVSSWGFAITPEQLTAVAKDIGENTVLARAGGAPTLAVGIAQILHQVLPGENTMAFWYHFAILFEALFILTAVDAGTRAGRFMLQDLLGSFVPALKRTESWTANAIGTGGCVALWGYLLYQGVIDPLGGINTLWPLFGISNQMLAGIALMLASVVLIKMKRQRYVWVTMLPATWLLICTVTAGLIKLFDANPAVGFLALAKKYSAAADAGQILAPAKTMDQMQHVIFNAYTNAGLTVLFLFVVFSILFYALKVGRAAWTTKARTDKEAPYQAMPPASQV

SEQ ID NO: 36602 - DNA, 1815 bp, Dechloromonas aromatica RCB
  CDS (1)..(1815): transl_table=11
atggatcaagccatctacttcgtagtcttgacagtctgcattctggccctggcatatcgcttctacgggatattcttcgtgcgcaaagtactggctgccgatgacaaggaaatcaccccgtcgcacgagctcgaggacggcaagaactacgtgccgaccaagaaatgggtcaatgccggccagcacttcgccgccattgccgccgccggcccgctggtcggtccggtcctcgccgcccagttcggttacctgccaggcttcctctggctgctgatcggcgccgtggtcggcggcgcggtacacgacaccgtcgtgctcttcgcctcgatgaagcaccagggcaagtcgctctccgaagtcgccaaggccgaactcggcccggtcgccggctggagtaccggtctcgccatgctgttcatcatcaccatcaccatggccggcctctccatcgtggttgtccatgcgctggaacgcaatgcctggggtaccttcgccgtcttcatgacggtgccgattgccatcgccctgggtctttatgaacgctatgtcggttcgtccaagtgggccacctatgtcggcgttgccgccgtgatggcctcggtggccgccggcccgcacctgcagggcaccctgctcggcgactggctgacgctgcacaagaccactgtctgctggatcctgccgatctacgccttcttcgcgacggcgctgccggtgtggatgctgctgaccccccgtggttacctgtccagcttcatgaaggttggcgtcttcctggccctgatcgtcggcgtcgtcgtcatcaacccgaccatccagttccctgccctgaccgagttcatcaacggcggcggccccatcctcaagggttcggtctggccgttcatctcgatcaccatcgcctgcggtgccatctccggtttccatgccttcatcggttccggcacgacgcccaagctggtcgataagtggagcgacatccagccggttgccttcggcgccatgctggccgaatgcctggttgcggtgatggccctgattgccgccacctcgctgcacccggccgactacttcgccatcaactcgacaccggaagtcttcaagaccctgggcatgcaagtcgtcgatctgccgcaactgagcgaagccatgggcatcgacctctacggtcgaaccggtggtgccgtgacgttggccgtcggcatgacctacatcttcaccaagatctcctggttcagccacctggccgcctacttcttccagttcgtgatcatgttcgaagcggtcttcatcctgacggcagtcgattccggcacccgtgtctcgcgctacctgatccaggatctactcggcgacttcttcccgttcatgaagcgcctggactccctgcccgccgccatcatcgccagcatcatcgcctgcgtcctgtggggttacctgctgctctccggtgacatcggttcggtctgggccctgttcggtgtctccaaccagctgatggcctccatcggcctgatgatcggcgccaccatcgtgctccgtctgtccagcaagcgtgcctacatcctgacctgcctgatcccgctcgcttacctgttcgtcacggtgaattacgccggctactggatgatctccaacgtctatctgaatagcgccggcaagggctacaacctgttcaacgctggtatcgcttcggtcatgctggtcctcggcttcgtcatcatggccgcctcgctcaagcgctgggcggtgttgtggaaggcccgcggcgaatcgaacagcatcccgtcagccctgactgtcagtcccgcctga

SEQ ID NO: 36603 - protein, 604 aa, Dechloromonas aromatica RCB
MDQAIYFVVLTVCILALAYRFYGIFFVRKVLAADDKEITPSHELEDGKNYVPTKKWVNAGQHFAAIAAAGPLVGPVLAAQFGYLPGFLWLLIGAVVGGAVHDTVVLFASMKHQGKSLSEVAKAELGPVAGWSTGLAMLFIITITMAGLSIVVVHALERNAWGTFAVFMTVPIAIALGLYERYVGSSKWATYVGVAAVMASVAAGPHLQGTLLGDWLTLHKTTVCWILPIYAFFATALPVWMLLTPRGYLSSFMKVGVFLALIVGVVVINPTIQFPALTEFINGGGPILKGSVWPFISITIACGAISGFHAFIGSGTTPKLVDKWSDIQPVAFGAMLAECLVAVMALIAATSLHPADYFAINSTPEVFKTLGMQVVDLPQLSEAMGIDLYGRTGGAVTLAVGMTYIFTKISWFSHLAAYFFQFVIMFEAVFILTAVDSGTRVSRYLIQDLLGDFFPFMKRLDSLPAAIIASIIACVLWGYLLLSGDIGSVWALFGVSNQLMASIGLMIGATIVLRLSSKRAYILTCLIPLAYLFVTVNYAGYWMISNVYLNSAGKGYNLFNAGIASVMLVLGFVIMAASLKRWAVLWKARGESNSIPSALTVSPA

SEQ ID NO: 36604 - DNA, 1800 bp, Thermobifida fusca YX
  CDS (1)..(1800): transl_table=11
atgcctgccgttgtcgtactggtcgctgttctcgccctcttcgctctgggataccgctactactcgtcgtatctggcccgccgcgtctacgggctggaccccaactatgtgacccccgcccaccgctactccgacggggtcgacttcgtccccaccaaccgttacgtcgttttcagccaccatttcatctccgtggccggagccgcccccatcgtcggccccgcggtcgccgtgttctggggctggggcccggccctgctgtgggtggtgctcggcacgatcttcgctgcgggcgtgcacgacttcggggcgctcgcggtctcggtccgccaccgcgcgaaaagcatcggcacgctcgccggtgaggtggtgagcagacgcgccggcaccctctttctgatcatcatcttcttcctgctgaccctggtgaacgcggtcttctccgtggtcatcgccaacctgttcgtttccacccctagcgtggtgctgcccaccttggtcacgattcccttggcgatcggtgtgggccagtacgtctaccgcacgcgcagcgcggcactgctgccgtccctggtcgtgctgctgctggtgtacgcgtccatcccgctgggcctgctgttcccgatcactatcgacccgctggctgccgcggtcggcctcaccccgaaaaccctgtggatcatcctggtcttcggctacgctttcgcggcgtcccggctgccagtgtggctgctgctgcagccgcgcgactacatcaaccagcagcagatgctggtggcgttggcggtgatcctgctgggcgtggccgtaggcttcgactggatcgtggcgcctctcatcaacgacgtgcccgacggatccccgccctggttccccctgctgttcattaccatcgcctgcggggcgatctccgggttccacagcctggtctcctcggggacgacagcgaagcagatcgaccgggaaaccgacgcccgtttcgtcggctacctgggtgctgtcggggagggcacgctcgcgctgtgcgccatcctggcctgcacggcgggcgtggcggcgacccgcgccgactgggatgcgctctacacggactatgcgaccgcgtcgggcagcgccaccgacaacttcgtcaacggggtggcgaacttcgcgtcccacctgggcattcccgaaaccgtgggtgtggtgttcgccgccgtggtgatcatcagtttcgcgtccaccaccatggacacgggggtgcggctgcaacgctacatcgtgcaggagatcgcggagaccgcccggatccggccgctggcacgcaacctcaccttggcgaccctggtggcggtggcggtgccgttggcgttggcgctcaccccgggcgacttcgcgttcggcaccctttggcagctgttcggcaccaccaaccagctcaccgccggactggcgttggcggtgatcgcagtatgggtcaccaagagcagccgcaacccgctcgcggtgctcatccccctggtgttcctgctcgtcatgacctcgtgggcgctggtcctcaacctggtccggtttgtgaccgctgacgaccccatgcaggtgttcctgctcgcccccttggacgcggtcatcttcgtgcttgcactgtggctgatcgttgaagcgtcgctggcgctgcggaccgcgtggcgggcccgcacggctgccgccggcactccagcagtcccggcagcggacccgaagaccggtacggatgcggccccgcccgcgggggacagcccgacggatccggcggagcctgcgggagcaggggagcagtga

SEQ ID NO: 36605 - protein, 599 aa, Thermobifida fusca YX
MPAVVVLVAVLALFALGYRYYSSYLARRVYGLDPNYVTPAHRYSDGVDFVPTNRYVVFSHHFISVAGAAPIVGPAVAVFWGWGPALLWVVLGTIFAAGVHDFGALAVSVRHRAKSIGTLAGEVVSRRAGTLFLIIIFFLLTLVNAVFSVVIANLFVSTPSVVLPTLVTIPLAIGVGQYVYRTRSAALLPSLVVLLLVYASIPLGLLFPITIDPLAAAVGLTPKTLWIILVFGYAFAASRLPVWLLLQPRDYINQQQMLVALAVILLGVAVGFDWIVAPLINDVPDGSPPWFPLLFITIACGAISGFHSLVSSGTTAKQIDRETDARFVGYLGAVGEGTLALCAILACTAGVAATRADWDALYTDYATASGSATDNFVNGVANFASHLGIPETVGVVFAAVVIISFASTTMDTGVRLQRYIVQEIAETARIRPLARNLTLATLVAVAVPLALALTPGDFAFGTLWQLFGTTNQLTAGLALAVIAVWVTKSSRNPLAVLIPLVFLLVMTSWALVLNLVRFVTADDPMQVFLLAPLDAVIFVLALWLIVEASLALRTAWRARTAAAGTPAVPAADPKTGTDAAPPAGDSPTDPAEPAGAGEQ

SEQ ID NO: 36606 - DNA, 2073 bp, Ralstonia eutropha JMP134
  CDS (1)..(2073): transl_table=11
atgaatcgcatcggagaacacctcgtgtggctggccgtcgccatcttgggcgcgtttgccttcggcacggtcgcgctcgcgcgcggcgaagccgtcagcgcgctatggatcgtggttgccgcgctctgcatctacctgatcgcctaccgctactacagccgcttcattgccgacaaggtgatgcagctcgacccgaaacgcatgacgccggcctggcgccataacgacgggctcgactacgtgccgaccaacaaggcagtgctgttcggccaccacttcgcggcgattgccggcgccggcccgctggtcggccccgtgctggccgcgcagatgggctatatgccgggcatgctttggatcctggcaggcgtggtgttcgccggcgcggtccaggatttcatgatcctgttcatctccacgcgccgcgacggccgttcgctgggcgacctggtcaagtccgagatgggcacggtaccgggcatgatcgcgctgttcggctgcttcatgatcatgatcatcatcctggcggtgctggcgctgatcgtggtgaaggcgctggccggctccccgtggggtacgttcaccgtcgctgtgaccatccccatcgcgctgttcatgggcatctacacgcgctatatccgcccgggccgcatcggtgaggtgtcggtgatcggcttcgtgctgctgatgctggccatcctcggcgggcagtacgtgcacgaaagcgcggtgctggcgccgctgttcacatacgacggcaaggcactgacctggatgctgatcatctacggcttcatcgccgccgtgctgccggtgtggctgctgctggccccgcgcgactacctgtcgaccttcctgaagatcggcaccatcatcgcgctggccatcggcatcctgatcgtcgcgccggaactgaagatgccagccttcacgcagttcgcccagggcggcggtccggtgtggtcgggcaacctgttcccgttcctcttcatcaccatcgcgtgtggcgcggtatcgggcttccatgcgctgatctcgtcgggcaccacgcccaagctgctggaaaacgaatcgcacgcgcgcttcatcggctacggcgcgatgctggccgagtcgttcgtcgccatcatggcgctggtggccgcttcggtgatcgagccgggcgtgtacttcgcgatgaacagcccgagcgcggtgatcggcacctcgccggaagccgtggcgcaagccgtgtcgacctggggctttgtgatcacgcctgatgtgctgatccagaccgccaaggacgtcggcgagaacaccatcatctcgcgcgccggcggcgcgccgacgctggccgtgggcatcgcccacatcctgcaccaggtggtgggcggccaagccatgatggcgttctggtaccacttcgcgatcctgttcgaggcgctgttcatcctgaccgccgtcgacgcaggcacccgcgccggccgcttcatgctgcaggacctgctgggcagcttcgtgccgtcgctcaagcgtaccgactcgctgccggccaacctgatcgctaccgcgctgaccgtggcggcctggggctacttcctgtaccagggcgtggtggatccgctgggcggcatcaacacgctgtggccgctgttcggtatctccaaccaaatgctggccgccgtggcgctggtgctgggcacctgcgtgctggtcaagatgaagcgcggccagtacgcctgggtcacgttggtgccgaccgtctggctgctggtctgcacgctgaccgccggctggcagaagctgttcgacgccgatccgaaggtcagtttcctgacccacgccagcaagttcagcgccgccattgccgaaggcaaggtgctggccccggccaagagcctggagcagatgcagcgcatcgtcttcaatgactacctggacgccggcctgtgcgcgctgttcatgttcgtggtgctgtcgatcgtggcctacggcttcaagaccgccatgcaggcacgcgccgtgaaccgccccaccgacaaggaaacgccgttcgagcccctgccggcggccgcctcggcgcagtcctga

SEQ ID NO: 36607 - protein, 690 aa, Ralstonia eutropha JMP134
MNRIGEHLVWLAVAILGAFAFGTVALARGEAVSALWIVVAALCIYLIAYRYYSRFIADKVMQLDPKRMTPAWRHNDGLDYVPTNKAVLFGHHFAAIAGAGPLVGPVLAAQMGYMPGMLWILAGVVFAGAVQDFMILFISTRRDGRSLGDLVKSEMGTVPGMIALFGCFMIMIIILAVLALIVVKALAGSPWGTFTVAVTIPIALFMGIYTRYIRPGRIGEVSVIGFVLLMLAILGGQYVHESAVLAPLFTYDGKALTWMLIIYGFIAAVLPVWLLLAPRDYLSTFLKIGTIIALAIGILIVAPELKMPAFTQFAQGGGPVWSGNLFPFLFITIACGAVSGFHALISSGTTPKLLENESHARFIGYGAMLAESFVAIMALVAASVIEPGVYFAMNSPSAVIGTSPEAVAQAVSTWGFVITPDVLIQTAKDVGENTIISRAGGAPTLAVGIAHILHQVVGGQAMMAFWYHFAILFEALFILTAVDAGTRAGRFMLQDLLGSFVPSLKRTDSLPANLIATALTVAAWGYFLYQGVVDPLGGINTLWPLFGISNQMLAAVALVLGTCVLVKMKRGQYAWVTLVPTVWLLVCTLTAGWQKLFDADPKVSFLTHASKFSAAIAEGKVLAPAKSLEQMQRIVFNDYLDAGLCALFMFVVLSIVAYGFKTAMQARAVNRPTDKETPFEPLPAAASAQS

SEQ ID NO: 36608 - DNA, 1458 bp, Staphylococcus saprophyticus subsp. saprophyticus ATCC 15305
  CDS (1)..(1458): transl_table=11
atgattacttttattgtagctattattttattggtggtgggttatttcacttatggaaaatacatagacaaaatgtttggaccaaataaagagcgacccacaccagcgtatgatcaaagagatgatgttgattatttaccaatgaagacgcgatctaactcgcttatacaattgttaaatatcgctggtgttggacctatatttggacctattatgggagcactttatggacccatagcatttatttggattgttgtaggctgtatctttgcaggggcagtacatgattatctgaccggtatgatttcaattagaaataaaggggcgcacttaccagaacttgcagggaaatttttaggtcaagtgatgaagcactttgttaatatattttctattttattattactcttaacaggaactgtatttgtgactagtccggcacttctattacataatttaatggatggacgcattgcactgggtattattatttttgttatatttgtgtattatacattatctacaattttacctatagataagatcattggtagaatttatccagtgtttggcgcattattattagtgagtgcggtaggtataggtttccgtcttattcaaacaggggcacctattccagaactaaattttagtaatatgcatcctgatggggcgccagtatttccattactattctttacaataacttgtggtgcattgtctggatttcatgcgacacagacaccgattatttctagaacaacaaataaagaacagaatggtagattcatcttttacggtatgatgattgcggaaggtatcatagcaatgatttgggctgcagcgggtatgagtttatttaatggctataatggtttgaatgatgtcttagcacgtggtgaagctgcattagtagtgagccaggcatcacatctattactgggctctgtattcggtacgatcgccgtgttaggtgttatcattttaccaatcactagcggggatacgtctttcagaagtgctagaatgattattgcagattatttaaactatggtcagcgaaatattgttaaacgtattattgtagcagtaccattgttcgttattagctttggtcttacacaagttgatttcacgattctatggagatatttctcttgggcaaatcaaacaacagcggttgttgcactatgggtaggtgcgatgtatctattgattgcgaaaaagaatttctgggtggcagcaatcccagctgtgtttatgacatggaatatttttacttatattttaagtcagaaaattggattgggtttagacctcaatttaagttatatcatagcctttgtgctaacgattttatgggtagcttatttcagttatcaatacaaaaaaatcacagcaggtgctaaatttgaattggattatcaaatatcttataagcaacaacaaacaacataa

SEQ ID NO: 36609 - protein, 485 aa, Staphylococcus saprophyticus subsp. saprophyticus ATCC 15305
MITFIVAIILLVVGYFTYGKYIDKMFGPNKERPTPAYDQRDDVDYLPMKTRSNSLIQLLNIAGVGPIFGPIMGALYGPIAFIWIVVGCIFAGAVHDYLTGMISIRNKGAHLPELAGKFLGQVMKHFVNIFSILLLLLTGTVFVTSPALLLHNLMDGRIALGIIIFVIFVYYTLSTILPIDKIIGRIYPVFGALLLVSAVGIGFRLIQTGAPIPELNFSNMHPDGAPVFPLLFFTITCGALSGFHATQTPIISRTTNKEQNGRFIFYGMMIAEGIIAMIWAAAGMSLFNGYNGLNDVLARGEAALVVSQASHLLLGSVFGTIAVLGVIILPITSGDTSFRSARMIIADYLNYGQRNIVKRIIVAVPLFVISFGLTQVDFTILWRYFSWANQTTAVVALWVGAMYLLIAKKNFWVAAIPAVFMTWNIFTYILSQKIGLGLDLNLSYIIAFVLTILWVAYFSYQYKKITAGAKFELDYQISYKQQQTT

SEQ ID NO: 36610 - DNA, 2166 bp, Shigella sonnei Ss046
  CDS (1)..(2166): transl_table=11
atgccaggttttactatggatacgaaaaaactattcaagcacataccctgggtgattctcggaatcatcggtgcattctgcctcgcggtagttgcattacgtcggggggagcacgtcagcgccctgtggatcgtggtcgcctctgtgtcggtgtatctggtggcgtatcgctactacagtctgtacatcgcccagaaggtgatgaaactcgaccccacgcgcgcgacgcctgcggttattaacaacgacggtctgaactacgttccgaccaaccgttacgtgttgtttggtcaccacttcgccgctatcgccggtgctggtccgctggtcggtccggttctcgccgcacagatgggccacctgcctggcacgctgtggctgctggcgggggtagtactggccggtgcggttcaggactttatggtgctgtttatctcctctcgccgtaacggcgcatctctcggtgagatgataaaagaagagatgggaccagtaccggggactatcgcgctgtttggctgtttcttaatcatgatcatcatccttgccgtcctggcgctgattgtggttaaagccctggccgaaagtccgtggggtgtcttcaccgtttgctcaaccgtaccgattgcgctgtttatgggtatctacatgcgctttatccgtccggggcgtgtgggtgaagtctctgtcattggtatcgtgctgctggttgcctctatctacttcggtggcgtgattgctcacgatccgtactggggtccggcactgacctttaaagacaccaccattaccttcgcgctgattggctatgcgtttgtttccgcattgctgccggtgtggctgatcctcgcaccgcgcgactatctggcaaccttcctgaaaatcggcgttatcgtcggcctggcgctgggtatcgtggtgctgaacccggaactgaaaatgcctgcgatgacccagtacattgacggtactggcccgctgtggaaaggtgctctgttcccgttcttgttcattaccatcgcctgtggtgcggtatctggcttccacgcactgatctcttccggtacgacgccgaaactgctggctaatgaaaccgacgcgcgtttcattggctacggcgcaatgctgatggagtccttcgtggcgattatggcgctggttgctgcgtccatcatcgaaccgggtctttacttcgcgatgaacaccccgcctgctggccttggcatcaccatgcctaacctgcatgaaatgggtggcgagaacgcgccgatcatcatggcgcagctgaaagacgttaccgcacacgcggcagcgaccgtcagctcttggggcttcgtgatttcgccagagcagatcctgcaaaccgcgaaagacattggtgagccttctgtcctgaaccgtgcaggtggtgcgccaacgctggcggtaggtatcgctcacgtgttccacaaagtgctgccgatggctgacatgggcttctggtatcacttcggtattctgttcgaagccctgttcatcctgaccgcgctggatgcgggtacccgttctggccgttttatgctgcaagacctgctgggtaacttcatcccgttcctgaaaaaaaccgactctctggttgccggtatcatcggtactgcgggctgtgtgggtctgtggggctacctgctgtatcagggcgtggtcgatccgctgggcggcgttaagagcctgtggccgctgttcggtatctccaaccagatgctggcagccgtagcgctggtactgggcaccgttgtgctgattaagatgaagcgcacccaatacatctgggtaactgttgttccggctgtatggctgcttatctgcaccacctgggcgctgggtctgaaactgttcagcaccaacccgcagatggaaggcttcttctacatggcaagccagtacaaagagaagattgctaacggtactgacctgacggcgcagcagattgccaacatgaaccacatcgttgtgaacaactacaccaacgcaggcctgagtattctgttcctgattgtggtgtacagcatcatcttctacggtttcaaaacctggcttgcggtgcgtaacagcgacaaacgtactgacaaagaaactccgtacgttccaatcccggaaggcggcgtgaagatctcttcgcaccactaa

SEQ ID NO: 36611 - protein, 721 aa, Shigella sonnei Ss046
MPGFTMDTKKLFKHIPWVILGIIGAFCLAVVALRRGEHVSALWIVVASVSVYLVAYRYYSLYIAQKVMKLDPTRATPAVINNDGLNYVPTNRYVLFGHHFAAIAGAGPLVGPVLAAQMGHLPGTLWLLAGVVLAGAVQDFMVLFISSRRNGASLGEMIKEEMGPVPGTIALFGCFLIMIIILAVLALIVVKALAESPWGVFTVCSTVPIALFMGIYMRFIRPGRVGEVSVIGIVLLVASIYFGGVIAHDPYWGPALTFKDTTITFALIGYAFVSALLPVWLILAPRDYLATFLKIGVIVGLALGIVVLNPELKMPAMTQYIDGTGPLWKGALFPFLFITIACGAVSGFHALISSGTTPKLLANETDARFIGYGAMLMESFVAIMALVAASIIEPGLYFAMNTPPAGLGITMPNLHEMGGENAPIIMAQLKDVTAHAAATVSSWGFVISPEQILQTAKDIGEPSVLNRAGGAPTLAVGIAHVFHKVLPMADMGFWYHFGILFEALFILTALDAGTRSGRFMLQDLLGNFIPFLKKTDSLVAGIIGTAGCVGLWGYLLYQGVVDPLGGVKSLWPLFGISNQMLAAVALVLGTVVLIKMKRTQYIWVTVVPAVWLLICTTWALGLKLFSTNPQMEGFFYMASQYKEKIANGTDLTAQQIANMNHIVVNNYTNAGLSILFLIVVYSIIFYGFKTWLAVRNSDKRTDKETPYVPIPEGGVKISSHH

SEQ ID NO: 36612 - DNA, 2400 bp, Bifidobacterium longum DJO10A
  CDS (1)..(2400)
atgaccaccgccgcagcccaggccccggcacctggcaagttggaattcaaggacgattacacgccggacgaagccgaacgtgtgattcgcaattcgaagggactgcccgtaggcgtgcgtcccaaaatggtatggacatggaagaaggccctgctgtgggccgccatcgccatcgtatgtgcctgcggatgggcgattctggccgtctcgcgcggtgagcggatctccgccatctggttcctggtcgtggcgctgagctcctacgccatcgcctaccgcttctatgcctattacatccagatcaagatcatgcgcaccgacgacgcgaacgccaccccggccgagcgcgtgcatgacggcgcgaacttcgaacgcaccgaccgccgcgtgctcttcggccagcactttgccggcatctccggcgccggaccgctcgtcggcccgatcctggccgcgcagatgggctacctgccctccactctgtggatcatcctcggcgtgattttcgccggcgccgtgcaggacatgctggtgctgtggatctccgccaagcgccgcggtcgctctctgggccagatggccactgatgaaatgggtaagttcggcggtatgatcctatccatcttcctcgtggtgatgaccgccatcgccatggcattcctggcgctcgtggccatcaaggccatggccgcctcgccgtgggccgtgttctccatcggtatgaccatcccgatcgccctgatcatgggctgctaccagcgtttcctgcgccccggccgtgtcattgagaccacgctgctcggtttcgtgctgctcgtgctcgacatcgtcgccggcggatggatcgcctctatcccggccgtggccgccgtgttcacactggacgccaagcagctcgtcatcgccctggtgatctactcgttcgccgccgccgcgctgccgcactggctgctcgtcaccccgcgcgactacctgtccacgctgatgaagatcggcacgctcgtgctgctcgtcatcggcatcatcatcgccaacccgtccgtcaaggtgccgggtctgaccgaactggcctccacctccaccggcccgaccttctccggcaacctattcccgttcctgttcatcaccatcgcctgcggcgccctctctggcttccacggcgcggtgagctccggcctgaccccgaaggccgtggagaaggagaaccagattcgcatgatcggctacggttcgatgctcgtcgaatcgttcaccgccgtcatcgcgctgatcgccgcgatcaccatctcgcagggcgtgtacttctccaccaacatgtccgccgcacagatcaccgccgcatccggcgtgagcatctccgccacctccacgccgggcgaacaggccgatgccgccgtcaaggccgtggagtcgatgaaggtctccgacatcgaaggcaaccagatgcaggtcacctgggattccgtggacgagaacggcgcggccaagacctacgaaggcgccgcggcgcttgagcaggccgccgccgacatcggcgagacctccatcgtctcccgcaccggtggcgccaccacgttcgccatgggcatggccaacttcctcaagtcctacctgggcggccacgactcgatggccttctggtaccacttcgccatcatgttcgaagccctgttcatcctgaccaccgtggacaacggcacccgcgtggcccgctaccagatcggcgaaatgctcggcaacgtgcgcaagctcaagaagttcgccgacccgacctggaagcccggcaacatcatcaccacgctgatcgccaccgcgctgtggggcggactgctgtggatgggcgtgtccgacgcgaacggcggcatcaacgcgatggtgcctatcttcggcatctccaaccagctgctcgccgccgcctgcttcgtgctgatcaccgtgtgtgtggccaagatgggctactggaagcacctgtggataccggtggtaccgctcgtgtgggacatcgccgtgaccttcaccgccgacttccagaagatcttcgggccgctgagctacttcaccaccgcctccaagtatcaggcgcagatcgactccggcgagctgaccggcgaggcactgaccaacgccaaggccgcgctgtccaacgcgtatctggacggcgtgctctccgtgttcttcctggtcatgatgggcgtcttcgtggtagtcggtatcgtggtcgtggcgcgcacgttcgccgctggcaagtacggtgccgaaacgacgtccgaggagccgttcgtggaatcccagtggttcgcgccctccagcctggtcgccaccgcgcttgagaagaaggtgcagcgcgaatacagcgccaagctgcatgagcttgtgcggaacgggcaggttgcagcgtag

SEQ ID NO: 36613 - protein, 799 aa, Bifidobacterium longum DJO10A
MTTAAAQAPAPGKLEFKDDYTPDEAERVIRNSKGLPVGVRPKMVWTWKKALLWAAIAIVCACGWAILAVSRGERISAIWFLVVALSSYAIAYRFYAYYIQIKIMRTDDANATPAERVHDGANFERTDRRVLFGQHFAGISGAGPLVGPILAAQMGYLPSTLWIILGVIFAGAVQDMLVLWISAKRRGRSLGQMATDEMGKFGGMILSIFLVVMTAIAMAFLALVAIKAMAASPWAVFSIGMTIPIALIMGCYQRFLRPGRVIETTLLGFVLLVLDIVAGGWIASIPAVAAVFTLDAKQLVIALVIYSFAAAALPHWLLVTPRDYLSTLMKIGTLVLLVIGIIIANPSVKVPGLTELASTSTGPTFSGNLFPFLFITIACGALSGFHGAVSSGLTPKAVEKENQIRMIGYGSMLVESFTAVIALIAAITISQGVYFSTNMSAAQITAASGVSISATSTPGEQADAAVKAVESMKVSDIEGNQMQVTWDSVDENGAAKTYEGAAALEQAAADIGETSIVSRTGGATTFAMGMANFLKSYLGGHDSMAFWYHFAIMFEALFILTTVDNGTRVARYQIGEMLGNVRKLKKFADPTWKPGNIITTLIATALWGGLLWMGVSDANGGINAMVPIFGISNQLLAAACFVLITVCVAKMGYWKHLWIPVVPLVWDIAVTFTADFQKIFGPLSYFTTASKYQAQIDSGELTGEALTNAKAALSNAYLDGVLSVFFLVMMGVFVVVGIVVVARTFAAGKYGAETTSEEPFVESQWFAPSSLVATALEKKVQREYSAKLHELVRNGQVAA

SEQ ID NO: 36614 - DNA, 2055 bp, Pseudomonas syringae pv. syringae B728a
  CDS (1)..(2055)
atgcgccatgttccctggctcatcgttgcaattgtcggggcatgtgcccttggggtcgtggccttgcgccgcggagaggcgatcaacgccttgtggatagtggtcgctgcggtagctatctacctggttgcctatcgttactacagtcttttcatcgccactcacgtcatgcagctcgatccgctgcgcgcgacaccggcggtggtcaacaacgacggtctggactatgtgccgaccaacaaacacattctcttcggacaccactttgccgccatcgctggcgcaggcccgctggtcggcccggtactggcagcgcaaatgggctatctgcccggcacgctctggctgatcgcaggcgtggtgctggccggtgcggtgcaggacttcatgatcctgttcctctccacgcgccgtgacggacgctcgctgggtgacatggttcgcgaggaaatgggccgtattcccggcaccatcgcgctgttcggctgcttcctgatcatgatcatcatcctggcggtgctggcgctgatcgtggtcaaggccctggccgagagcccgtggggcatgttcacggtcatggcgacgatcccgatcgcgatgttcatgggcatttatatgcgctacatccgtccggggcgcattggtgaaatctccatcgtcggtgtcattctgttgctcggttcgatctgggtcggcgggatggtagcggcggatccgacctgggggccgatgttcacgttcaccggtgtgcagatcacctggatgctggtcggttacggctttgtagcggccatgctgccggtctggctgctgcttgcgccccgtgactacctgtcgaccttcctgaaaatcggcaccattctggcactcgcgatcggcatcctgatcctggcgcccgagctgaaaatgccggccctgacccagttcaccaacggcacaggcccggtctggaagggcgcattgttcccgttcctgttcatcaccattgcctgcggtgcagtgtcgggtttccacgcactgatctcctcgggcaccacgcccaagctgctggataacgagaagaacgcccgttacatcggttacggcggcatgttgatggagtccttcgtggccatcatggcgatggttgccgcttcggtgatcgagccgggcgtgtacttcgccatgaacagcccggctgccgtggtcggcagtgacgtggtgaccgtcgcgcagacggtgtccagctggggctttgccatcacgccggagcaactgacggctgtggcgaaagacattggtgaaaacaccgtgctggcgcgggctggtggtgctccgacgctggccgtcggtatcgcacagatcctccatcaggtgctgccgggtgaaaacaccatggcgttctggtaccactttgcgattctgttcgaggcgctgttcatcctgaccgccgtcgacgccgggacacgtgccggacgcttcatgctgcaggacctgctgggcagcttcgttccggccttgaaacgcaccgagtcgtggacggccaacgccatcggcaccggcggttgcgtggcgctgtggggctatctgctctatcagggcgtcatcgacccgctgggcggcatcaataccttatggccgctgttcggtatctccaaccagatgctcgccggtatcgccctgatgctggccagcgtggtgctgatcaagatgaagcgtcagcgctacgtctgggtgaccatgctgcctgccgtctggctgctgatctgcaccgtgaccgctggcttgatcaagctgttcgacgccaaccctgcggtaggtttcctggccctggccaagaaatacagcgcggcggccgatgccggtcagattctggccccggccaagaccatggaccagatgcagcacgtgatcttcaacgcttacaccaacgccgggctgaccgtgctgttcctgttcgtggtgttcagcatcctgttctacgccattaaagtcggccgtgcggcctggagcaccaaggagcgcaccgacaaggaagcgccattccaggccatgccgccagcgtcgcaggtgtga

SEQ ID NO: 36615 - protein, 684 aa, Pseudomonas syringae pv. syringae B728a
MRHVPWLIVAIVGACALGVVALRRGEAINALWIVVAAVAIYLVAYRYYSLFIATHVMQLDPLRATPAVVNNDGLDYVPTNKHILFGHHFAAIAGAGPLVGPVLAAQMGYLPGTLWLIAGVVLAGAVQDFMILFLSTRRDGRSLGDMVREEMGRIPGTIALFGCFLIMIIILAVLALIVVKALAESPWGMFTVMATIPIAMFMGIYMRYIRPGRIGEISIVGVILLLGSIWVGGMVAADPTWGPMFTFTGVQITWMLVGYGFVAAMLPVWLLLAPRDYLSTFLKIGTILALAIGILILAPELKMPALTQFTNGTGPVWKGALFPFLFITIACGAVSGFHALISSGTTPKLLDNEKNARYIGYGGMLMESFVAIMAMVAASVIEPGVYFAMNSPAAVVGSDVVTVAQTVSSWGFAITPEQLTAVAKDIGENTVLARAGGAPTLAVGIAQILHQVLPGENTMAFWYHFAILFEALFILTAVDAGTRAGRFMLQDLLGSFVPALKRTESWTANAIGTGGCVALWGYLLYQGVIDPLGGINTLWPLFGISNQMLAGIALMLASVVLIKMKRQRYVWVTMLPAVWLLICTVTAGLIKLFDANPAVGFLALAKKYSAAADAGQILAPAKTMDQMQHVIFNAYTNAGLTVLFLFVVFSILFYAIKVGRAAWSTKERTDKEAPFQAMPPASQV

SEQ ID NO: 36616 - DNA, 1470 bp, Desulfovibrio desulfuricans G20
  CDS (1)..(1470)
atgctgtacttttttctggctgttgcagcactgctggtcggctacgccgtatacagcaaggtagtggaacgcgccttcggcgcggatgaatgccgggccacaccggcctgcaccatggaagacggtgtggactatgtgaagatggatcccaaaaaaatctggctgatccagcttctgaacattgccggtctgggtcccatcttcggccccattctgggtgcgctgtacggtcccgcggccctgctgtggattgtcatcggatctattttcgcgggtgctgtgcacgactacttcgcaggcatgatgtcggtgcgctacagcggcaaatccatccccgacgccgtcggctacaaccttggttctttcgccaagcacttcatgaacgtgttcgccgtcattctgctgctgcttgtgggcgtcgtgtttgttctcggtccggcaaagctgctggcagtcaagctgggcttcggccttgaaggcgacggcgccgtggctaccgccaccatgatctggacgggcatcattttctgttactactttatcgccaccgtactgcccgtggataaaatcatcggccggttgtaccccctgttcgccgtggtgctgcttatcatggcgttcggcctgaccatcatgctcatcgccaagggatacgaattctatccgcagggtctcacgcttgaaaacctgcatcccaaaaacctgcccatgtggccgctgatgttcatcaccatcgcctgcggtgccatttccggcttccatgccacgcagtctccgctgatggcccgctgcgtgcccgatgaaaaatgcggacgccccatattctacggcgccatgatcggcgaaggcatcatcgcccttatctgggcaactctgggcatgagctttttccacacccccggagaactgcaggccgtgctggataacggcggccccgcagccgtggtggatactgtatccatgacccttatggggcccataggcggcttccttgccatcatcggcgtggtggttctgcccatcacttccggtgacacggctttccgttccgcccgtctcatcattgccgacttcatcaagctgcctcagaaggcaccggtcaagcgtctgttcattgccgtgccgctgttcgcagtcggctacgccatcacgctcacgccgtttgcagtcatctggcgctacttcggcttttccaaccagctgctggccaccatcgtgctgtgggcgggcgccatgtatcttgtccgccacggcaaggcacactggatggcatccatccccgccacattcatgacggcagtatgcgcaacctaccttgcctacgccaaaatcggcttcggcctttccatggatatcgcacaggttttcggcattgccgtggctgtgctgtgcgccggtttcttcctggtgaagatccgcagcgtgcccgtggagcccgacgccgccgacggtcccggccgcatcggctga

SEQ ID NO: 36617 - protein, 489 aa, Desulfovibrio desulfuricans G20
MLYFFLAVAALLVGYAVYSKVVERAFGADECRATPACTMEDGVDYVKMDPKKIWLIQLLNIAGLGPIFGPILGALYGPAALLWIVIGSIFAGAVHDYFAGMMSVRYSGKSIPDAVGYNLGSFAKHFMNVFAVILLLLVGVVFVLGPAKLLAVKLGFGLEGDGAVATATMIWTGIIFCYYFIATVLPVDKIIGRLYPLFAVVLLIMAFGLTIMLIAKGYEFYPQGLTLENLHPKNLPMWPLMFITIACGAISGFHATQSPLMARCVPDEKCGRPIFYGAMIGEGIIALIWATLGMSFFHTPGELQAVLDNGGPAAVVDTVSMTLMGPIGGFLAIIGVVVLPITSGDTAFRSARLIIADFIKLPQKAPVKRLFIAVPLFAVGYAITLTPFAVIWRYFGFSNQLLATIVLWAGAMYLVRHGKAHWMASIPATFMTAVCATYLAYAKIGFGLSMDIAQVFGIAVAVLCAGFFLVKIRSVPVEPDAADGPGRIG

SEQ ID NO: 36618 - DNA, 1584 bp, Haemophilus somnus 2336
  CDS (1)..(1584)
atgttatggtttttcttttgtgttgccctattgattttaggctatttcacatacggtaaatttgttgagaaagtatttgttatcaatccgaacaagaaaacgcccgcttattctatgacagatggtgttgactatgttccgatgtctaaaaagaaaatttggctaattcaattattgaatatcgcaggcacaggtccgattttcggaccgattatgggggcattatatggaccggtggcgatgttatggattgtactgggttgtgtatttgccggtgcagtacatgattatttctgtggtatgttgagcgttcgtaatggtggtgcttcaatgcctactcttgccggacgctatttaggtactcccgttaaagtatttattaacgtacttgccgttgttttattattccttgtcgggattgtgtttgtaaccagtcctgctcagttattaagtactattactttagatatgtttggtagtgcaagtatggctacaaccaatgcacatgaggtggtaagtgcggtacaaaacgctggtgagatccgtgtttggggaatggataaaccgacagttgtggcggtttggactggaattattttcctttactatattgtggcgacattgttaccgattgataagattattggacgtatttatccattatttggtggattattattattcatgtctgccggtatggtatatggcttagtatccagccatttaaatggtgctgatccaattgaatttttccgttccgttgatggtatgagttttgaaaaattcttacaaaactttgaaactcgtaaagagctaccattatggccattattattcttaaccatttcttgtggtgcactttccggtttccatgcaactcaatctccattgatggcacgttgtgctgaaaatgagaaagaaggtcgttttattttctacggagccatgattgcagaaggtgttattgctttagtttggtgtactgttggtttaagtttctatgaaaatttgggtgaactattagctgcaacccaacaaggttcaccttccaaagtagtgtatgattcttctatttatttcttagggactattggtggtgtttttgctgtattaggggtagttgtgctacctattacttccggagatacagcattccgttccgctcgtttgattattgcggagttcttaaaaattgaacaacgcactttggtgaaacggttacttattgcagttccgttatttgcagtcggtttttggattattgcatcaaaaattgactttggtgtgttgtggcgttatttcacttgggcaaaccaagcaacagcaatggtgatgctatggacagctgcggcttatctatatcgttacaataaattccattgggtgtgtactattccggcagcatttattagtgcggtatgttttacatacttagcctataacaaaattggttttggtttagattatcaactttccgtttatattggtattggattaactattttgtgtttagtggctttctttattttattgaaaccgttaggttcgaaagatccggatgcctttataaatgatgtagcataa

SEQ ID NO: 36619 - protein, 527 aa, Haemophilus somnus 2336
MLWFFFCVALLILGYFTYGKFVEKVFVINPNKKTPAYSMTDGVDYVPMSKKKIWLIQLLNIAGTGPIFGPIMGALYGPVAMLWIVLGCVFAGAVHDYFCGMLSVRNGGASMPTLAGRYLGTPVKVFINVLAVVLLFLVGIVFVTSPAQLLSTITLDMFGSASMATTNAHEVVSAVQNAGEIRVWGMDKPTVVAVWTGIIFLYYIVATLLPIDKIIGRIYPLFGGLLLFMSAGMVYGLVSSHLNGADPIEFFRSVDGMSFEKFLQNFETRKELPLWPLLFLTISCGALSGFHATQSPLMARCAENEKEGRFIFYGAMIAEGVIALVWCTVGLSFYENLGELLAATQQGSPSKVVYDSSIYFLGTIGGVFAVLGVVVLPITSGDTAFRSARLIIAEFLKIEQRTLVKRLLIAVPLFAVGFWIIASKIDFGVLWRYFTWANQATAMVMLWTAAAYLYRYNKFHWVCTIPAAFISAVCFTYLAYNKIGFGLDYQLSVYIGIGLTILCLVAFFILLKPLGSKDPDAFINDVA

SEQ ID NO: 36620 - DNA, 1587 bp, Actinobacillus pleuropneumoniae serovar 1 str. 4074
  CDS (1)..(1587)
atgttgtggttcttcttttgtgtagcagtccttgtactcggctacttcgtttacggtaaaatcattgaaaagattttcgtgattaaccccaaaaaagcaacacctgcttataccatgaatgacggtgtggactatatgccaatgtctaaaactaagatttggcttattcagttattaaacattgcgggtaccggcccaatcttcggtccgattctcggtgcgttatacggccctgttgcaatgctttggatcgttatcggttgtatttttgccggtgcggtacatgactacttctgcggtatgttaagtattcgtaacggtggcgcgacaatgccggcgttagcgggtaaattcttaggtcgcccggttaaagtatttatcaacgttatggcgttaatccttctattattagtaggtgtggtattcgttgcaagtccggcgcaattaatggcaaccattacaatggatgtattcggtgcagctggcggaacgttacaattaaacgatgcggaagccgttcaccaagcggttgaagccggtggtattacagtttggggtatggataaagcaaccgttatttctgtttggacattaattatcttcggttactatatcttagcaactttacttccaattgataaaattatcggtcgaatctacccattcttcggtgcattattactctttatgtctgtaggtatggtgtacggtttaattaccgctcacttcagtgcaaccgatccaatcgaattcttccgtaccgttaatgcggacggtcaaggcttaacgtgggaaaaattcactcaaaacttccaagtgaagggcgatgttccgatttggcctttattattcttaactatttcttgtggtgcgttatcaggcttccacgcaacccaaaccccattaatggcgcgttgtgcggaaaatgaaagcgaaggtcgtttcattttctacggtgcaatgattaccgagggtgtaatcgcattagtatggtgtatggtcggtcttgcattctatgaaaatccacaagcgttacaagatgcaatttcggcaggttcaccgtctaaagtggtttatgacagttcattacacttcttaggctttatcggcggtattttcgcagtactcggcgtagtagtattaccgattacttcaggcgatacggcattccgtgcggcacgtttacaattggctgaactctttaaaattgatcaacgttcattagctaaacgtttaatgattgcagtaccgttattcgcattaggtttcgtggtatcaaaaattgacttcagtatcttatggcgttacttcacttgggcaaaccaaatgacagcaatggtaatgctttggactgcggcggcatacttatatcgctacaaaaaattccactgggtatgttcaatccctgcgtggtttattacaaccgtatgtgcaacctacttgttctataacaaaatcggcttcggtttagattatgaactttcggtttacttaggtttagcttcaaccgttgtttgtatcgtgctattcttcacaatgcttaaaccgttaggcgagcgtgacgaagatgcttatgcagcaaactaa

SEQ ID NO: 36621 - protein, 528 aa, Actinobacillus pleuropneumoniae serovar 1 str. 4074
MLWFFFCVAVLVLGYFVYGKIIEKIFVINPKKATPAYTMNDGVDYMPMSKTKIWLIQLLNIAGTGPIFGPILGALYGPVAMLWIVIGCIFAGAVHDYFCGMLSIRNGGATMPALAGKFLGRPVKVFINVMALILLLLVGVVFVASPAQLMATITMDVFGAAGGTLQLNDAEAVHQAVEAGGITVWGMDKATVISVWTLIIFGYYILATLLPIDKIIGRIYPFFGALLLFMSVGMVYGLITAHFSATDPIEFFRTVNADGQGLTWEKFTQNFQVKGDVPIWPLLFLTISCGALSGFHATQTPLMARCAENESEGRFIFYGAMITEGVIALVWCMVGLAFYENPQALQDAISAGSPSKVVYDSSLHFLGFIGGIFAVLGVVVLPITSGDTAFRAARLQLAELFKIDQRSLAKRLMIAVPLFALGFVVSKIDFSILWRYFTWANQMTAMVMLWTAAAYLYRYKKFHWVCSIPAWFITTVCATYLFYNKIGFGLDYELSVYLGLASTVVCIVLFFTMLKPLGERDEDAYAAN

SEQ ID NO: 36622 - DNA, 2067 bp, Pseudomonas aeruginosa UCBPP-PA14
  CDS (1)..(2067)
atgaacaataacaatagcctgctacgtcacctcgcctggctggtggtggcgatcgtgggcgccgcggccctgggcgtcgtcgccctgcgtcgtggcgaagcgatcaacgccttgtggatcgtggtggcggcggtggccatctacctggtcgcctaccgttactacagcctgttcatcgccagcaaggtgatgcaactggaccccaaccgcgccactcccgcggtactcaacaacgatggcctggactacgtcccgaccaacaagcacatcctcttcggccaccacttcgccgccatcgccggcgccggtccgctggtcggtccggtccttgccgcgcagatgggctacctgcccggcaccctctggctgatcgccggcgtagtcctcgccggcgcggtgcaggacttcatggtcctgttcatctccagccgccgcaacggccgctcgctgggcgagctggtgcgcgaggaaatgggccaggtggccgggaccatcgcgctgttcggcgccttcctgatcatgatcatcatcctcgcggtgctcgcgctgatcgtggtgaaggctctggccgacagcccctggggcatgttcaccgtcctcgcgaccattcccatcgcgctgttcatgggcgtctacatgcgcttcatccgccccggccggatcggcgagatctcgatcatcggggtgttcctcctgctcggttcgatctggctcggcgggcaggtcgcggccagtccggaatgggcgccgcatttcaccttcagtggaatccagatcacctggatgctgatcggctacggcgccgtcgcctcggtactgccggtgtggctgctgctggcgccgcgcgactacctgtcgaccttcctcaagatcggcaccatcatcggcctggcgatcggcatcctgatcgtcatgccggatctgaagatgccggccctgacccagttcaccgacggcaccggcccggtctggaaaggcagcctgttcccgttcctgttcatcaccatcgcctgcggcgcggtgtccggcttccacgcgctgatctcctcggggaccacgccgaagctgctcaaccgcgagcccgacgcccgctacatcggctacggcggcatgctgatggagtccttcgtggcgatcatggcgatggtcgccgcctcggtgatcgagccgggcatctacttcgccatgaacagcccgccggcggtggtcggcgccgacgtcaacgcggtggccgcgaccgtcagcagctggggcttcgccatcacgccggagcaactcacccagaccgcccaggacatcggcgagaccaccatcctggcccgtgccggcggcgcgccgaccctggcggtggggatcgcgcacatcctccaccaggtgctgccgggcgagaacaccatggccttctggtaccacttcgcgatcctcttcgaggccttgttcatcctcaccgcggtggacgccggcacccgtgccgggcgcttcatgctgcaggacctgctgggcaacttcgtgccggcgctgaagaagaccgagtcgtggaccgccaacatcatcggcaccggcggctgcgtggcgctgtggggctggctgctgtaccagggcgtggtcgacccgctgggtgggatcaataccctgtggccgctgttcggcatttccaaccagatgctcgccggcatcgcgctgatgctcgccaccgtggtcctgatcaagatgaagcgccagcagtatgtctgggtcaccatcctgccggcggcctggctgctgatctgcaccaccaccgcgggcctgatcaagatcttcgacagcaacccggcggtcggcttcgtcgcccttggcgagaagtacgccaccgcgctggatgctggccaggtgctggcgccggccaaggatatcggccagatgcagcacgtggtgctgaacgcctacatcaacgccggtctgaccgtgctgttcctgctggtggtgttcagcgtactgttctacgccatcaaggtcggcatcgcggcctggggcaagagcgagcggaccgacaaggaaaccccgttcgagcccattcccgacgcctga

SEQ ID NO: 36623 - protein, 688 aa, Pseudomonas aeruginosa UCBPP-PA14
MNNNNSLLRHLAWLVVAIVGAAALGVVALRRGEAINALWIVVAAVAIYLVAYRYYSLFIASKVMQLDPNRATPAVLNNDGLDYVPTNKHILFGHHFAAIAGAGPLVGPVLAAQMGYLPGTLWLIAGVVLAGAVQDFMVLFISSRRNGRSLGELVREEMGQVAGTIALFGAFLIMIIILAVLALIVVKALADSPWGMFTVLATIPIALFMGVYMRFIRPGRIGEISIIGVFLLLGSIWLGGQVAASPEWAPHFTFSGIQITWMLIGYGAVASVLPVWLLLAPRDYLSTFLKIGTIIGLAIGILIVMPDLKMPALTQFTDGTGPVWKGSLFPFLFITIACGAVSGFHALISSGTTPKLLNREPDARYIGYGGMLMESFVAIMAMVAASVIEPGIYFAMNSPPAVVGADVNAVAATVSSWGFAITPEQLTQTAQDIGETTILARAGGAPTLAVGIAHILHQVLPGENTMAFWYHFAILFEALFILTAVDAGTRAGRFMLQDLLGNFVPALKKTESWTANIIGTGGCVALWGWLLYQGVVDPLGGINTLWPLFGISNQMLAGIALMLATVVLIKMKRQQYVWVTILPAAWLLICTTTAGLIKIFDSNPAVGFVALGEKYATALDAGQVLAPAKDIGQMQHVVLNAYINAGLTVLFLLVVFSVLFYAIKVGIAAWGKSERTDKETPFEPIPDA

SEQ ID NO: 36624 - DNA, 1425 bp, Fusobacterium nucleatum subsp. vincentii ATCC 49256
  CDS (1)..(1425): transl_table=11
atgtatagttttataggttcaattatagcattggtacttggatattttatctatggaaaatttgttgaaggtgtttttgggatagagccttcaagagaaacacctgcaaaaagattagcagatggtgttgactatatggaaatgagttggccaaaagcatttcttattcaatttcttaatatagctggaacaggtcctatatttggagcagttgctggagcattatggggtccagctgcatttatttggatagtatttggttgtatctttgcaggttcagttcatgattttctaataggaatgatgtctttaagaaaagatggagcatctgtttctgaaatagtaggagaaaatttaggtatgactgcaaaacaaataatgagagttttctctgttatacttctattattagttggtgttgtatttataatgagtccagctcaaattttaactaatataacaggggttaattatacagtttggttaggagtcattataatttattatctttgtgcaactgtattaccaattgatacaattattggtaaaatttatccaatatttggtttatctcttttagtaatggcatttggtataggtggaggcttaataataaataatgctaatattcctgaaatagcttttgtaaatatgaatccagcaggaagatcagttttcccttatctatgtataacaatagcttgtggagcaattagtggtttccatgctactcaatctcctatgatggctagatgtttaaaaacagaaaaatcaggaagaaaagttttctatggtgcaatgatatcagaaggaattatagctcttatttgggctgctgctgcaatgtcattctttggtggaatacctcaacttgcagaagcaggtactgctgctgttgttgttaataaaatatctgttggaattttaggaaaagctggaggtgttttagcattattaggagttgttgcttgtcctataacttctggggatactgcatttagaagtgcaagacttactattgctgattctctaaactataaacaaggacctgttgtaaatagatttgttgttgcaattcctttatttgttcttggaattatattatgtttcacaccatttgatgttatttggagatattttggttgggcaaatcaaactcttgctacaatagctctatgggcagcagttaaatatttggcaaacagaggaaaaaattattggatagctttagttccagcaatgtttatgacagttgttgtaacttcttatatacttgcagcaccagaaggatttgtaagattctttggagataaagatataaaagtaatagaacatattgcaatagcaataggttgtgttgtatcattagtatgtacagctgcattctttatgacaaataaaaaatctaaattaattactgaataa

SEQ ID NO: 36625 - protein, 474 aa, Fusobacterium nucleatum subsp. vincentii ATCC 49256
MYSFIGSIIALVLGYFIYGKFVEGVFGIEPSRETPAKRLADGVDYMEMSWPKAFLIQFLNIAGTGPIFGAVAGALWGPAAFIWIVFGCIFAGSVHDFLIGMMSLRKDGASVSEIVGENLGMTAKQIMRVFSVILLLLVGVVFIMSPAQILTNITGVNYTVWLGVIIIYYLCATVLPIDTIIGKIYPIFGLSLLVMAFGIGGGLIINNANIPEIAFVNMNPAGRSVFPYLCITIACGAISGFHATQSPMMARCLKTEKSGRKVFYGAMISEGIIALIWAAAAMSFFGGIPQLAEAGTAAVVVNKISVGILGKAGGVLALLGVVACPITSGDTAFRSARLTIADSLNYKQGPVVNRFVVAIPLFVLGIILCFTPFDVIWRYFGWANQTLATIALWAAVKYLANRGKNYWIALVPAMFMTVVVTSYILAAPEGFVRFFGDKDIKVIEHIAIAIGCVVSLVCTAAFFMTNKKSKLITE

SEQ ID NO: 36626 - DNA, 1587 bp, Haemophilus influenzae R2846
  CDS (1)..(1587)
atgttatggtttttcttttgtgtagccgtgttgattatcggttactttatttatggaaaaattatcgaaaaaatttttgtgattaatccaaaacgtcaaacacctgcttaccaagtaaatgatggtgtggactatatgccaatgtctaaaacgaaaatttggctaattcaattgttaaatattgcgggaacaggccctatttttggccctattcttggtgcattatatggacctgttgcaatgctttggattgttattggttgtatttttgcgggcgcagtacacgattatttctgtggtatgttaagtattcgtcacggtggcgcaacaatgccatatttggcgggtaagtttttaggtcgtcccgttaaagtctttatcaatacattagcacttgtgttgcttttacttgtcggtgttgtgtttgtggcaagcccagctcaattaatgggtaccattacaatggatgtatttggtgcttcgcaaagtgcgttagtgcttggtgatgcagaggcagttcatcattctgttgaagctggtgggattaaagtatggggaatggataaagcaacagtggttgctctgtggacagcaattatttttgcttattatattcttgcaaccttacttccagttgataagattattggtcgaatttatccactctttggtgcgttattactctttatgtcagttggtatggtatacggattagttgtttcacattttagtgcaacagatccaattgagtttttccgtacaatcaatgctgatggcgagggtttaacttgggcgaaatttacacaaaatttccaagtgaaaggtgatgttccaatttggccacttttattcttaactatctcttgtggcgcattatcaggtttccacgcaacgcaaactccattaatggcgcgttgtacagaaaatgaaagtgaaggtcgcttcattttctacggtgcaatgattactgagggggtaattgcattagtatggtgtatggttggtcttgcattctatgaaaatccacaagcgttacaagatgcaatttcagcaggttctccatctaaagttgtgtatgatagttcgttacatttcttaggttttattggtggtatttttgccatattaggcgtgattgttcttcctattacttctggcgatactgcattccgtgctgcgcgtttacagatagccgaaatttttaatgttgatcaacgttcattacctaaacgtttattaattgctgtgccgttgtttgtattaggttattttatttcaaccattgatttcagcgtattatggcgttatttcacttgggcaaaccaaatgacagcaatggtaatgttatggactgcagcgggatatttatatcgttatcataaattccactgggttgcgtctcttcctgcgtggtttatcacaacagtatgtgcaacttatttgttctacaacaaaattggtttcggcttagattatcagctttctgtgtatcttggtttagcaacaaccatcgtttgtatcgtattgttcttcacaatgcttaaaccattaggtacgcgagatgaagaagcttatataaataattag

SEQ ID NO: 36627 - protein, 528 aa, Haemophilus influenzae R2846
MLWFFFCVAVLIIGYFIYGKIIEKIFVINPKRQTPAYQVNDGVDYMPMSKTKIWLIQLLNIAGTGPIFGPILGALYGPVAMLWIVIGCIFAGAVHDYFCGMLSIRHGGATMPYLAGKFLGRPVKVFINTLALVLLLLVGVVFVASPAQLMGTITMDVFGASQSALVLGDAEAVHHSVEAGGIKVWGMDKATVVALWTAIIFAYYILATLLPVDKIIGRIYPLFGALLLFMSVGMVYGLVVSHFSATDPIEFFRTINADGEGLTWAKFTQNFQVKGDVPIWPLLFLTISCGALSGFHATQTPLMARCTENESEGRFIFYGAMITEGVIALVWCMVGLAFYENPQALQDAISAGSPSKVVYDSSLHFLGFIGGIFAILGVIVLPITSGDTAFRAARLQIAEIFNVDQRSLPKRLLIAVPLFVLGYFISTIDFSVLWRYFTWANQMTAMVMLWTAAGYLYRYHKFHWVASLPAWFITTVCATYLFYNKIGFGLDYQLSVYLGLATTIVCIVLFFTMLKPLGTRDEEAYINN

SEQ ID NO: 36628 - DNA, 1587 bp, Haemophilus influenzae R2866
  CDS (1)..(1587)
atgttatggtttttcttttgtgtagccgtgttgattatcggttactttatttatggaaaaattatcgaaaaaatttttgtgattaatccaaaacgtcaaacacctgcttaccaagtaaatgatggtgtggactatatgccaatgtctaaaacgaaaatttggctaattcaattgttaaatattgcgggaacaggccctatttttggccctattcttggtgcattatatggacctgttgcaatgctttggattgttattggttgtatttttgctggcgcagtacacgattatttctgtggtatgttaagtattcgtcacggtggcgcaacaatgccatatttggcgggtaagtttttaggtcgtcccgttaaagtctttatcaatacattagcacttgtgttgcttttacttgtcggtgttgtgtttgtggcaagcccagctcaattaatgggtaccattacaatggatgtatttggtgcttcgcaaggtgcgttagtgcttggtgatgcagaggcagttcatcattctgttgaagctggcgggattaaagtatggggaatggataaagcaacagtggttgctctgtggacagcaattatttttgcttattatattcttgcaaccttacttccagttgataagattattggtcgaatttatccactctttggtgcgttattactctttatgtcagttggtatggtatacggattagttgtttcacattttagtgcaacagatccaattgagtttttccgtacaatcaatgctgatggcgagggtttaacttgggcgaaatttacacaaaatttccaagtgaaaggtgatgttccaatttggccacttttattcttaactatctcttgtggcgcattatcaggtttccacgcaacgcaaactccattaatggcacgttgtacagaaaatgaaagtgaaggtcgcttcattttctacggtgcaatgattactgagggggtaattgcattagtatggtgtatggttggtcttgcattctatgaaaatccacaagcgttacaagatgcaatttcagcaggttctccatctaaagttgtgtatgatagttcgttacatttcttaggttttattggtggtatttttgccatattaggcgtgattgttcttcctattacttctggcgatactgcattccgtgctgcgcgtttacagatagccgaaatttttaatgttgatcaacgttcattacctaaacgtttattaattgctgtgccgttgtttgtattaggttattttatttcaaccattgatttcagcgtattatggcgttatttcacttgggcaaaccaaatgacagcaatggtaatgttatggactgcagcgggatatttatatcgttatcataaattccactgggttgcgtctcttcctgcgtggtttatcacaacagtatgtgcaacttatttgttctacaacaaaattggtttcggcttagattatcagctttctgtgtatcttggtttagcaacaaccatcgtttgtatcgtattgttcttcacaatgcttaaaccattaggtacgcgagatgaagaagcttatataaataattag

SEQ ID NO: 36629 - protein, 528 aa, Haemophilus influenzae R2866
MLWFFFCVAVLIIGYFIYGKIIEKIFVINPKRQTPAYQVNDGVDYMPMSKTKIWLIQLLNIAGTGPIFGPILGALYGPVAMLWIVIGCIFAGAVHDYFCGMLSIRHGGATMPYLAGKFLGRPVKVFINTLALVLLLLVGVVFVASPAQLMGTITMDVFGASQGALVLGDAEAVHHSVEAGGIKVWGMDKATVVALWTAIIFAYYILATLLPVDKIIGRIYPLFGALLLFMSVGMVYGLVVSHFSATDPIEFFRTINADGEGLTWAKFTQNFQVKGDVPIWPLLFLTISCGALSGFHATQTPLMARCTENESEGRFIFYGAMITEGVIALVWCMVGLAFYENPQALQDAISAGSPSKVVYDSSLHFLGFIGGIFAILGVIVLPITSGDTAFRAARLQIAEIFNVDQRSLPKRLLIAVPLFVLGYFISTIDFSVLWRYFTWANQMTAMVMLWTAAGYLYRYHKFHWVASLPAWFITTVCATYLFYNKIGFGLDYQLSVYLGLATTIVCIVLFFTMLKPLGTRDEEAYINN

SEQ ID NO: 36630 - DNA, 2079 bp, Burkholderia cepacia R18194
  CDS (1)..(2079)
atgaatcgggcttccagtaccctgctctggattgcggtcgcgctgctcggcgcgttcgcgttcggcacgatcgcactcgcacacggcgagcgcgtcagtgccctctggatcgtgatcgccgcagtctgcgtgtatctgatcgcgtatcgcttctacagccgtttcatcgccagcaaggtcatgcagctcgacgggctgcggatgacgccggccgtcaagtacaacgatggcctcgactacgtgccgaccaacaagtacgtgctgttcggccatcacttcgccgcgatcgccggcgccggcccgctcgtcgggcccgtgctcgccgcgcagatgggctacatgcccggcatgctgtggatcctggccggcgtcgtgttcgccggtgcggtgcaggacttcatcgtgctgttcatctcgacgcgccgcgacggccgctcgctcggcgatctcgtcaagatggagctcggcacggtgcccggcgtgatcgcgctgttcggcgcgttcctgatcatggtgatcatcctcgcggtgctcgcgctgatcgtcgtgaaggcgctgaccaattcgccgtggggcacgttcaccgtcgccgcgacgattccgatcgcactgttcatgggcgtctatacgcgctacatccgtccgggccgcatcggcgaagtgtcgatcatcggcttcgtgctgctgatggcatcgatcgcgttcggccagcacgtgcacgattcgccgacgctcgccgcgtggttcacgttcacgggcacccagctcacgtggatcctgatcggctacggcttcgtcgcctcggtgctgccggtgtggctactgctcgcgccgcgcgactacctgtcgacgttcctgaagatcggcacgatcctcggcctcgcgatcggcatcctggtcgtcgcaccggaactgaagatgcccgcgctgacgaagttcgtcgatggcacgggccccgtgtggtcgggcggcctgttcccgttcctgttcatcacgatcgcgtgcggtgccgtgtcgggcttccatgcgctgatctcgtcgggcacgacgccgaagctgatcgacaacgaaaccaacgcgcgcttcatcggttacggcgcgatgctgatggagtcgttcgtcgcgatcatggcgctggtcgccgcgagcgtgatcgagccgggcatctacttcgcgatgaacgcgccggccgccgtgctcggctcgacgccggaagcggtcgccaacaccgtcacgcaatggggcttcgtgctgacgccggacatgctgacgcagaccgcgaaggccgtcggtgaaacgacgatcatcgcgcgcgcgggcggcgcgccgacgctggccgtcggcatggcgcacatcctgcaccaggtgatcggcggcgaagcgatgatggcgttctggtatcacttcgcgatcctgttcgaggcgctgttcatcctgacggccgtcgacgccggcacgcgcgcaggccgcttcatgctgcaggacctgctcggcacgttccacccggcgctcaagcgcaccgagtcgctgcccgcgaacctggtcgcgaccgcgctgtgcgtggccgcgtggggctacttcctgtaccagggcgtggtcgatccgctcggcggcatcaacacgctgtggccgctgttcggcatctcgaaccagatgcttgccgcgatcgcgctggtgctcggcaccgtcgtgctgttcaagatgaagcgcgagcgctatgcgtgggtgacgatcgtgccgaccgtgtggctgctgatctgcacgctgaccgccggctggcagaagattttcgacgcgaacccgaaggtcagcttcctcgcgcacgccgcgaagctgcaggccgcggtggacgaaggcaaggtgcttgccccggcgaagtcgatcgcgcagatgaagcggatcatcttcaacgactacatcgatgcggcgctggccgggttgttcatcttcgtcgtcgtggcgatcgcggtgtacggcgtgatcgccgtgctgcgcgcgcgccgcgagtcgaagccgaccgtgcgcgagacgccgtacgaagccatgccggccgcgcaggcgctcggcagcggacgttaa

SEQ ID NO: 36631 - protein, 692 aa, Burkholderia cepacia R18194
MNRASSTLLWIAVALLGAFAFGTIALAHGERVSALWIVIAAVCVYLIAYRFYSRFIASKVMQLDGLRMTPAVKYNDGLDYVPTNKYVLFGHHFAAIAGAGPLVGPVLAAQMGYMPGMLWILAGVVFAGAVQDFIVLFISTRRDGRSLGDLVKMELGTVPGVIALFGAFLIMVIILAVLALIVVKALTNSPWGTFTVAATIPIALFMGVYTRYIRPGRIGEVSIIGFVLLMASIAFGQHVHDSPTLAAWFTFTGTQLTWILIGYGFVASVLPVWLLLAPRDYLSTFLKIGTILGLAIGILVVAPELKMPALTKFVDGTGPVWSGGLFPFLFITIACGAVSGFHALISSGTTPKLIDNETNARFIGYGAMLMESFVAIMALVAASVIEPGIYFAMNAPAAVLGSTPEAVANTVTQWGFVLTPDMLTQTAKAVGETTIIARAGGAPTLAVGMAHILHQVIGGEAMMAFWYHFAILFEALFILTAVDAGTRAGRFMLQDLLGTFHPALKRTESLPANLVATALCVAAWGYFLYQGVVDPLGGINTLWPLFGISNQMLAAIALVLGTVVLFKMKRERYAWVTIVPTVWLLICTLTAGWQKIFDANPKVSFLAHAAKLQAAVDEGKVLAPAKSIAQMKRIIFNDYIDAALAGLFIFVVVAIAVYGVIAVLRARRESKPTVRETPYEAMPAAQALGSGR

SEQ ID NO: 36632 - DNA, 2091 bp, Bacillus cereus G9241
  CDS (1)..(2091): transl_table=11
ttggggggattgtatgtgagaacattgaagtcgattttactttggggagttattgcagcagtaggagcaggtgcctttggtgtgatagctttatcacaaggtgaaactattaatgccgtatggctcttagtagctgcggtatgtgtgtatgcagttgcttatcgcttttatagtagatttatagcgagaaaggtattcggtttagataataatcggcaaacgccagcccatacattaaatgatggaaaagattatgttccgacaaataaatgggtattatttgggcatcattttgcagcaattgctggggctggacctttagtaggaccgattttggcggcacaaatgggatatttaccagggacaatatggattattgttggggtagttgtcgctggagctgtgcaagattttgtcattttatttgcttcgatgagacgtaatggtaaatctctcggtgaaatgattaaagatgagattggtcctgttacaggacttattgcaatgatcggtattttaggcataatgattattttattagcagtattagcattagtagtagtaaaggcgcttgtcggaagcccttggggaatgtttacgatagccgcaacgattcctattgctattttgatgggagtatatatgcgctacattagacctggacgggttggtgagggatcagtaatcggaattattctacttatactatctcttattggagggcagtatgtagcggaaaatccagcgcttgcaagcatgttcacgtttagcggagaaacaattgctattatgcttattgtatatggatttatcgcatcggcattaccagtttggatgcttttagcaccacgtgattatttaagtacatttttaaaagtcggaacaattgtaggattagcaatcggtattttaattgtagcaccagatttacaaatgccagcagtttcgaaatttattgatggaactggtcctgtgttctctggaaacttattcccgttcttatttattactattgcttgtggtgcagtgtctggattccatgctctcgtttcatcaggtacgacgccgaagatgattgagcaagagggacacgcacagccaatcggttatggagcaatgttaatggagtcgtttgtagcggcgatggcgatgattgcagcttgtgtattaacaccgggaacgtattttgcaattaatagtcccgcagcacttatcggtacagatgtctcgcaggcagctcaagttatttcctcatggggatttgctattacaccaaatgaattaaaagatctcgctgtaaacgttggagagcaaacgattttatcacgtacaggtggtgcaccaacgttagcgataggtatggcatatattttctcacaagtaataggtggaacggccatgatggcattttggtatcattttgcgattctctttgaagcgttattcattttaacaacgattgatgctggaacgcgcgtaggtcgatttatgattcaagatattttagggcatgtatataagccatttgggaaaacggattctacattagcgaatgtaatagctacaacgttatgcgtgttaggatggggctatttcttatatcaaggggtagttgatccacttggtggaattaatacattatggccacttttcggtattgcaaatcaaatgttagcaggtattgcgttattacttggaacgacaattttgttcaaaatgggaaaaaaggcatatgtttgggtgacgcttattccaactgtcggattgcttattgtaacgatgacggcgggttatcaaaagttatttcatgaaaaccctaaaataggatttctatcccacgcaaaggtgtttcaaggcgcattagatgaggggaaagtgttagcgccagctaaaaatgtcgctcaaatgaagcaaattattttcaatgattatattgatgcggcactttgtggaatttttatgatagttgtaatcgctgtattaatttctgcaattcgaatttggattcaagtattaagaaataagccgatgccgctaaaagaggcaccatatatccctagagatgaaagtgagtcgaggaactatgcttaa

SEQ ID NO: 36633 - protein, 696 aa, Bacillus cereus G9241
MGGLYVRTLKSILLWGVIAAVGAGAFGVIALSQGETINAVWLLVAAVCVYAVAYRFYSRFIARKVFGLDNNRQTPAHTLNDGKDYVPTNKWVLFGHHFAAIAGAGPLVGPILAAQMGYLPGTIWIIVGVVVAGAVQDFVILFASMRRNGKSLGEMIKDEIGPVTGLIAMIGILGIMIILLAVLALVVVKALVGSPWGMFTIAATIPIAILMGVYMRYIRPGRVGEGSVIGIILLILSLIGGQYVAENPALASMFTFSGETIAIMLIVYGFIASALPVWMLLAPRDYLSTFLKVGTIVGLAIGILIVAPDLQMPAVSKFIDGTGPVFSGNLFPFLFITIACGAVSGFHALVSSGTTPKMIEQEGHAQPIGYGAMLMESFVAAMAMIAACVLTPGTYFAINSPAALIGTDVSQAAQVISSWGFAITPNELKDLAVNVGEQTILSRTGGAPTLAIGMAYIFSQVIGGTAMMAFWYHFAILFEALFILTTIDAGTRVGRFMIQDILGHVYKPFGKTDSTLANVIATTLCVLGWGYFLYQGVVDPLGGINTLWPLFGIANQMLAGIALLLGTTILFKMGKKAYVWVTLIPTVGLLIVTMTAGYQKLFHENPKIGFLSHAKVFQGALDEGKVLAPAKNVAQMKQIIFNDYIDAALCGIFMIVVIAVLISAIRIWIQVLRNKPMPLKEAPYIPRDESESRNYA

SEQ ID NO: 36634 - DNA, 2067 bp, Rubrivivax gelatinosus PM1
  CDS (1)..(2067)
atgacccatctacgcaagcaccttccctgggtgctcgtcgccatcgtcggcgcgttcgcgctggcgaccatcgcgctgcagcgcggtgaagccatcagcgccctgtgggtggtggtggccgccctgtgcgtctacctcatcgcctaccgctactacagcctgttcctggcgaccaaggtgctgggtctcgatccgaaccggcagacgccggcacaccgccacaacgatggcctggactacgtgccgaccaacaagtacgtgctctacggccaccacttcgccgcgatcgcgggcgccggtccgctggtcggcccggtactggccgcacagatgggctacctgccgggcatgctgtggctgctggccggcgtggtgttcgccggcgcggtgcaggacttcatcgtgctgttcatctccacgcggcgcgacggccgttcgctcggcgagctggtgaagcaggagatgggcacggtgccgggcgtcatcacgctgttcggcgccttcatgatcatgatcatcatcctggcggtgctggcgctgatcgtcgtcaaggcgctggcgcactcgccgtggggtgcggtcaccgtgggcctgacgatcccggtcgcgctgttcatgggcatctacagccgctacctgcggccagggcgcatcggcgaggtctcggcgatcggcttcgtgctgctgatggcggccatctggctgggcggctgggtgcacgagcatgcggccctgtccgcgctgttcgacttcgacggcaaggctctcacctggatgctgatcggctacggcttcatcgcctcggtcttgccggtgtggctgctgctggcgccgcgcgactacctgtcgaccttcctgaagatcggcaccatcatcgcgctggcgatcggcatcctgatcgtcgcaccgacgctgcagatgccggcactgacccagttcgcgcagggcaacggcccggtgtggtcgggcaacctgttccccttcctgttcatcaccatcgcctgcggcgcggtgtcgggcttccatgcgctgatctcgtcgggcaccacgcccaagatgctggagaacgagacgcacgcgcgcttcatcggctacggcggcatgctggccgagtccttcgtcgcgatcatggcgctggtggcggcctcggtgatccagccgggcatctacttcgcgatgaacagcccggccgcgctgatcggcacgacgccggaggcggtggcgcagaccctgtcgacctggggcttcgtgatcacgcccgacgtgctgatccagaccgccaaggacgtgggcgagaacaccatcctcgcacgcgccggcggcgcaccgacgctggccgtgggcatggcgcacatcctgcaccaggtggtcggcgggcccgcgatgatggccttctggtaccacttcgcgatcctgttcgaggcgctgttcatcctgaccgcggtcgacgccggcacgcgcgccgggcgcttcatgctgcaggacctgctgggcaacttcatcccggcgatgaagcgcaccgactcgctgcccgccaacctgatcgccaccggcctgtgcgtggcgacctggggctacttcctgtacgccggcgtggtggatccgctgggcggcatcaacacgctgtggccgctgttcggcatctccaaccagatgctggccgccgtggcgctgacgctgggcaccgtggtgctgttcaagatgaagcgccagcgctacgcctgggtcaccatcgtgccggcggcgtggctgctgatctgcacgctgaccgccggctggctgaagctgttctcgccggatccgaaggtcggcttcctggcccacgcgcagaagttcggcgacgcgctggcgcaggggacggtgctggcgccggccaagtcgctcgacgcgatgcgccacatcgtggtcaacgactacatcaacgccagcttgtgcgtgctgttcatgctggtcgtcgtgagcacggtgttctatgcggtcaagtcgatcttgaaggcgctgggcaaccagtcgccgaccgtgcgcgaaacgccgttcgaaccgatgccgcaaggcgccggcggctga

SEQ ID NO: 36635 - protein, 688 aa, Rubrivivax gelatinosus PM1
MTHLRKHLPWVLVAIVGAFALATIALQRGEAISALWVVVAALCVYLIAYRYYSLFLATKVLGLDPNRQTPAHRHNDGLDYVPTNKYVLYGHHFAAIAGAGPLVGPVLAAQMGYLPGMLWLLAGVVFAGAVQDFIVLFISTRRDGRSLGELVKQEMGTVPGVITLFGAFMIMIIILAVLALIVVKALAHSPWGAVTVGLTIPVALFMGIYSRYLRPGRIGEVSAIGFVLLMAAIWLGGWVHEHAALSALFDFDGKALTWMLIGYGFIASVLPVWLLLAPRDYLSTFLKIGTIIALAIGILIVAPTLQMPALTQFAQGNGPVWSGNLFPFLFITIACGAVSGFHALISSGTTPKMLENETHARFIGYGGMLAESFVAIMALVAASVIQPGIYFAMNSPAALIGTTPEAVAQTLSTWGFVITPDVLIQTAKDVGENTILARAGGAPTLAVGMAHILHQVVGGPAMMAFWYHFAILFEALFILTAVDAGTRAGRFMLQDLLGNFIPAMKRTDSLPANLIATGLCVATWGYFLYAGVVDPLGGINTLWPLFGISNQMLAAVALTLGTVVLFKMKRQRYAWVTIVPAAWLLICTLTAGWLKLFSPDPKVGFLAHAQKFGDALAQGTVLAPAKSLDAMRHIVVNDYINASLCVLFMLVVVSTVFYAVKSILKALGNQSPTVRETPFEPMPQGAGG

SEQ ID NO: 36636 - DNA, 1989 bp, Pseudomonas fluorescens PfO-1
  CDS (1)..(1989)
atggcattgcgccgaggcgaggcgatcaacgccttgtggattgtggtcgccgccgtggccatctatctggttgcgtaccgttactacagtctgttcatcgctaacaatgtgatgcaactcgatccgcgtcgggccacccccgccgtgctcaacaacgacggtctggactacgttccaaccaacaaacacattctcttcggtcaccacttcgcggccatcgccggcgcgggacctctggttggcccggtactggcggcgcagatgggctatctgcccggtacgctgtggctgatcgccggcgtggtgctggcgggtgcggtgcaggacttcatggtcctgttcatgtcgacccgtcgcaacggccgttcgctgggtgacatggtgcgtgaagaaatgggccgtatccccggcaccatcgccctgttcggctgcttcctgatcatgatcatcatcctcgcggtgctggcgctgatcgtggtgaaagccctggctgagagcccgtggggcatcttcaccgtgatggcgaccatcccgatcgcgatgttcatgggcatctacatgcgctacatccgtccgggccgcatcggcgagatctcggtagtcggcgtgttgctgctgctgggttcgatctggctgggtgggcagattgccgccgatccggtctgggccaaggccttcaccttcactggcgtgcagattacctggatgctggtcggttacggtttcgtcgccgcttcgctgccggtgtggctgattctggcgccgcgtgactatctctccacgttcctcaagatcggtaccatcgtcgccttggcgatcggcatcctggtgaccatgcccgagctgaaaatgccggcactgacccagttcgtcgacggcaccggcccggtgtggaagggcggtctgttcccgttcctgttcatcaccatcgcttgcggtgcggtatccggtttccacgcgctgatctcttccgggaccacgccgaagctgctggataacgaaaccaacgcccgttacatcggttacggcggcatgctgatggaatcgttcgtggccatcatggccatggtcgctgcctcggtgatcgagccaggcgtgtacttcgccatgaacagcccggccgccgtggtcggcggtgatgtggtgtccgtggcaaccgcagtcagtaactggggctttgcaattaccccggaagccctgcaagccgtggcgcatgacatcggcgaaaccaccattctggctcgtgccggtggtgcaccgaccctggcggtcggtatcgcgcagatcctgcacagtgtcctgccgggtgaaaacaccatggcgttctggtaccacttcgcgatcctgttcgaagcgctgttcattctgaccgcagtcgatgccggtacacgtgccggtcgcttcatgctgcaggacttgctcggctccttcgtgccggcactcaaacgtactgaatcctggtccgccaacctgatcgccaccgccggttgtgtggcgatgtggggctggttgctgtatcagggcgtggtcgatccactgggcgggatcaacaccctgtggccgctgttcggtatctccaaccagatgctcgccggtatcgcgctgatgctcggtaccgtggtcctgatcaagatgaagcgccagcgttacatctgggtcaccctgctgccggccacctggctgctgatctgcaccacgactgcaggcttcatcaagctgttcgacgccaacccggcgatcggcttcctgtcgctggccaagaagtacagcgatgcactggccaacggtcaggtgctggcgccggcgaaaagcgtcgagcagatgcagcacgtgatcttcaacgcctacaccaacgctacattgaccgcgctgttcctgttcgtggtattcagcatcctgttctatgcgctcaaggtcggcatcgccgcctggggcaaaaaagagcgtacggacaaagaatcgccattccaggccctgccggacgcgtaa

SEQ ID NO: 36637 - protein, 662 aa, Pseudomonas fluorescens PfO-1
MALRRGEAINALWIVVAAVAIYLVAYRYYSLFIANNVMQLDPRRATPAVLNNDGLDYVPTNKHILFGHHFAAIAGAGPLVGPVLAAQMGYLPGTLWLIAGVVLAGAVQDFMVLFMSTRRNGRSLGDMVREEMGRIPGTIALFGCFLIMIIILAVLALIVVKALAESPWGIFTVMATIPIAMFMGIYMRYIRPGRIGEISVVGVLLLLGSIWLGGQIAADPVWAKAFTFTGVQITWMLVGYGFVAASLPVWLILAPRDYLSTFLKIGTIVALAIGILVTMPELKMPALTQFVDGTGPVWKGGLFPFLFITIACGAVSGFHALISSGTTPKLLDNETNARYIGYGGMLMESFVAIMAMVAASVIEPGVYFAMNSPAAVVGGDVVSVATAVSNWGFAITPEALQAVAHDIGETTILARAGGAPTLAVGIAQILHSVLPGENTMAFWYHFAILFEALFILTAVDAGTRAGRFMLQDLLGSFVPALKRTESWSANLIATAGCVAMWGWLLYQGVVDPLGGINTLWPLFGISNQMLAGIALMLGTVVLIKMKRQRYIWVTLLPATWLLICTTTAGFIKLFDANPAIGFLSLAKKYSDALANGQVLAPAKSVEQMQHVIFNAYTNATLTALFLFVVFSILFYALKVGIAAWGKKERTDKESPFQALPDA

SEQ ID NO: 36638 - DNA, 2046 bp, Rhodospirillum rubrum
  CDS (1)..(2046)
atgctgggctggctggcaaccgctgttctgggagcgatcgccctcggcgtcgttgctttgcagcggggggaaagcatcaacgccatttggctggtgatcgccgccgtctgtacctacttcatcgcctatcgcttctacggactgttcatcgccaagcgtgttttgggcgttgacgccaatcgtcagacgcccgccgtccgccgcaacgacggcctggattacgtgccgacgaaccgctacgtgttgtttggccaccatttcgccgccattgccggcgccggtccgctggttggtccggtgcttgccgcgcagatgggctatatgcccggaaccttgtggatcctggccggcgtggtcttcgccggcgccgtccaggactcgatggtgctgttctgctcgacccggcgcgacggtcggtcgctgggcgacatgatccgtaccgaaatgggtccggtggccggcgccatcggtctggtcggcgtgctgctgatcatgatcatcatcctggccattctggctttggtggtggtcaaggctttggcgggcagcccttggggtaccttcacggtcttctcaactattcccatcgccctgatcatgggcgtctattcgcgcttcatccggcccggccgcatcgccgagatgagcgggatcggcttcgtgctgctgatgctggctttggtctatggccagtcggtggccgaaagcccgaccctggccccgttgttcacctatacgggcaccgaactggcgctgatcatcatcggctatggcttcgtcgcctcggtcttgccggtctggctgctgctggcgccgcgtgactatctgtcgaccttcctcaagatcggcgtcatcgtcggcttggccatcggcatcgtcatcgtcatgcccgacatgaagatgccggcggtgaccaaattcatcgatggcaccggcccggtgttcagcggcgcgctgttcccgttcctgttcatcaccatcgcctgcggcgccgtttccggcttccacgccctgatctcctcgggcaccacgcccaagatgatcgagaacgagaatcaggtcgccttcatcggctatggcggcatgttgatggaaagcttcgtggcgatcatggccatggtcgccgcctgcgtcatcgatcccggcgtctatttcgccatgaacagcccggcggcgctgatcggcaccgatgcggtcaacgccgcggcggtgatctcgtcgtggggcttcgccgtgacccccgacatcctcacccagaccgccgccgacgtcggcgaatcctcgatcctgtcgcgggccggcggcgcgccgaccctggccgtgggcatggcccatatcttctcggcggtcatcggcggcaaggcgatgatgggcttttggtaccacttcgccatcttgttcgaggccctgttcatcctgaccgccgtcgacgccggcacgcgggcctgccgcttcatggttcaagacatgatcggcagcgtcgttcccgccttcaaggccacccggtcgtggggcaataatctgctcgccacgggcatctcggtgtcgctgtggggctatatcctctatacgggcgttaccgatccctttggcggcatcaacagcctgtggccgttgtttggcatctccaaccagatgctggcgggcatggcgctgatcatgatcaccgtcattttgttcaagatgaagcgtcagcgtcacgcctgggtctcgatcatcccggccacctggctgctcatctgcaccacctatgccgggctgctcaaggtgttctcgcccgatccgaagatcggcttctgggcccaggcccagcgcttttcgacggccctggacgagggcaagatccttggccccgccaagacggtggaccatatgcgtcaggtgatgttcaataactatctcgacgccgccctggccttcgccttcgtccttgtcgtggcggcgaccctggtctacgcggtgatcgccatccgcaaggcgcaggcgacgagccggccgacggccctggaggttggcggcccaacggaggttagaacgcatgcttga

SEQ ID NO: 36639 - protein, 681 aa, Rhodospirillum rubrum
MLGWLATAVLGAIALGVVALQRGESINAIWLVIAAVCTYFIAYRFYGLFIAKRVLGVDANRQTPAVRRNDGLDYVPTNRYVLFGHHFAAIAGAGPLVGPVLAAQMGYMPGTLWILAGVVFAGAVQDSMVLFCSTRRDGRSLGDMIRTEMGPVAGAIGLVGVLLIMIIILAILALVVVKALAGSPWGTFTVFSTIPIALIMGVYSRFIRPGRIAEMSGIGFVLLMLALVYGQSVAESPTLAPLFTYTGTELALIIIGYGFVASVLPVWLLLAPRDYLSTFLKIGVIVGLAIGIVIVMPDMKMPAVTKFIDGTGPVFSGALFPFLFITIACGAVSGFHALISSGTTPKMIENENQVAFIGYGGMLMESFVAIMAMVAACVIDPGVYFAMNSPAALIGTDAVNAAAVISSWGFAVTPDILTQTAADVGESSILSRAGGAPTLAVGMAHIFSAVIGGKAMMGFWYHFAILFEALFILTAVDAGTRACRFMVQDMIGSVVPAFKATRSWGNNLLATGISVSLWGYILYTGVTDPFGGINSLWPLFGISNQMLAGMALIMITVILFKMKRQRHAWVSIIPATWLLICTTYAGLLKVFSPDPKIGFWAQAQRFSTALDEGKILGPAKTVDHMRQVMFNNYLDAALAFAFVLVVAATLVYAVIAIRKAQATSRPTALEVGGPTEVRTHA

SEQ ID NO: 36640 - DNA, 1812 bp, Rhodospirillum rubrum
  CDS (1)..(1812)
atggacaacgccctaacgttcgtgatctcgacactgtgtatcctcgcgctttgttaccgcttctatggcgtgttctttgtgcggaaggtactgcgtgccgatgattcagtcgtaaccccctcgcatacgttcgaggacggcaagaattacgtacccacgaaaaagtgggtcaacgccggtcagcatttcgccgccatcgccgccgccggtccgctggtcggtccggttctggccgcccagttcggctaccttcccggtttcctgtggttgctcgtcggctgcgtcgtcggcggcgccgttcacgacacggtcgtgctcttcgcctcgatgaagcacaacggcaagtcgctctccaatgtcgccaaggccgaattgggcccggtggcggggtggtgcaccggtctggcgatgctgttcatcatcaccatcaccatggccggcctgtcgatggtggtcgttcacgcgctggaacggaacccctggggaaccttcgccgtgttcatgaccattcccatcgccatcgccgtgggtctgtacgaacgcttcaccggcaaccacaagggcgccacctgggttggcatcatcgccatcatggtcgcggttctggccggtccctatatccagggcacgctgcttggcgattggctgacgctgcgcgtcgactccgtcgccctcgccctgccgatctacgccttcttcgccagcgccctgccggtgtggctgctgctgacgccgcgcggctatctgtcgagcttcatgaagatcggcgtcttcggcgccctggtcgtcggcgtcgtcatcatcaacccgaccatccagttccccgccctgaccgatttcatccacggcggtggtccggtcctggccggcccggtgtggcccttcatctcgatcaccatcgcctgcggcgccatctcggggttccacgccttcatcggctcgggcaccacgcccaagctggtcgataagtggagcgacatccgccccgtcgcctttggcgccatgctcgccgaatgcatggtcgccgtgctggccctggtcgccgccaccgccctgcaccccgccgattacttcgccatcaacgccagccccgccgccttcgccagcctgggcatggaggtcgtcgacctgccgcacctcagccaggagatcggcatggatctggccggccgcaccggcggcgccgtcaccctggccgtcggcatgaccttcatcttcaccaagctgccctggttcgccacgctgtcgtcctacttcttccagttcgtcatcatgttcgaggcggtgttcatcctgaccgccgtcgactcgggtacccgggtcgcccgctacctgatccaggacctgggtggcgatctttacgccccgctcaagcgcctggactggatccccggttcgatcggcgccagcgtcgccgcctgcgcgctgtggggctacctgctgacctcgggcgatatcaactcggtctgggcgctgtttggagtgtcgaaccagctgatggcctcgatcggcctgatcatcggcgccacgatcatcctgcgggtcgccgccaagcgcatctacatgctgacctgcctgatcccgctggcctacctgttcgtcacggtgaattacgccggctactggatgatcgccaacgtttatctgaacacccaggcccgcggctacaacccgatcaacgccggcatctcggccatcatgatggtgctcggcctgatcatcctgatcaccgcttttggcaaatggaaaacgatgctcgccctgcccaagagcctgcgctcgggtgaggtgccggccccgtcgctgccctga

SEQ ID NO: 36641 - protein, 603 aa, Rhodospirillum rubrum
MDNALTFVISTLCILALCYRFYGVFFVRKVLRADDSVVTPSHTFEDGKNYVPTKKWVNAGQHFAAIAAAGPLVGPVLAAQFGYLPGFLWLLVGCVVGGAVHDTVVLFASMKHNGKSLSNVAKAELGPVAGWCTGLAMLFIITITMAGLSMVVVHALERNPWGTFAVFMTIPIAIAVGLYERFTGNHKGATWVGIIAIMVAVLAGPYIQGTLLGDWLTLRVDSVALALPIYAFFASALPVWLLLTPRGYLSSFMKIGVFGALVVGVVIINPTIQFPALTDFIHGGGPVLAGPVWPFISITIACGAISGFHAFIGSGTTPKLVDKWSDIRPVAFGAMLAECMVAVLALVAATALHPADYFAINASPAAFASLGMEVVDLPHLSQEIGMDLAGRTGGAVTLAVGMTFIFTKLPWFATLSSYFFQFVIMFEAVFILTAVDSGTRVARYLIQDLGGDLYAPLKRLDWIPGSIGASVAACALWGYLLTSGDINSVWALFGVSNQLMASIGLIIGATIILRVAAKRIYMLTCLIPLAYLFVTVNYAGYWMIANVYLNTQARGYNPINAGISAIMMVLGLIILITAFGKWKTMLALPKSLRSGEVPAPSLP

SEQ ID NO: 36642 - DNA, 2106 bp, Campylobacter lari RM2100
  CDS (1)..(2106): transl_table=11
atgagtgtaacaaacaaaatactttggttttttgtcgctattgttgctgctgtatgttttagtatattagcgctccaaaatggcgaaagtatttcagcaatttaccttgttattgctgctttatgtatttatatcataggatatagattttatggtagatatattgcatataaagtcttagaactagataaaaatagagcaactcctgctaccgttaaaaatgatggatgtgactttgtccctactaacaaaattgtactttttgggcatcattttgcagctattgcaggagctggtcctttagtaggtcctatactggctgctcaaatgggttatttaccttccatgctttggattttaatcggcggagtactagctggagcagtgcatgactttgttgttttgtttatctctacacgccgtaatggaaaatctttaggtgaaatgataaaagatgaacttggtaagcttactggtggatttgctatgcttgctatctttggaatcatgttaatcattatagcaattttggcaatggttgttgttaaagccttggctgagtcaccttggggattgtttaccatagccatgacaatacctattgctatttttatgggtatttatatgagatttttaagacctggtaaagtaggtgaagcttctataataggttttatacttcttatacttgctatacattatggtagtgaaatagctgctaatccttattgggctaatattttcacactaagcgctccaactctagcccttataatgatggcttatggttttatagcagcgattttaccagtttggtttttacttgctccaagagattatttatcaacttttttgaaaatcggtgttattgtaattatggctttggctattatctttgtagcacctgatttacaaatgccaaaaatcaattctcaatatttagatggaagtggtcctgtgtttgctggagctatttttccatttttatttatcactatagcatgtggagctattagtggttttcatgctttaatttcaagtggtacaactcctaaaatgcttgaaaatgaaacccatgctttagctgttggatatggctccatgcttatggaaagtgctgtggctatcatggctttaatttgtgcttgtattttacatcctggtctttattttgctattaactctcctgcagctgttatagggactgatgttgtcaatgccgctgctactatttctagctggggctttaaaataacacctgaagaaattacaactcttactaccaatataggagaacaaagtatactttcaagaactggtggagcaccaacattcgccgtaggtgtagctttaattttacacgagctttttggtggagtaaatttaatgggcttttggtatcactttgctattttatttgaggctttatttattttaactgcagttgatgcaggaacgagagcttgcagatttatggctcaagatatattaggcaatatatataaacctttaggaaatatcaataacacttttgcaggtatttttgccactgcattgagtgttgcaggttggggatattttctttatcaaggagccattgatccaaaaggtggaatttactcactttggccactttttggagtgagcaaccaaatgcttgctggcatggctttacttttagctagtgcgattttatttaaaatgggcaaggcaaaatatacttgggtaacgctggtcccagctacttttgttctagttgcaactctttatggaggatttcaaaaaatacttccatataaagaaggcgataaagtacataatgccgtaagccatgtagctgctgtacaagttaatgctcaaaaaataaaagatttaaatttaaaattagagcaaacaactgatcaaatacaaattgaacaaattaaaaaagatttaaaactagcctcacaagctaaaacatctaatcttgtcaatgcaatactttgtgtgtttttcatgattaccactttgcttgttatactttcttgctttggaatttttatcaaaaaattaaacattcctttaaaagaaagcccttatatagcattaaaaaaggaaaaagcatga

SEQ ID NO: 36643 - protein, 701 aa, Campylobacter lari RM2100
MSVTNKILWFFVAIVAAVCFSILALQNGESISAIYLVIAALCIYIIGYRFYGRYIAYKVLELDKNRATPATVKNDGCDFVPTNKIVLFGHHFAAIAGAGPLVGPILAAQMGYLPSMLWILIGGVLAGAVHDFVVLFISTRRNGKSLGEMIKDELGKLTGGFAMLAIFGIMLIIIAILAMVVVKALAESPWGLFTIAMTIPIAIFMGIYMRFLRPGKVGEASIIGFILLILAIHYGSEIAANPYWANIFTLSAPTLALIMMAYGFIAAILPVWFLLAPRDYLSTFLKIGVIVIMALAIIFVAPDLQMPKINSQYLDGSGPVFAGAIFPFLFITIACGAISGFHALISSGTTPKMLENETHALAVGYGSMLMESAVAIMALICACILHPGLYFAINSPAAVIGTDVVNAAATISSWGFKITPEEITTLTTNIGEQSILSRTGGAPTFAVGVALILHELFGGVNLMGFWYHFAILFEALFILTAVDAGTRACRFMAQDILGNIYKPLGNINNTFAGIFATALSVAGWGYFLYQGAIDPKGGIYSLWPLFGVSNQMLAGMALLLASAILFKMGKAKYTWVTLVPATFVLVATLYGGFQKILPYKEGDKVHNAVSHVAAVQVNAQKIKDLNLKLEQTTDQIQIEQIKKDLKLASQAKTSNLVNAILCVFFMITTLLVILSCFGIFIKKLNIPLKESPYIALKKEKA

SEQ ID NO: 36644 - DNA, 2112 bp, Campylobacter upsaliensis RM3195
  CDS (1)..(2112): transl_table=11
atgaattctcttactacaaaaattttatggctttttgtggcagctttgggtgctgtttgttttggctacttagccttgcaaaatggagaaagtgtttcagcgatttatttggtcgttgcggcggtgtgtatctatatgataggatatagattttatgggcgttttgtggcttatagggttttagagcttgataaaacgcgtgccactccagcccttacacaaaatgacggacgcgattttgtccctacaaataaagtcgttctttttggacaccattttgcagcgattgctggagcgggtcctttggtaggtcctattttggcggctcaaatgggctacttgccttctatgctttggattttagtcggtggtgttttagcgggtgctgtgcatgattttgtcgtgctttttatctctacaaggcgtaatggtcgctctttaggggagatgataaaagatgagatgggaaatttcacaggcggcgtagctatggtggcgatttttggcattatgcttattattattgctattttggctatggttgtcgttaaggctttagcggagtctccttggggtttatttactattgcgatgacgattcctattgcgatttttatgggaatttatatgagatttttgcgtcctggtagagtaggagaggcttctattataggttttgtgcttttgattttatccattcattatggtagcgttgtaactgctgatgcgtattggaaagaatttttcacccttgacgcaccgactttggctattgtgatgatgatttatggttttgtagcggctgttttacctgtgtggtttttgttagcacctagggattatctttcgacttttttaaaaatcggcgttatagttttgatggctgtggctattgtgatagtcgctccggatttacaaatgcctaaggcaaatacgcagtattttgacggaactggtcctgtttttgcgggagctattttccctttcttgtttattaccatagcttgtggggcgattagtggttttcacgctttaatttcaagtggaacaacccctaaaatgcttgaaaatgaaacacacgctttagcggtgggttatggttctatgcttatggaaagtgccgtggctattatggctttgatttgtgcttgtattttgcatccgggaatttattttactgttaattcttcaagtgctttaataggcacggatttagctggtgttgcggcgactatttctagctggggctttagcgttagctctgaagagattatgagtcttacaaaaagcataggcgaagagaccatactttcaagaacgggtggtgcgccgacttttgctatcggtgtggctttgattttgcatgagttatttagcggtgtggatttaatggcgttttggtatcactttgccattttatttgaagctttatttattttaacggcagttgatgctggcactagggcgtgtcgttttatggtgcaagatattttgggtaatgtttataagcctttaggaaatatacacagcattcctgcgggaatttttgcgactgctttgagtgtggctggctggggttattttctttatcaaggggcgattgatcctaagggtggaatttatacgctttggcctttatttggtgtgagcaatcaaatgcttgcaggtatggctttgcttcttgctacaactatacttgtaaaaatgggcaaggcaagatatacttgggtaacctttgtgccagcgacctttgttttaatcgccacactttatggtggtattcaaaaaatcctaccttatgaagagggtaatagggtgcgtaatgccataagccatgttgccacagcaaaaattcaaagtgataaaatcactactttagaagctaagttagccactatcactgatgaggcggaaaaagcgaaaattcaaaaagatatttctgtcgccactcaggcgaaatttgcaaatattttaaatgctatattgtgcgtgttctttatgataacaaccctacttgtcattatctcttgtgtgggaatttgctttggtaggataagaattccactcaaagaaagcccttatataaagcttgatagcaaacaaattgtttaa

SEQ ID NO: 36645 - protein, 703 aa, Campylobacter upsaliensis RM3195
MNSLTTKILWLFVAALGAVCFGYLALQNGESVSAIYLVVAAVCIYMIGYRFYGRFVAYRVLELDKTRATPALTQNDGRDFVPTNKVVLFGHHFAAIAGAGPLVGPILAAQMGYLPSMLWILVGGVLAGAVHDFVVLFISTRRNGRSLGEMIKDEMGNFTGGVAMVAIFGIMLIIIAILAMVVVKALAESPWGLFTIAMTIPIAIFMGIYMRFLRPGRVGEASIIGFVLLILSIHYGSVVTADAYWKEFFTLDAPTLAIVMMIYGFVAAVLPVWFLLAPRDYLSTFLKIGVIVLMAVAIVIVAPDLQMPKANTQYFDGTGPVFAGAIFPFLFITIACGAISGFHALISSGTTPKMLENETHALAVGYGSMLMESAVAIMALICACILHPGIYFTVNSSSALIGTDLAGVAATISSWGFSVSSEEIMSLTKSIGEETILSRTGGAPTFAIGVALILHELFSGVDLMAFWYHFAILFEALFILTAVDAGTRACRFMVQDILGNVYKPLGNIHSIPAGIFATALSVAGWGYFLYQGAIDPKGGIYTLWPLFGVSNQMLAGMALLLATTILVKMGKARYTWVTFVPATFVLIATLYGGIQKILPYEEGNRVRNAISHVATAKIQSDKITTLEAKLATITDEAEKAKIQKDISVATQAKFANILNAILCVFFMITTLLVIISCVGICFGRIRIPLKESPYIKLDSKQIV

SEQ ID NO: 36646 - DNA, 2112 bp, Campylobacter coli RM2228
  CDS (1)..(2112): transl_table=11
atggctcgttttggaactaaaattttatggttgtttgtcgcagctttaggtgctatttgttttgctcatttagctttacaaaatggcgagagtgtatcagcaatttatctagtagttgctgctgtgtgtatctatatgataggatatagattttatggacgctttgtagcgtataaggttttagaacttgacaaaaatcgtgctacacctgcagttttagaaaatgatggacgcgattttgttcctacaaatagaacagttttgtttggacatcattttgctgctattgcaggtgctggtcctttagtgggtcctattttggctgctcagatgggatatttaccttctatgctttggattttagtgggaggtgttttagcaggtgcggttcatgactttgttgtgctttttatatccactcgtagaagaggtagaagtttaggcgaaattatcaaagatgaaatgggtaaatttaccggtggtgttgcaatggtagcaatttttggtatcatgcttattatcatcgctattttagctatggtagttgtaaaagctctcgcagagtcaccttggggattatttaccattgcaatgactattcctatagcaatttttatgggagtatatatgcgctttattcgtccaggtagagtaggtgaggcttcagttataggttttatacttttgattctagcgattcattatggtagtgttatagctgctgatccttattgggcgaaaatattcacattagaagctccaactttggcaattattatgatggcttatggctttatcgcagctgttttacctgtatggtttttattggctccaagagattatctttctactttcttaaagattggtgttattgttgtaatggctgtagctattattatcgttgcacctgatttgcaaatgccaaaaaccaatgctcagtattttgatggaacaggtcctgtatttgcgggtgctatttttccatttttgtttataaccattgcttgtggtgctattagtggttttcatgctcttatttcaagtggaactactccaaaaatgcttgaaaatgaaactcatgctttgcctgttggatatggctctatgcttgcagaaagtgctgtagcaattatggctttaatttgtgcttgtattttacatcctggactttattttgctataaattcaagttctgctttaataggatctgatgttgcaagtgcggcgcaagctatttcaagttggggatttagtatcactcctgaagaaatttctactttaactgcaaatataggagaatacactatactttctagaacaggtggggctccaacttttgctataggcgtagctttaattttacatgagctttttggtggtattgatctaatggctttttggtatcattttgctatattgtttgaagctttatttatcttaacagctgtggatgctggaactagagcttgccgttttatggtgcaagatatcttaggtaatgtctataaacctttgggaaatattcataattatccagctggacttttagcaactgcattgagtgttgcaggatggggatattttctttatcaaggtgcgattgatcctaaaggcggtatttataccctttggcctctctttggtgtaagcaatcaaatgcttgcaggtatggctttacttcttgctacagccatacttgtaaaaatgggcaaggcaaaatacacttgggtaactttaattcctgctacatttgttttggtagcaaccctatatggaggaatacaaaaagttatgccttacgaagaaggaaataaagtaggaaatgctgtaagccatgtggcagcagttactatacaaagtcaaaaaattcaagatttagaattgaaattaaacaatgccaaagatgaaaatgaaattgcagcaattgaaaaagaaatttctgtagctactcaaagtaagatcggaaatttaatcaatgccattctttgtgtgtttttcatgttggccacattgcttgtcatactctcttgcataggaatttgcctaggtaagattaaaattccactaaaagaaaccaaatatattaaacttgatgaatttcaaaaagtttaa

SEQ ID NO: 36647 - protein, 703 aa, Campylobacter coli RM2228
MARFGTKILWLFVAALGAICFAHLALQNGESVSAIYLVVAAVCIYMIGYRFYGRFVAYKVLELDKNRATPAVLENDGRDFVPTNRTVLFGHHFAAIAGAGPLVGPILAAQMGYLPSMLWILVGGVLAGAVHDFVVLFISTRRRGRSLGEIIKDEMGKFTGGVAMVAIFGIMLIIIAILAMVVVKALAESPWGLFTIAMTIPIAIFMGVYMRFIRPGRVGEASVIGFILLILAIHYGSVIAADPYWAKIFTLEAPTLAIIMMAYGFIAAVLPVWFLLAPRDYLSTFLKIGVIVVMAVAIIIVAPDLQMPKTNAQYFDGTGPVFAGAIFPFLFITIACGAISGFHALISSGTTPKMLENETHALPVGYGSMLAESAVAIMALICACILHPGLYFAINSSSALIGSDVASAAQAISSWGFSITPEEISTLTANIGEYTILSRTGGAPTFAIGVALILHELFGGIDLMAFWYHFAILFEALFILTAVDAGTRACRFMVQDILGNVYKPLGNIHNYPAGLLATALSVAGWGYFLYQGAIDPKGGIYTLWPLFGVSNQMLAGMALLLATAILVKMGKAKYTWVTLIPATFVLVATLYGGIQKVMPYEEGNKVGNAVSHVAAVTIQSQKIQDLELKLNNAKDENEIAAIEKEISVATQSKIGNLINAILCVFFMLATLLVILSCIGICLGKIKIPLKETKYIKLDEFQKV

SEQ ID NO: 36648 - DNA, 1728 bp, Brevibacterium linens BL2
  CDS (1)..(1728)
atgagtcccgtcctcctgatggtgatcggtctcgcgatcctggcactcggataccttgtgtattccaagtacctcgcgaaacgcgtctatcgcctgaatgacgatttccgcacaccctcccacgaacttaccgacggggtcgactacgtccccacgaacaaattcatcctctggggccaccacttcacttcggttgcaggcgccgcgcccatcgtcgggccagccgtcgcgctgatctggggctgggtgcctgcgttcctctgggtcacactcggcactgtcttcttcgccggtatgcacgacttcggcgcgctatgggcctcagttcgcaacaagggccagtcaatcggtgcgctgtccggccgctatatcggcaaacgcggcgctggtctgttcctgattgtaatcttcatcctgcttctgatggtgatcgcagcattcgctgttgtcatcacgggactcctcatctccactccgaccgcggtcattccgacgtggggcgcgatcggcgttgctctgctcgtcggcgtggccgtataccgtctgcgtatgccgttggtggcggtgaccatcgtcggcgtcgtcgcgctctacggactcatcgtcctcggcgatgctgtacccgtggtcctgccggagaccttcctcggcatgacgccgactgtattctggatcctgacgctgttcatctacggagcgttcgcttctctgctgccggtgtgggtgctgctgcagccgcgcgattacatcaatggcgtgcagctgttcatcggactcatcctcctctacggggctgtggtcatcggcatgttcgtcgccgacggtgcccacgacatcgtgaccccggccatcaacatgaatgtcccggagggcacccccagcatcgtgccgctgctcttcgtcacaatcgcctgtggcgctatctcaggtttccacggcatggtctcctcaggaaccagctccaaacagctggacaaggagacggactcccgcttcgtcggttatttcggcgcagtcggtgagggcctcctggctctgggaacaatcatcgcgatctccgccggacttcgcaccgtggctgagtgggaagagctttacagcaagttcggtgaagccggtgtgcagtcgttcgtccagggcggcggcatgctcatggaatccggtctgggcctgcctgcgtcattgagcaccacggtgctcgccacgatggcagtgctgttcgccgcaacctcgctcgacaccggattccgtctcatgcgattcgtcgttcaagagatgggcgaacgcgtcaacctcaggatcggcaagtacacggcgacaggagtcgtcgtcgtcctcggcatgggcctcacattctcacaggggctgggaggagaaggcggtctgcgcatctggccgctcttcggtacgaccaatcagctgatggcatcgttgacgttgatgatcctcgcggtcatgctcatccgaaagcggcgcaatccgtggccggcgctcataccgttggccatcgtattcgtcatgtcgttctgggccgcgatcgaccagctcttcagcttcgcgaccccgggaagcgcggactggctgctcttcgccatcgactgcatcatcatcgtcagcagcgtgttcgtagcgatcgaaggcatcagagcgatcatccgagctcgatcggacccgccggagcccgaggacgccgacgagaagatcgaagccgtacgcgaagaggtctga

SEQ ID NO: 36649 - protein, 575 aa, Brevibacterium linens BL2
MSPVLLMVIGLAILALGYLVYSKYLAKRVYRLNDDFRTPSHELTDGVDYVPTNKFILWGHHFTSVAGAAPIVGPAVALIWGWVPAFLWVTLGTVFFAGMHDFGALWASVRNKGQSIGALSGRYIGKRGAGLFLIVIFILLLMVIAAFAVVITGLLISTPTAVIPTWGAIGVALLVGVAVYRLRMPLVAVTIVGVVALYGLIVLGDAVPVVLPETFLGMTPTVFWILTLFIYGAFASLLPVWVLLQPRDYINGVQLFIGLILLYGAVVIGMFVADGAHDIVTPAINMNVPEGTPSIVPLLFVTIACGAISGFHGMVSSGTSSKQLDKETDSRFVGYFGAVGEGLLALGTIIAISAGLRTVAEWEELYSKFGEAGVQSFVQGGGMLMESGLGLPASLSTTVLATMAVLFAATSLDTGFRLMRFVVQEMGERVNLRIGKYTATGVVVVLGMGLTFSQGLGGEGGLRIWPLFGTTNQLMASLTLMILAVMLIRKRRNPWPALIPLAIVFVMSFWAAIDQLFSFATPGSADWLLFAIDCIIIVSSVFVAIEGIRAIIRARSDPPEPEDADEKIEAVREEV

SEQ ID NO: 36650 - DNA, 2355 bp, Lactococcus lactis subsp. cremoris SK11
  misc_feature (2002)..(2002): n is a, c, g, or t
  CDS (1)..(2355)
atgaaagatattggaaactcttcaaactttaccgaagatgaagagctatttttgttacggaataaacaaggaaaaattgtcggaattaaagatttaaagcaggcaaattttcaagaaacaatgaaagactggaaaaaacatttaccaaaacccagtcttctatcaattatcatttgggtggcggtcgctttactaggtggtcttgcttggtcgttgattgctctggctcaaggagagacgattaatgcgatttggtttgttattgcagcagtttgttcttatttgattggctatcgtttttatgctttatatattcaacgtaagattatgcgtccaaatgatttacgggcaactccttcggaaagccataatgacggaaaagaattcgacccaaccaatcgagttgttttattcggtcaccattttgcttcaattgctggagctgggcctttggttggaccagttttagcggcacaaatgggttacttaccagggacaatttggattattttcggagttatttttgctggaggggtacaagatatgcttgttctctggtattctcatcgtcgtcgagcaaaatctattggggcaatggctcatgatgaagttggcagatttgctggtggcttgacttcatttattgtatttatcatgacaatgattgttcttgctgttttagctttgatttgtgtgacagcgatggcaaattctgcttgggcagtcttttcgattgggatgaccattccaattgccttattaatgggaatttatttgaaatatattcgtccagggcatgtgaatgaaatttcagcgattggttttattctccttttagttgctattttcggtggccgttgggtttcagaatcttcatttgcgcatattttcatgctttcgccaactgctttagtttggtgggtcatgggctatacttttattgcagccattatccccgcttggattttacttacgcctcgtgattacttatccatgtttatgaaaattggtacaattgctgttttagcaatagctgtagttggtgtgcgtccagatgttacaattccagctctgactaattttgcacataatacagatggtcctgcttttgctggttccctctttcccttcttatttgttacgattgcctgtggggccttgtctggtttccatgtaatgatgtcttctggaacaacgcctcatttgattgctaaagagtcacaaacgcgaatgattggttatggtgggatgctctttgaatcatttgttgctattatggctttagtcgctgcgatttctcttaatcctggaatttattattctatgaatacccctcaagctagtattcaaaaactcgcagcttcaagttatcaagcagataaaagtgctgaatataatgctgccaaagcaattccaaatgtagccatgatgcctgacggttcaaaactcagtattgactgggaaggaacgactggtgaaaaggcacttgagcaagtggcaaaagatgtaggtgaacaatcaatcgtttcacggactggtggtgcaccaactttagccgtttcaatgtcaaatattctacataaggttccacttattggtgggacaaatatgatgggattctggtatcattttgcgattatgtttgaggcgctctttatcctgtcagctgtttcagcggcaacaaaatcgactcgttatttacttaatgatgccctgcgtggcttcaaaaaattaggtcgcttaggtgatgatgattggttacctagtaaaattataacgacagcagtgattgttggagtttggggtgctttgcttttgatgggcgtttctgatccgaatggtggaataaaaatcatgtatccgctctttgggatttctaatcaattaattgcggcggtagctctggctattgtttgtgtcatggttatccgtaaaggttatcttaaatgggtttggattccagcacttcctttagtttgggatgtttgtgtaacttttgcgngccagttggcaaaaatcttttcaaatgatgtcaatattggttactttgcttcttattcagcagcaaaagcccaagtggcttctggtaaaatatctggtctagcattaacgaatacgcaagcaaccatgcgtaatacaatgattcaaggaagtctgtcagtcattttcttactttgtgtggctatattattagtcatctgtgcctttaaagttgctaaaattttaagaacaaatgaagttggtgataaatttagctcagaagaagtttttgaagaatcaaatctttttgaaacttcaagtttctggcctagtaagcttgaacataaggttttaaaaagtaaagttaatgaataa

SEQ ID NO: 36651 - protein, 784 aa, Lactococcus lactis subsp. cremoris SK11
  misc_feature (668)..(668): Xaa can be any naturally occuring amino acid
MKDIGNSSNFTEDEELFLLRNKQGKIVGIKDLKQANFQETMKDWKKHLPKPSLLSIIIWVAVALLGGLAWSLIALAQGETINAIWFVIAAVCSYLIGYRFYALYIQRKIMRPNDLRATPSESHNDGKEFDPTNRVVLFGHHFASIAGAGPLVGPVLAAQMGYLPGTIWIIFGVIFAGGVQDMLVLWYSHRRRAKSIGAMAHDEVGRFAGGLTSFIVFIMTMIVLAVLALICVTAMANSAWAVFSIGMTIPIALLMGIYLKYIRPGHVNEISAIGFILLLVAIFGGRWVSESSFAHIFMLSPTALVWWVMGYTFIAAIIPAWILLTPRDYLSMFMKIGTIAVLAIAVVGVRPDVTIPALTNFAHNTDGPAFAGSLFPFLFVTIACGALSGFHVMMSSGTTPHLIAKESQTRMIGYGGMLFESFVAIMALVAAISLNPGIYYSMNTPQASIQKLAASSYQADKSAEYNAAKAIPNVAMMPDGSKLSIDWEGTTGEKALEQVAKDVGEQSIVSRTGGAPTLAVSMSNILHKVPLIGGTNMMGFWYHFAIMFEALFILSAVSAATKSTRYLLNDALRGFKKLGRLGDDDWLPSKIITTAVIVGVWGALLLMGVSDPNGGIKIMYPLFGISNQLIAAVALAIVCVMVIRKGYLKWVWIPALPLVWDVCVTFAXQLAKIFSNDVNIGYFASYSAAKAQVASGKISGLALTNTQATMRNTMIQGSLSVIFLLCVAILLVICAFKVAKILRTNEVGDKFSSEEVFEESNLFETSSFWPSKLEHKVLKSKVNE

SEQ ID NO: 36652 - DNA, 2355 bp, Lactococcus lactis subsp. cremoris SK11
  CDS (1)..(2355)
atgaaagatgatggaaactcttcaaactttactgatgaagaagagctgtttttgttgcgcaataaagaaggaaaaattgtcggaatcaaggatttaaagcaggcaaattttcaagaaaccatgaaagactggaaagaacatctgccaaaacctagcttattatcaattattatttgggtggctgttgctttactgggtggtcttgcttggtcattaattgcgctagctcaaggggaaacgattaatgcgatttggtttgttattgcagctgtttgttcttatttaattggttatcgtttctatgctttatatattcaacgcaaaatcatgcgtcctaatgacttgcgagcaacaccgtcagaagctcataatgacggaaaagaattcaacccaaccaatcgagtggttttattcggacaccattttgcatcaatcgctggagctgggcctttggttggaccagttttagcggcacagatgggttacttaccagggacaatttggattatttttggggttatttttgctggtggggtacaagatatgcttgttctctggtattctcatcgtcgtcgtgcaaaatcaattggggcaatggctcatgatgaagtaggtagatttgctggtggcttgacatcatttattgtttttatcatgaccatgattgttcttgctgttttagcgctgatttgtgtgacggcaatggaaaattctgcttgggcagtcttttcgattggaatgacgattccaattgctttactaatggggatttatctaaaatacatccgtccaggtcatgttaatgaaatttcagcaattggttttattttacttttagtggctatttttggtggtcgttgggtttcagaatcttcatttgctcatattttcatgctttcgccaacggctttggtatggtgggtcatgggatatacttttattgcggcgattattcccgcttggattttacttacaccacgtgattacttatccatgtttatgaaaattggtacaattgctattttagcaatagcagtcgttggtgtgcgtcctgatgtcacgattccagctttgacaaatttcgcacataatacagatggtcctgcttttgctggttcactctttccatttttattcgtcacgattgcctgtggggccttgtcaggctttcacgtcatgatgtcttctgggacgacgccccatttgattgccaaagaatcgcaaacgcgcatgattggttatggcgggatgttatttgagtcatttgttgccattatggctttagtcgctgcgatttctcttaatccggggatttattattcaatgaacaccccccaagccagtattcaaaaactagcagcttcaagttatcaagcagataaaagtgccgaatataatgcttctaaagccattcccaatgttgcgatgatgccagatggctcaaaactcagtattgattgggaaggaacgactggcgaaaaagcgctccaacaagttgcaaaagatgttggcgaaaaatcgattgtttcacggactggtggggcaccaacgctggctgtttcaatgtcaaacattctacataaggtgccagttattggtgggacaaatatgatgggcttctggtatcattttgccattatgtttgaggctctctttatcctgtcggccgtttcagccgcaactaagtccactcgttatctactcaatgatgcgcttcgaggcttcaaaaaattaggacggttgggggatgatgattggctaccaagtaaaatcgtgacaactgcggtcattgttggtgtttggggagctttacttttgatgggcgtttctgaccccaatggtggaataaaaatcatgtatccgctctttgggatttctaatcagctgattgcagctgtggctctagccattgtctgtgtcatggttattcgtaaaggttatctcaaatgggtttggattcctgccattccattggtctgggatgtttgtgtgacctttgctgccagctggcaaaaaatcttttctacggatgtaaatattgggtattttgcttcttattcagcagcgaaaagtcaagtagattcaggaaaattgacaggtttattattaaccaatgcgcaagcaaccatgcgaaatacgatgattcaaggaattctgtcagtaattttcttgctttgcgtggccatattattagcaatttgtgccgttaaagttgtcaagattttgcaaaccaataaagtcggtgataagttcagctcagaagaagcttttgaagagtccaacctttttgaaacttcaagtttatggccaagtcatcttgaacataaggttttaaaaagcaaagttaaaaattaa

SEQ ID NO: 36653 - protein, 784 aa, Lactococcus lactis subsp. cremoris SK11
MKDDGNSSNFTDEEELFLLRNKEGKIVGIKDLKQANFQETMKDWKEHLPKPSLLSIIIWVAVALLGGLAWSLIALAQGETINAIWFVIAAVCSYLIGYRFYALYIQRKIMRPNDLRATPSEAHNDGKEFNPTNRVVLFGHHFASIAGAGPLVGPVLAAQMGYLPGTIWIIFGVIFAGGVQDMLVLWYSHRRRAKSIGAMAHDEVGRFAGGLTSFIVFIMTMIVLAVLALICVTAMENSAWAVFSIGMTIPIALLMGIYLKYIRPGHVNEISAIGFILLLVAIFGGRWVSESSFAHIFMLSPTALVWWVMGYTFIAAIIPAWILLTPRDYLSMFMKIGTIAILAIAVVGVRPDVTIPALTNFAHNTDGPAFAGSLFPFLFVTIACGALSGFHVMMSSGTTPHLIAKESQTRMIGYGGMLFESFVAIMALVAAISLNPGIYYSMNTPQASIQKLAASSYQADKSAEYNASKAIPNVAMMPDGSKLSIDWEGTTGEKALQQVAKDVGEKSIVSRTGGAPTLAVSMSNILHKVPVIGGTNMMGFWYHFAIMFEALFILSAVSAATKSTRYLLNDALRGFKKLGRLGDDDWLPSKIVTTAVIVGVWGALLLMGVSDPNGGIKIMYPLFGISNQLIAAVALAIVCVMVIRKGYLKWVWIPAIPLVWDVCVTFAASWQKIFSTDVNIGYFASYSAAKSQVDSGKLTGLLLTNAQATMRNTMIQGILSVIFLLCVAILLAICAVKVVKILQTNKVGDKFSSEEAFEESNLFETSSLWPSHLEHKVLKSKVKN

SEQ ID NO: 36654 - DNA, 2301 bp, Arthrobacter sp. FB24
  CDS (1)..(2301): transl_table=11
atgggcaaaatgccggatggcaaggcgcggacagcattatcggaggacgcgctggtgcctgatccaaagcttccgccaacatcggtggacgagacggtcctcgaggcggaagagcgcaagtggacacccgcgaagatcgccatctgggcggccatcgccctgcttggcggcgttgcctggttcatgctggcgatcatccgcggcgagacagtcaacgcaatctggtttgtcttcgcgtctgtctgcacgtacctgatcggataccgcttttactccaaggtgatcgaacgctacatcaccaagcccaatgaccgccgggccacacccgcggagtacaaagctgacggcaaggactacgtccgcacggaccgcaacgtcctcttcggccaccactttgcggccatcgccggcgccgggccgcttgtcggccctgtccttgcggcccagatgggctacctgcccggcaccatctggatcatcatcggcgtcgtgctggccggagcggtgcaggactacctcgtgctgttcttctccatgcgccgcggaggccgctcgctgggccagatggcccgtgaggaacttggcgtgatcgggggcaccgcagccctcatcgccactctgctgatcatggtgatcatcgtggccatcctggccctcgtcgtcgtgaacgcactggccgaaagcccctggggcgttttctccgtcggcatgacaatccccatcgccctctttatgggcgtgtacctccgcgttcttaggcccggcaaggtcctggaagtgtcgctgatcggcttcgtgctgctgatggctgccatcatcggcggcggcgccgtggccggaacggagtggggcgcagcgttcttcactctggacaaggtcaccatcgcatggggcctggttgtctacggcttcatcgccgccatcctgccggtgtggctcctgctggctcccagggattacctctccacgttcatgaagatcggcgtgatcgtcatgctggcgctggccatcatcgtggtccggcccgaaatcagcgttccggcgttcagcgaattcgcgagccgggagaacgggcccgtgttccccggggcgctcttcccgttcctattcgtcacgattgcctgcggcgcgctgtccggcttccacgcactgattgcctccggcaccaccccgaagctgatcgaaaaggaacgccaggcgcgcctgatcggctacggcggcatgctgatggagtccttcgtggccatcatggccctcgtcgcagccatctccatcgaccgcgggctgtacttcgccatgaactccccggccgccctgaccggtggcacggtgcaaaccgctgccacctgggtcaacagcctgggccttgccggtgtgaacctcactccggacctcctggctgagaccgccaggaatgtcggcgaggaaagcatcgtgtcgcgcacgggcggtgcacccacccttgctgtgggcctggcccacatcatgcagcagttcatcggcggcacggcgatgatggcgttctggtaccacttcgccatcatgttcgaggcgctgttcatcctgaccgccgtggatgccggcacccgcgtggcccgctttatgctgcaggattccatcggcaacttcattcccaagttcaaggaacactcgtggcggccgggagcctggctctgcacggccatcatggtgggcgcctggggtgcggtgctgctgatgggcgtcaccgacccgctgggcggtatcaacacgctgttcccgctgttcggcatagccaaccagctgctcgcggctatcgcgctgtctgtctgcatggccatcgccgccaggcgggcctcgttcaagtacctctggattgtcgcgcttccgctggcttttgcagcagtcgtcaccatcaccgccagcttccagaagatcttctctcctgttccggcggtaggttacttcgccaacaacgcggcgttcgccaaggcgctggctgacggcaagaaggaattcggcacggccaagaccgtcgcggccatggaagccgtggtgcgcaacaccatgatccagggctggctgtcggtgatcttcgtggtgctgagcatcattgtcatcatgacggcgatcgtggcaaccgcaaaggcgttccgcaacgcacgcgacggcatcgcccacacggaccacgaggacccggccgtgccttcccggacgtatgctccagcgggattcatacccacggcggccgaacgggagctcgtgggcgaatggaacaaacttcccgccgagctgcgtctcgaaaagccagcacaccactga

SEQ ID NO: 36655 - protein, 766 aa, Arthrobacter sp. FB24
MGKMPDGKARTALSEDALVPDPKLPPTSVDETVLEAEERKWTPAKIAIWAAIALLGGVAWFMLAIIRGETVNAIWFVFASVCTYLIGYRFYSKVIERYITKPNDRRATPAEYKADGKDYVRTDRNVLFGHHFAAIAGAGPLVGPVLAAQMGYLPGTIWIIIGVVLAGAVQDYLVLFFSMRRGGRSLGQMAREELGVIGGTAALIATLLIMVIIVAILALVVVNALAESPWGVFSVGMTIPIALFMGVYLRVLRPGKVLEVSLIGFVLLMAAIIGGGAVAGTEWGAAFFTLDKVTIAWGLVVYGFIAAILPVWLLLAPRDYLSTFMKIGVIVMLALAIIVVRPEISVPAFSEFASRENGPVFPGALFPFLFVTIACGALSGFHALIASGTTPKLIEKERQARLIGYGGMLMESFVAIMALVAAISIDRGLYFAMNSPAALTGGTVQTAATWVNSLGLAGVNLTPDLLAETARNVGEESIVSRTGGAPTLAVGLAHIMQQFIGGTAMMAFWYHFAIMFEALFILTAVDAGTRVARFMLQDSIGNFIPKFKEHSWRPGAWLCTAIMVGAWGAVLLMGVTDPLGGINTLFPLFGIANQLLAAIALSVCMAIAARRASFKYLWIVALPLAFAAVVTITASFQKIFSPVPAVGYFANNAAFAKALADGKKEFGTAKTVAAMEAVVRNTMIQGWLSVIFVVLSIIVIMTAIVATAKAFRNARDGIAHTDHEDPAVPSRTYAPAGFIPTAAERELVGEWNKLPAELRLEKPAHH

SEQ ID NO: 36656 - DNA, 2058 bp, Azotobacter vinelandii AvOP
  CDS (1)..(2058): transl_table=11
atgaaccgactggtctctcatctcgcctggctcgccctggcggtgctgggcgccgccgccctgggtgtcgtggccctacggcgtggcgaagccatcaatgccttgtggatcgtggtcgccgcgacggcgatctatctggtcgcctaccgctactacagcctgttcatcgccaaccgggtgatgcagctcgatccacgccgcgccaccccggcggtgctcaacaacgatggtctggatttcgtgccgaccaacaagcacgtgctcttcggccatcacttcgccgccatcgccggcgccggcccgctggtcggcccggtgctcgccgcgcagatgggctacctgcccggcaccctgtggctgatcgccggggtggtgctggccggcgcggtgcaggatttcctggtgctgtgcatctccacccgccgcaacgcccgctcgctgggcgacatggtgcgcgaggaaatgggccgtgttcccggcaccatcgcgctgttcggctgtttcctgatcatgatcatcatcctcgcggtgctggcgctgatcgtggtcaaggctctggcccacagtccctggggcatgttcacggtgatcgcgaccattccgatcgccatgttcatgggcctgtacatgcgctacatccgtcccggacgcatcggcgagatctcgctgatcggcatcgtcctgctgctggcctcgatctggctgggcggcgtgatttccaccgacccctactggagcggagtgttcaccttcagcggcgtgcagatcacctggatgctgatcggctacggcttcgtcgccgcggtgttgccggtatggctgatcctcgccccgcgcgactatctgtcgaccttcctgaagatcggcaccatcgccgccctggcggtcggcatcgtgatcctcaaccccgacctgaagatgccggcggtgacccagttcatcgatggtagcggtccggtgtggaagggggcgctgtttcccttcctgttcatcaccatcgcctgcggcgcggtgtccggcttccatgcgctgatcgcctcgggtaccacgcccaagctgctggccagcgagggccacgcccgctacatcggctacggcggcatgctgatggagtcgatggtggcgatcatggccatggtcgccgccgcggtgatcgagcccggcgtgtacttcgccatgaacagcccgccggccatcgtcggcgccgatgccgccagcgtggcggcggcggtcagcggctggggtttcgccatcacgcccgaagcgctggaaagcgtcgcccgcgacatcggcgaaaccaccatcctggcgcgtgccggcggtgcgccgaccctggccgtgggcatcgcgcagatcctccaccaggtgctgccgggggcgacctccatggcgttctggtatcacttcgccattctgttcgaggcgctgttcatcctgaccgccgtggacgccggcacccgcgccgggcgcttcatgctccaggacctgctcggcaacttcgtgccggtcctgcgccgcaccgactcctggggcgccaacgtactggccaccgccggttgcgtggcgctctggggctatctgctgtaccagggcgtggtcgatccgctgggcggcatcaacaccctgtggccgctgttcggcatctccaaccagatgctcgccggcatcgccctgatgctctgcagcgtggtgctgatcaagatgaagcgccagaactacgtctgggtcaccctgctgccggccgtctggctgctgatctgcaccacggtggcgagcctgatcaagctgttcgatccgaacccggcggtcggcttcctcgccctggccagcaaatacgccgcggcgatggacaccggccaggtcctggctccggccagggacatcggccagatgcagaacgtgatcatgaacgcctataccaacgccggtctcagcgtgctgttcctggtggtggtgttcagcatcctgttctactcgctgaaggtcggccgtgccgcctggatcgtcgagcagcgcaccgacaaggaaacgcccttccaggcgattcccggcgcctga

SEQ ID NO: 36657 - protein, 685 aa, Azotobacter vinelandii AvOP
MNRLVSHLAWLALAVLGAAALGVVALRRGEAINALWIVVAATAIYLVAYRYYSLFIANRVMQLDPRRATPAVLNNDGLDFVPTNKHVLFGHHFAAIAGAGPLVGPVLAAQMGYLPGTLWLIAGVVLAGAVQDFLVLCISTRRNARSLGDMVREEMGRVPGTIALFGCFLIMIIILAVLALIVVKALAHSPWGMFTVIATIPIAMFMGLYMRYIRPGRIGEISLIGIVLLLASIWLGGVISTDPYWSGVFTFSGVQITWMLIGYGFVAAVLPVWLILAPRDYLSTFLKIGTIAALAVGIVILNPDLKMPAVTQFIDGSGPVWKGALFPFLFITIACGAVSGFHALIASGTTPKLLASEGHARYIGYGGMLMESMVAIMAMVAAAVIEPGVYFAMNSPPAIVGADAASVAAAVSGWGFAITPEALESVARDIGETTILARAGGAPTLAVGIAQILHQVLPGATSMAFWYHFAILFEALFILTAVDAGTRAGRFMLQDLLGNFVPVLRRTDSWGANVLATAGCVALWGYLLYQGVVDPLGGINTLWPLFGISNQMLAGIALMLCSVVLIKMKRQNYVWVTLLPAVWLLICTTVASLIKLFDPNPAVGFLALASKYAAAMDTGQVLAPARDIGQMQNVIMNAYTNAGLSVLFLVVVFSILFYSLKVGRAAWIVEQRTDKETPFQAIPGA

SEQ ID NO: 36658 - DNA, 2079 bp, Burkholderia vietnamiensis G4
  CDS (1)..(2079): transl_table=11
atgaatcgggcttccagtaccttgctatggaccgcggtcgcgctgctcggcgccttcgcgttcggcacgatcgcacttgcgcacggcgaacgcgtcagcgcgctgtggatcgtgatcgcagcagtctgtgtctatctgatcgcatatcgcttctacagccgtttcatcgccagcaaggtgatgcagctcgacgggctgcggatgacgccggccgtcaaatacaacgacggcctcgactacgtaccgaccaacaaatacgtgctgttcggccatcacttcgccgcgatcgccggcgccgggccgctcgtcggcccggtgctcgccgcgcagatgggctacacgccggggatgctgtggatcctgggcggcgtcgtgttcgccggcgcggtgcaggacttcatcgtgctgttcatctcgacgcgtcgcgacggccgttcgctcggcgacctcgtcaagatggagctcggcacggtgcccggcgtgatcgcgctgttcggcgcgttcctgatcatggtgatcatcctcgcggtgctcgcgctgatcgtcgtgaaggcgctgacgaattcgccatggggcacgttcaccgtcgccgcgacgattccgatcgcgctgttcatgggcatctacacgcgctacatccgcccgggccgcatcggcgaagtgtcgatcatcggcttcgtgctgctgatggcgtcgatcgcgttcggtcaggccgtgcacgattcgccgacgctcgccgcatggttcacgttcagcggcacgcagctcacctggatcctgatcggctacggcttcatcgcgtcggtgctgccggtgtggctgctgctcgcgccgcgtgactacctgtcgacgttcctgaagatcggcacgatcctcggcctcgcgatcggcatcctggtcgtcgcgccggaactgaagatgccggcgctgacgaagttcgtcgacggcaccggccccgtctggtcgggcaatctgtttccgttcctgttcatcacgatcgcgtgcggcgcggtgtcgggcttccacgcgctgatctcgtcgggcacgacgccgaagctgatcgacaacgaaaccaacgcgcgcttcattggctatggcgcgatgctgatggaatcgttcgtcgcgatcatggcgctggtcgccgcatgcgtgatcgagccgggcgtctacttcgcgatgaacgcgccggcggccgtgctcggctcgacgccggaagcggttgccaacaccgtcacgcaatggggcttcgtgctgacgcccgacatgctcacgcagacggcgaaggccgtcggcgaaacgacgatcatcgcccgcgcgggcggcgcaccgacgctggccgtcggcatggcgcacatcctgcatcaggtgatcggcggcgaagcgatgatggcgttctggtatcacttcgcgattctgttcgaggcgctgttcatcctgacggccgtcgatgcaggcacgcgcgccggacgcttcatgctgcaggatctgctcggcacgttccacccggcgctcaagcgcacggaatcgctgccggcgaacctggtcgccaccgcgctgtgcgtggccgcgtggggctacttcctgtatcagggcgtggtcgatccgctcggcggcatcaacacgctgtggccgctgttcggcatctcgaaccagatgctcgccgcgatcgcgctggtgctcggcaccgtcgtgctgttcaagatgaagcgtgagcgctacgcatgggtgacgatcgtgccgaccgcatggctgctgatctgcacgctcacggccggctggcagaagatcttcgacgcgaacccgaaggtcagcttcctcgcgcatgcggccaagctgcaggcgtcggtggaccagggcaaggtgctcgcgccggcgaagtcgctcgcgcagatgaagcggatcatcttcaacgactacgtcgatgcggcgctggccgggctgttcatcttcgtcgtcgtggcgatcgcggtgtacgggctgctcgccgtgctgcgcgcgcgccgcgaggcgaagccgagcgtgcgcgagacgccgtacgagccgatgccggccgcgcaggcgctcggcagcggacgctga

SEQ ID NO: 36659 - protein, 692 aa, Burkholderia vietnamiensis G4
MNRASSTLLWTAVALLGAFAFGTIALAHGERVSALWIVIAAVCVYLIAYRFYSRFIASKVMQLDGLRMTPAVKYNDGLDYVPTNKYVLFGHHFAAIAGAGPLVGPVLAAQMGYTPGMLWILGGVVFAGAVQDFIVLFISTRRDGRSLGDLVKMELGTVPGVIALFGAFLIMVIILAVLALIVVKALTNSPWGTFTVAATIPIALFMGIYTRYIRPGRIGEVSIIGFVLLMASIAFGQAVHDSPTLAAWFTFSGTQLTWILIGYGFIASVLPVWLLLAPRDYLSTFLKIGTILGLAIGILVVAPELKMPALTKFVDGTGPVWSGNLFPFLFITIACGAVSGFHALISSGTTPKLIDNETNARFIGYGAMLMESFVAIMALVAACVIEPGVYFAMNAPAAVLGSTPEAVANTVTQWGFVLTPDMLTQTAKAVGETTIIARAGGAPTLAVGMAHILHQVIGGEAMMAFWYHFAILFEALFILTAVDAGTRAGRFMLQDLLGTFHPALKRTESLPANLVATALCVAAWGYFLYQGVVDPLGGINTLWPLFGISNQMLAAIALVLGTVVLFKMKRERYAWVTIVPTAWLLICTLTAGWQKIFDANPKVSFLAHAAKLQASVDQGKVLAPAKSLAQMKRIIFNDYVDAALAGLFIFVVVAIAVYGLLAVLRARREAKPSVRETPYEPMPAAQALGSGR

SEQ ID NO: 36660 - DNA, 2079 bp, Burkholderia cenocepacia AU 1054
  CDS (1)..(2079): transl_table=11
atgaatcgggcttccagtaccctgctatggatcgcggtcgcgctgcttggcgcgttcgcattcggcacgatcgcactcgcgcacggcgagcgcgtcagtgccctctggatcgtgatcgccgcagtctgcgtgtatctgatcgcgtatcgcttctacagccgtttcatcgccagcaaggtcatgcagctcgacgggctgcggatgacgccggcggtcaagtacaacgacggcctcgactacgtgccgaccaacaagtacgtgctgttcggccatcacttcgccgcgatcgccggcgccgggccgctggtcggccccgtgctcgccgcgcagatgggctacacgcccggcatgctgtggattctggccggcgtcgtgttcgccggcgcggtgcaggatttcatcgtgctgttcatctcgacgcgtcgcgacggccgttcgctcggcgacctcgtcaagatggagctcggcacggtgcccggcgtgatcgcgctgttcggcgcgttcctgatcatggtgatcatcctcgcggtgctcgcgctgatcgtcgtgaaggcgctgaccaattcgccgtggggcacgttcaccgtcgccgcgacgattccgatcgcgctgttcatgggcgtctatacgcgctacatccgtccgggccgcatcggcgaagtgtcgatcatcggcttcatcgggctgatggcggcgatcgcgttcggccagaacgtggccgcctcgccggcggttgccgcgtggttcacgttcagcggcacgcagctcacgtggatcctgatcggctacggcttcgtcgcatcggtgctgccggtgtggctgctgctcgcgccgcgcgactacctgtcgacgttcctgaagatcggcacgatcctcggcctcgcgatcggcatcctggtcgtcgcaccggaactgaagatgcccgcgctgacgaagttcgtcgacggctcgggcccggtgtggtcgggcaacctgttcccgttcctgttcatcacgatcgcgtgcggcgcggtgtcgggcttccacgcgctgatctcgtcgggcacgacgccgaagctgatcgacaacgaaaccaatgcgcgcttcatcggttacggcgcgatgctgatggaatcgttcgtcgcgatcatggcgctggtcgccgcgtgcgtgatcgaaccgggcatctacttcgcgatgaacgcgccggccgcggtgctcggctcgacgccggaagcggtcgcgaacaccgtcacgcaatggggcttcgtgctgacgcccgacatgctgacgcagacggccaaggccgtcggcgaaacgacgatcatcgcgcgtgcgggcggcgcgccgacgctggccgtcggcatggcgcacatcctgcaccaggtgatcggcggcgaagcgatgatggcgttctggtatcacttcgcgatcctgttcgaggcgctgttcatcctgacggccgtcgacgcgggcacgcgtgcgggccgcttcatgctgcaggatctgctcggcacgttccacccggcgctcaagcgcaccgagtcgctgcccgcgaacctcgtcgccaccgcgctgtgcgtggccgcgtggggctacttcctgtaccagggcgtggtcgatccgctcggcggcatcaacacgctgtggccgctgttcggcatctcgaaccagatgctcgccgcgatcgcgctggtgctcggcaccgtcgtgctgttcaagatgaagcgcgagcgctatgcgtgggtcacgatggtgccgaccgcatggctcttgatttgcacgctgacggccggctggcagaagattttcgacgcgaacccgaaggtcagcttcctcgcgcacgccgcgaagctgcaggccgcggtggacgaaggcaaggtgctcgcgccggcgaagtcgatcgcgcagatgaaacggatcatcttcaacgactacatcgatgcggcgctggccgggctgttcatcttcgtcgtcgtggccatcgcggtgtacggcgtgatcgccgtgctgcgcgcgcgccgcgagtcgaagccgaccgtgcgcgagacgccgtacgaagcgatgccggccgcgcaggcgctcggcagcggacgttga

SEQ ID NO: 36661 - protein, 692 aa, Burkholderia cenocepacia AU 1054
MNRASSTLLWIAVALLGAFAFGTIALAHGERVSALWIVIAAVCVYLIAYRFYSRFIASKVMQLDGLRMTPAVKYNDGLDYVPTNKYVLFGHHFAAIAGAGPLVGPVLAAQMGYTPGMLWILAGVVFAGAVQDFIVLFISTRRDGRSLGDLVKMELGTVPGVIALFGAFLIMVIILAVLALIVVKALTNSPWGTFTVAATIPIALFMGVYTRYIRPGRIGEVSIIGFIGLMAAIAFGQNVAASPAVAAWFTFSGTQLTWILIGYGFVASVLPVWLLLAPRDYLSTFLKIGTILGLAIGILVVAPELKMPALTKFVDGSGPVWSGNLFPFLFITIACGAVSGFHALISSGTTPKLIDNETNARFIGYGAMLMESFVAIMALVAACVIEPGIYFAMNAPAAVLGSTPEAVANTVTQWGFVLTPDMLTQTAKAVGETTIIARAGGAPTLAVGMAHILHQVIGGEAMMAFWYHFAILFEALFILTAVDAGTRAGRFMLQDLLGTFHPALKRTESLPANLVATALCVAAWGYFLYQGVVDPLGGINTLWPLFGISNQMLAAIALVLGTVVLFKMKRERYAWVTMVPTAWLLICTLTAGWQKIFDANPKVSFLAHAAKLQAAVDEGKVLAPAKSIAQMKRIIFNDYIDAALAGLFIFVVVAIAVYGVIAVLRARRESKPTVRETPYEAMPAAQALGSGR

SEQ ID NO: 36662 - DNA, 2058 bp, Burkholderia pseudomallei 1655
  CDS (1)..(2058)
ttggtctggatcgcggtcgcgctgctcggcgcgttcgcgttcggcacgatcgcgctcgcgcacggcgagcggatcagcgcgctatggatcgtgatcgccgccgtttgcgtgtatttgatcgcgtaccgcttctacagccgcttcatcgcgagcaaggtcgtccagctcgacggcctgcgcatgacgcccgccgtcaagtacaacgacggcctcgattacgtgccgaccaacaaatacgtgctgttcggccatcatttcgccgcgatcgccggcgcgggcccgctcgtcggcccggtgctcgccgcgcagatgggctacacgcccggcatgctgtggattctcgcgggcgtcgtgttcgcgggcgcggtgcaggacttcatcgtgctgttcatctcgacgcgccgcgacggccgctcgctcggcgacctcgtcaagatggagctcggcacggtgcccggcgtgatcgcgctgttcggcgcgttcctgatcatggtgatcattctcgcggtgctcgcgctgatcgtcgtgaaggcgctcaccaattcgccgtggggcacgttcaccgtcgccgcgacgattccgatcgcgctgttcatgggcgtctacacgcgctacatccggccgggccggatcggcgaagtgtcgatcatcggcttcgtgctgctgatggcgtcgatcgcgtacggccagcacgtgcacgattcggccgcgctcgccgcgtggttcacgttcagcggcacgcagctcacgtggatcctgatcggttacggcttcgtcgcgtcggtgctgccggtgtggctgctgctcgcgccgcgcgactacctgtcgacgttcctgaagatcggcacgatcgtcggcctcgcgatcggcatcctgatcgtcgcgccggagctgaagatgccggcgctcacgaagttcgtcgacggcacgggcccggtctggtcgggcaacctgttcccgttcctgttcatcacgatcgcgtgcggcgcggtgtcgggcttccattcgctgatctcgtcgggcacgacgccgaagctgctcgacaacgaaaccaacgcgcgcttcatcggctatggcgcgatgctgatggaatcgttcgtcgcgatcatggcgctcgtcgccgcgtgcgtgatcgagccgggcgtctacttcgcgatgaacgcgccggccgccgtgctcggcacgacgccggaagcggtcgcgcacaccgtcacgcagtggggcttcatgctgacgcccgacatgctcacgcagacggcgaaggccgtcggcgagacgacgatcatcgcgcgcgccggcggcgcgccgacgctcgcggtcggcatggcgcagatcctgcatcaggtgatcggcggcgaggcgatgatggcgttctggtatcacttcgcgatcctgttcgaggcgctgttcatcctgaccgcggtcgacgcgggcacgcgcgcgggccgcttcatgctgcaggatttgctcggcacgttccacccggcgctcaagcgcaccgaatcgctgccggcgaacctgaccgcgaccgcgctgtgcgtggccgcgtggggttacttcctgtatcagggcgtggtcgatccgctcggcggcatcaatacgctgtggccgctgttcggcatctcgaaccagatgctcgccgcgatcgcgctggtgctcggcaccgtcgtgctgttcaagatgaagcgcgagcgctacgcgtgggtgacgatcgtgccgacggcgtggctgctgatctgcacgctgacggccggctggcagaaggtgttcgattcgaatccgaaggtgagcttcctcgcgcacgcggcgaagctgcaggcggccgcggccgacggcaaggtgctcgcgccggcgaagtcgctcgcgcagatgcagcggatcatcttcaacgactacgtggacgcggcgctctcggcgctgttcatcctggtcgtcgtgagcatcgcggtgtacggcgtggtcgcggtcgtgcgcgcgcggcgcgcggtgcagcccacgtcgcgcgaaacgccgtacgaaccgatgccggtcgcgcaggcgctcggcagcggacgctga

SEQ ID NO: 36663 - protein, 685 aa, Burkholderia pseudomallei 1655
MVWIAVALLGAFAFGTIALAHGERISALWIVIAAVCVYLIAYRFYSRFIASKVVQLDGLRMTPAVKYNDGLDYVPTNKYVLFGHHFAAIAGAGPLVGPVLAAQMGYTPGMLWILAGVVFAGAVQDFIVLFISTRRDGRSLGDLVKMELGTVPGVIALFGAFLIMVIILAVLALIVVKALTNSPWGTFTVAATIPIALFMGVYTRYIRPGRIGEVSIIGFVLLMASIAYGQHVHDSAALAAWFTFSGTQLTWILIGYGFVASVLPVWLLLAPRDYLSTFLKIGTIVGLAIGILIVAPELKMPALTKFVDGTGPVWSGNLFPFLFITIACGAVSGFHSLISSGTTPKLLDNETNARFIGYGAMLMESFVAIMALVAACVIEPGVYFAMNAPAAVLGTTPEAVAHTVTQWGFMLTPDMLTQTAKAVGETTIIARAGGAPTLAVGMAQILHQVIGGEAMMAFWYHFAILFEALFILTAVDAGTRAGRFMLQDLLGTFHPALKRTESLPANLTATALCVAAWGYFLYQGVVDPLGGINTLWPLFGISNQMLAAIALVLGTVVLFKMKRERYAWVTIVPTAWLLICTLTAGWQKVFDSNPKVSFLAHAAKLQAAAADGKVLAPAKSLAQMQRIIFNDYVDAALSALFILVVVSIAVYGVVAVVRARRAVQPTSRETPYEPMPVAQALGSGR

SEQ ID NO: 36664 - DNA, 1758 bp, Chromohalobacter salexigens DSM 3043
  CDS (1)..(1758): transl_table=11
atgaacgctatctggattgccctgttcggcgccgtgtgtttcgtgatgggctatcgcttctattcgaagttcatcgccgaacgcatttatcgactcgatgccgacttccagacgccggcgcacgcctatcgcgacggcgtcgactacgtgcccaccaacaagtggattctctggggccaccatttcacgtcggtggccggagcggcgcccatcgtggggcctgccatcgcgatctactggggctggctgccggccatcctgtgggtcgtgctggggaccgtcttcgccgccggggtgcacgatttcggcgcggtggtgctctccaaccgccacaagggccattcgatcggcacgctggccaacaagctgatcggacagcgcgccaaactgctgttcctgttcatcatcttgatcctggtgttgatggtcaacgcggtcttcgcctgggtcatcgccaagctgttcatcaccttcccggccagtgtgctgtcggtcttcatccagatcccgctcgccgtgtggatcggctaccgcgtctatcgccattcgggctcgatgctgctgccgtcggtgattgcactggccgtgatgtatggcgcagcgctgctggccagcgagattcccctgctgcagatcgatctggtgagctggttcggcggtgccgaggcgccggtcgtgggtggcttcaacggcacctcgatggcctttctggtgtggatcgtggtgctgatgacatacgtctacatcgcctcgacgctccccgtctggaagctgttgcagccgcgcgattacatcaattcgcaccagctcgtggtcggcctggcgctgctgtatctggggctgctgttcggtgcaccggaaatgaccgcccccagcgtcaacggcgaagcggacatcagctggtacccgctgctgttcatcaccatcgcctgcggggcgatttccggcttccacggcctggtcgcctcgggcaccacgtccaagcagctcgacaaggaaaccgatgcccgcatggtcggctacgggggcgctctgggtgaaggcatgctggcgatgatcgcgatcatcgcggtgggcaccctgttcgcctccggtaccgatttcaccgcgacgtactcgagcttttccgcggccggctccaacggcctgggctcgttcgtgaaaggcgctggccagcttgccggcaatctgggcattcccgagcacatgggctcgaccctggtcgcggtgatcgtggtgagcttcgccgccaccacgctcgacaccgccgtgcgcctgatgcgttacatcatcgccgagctgggcaacgagtacggcatgccggtgatcgcccgcaagcacgtcgcgaccagcatcgccgtcatcgccagcgccgcgctggtcatcctgcccgaaggccccaacggcttcggctccggcggctacctgctgtggccgttgttcggcaccagcaaccagctgctggccggcatcacgctgatgctggtctcggtatggctcaagcgccagggccgcccggtggtcttcaccctggttcccatgctgttcctgctggtcatgacactgtgggccatggggcagcaggtgatcttcacctggtcgggcttcggcgatgccgaccgcaacctgctgctgttcaccttcggcagcctgatcatggtgttcacgctgtggatcctgctcgaggcgtcgcgaagcttccgtcagggtgacccggccgcgcagcagcaaccgctgagttccgatgaatcacgctga

SEQ ID NO: 36665 - protein, 585 aa, Chromohalobacter salexigens DSM 3043
MNAIWIALFGAVCFVMGYRFYSKFIAERIYRLDADFQTPAHAYRDGVDYVPTNKWILWGHHFTSVAGAAPIVGPAIAIYWGWLPAILWVVLGTVFAAGVHDFGAVVLSNRHKGHSIGTLANKLIGQRAKLLFLFIILILVLMVNAVFAWVIAKLFITFPASVLSVFIQIPLAVWIGYRVYRHSGSMLLPSVIALAVMYGAALLASEIPLLQIDLVSWFGGAEAPVVGGFNGTSMAFLVWIVVLMTYVYIASTLPVWKLLQPRDYINSHQLVVGLALLYLGLLFGAPEMTAPSVNGEADISWYPLLFITIACGAISGFHGLVASGTTSKQLDKETDARMVGYGGALGEGMLAMIAIIAVGTLFASGTDFTATYSSFSAAGSNGLGSFVKGAGQLAGNLGIPEHMGSTLVAVIVVSFAATTLDTAVRLMRYIIAELGNEYGMPVIARKHVATSIAVIASAALVILPEGPNGFGSGGYLLWPLFGTSNQLLAGITLMLVSVWLKRQGRPVVFTLVPMLFLLVMTLWAMGQQVIFTWSGFGDADRNLLLFTFGSLIMVFTLWILLEASRSFRQGDPAAQQQPLSSDESR

SEQ ID NO: 36666 - DNA, 2058 bp, Burkholderia pseudomallei 1710a
  CDS (1)..(2058)
ttggtctggatcgcggtcgcgctgctcggcgcgttcgcgttcggcacgatcgcgctcgcgcacggcgagcggatcagcgcgctatggatcgtgatcgccgccgtttgcgtgtatttgatcgcgtaccgcttctacagccgcttcatcgcgagcaaggtcgtccagctcgacggcctgcgcatgacgcccgccgtcaagtacaacgacggcctcgattacgtgccgaccaacaaatacgtgctgttcggccatcatttcgccgcgatcgccggcgcgggcccgctcgtcggcccggtgctcgccgcgcagatgggctacacgcccggcatgctgtggattctcgcgggcgtcgtgttcgcgggcgcggtgcaggacttcatcgtgctgttcatctcgacgcgccgcgacggccgctcgctcggcgacctcgtcaagatggagctcggcacggtgcccggcgtgatcgcgctgttcggggcgttcctgatcatggtgatcattctcgcggtgctcgcgctgatcgtcgtgaaggcgctcgccaattcgccgtggggcacgttcaccgtcgccgcgacgattccgatcgcgctgttcatgggcgtctacacgcgctacatccggccgggccggatcggcgaagtgtcgatcatcggcttcgtgctgctgatggcgtcgatcgcgtacggccagcacgtgcacgattcggccgcgctcgccgcgtggttcacgttcagcggcacgcagctcacgtggatcctgatcggttacggcttcgtcgcgtcggtgctgccggtgtggctgctgctcgcgccgcgcgactacctgtcgacgttcctgaagatcggcacgatcgtcggcctcgcgatcggcatcctgatcgtcgcgccggagctgaagatgccggcgctcacgaagttcgtcgacggcacgggcccggtctggtcgggcaacctgttcccgttcctgttcatcacgatcgcgtgcggcgcggtgtcgggcttccattcgctgatctcgtcgggcacgacgccgaagctgctcgacaacgaaaccaacgcgcgcttcatcggctatggcgcgatgctgatggaatcgttcgtcgcgatcatggcgctcgtcgccgcgtgcgtgatcgagccgggcgtctacttcgcgatgaacgcgccggccgccgtgctcggcacgacgccggaagcggtcgcgcacaccgtcacgcagtggggcttcatgctgacgcccgacatgctcacgcagacggcgaaggccgtcggcgagacgacgatcatcgcgcgcgccggcggcgcgccgacgctcgcggtcggcatggcgcagatcctgcaccaggtgatcggcggcgaggcgatgatggcgttctggtatcacttcgcgatcctgttcgaggcgctgttcatcctgaccgcggtcgacgcgggcacgcgcgcgggccgcttcatgctgcaggatttgctcggcacgttccacccggcgctcaagcgcaccgaatcgctgccggcgaacctgaccgcgaccgcgctgtgcgtggccgcgtggggttacttcctgtatcagggcgtggtcgatccgctcggcggcatcaatacgctgtggccgctgttcggcatctcgaaccagatgctcgccgcgatcgcgctggtgctcggcaccgtcgtgctgttcaagatgaagcgcgagcgctacgcgtgggtgacgatcgtgccgacggcgtggctgctgatctgcacgctgacggccggctggcagaaggtgttcgattcgaatccgaaggtgagcttcctcgcgcacgcggcgaagctgcaggcggccgcggccgacggcaaggtgctcgcgccggcgaagtcgctcgcgcagatgcagcggatcatcttcaacgactacgtggacgcggcgctctcggcgctgttcatcctggtcgtcgtgagcatcgcggtgtacggcgtggttgcggtcgtgcgcgcgcggcgcgcggtgcagcccacgtcgcgcgaaacgccgtacgaaccgatgccggtcgcgcaggcgctcggcagcggacgctga

SEQ ID NO: 36667 - protein, 685 aa, Burkholderia pseudomallei 1710a
MVWIAVALLGAFAFGTIALAHGERISALWIVIAAVCVYLIAYRFYSRFIASKVVQLDGLRMTPAVKYNDGLDYVPTNKYVLFGHHFAAIAGAGPLVGPVLAAQMGYTPGMLWILAGVVFAGAVQDFIVLFISTRRDGRSLGDLVKMELGTVPGVIALFGAFLIMVIILAVLALIVVKALANSPWGTFTVAATIPIALFMGVYTRYIRPGRIGEVSIIGFVLLMASIAYGQHVHDSAALAAWFTFSGTQLTWILIGYGFVASVLPVWLLLAPRDYLSTFLKIGTIVGLAIGILIVAPELKMPALTKFVDGTGPVWSGNLFPFLFITIACGAVSGFHSLISSGTTPKLLDNETNARFIGYGAMLMESFVAIMALVAACVIEPGVYFAMNAPAAVLGTTPEAVAHTVTQWGFMLTPDMLTQTAKAVGETTIIARAGGAPTLAVGMAQILHQVIGGEAMMAFWYHFAILFEALFILTAVDAGTRAGRFMLQDLLGTFHPALKRTESLPANLTATALCVAAWGYFLYQGVVDPLGGINTLWPLFGISNQMLAAIALVLGTVVLFKMKRERYAWVTIVPTAWLLICTLTAGWQKVFDSNPKVSFLAHAAKLQAAAADGKVLAPAKSLAQMQRIIFNDYVDAALSALFILVVVSIAVYGVVAVVRARRAVQPTSRETPYEPMPVAQALGSGR

SEQ ID NO: 36668 - DNA, 2049 bp, Solibacter usitatus Ellin6076
  CDS (1)..(2049): transl_table=11
ttggggtatctcttctgggccgttgtcgcctccgtggcggcattctgcctcggcaccattgcgctcagccgcggtgaacacatcaatagcctgtggctggtgctcgcggccgcctgcagctacgccacggcctaccggttttacgcgaagttcatttcggctcgcgtgatgatgttgaacgacaagcgcgccacccccgccgagcgcctccagaacggccatgatttcgagcccaccaacaagtggattctcttcggccaccacttcgcggctattgccggacccggtccgctggttggcccggtgctcgccgcgcaattcggttatctgcccgggacgctctggatcatcatcggcgcctgcctcggcggcgccgtgcaggatttcgtgatcctcttcgcctccatgcgccgcgacggcaaatcgctcggccagatggcgcgcgaggagatcggcaaggtcggcggcttcatcgccctggtcaccgtcctgctcatcatggtcatcctgctcgcagtggtcgcgctggtcgtggttaacgcgctcagaggcagcccctggggagccttcacgatcgccgccaccatgccgatcgcggtgttcatgggcctctatctgcgctactggcggcccggaaaagttctggagtgctccgccatcgggttcgtgctcgtgatgggcagcatcttcgccggccaggccgtcggcgaatcggccaccctcgcgccggtcttcacgctgagcgcgatgactatcgccttcgccatcattctctatggcttcctcgccagcgcgctgccggtttggctgctgctcgcgccccgcgattacctcagcaccttcgtgaaactcggcgtggtcctcatgctcgcgatcggcattctcttcgtgcgtcccgagttgcagctacccgccttcacgcgattcaccgatggcaccggaccgattttcgcgggtaagatcttccccttctgcttcatcacgatcgcctgcggcgcgatctcgggcttccattcgttgatctcttcgggcaccacgccgaaaatgatcgccaaggaatcccacgcctggcccgtcggctacggctccatgctgctcgaaagcttcgtcgcgatcatggcgatcatcgctgcctgcgtgctgcagcccggcatctacttcgcggtcaactcccccgcgggcgtcgtcggcgccactccggcggcggccgcggccaccatcaccgcctggggctttccggtgacggcggccgacatggcgcttctcgcgcacaacgtcggcgaacagtcactcttctcgcgcaccggcggcgcgccctctctggccctcgggatggcccacatctttgccagctccggcggcggccaggccgtgatcggcttctggtaccacttcgccatcatgttcgaagccctcttcatcctgaccatcatcgatgccggcacccgcgtgggccgcttcatgctccaggacctgctcggccacatcgcgccgcccctcggccgcaccagttggatgcccggcgtcatcggcacttccgccgtggtggtcggcgcctggggctacttcctggtgcagggcgtgcgcgacccgctcggcggcatcaattcgctgtggccgctgttcggcatctccaaccagttgctggcggcgatcgcgctctgcgtcgcaaccaccatcctgctcaaaatgcatggcgcgaaattcatgtggatcacgtgcgtccccctggtctggctggtcagcgccaccttcaccgccgcctggcagaagatcttctccccgattccagcgatcgggtttctctctcaggccgaccgcctcgaggcagccctgcgcgccggcaaggcggccagtccggcggcgacccagacgttgatcttcaacgcccgcctcgacgccgccatctgcggcgtcttcatggtcctggtggccgttatcctggcggattccctgcgcgtctgggcgggcatcctgtggggcgcaggcgaacgccgcatccacgaagcccccttcgtggcatcccaactgcgcgcggaggagctatga

SEQ ID NO: 36669 - protein, 682 aa, Solibacter usitatus Ellin6076
MGYLFWAVVASVAAFCLGTIALSRGEHINSLWLVLAAACSYATAYRFYAKFISARVMMLNDKRATPAERLQNGHDFEPTNKWILFGHHFAAIAGPGPLVGPVLAAQFGYLPGTLWIIIGACLGGAVQDFVILFASMRRDGKSLGQMAREEIGKVGGFIALVTVLLIMVILLAVVALVVVNALRGSPWGAFTIAATMPIAVFMGLYLRYWRPGKVLECSAIGFVLVMGSIFAGQAVGESATLAPVFTLSAMTIAFAIILYGFLASALPVWLLLAPRDYLSTFVKLGVVLMLAIGILFVRPELQLPAFTRFTDGTGPIFAGKIFPFCFITIACGAISGFHSLISSGTTPKMIAKESHAWPVGYGSMLLESFVAIMAIIAACVLQPGIYFAVNSPAGVVGATPAAAAATITAWGFPVTAADMALLAHNVGEQSLFSRTGGAPSLALGMAHIFASSGGGQAVIGFWYHFAIMFEALFILTIIDAGTRVGRFMLQDLLGHIAPPLGRTSWMPGVIGTSAVVVGAWGYFLVQGVRDPLGGINSLWPLFGISNQLLAAIALCVATTILLKMHGAKFMWITCVPLVWLVSATFTAAWQKIFSPIPAIGFLSQADRLEAALRAGKAASPAATQTLIFNARLDAAICGVFMVLVAVILADSLRVWAGILWGAGERRIHEAPFVASQLRAEEL

SEQ ID NO: 36670 - DNA, 1929 bp, Geobacter metallireducens GS-15
  CDS (1)..(1929): transl_table=11
atgctcggaaagctcgtctggctggtgatttcggcggttgcggccggttcccttgctgtagtggccggcgtcgtgaacccgggggagaaggtgaacgccctctggctcgtgacggccgccgcctgtttctacctagttgcctaccggttctatggcgcctttctggcggcgaaggtcctctccctggatccccgcctgaagaccccggcccggcgcctggctgacggcatggattaccaccccaccaaccgctgggtcctcttcggtcaccactttgcggccatcgctggcgccggtcccctcatcggtcccatgctggcggcccagttcggctatctccccggcttcctctggcttctggtgggggccgtcatggtgggggcggtgcacgacatggtgatcctggcggcgtcggtgcggcgcaacggccgctccctggctaggatcgccaaggatgagatcgggccggtgggggggctggcggcctctctcgccatcctcttcatcctgatcgtggccttggctgggctggggctcgcggtggtgaactccctggccaagagcccctgggggacctttaccattttccttaccatccccatcgccctcttcatggggctctacctctacaagatccgccccggccgggtgggggaggtgagcgccatcggctttgtgcttttgctggcggcggtcttcagcggccacttcatccccggctctcccctggagcccatcttcagtctcgggaagggggggctgaccctggccatggccgcctacggcctcatcgcctccatccttccggtctggatgctcctctgcccccgggactacctctctacctacatgaagatcggcacggtgatcctcctggccttcggggtcgtcttcatggcccccaccatccagatgccggcaatgacccggttcgtggccggcggtgggccggtgatccccggcaagctcttcccctttatgttcatcaccatcgcctgcggggcggtctccgggttccattccctcatctcctcggggaccacgccgaagatgatcatgagcgagcgggagatccccatgatcgggtatggcgccatgctggccgagggattcgtgtcggtcatggccctggtggcggccacgatcctcatcccgggggactacttcgccatcaatacgaagctctccttcgacgccatcgcggccctgggcttcccggtggaacgggtgcgtgagctgtcggccatggtggggaccgacgtggccggccgccccggcggcgccgtctcccttgccgtgggtatggcctccatcctgtcgtccctccccggcatgaaggggctcatgccctactggtacaacttcgccctcatgttcgaggccctcttcatcctcaccaccgtcgacaccggcacccgggtggcgcggtttctcctccaggagctggggagccgggctttcccccgcctgggccagcagaactggctccccggcatcatcatcaccagctttctcgtggtggccgcctggtcgtacctgatctggtccggcaacgtctccaccatctggcccatgttcggggtatcgaatcagctcctggcggccatcgccctggggatcggcaccacgatcctcatcaagagcggcaaggcgcgctatgcctggaccacggtcctccccatggtgttcatgtacgccaccaccttcaccgccgcgtggaagctgaccggcagcttcctcggcaaggccgccgcagctgccacggctgccgaggccttcaccttgaggatgaacgccggcctggtggtgttgatggccatcctggcggtggtgactctgctcgacatgctcctcaagtggcgcggctacctctccgagcggagacccatcaccacgagcgaggtgctggagttcgaggagccggcatga

SEQ ID NO: 36671 - protein, 642 aa, Geobacter metallireducens GS-15
MLGKLVWLVISAVAAGSLAVVAGVVNPGEKVNALWLVTAAACFYLVAYRFYGAFLAAKVLSLDPRLKTPARRLADGMDYHPTNRWVLFGHHFAAIAGAGPLIGPMLAAQFGYLPGFLWLLVGAVMVGAVHDMVILAASVRRNGRSLARIAKDEIGPVGGLAASLAILFILIVALAGLGLAVVNSLAKSPWGTFTIFLTIPIALFMGLYLYKIRPGRVGEVSAIGFVLLLAAVFSGHFIPGSPLEPIFSLGKGGLTLAMAAYGLIASILPVWMLLCPRDYLSTYMKIGTVILLAFGVVFMAPTIQMPAMTRFVAGGGPVIPGKLFPFMFITIACGAVSGFHSLISSGTTPKMIMSEREIPMIGYGAMLAEGFVSVMALVAATILIPGDYFAINTKLSFDAIAALGFPVERVRELSAMVGTDVAGRPGGAVSLAVGMASILSSLPGMKGLMPYWYNFALMFEALFILTTVDTGTRVARFLLQELGSRAFPRLGQQNWLPGIIITSFLVVAAWSYLIWSGNVSTIWPMFGVSNQLLAAIALGIGTTILIKSGKARYAWTTVLPMVFMYATTFTAAWKLTGSFLGKAAAAATAAEAFTLRMNAGLVVLMAILAVVTLLDMLLKWRGYLSERRPITTSEVLEFEEPA

SEQ ID NO: 36672 - DNA, 1848 bp, Geobacter metallireducens GS-15
  CDS (1)..(1848): transl_table=11
atgaatgcgttgacactcatttttgtggcactgtgcgtctttgcgcttgcctaccgctactatggcctgtttctggcgaacagggtgctggggctgcgggaggaccgcgcaacgcctgccaccaccatggcggacgggcacgactacgtgaagaccaacaagtacgtcctgttcggccaccacttcgcggccatcgccgcggcgggccccctcctggggccggtgctcgctgcccagttcgggttcctgccgggggccctctggattatcgtcggggccgttctggccggcgcggtccacgatgccatcgtcctcttcgcctcggtgcggcaccggggcaagagcctttcgcgcatcgccgagaccgagatcggcaaagccgcggggaaggtggcttccgtggccattctcttcattctcatcctgaccctggccggcctctccattgccgtcgtgaacgccatgttcaacagcccctggggaacctacaccgtcttctgcaccattcccatcgccatggtcatgggggtttacatgcagaagatccggccgggggacgtgaagggggggagcatcatcggcgttgcactcctcgccctggcgatcctgaccgggccctacgtggccgccaatcccgagctggcggcgttcttcaccttttccaagaagcagatcgcgctcatcatccccatctacggattcttcgcctcggtgctgccggtctggttcctcctggtcccccgcgactatctctcaacctacctgaagatcggcaccatcgccctgctggccctcgggatcgtcgccgtgcatccccagctccagatgcccgccatcaccagctatgtgagcggcggcggtccggtgatccccggcgcggtcttccccttcatcttcgtgaccattgcctgcggcgccctctccggtttccacgccatcatcggctccggcaccaccccgaagatgatcgccaacgagcgggatatcctcttcgtcggctacggcgccatgctgaccgaagggtttgtggcgatcatggccctcatcgccgcctgtgtgctggtcccggccgactacttcgccatcaacgccgcccccaaggcgttccaggccctcaatatggcccccgtgaacctgccggcactctcccaggcggtgggcgagcaggtccaggggcggcccggcggcgcggtctccctggcggtggggatggcctacatcttctcgtcgattccggtcatgaagagcatgatggcctactggtaccacttcgccatcatgttcgaggcggtctttattctcactgccgtcgatgccggtacccgggtcggccgctatctcctccaggagatgctcggcaagctctatccgcgctttgccgataacacgtggacgccaggggtcatcgttacgagtatcctctttacctccgcctggggctacctggtctacaccggcgacatcaccaccatctggcccctgttcggcatgagcaaccagctcctcgccacctgcgccctcatcgtcggcaccaccatgctcatcaggctcggcaaggcccgctacgcctgggtcaccgcggtcccggggatcttcatgattccggtcaccatgaccgcagggtacctgaacatcaccaagaacttcctgcccaaggggcttaccctgctcgtggtcctgtccgtcgtgctgatggtgctgatggccatcgtcttcatcgaggcgttccgtaaatggtatgcgttgttgcagatccgggagaaggtgcttgatgccaacggcgacctggttctggtgccggtggagtcgccggccgagaggtacgagccgctccccttgcaggagtaa

SEQ ID NO: 36673 - protein, 615 aa, Geobacter metallireducens GS-15
MNALTLIFVALCVFALAYRYYGLFLANRVLGLREDRATPATTMADGHDYVKTNKYVLFGHHFAAIAAAGPLLGPVLAAQFGFLPGALWIIVGAVLAGAVHDAIVLFASVRHRGKSLSRIAETEIGKAAGKVASVAILFILILTLAGLSIAVVNAMFNSPWGTYTVFCTIPIAMVMGVYMQKIRPGDVKGGSIIGVALLALAILTGPYVAANPELAAFFTFSKKQIALIIPIYGFFASVLPVWFLLVPRDYLSTYLKIGTIALLALGIVAVHPQLQMPAITSYVSGGGPVIPGAVFPFIFVTIACGALSGFHAIIGSGTTPKMIANERDILFVGYGAMLTEGFVAIMALIAACVLVPADYFAINAAPKAFQALNMAPVNLPALSQAVGEQVQGRPGGAVSLAVGMAYIFSSIPVMKSMMAYWYHFAIMFEAVFILTAVDAGTRVGRYLLQEMLGKLYPRFADNTWTPGVIVTSILFTSAWGYLVYTGDITTIWPLFGMSNQLLATCALIVGTTMLIRLGKARYAWVTAVPGIFMIPVTMTAGYLNITKNFLPKGLTLLVVLSVVLMVLMAIVFIEAFRKWYALLQIREKVLDANGDLVLVPVESPAERYEPLPLQE

SEQ ID NO: 36674 - DNA, 1794 bp, Exiguobacterium sp. 255-15
  CDS (1)..(1794): transl_table=11
atgagtgctacacccattgttattgccgtcatttgtattttattgatcgtttatcgtctttatggcacattcatggctgtcaaagtcttaaaaatcaaagaggaccgggaaacaccggctcataagtttgcggatggaaaagattatgtcccgaccaacaaatgggtgtcgttcggtcaccacttcgcagcgatcgctgctgccggcccgctcgtcggtcctgtacttgctgcccagttcggttatttaccgggactgttatggctcttgattggtgccgtcatcggtggcgccgtccacgatatggtcgtcttgttcgcttccatgcgtcaagatggacagtcgttatctgaagtcgctaaaaaagagctcggacctgtcgccggtttttgtgccggtctcgcgatgctcttcatcatcaccatcacgatggccggattatcaatggtcgtcctgcatgccctggagcataatccatggggaacatttgctgtcttctcgaccattccgatcgcaatgggggtcggcatctacttacgaaaaggcggcaatctcgccttggcttccgtcgtcggtttcctattgattcttgctgcaatcggtttcggtccccagttgactgacacgttcatcggaacatggttcgacctgtcgtcacgtcaactcgcgattgcgttaccgatttatgccttcttcgctgcagcactgccggtctggttgttgcttgcaccgcgtgattacttatcaagtttcatgaaaatcggtgttttctttgccttgatcgtcggtgtcttcatcatcaatccggatatccgtttcccggcgttcacgaaattcgtcaacggtggcggtccgatcattgccggtccggtctggccattcatctcgatcacgattgcctgtggcgcgatttccggtttccacgctttcgtcggctccggaacgacaccgaagatgatcaatcgttggagtgatatcaaaccggtcgccttcggtgcgatgcttgttgagtgtctcgtcgctgtcatggcgttgattgccgcaacgtctcttgaagtcggagattacttcgccatcaattcgacaccggaagtctttgcgacactcggtatgagcaccgtttaccttgatgaattatcacgggaaatcggactcgatctcgccggacggaccggtggagccgtttcactggccgtcggtatgacgttcatcttccgggccattccctggttccgtgaaattgccggcttcttcttccaattcgtcattctgtttgaagcggtcttcattttgacggcgatcgatgccggaacacgcgttgcccgctacttgatccaagatttcttcggtgaattctacaaaccgttaaaacgggtcgactggatcccgggtgcgattttcgccagtgcgcttggtacgttcttctgggggtacctgctcttctccggcgacatcggttcgatttgggccttgttcggtgtctccaatcagttgatggcgtcgatcggcttaattatcggaacgacaatcatcctgaagattgccgacaaaaaagtgtatgccttgacgacattcattccgcttgtctacttgcttgtaacagtgacgttcgctgatatctggatggtcgccaatgtctatgcgaatccggcttctgccggcttcagtatcctgaatacgattctgtcgttcacgatggggatcttagctatcgtcatcacgatttcagcggtccggaaatggattgaattgctcaactcaccgcgttgggaaaaagtgaaaaaatcagcttaa

SEQ ID NO: 36675 - protein, 597 aa, Exiguobacterium sp. 255-15
MSATPIVIAVICILLIVYRLYGTFMAVKVLKIKEDRETPAHKFADGKDYVPTNKWVSFGHHFAAIAAAGPLVGPVLAAQFGYLPGLLWLLIGAVIGGAVHDMVVLFASMRQDGQSLSEVAKKELGPVAGFCAGLAMLFIITITMAGLSMVVLHALEHNPWGTFAVFSTIPIAMGVGIYLRKGGNLALASVVGFLLILAAIGFGPQLTDTFIGTWFDLSSRQLAIALPIYAFFAAALPVWLLLAPRDYLSSFMKIGVFFALIVGVFIINPDIRFPAFTKFVNGGGPIIAGPVWPFISITIACGAISGFHAFVGSGTTPKMINRWSDIKPVAFGAMLVECLVAVMALIAATSLEVGDYFAINSTPEVFATLGMSTVYLDELSREIGLDLAGRTGGAVSLAVGMTFIFRAIPWFREIAGFFFQFVILFEAVFILTAIDAGTRVARYLIQDFFGEFYKPLKRVDWIPGAIFASALGTFFWGYLLFSGDIGSIWALFGVSNQLMASIGLIIGTTIILKIADKKVYALTTFIPLVYLLVTVTFADIWMVANVYANPASAGFSILNTILSFTMGILAIVITISAVRKWIELLNSPRWEKVKKSA

SEQ ID NO: 36676 - DNA, 2271 bp, Frankia sp. CcI3
  CDS (1)..(2271): transl_table=11
atgactacccatctcgatactgccggaaccggtcttccgcctggcggcggtcgtgcgcctggccatggccggaggaccggccggctccgatcgatagccatctggaccacggtgtcggcggtcggcgcgatcagctgggctgtgctcgcgatgtcccgccacgagtcgatctctgcggcgtggatcctgctcgccggcctgggatccttcgccatcgcctaccgcttctacgcccggttcatcgcaaaccgggtgctgcgggtggatgacagccgggcgacgccggccgaacgcctcgacaacggcgtcgactacgagccgaccgaccggcgggtcctgtttggccaccacttcgctgccatcgccggggccggtccgctcgtcggcccggtgctcgccgtacagatggggtatctgcccgggacgatctggatcatcgccggtgttattttcgccggtgccgtgcaggacatggtgacgttgttcttctccatgcggcgggacggcaagagcctgggccagatggcgcgcgacgagatcggcccggtgggcgggacggcggcactagtcgccgtcttcgccataatgatcattttgctggcggtgctggcgcttgtcgtggtgaacgcgctcgccgcctctgcatggggcaccttctcgatcgcgatgaccatcccgatcgccctgttcatgggcatttacctgcgggtgctgcgacccggccgggtcgctgaggccaccgccgtcggtgtcgccggactgttcgcggcccttgtcggcggccgctggatccaggactccgccctcgcctccgcctttacactcagcccgaaggcattggtcgcctgccttgtcggctacggctttgtcgcctcggtgctgccggtgtggctcctgctcgcgccccgcgactacctctcgacctttatgaaggtcggcaccatcgggctgctcgccatcggcgttctcgtcgaatttccggtacttcaggcggacgcagtcagtactttcgcgaccaggggaaacgggccggtgttcgccggcagcctgttcccgttcgtcttcatcaccatcgcctgcggtgccctgtccggattccactccctcatcgcgtccggcaccacgccgaagatgattcaaaaggagtcccaggtccggttcatcggttatggggcgatgctgaccgagtcccttgtcgcactgatggcgctgatcgcggcggcggtgctcagcccgggcctctactacgccatgaatgcgcccggtggggtcgtcggcaagaccgcggcgtcggctgcgtccgcggtcaccgacctcggtttcaccatcaccccggacgccctcgactccgcggcccgggccgtcggtgaatcgacgctggtagcccgcaccggaggtgcaccgacgctcgctgtcggcatgtccaacatcctttcaggcgcattcgggggcggccgcctcgccgccttctggtaccacttcgcgatcatgttcgaggcgctgttcatcctgaccactgtcgacgccggaacccgggtcggccgattcatgttgcaggacatgctcgggaacgtatggaagccaatcggccgggtgagctggtggcccggggtctggctgagcagcgtgctggtggtcggcacctggggctacttcctctggaccggggcaaccgacccgctcggcggcatcaaccagctgttcccgctgttcgggatggccaaccagatgcttgccgccatcgcattggcggtcgtcaccaccctgttcgtcaagagtgggcgagcgcggtgggcctgggtgcccggcgtcccgctcggctgggatgtcgccgtcaccttcaccgcggcctggcagaaggttttctcggacgatcccaagctcggcttcctcgcccaacggcaccgctatgccgacgcgctcgacgacggcagggttctggcgcccgcgaggagtatcagcgacatgcacaaagtcgtccagaactcgaccgtggacgggatcatagcgatagtgttcgctctgctagtgctcgtcgtgctcgccgatgcggtacgggtgtgcatacgggctgtccgcacccgggcgccgataaccaccaccgaagcggactatgtagcctcccgttttgtcgcgtccgggggattgttggcgatcgctgaagagcgccaactgctcgcggatgcggtccaggcggccggggcccctcagcccgagcccgtcacaccgccgctgcgccgctgcgccgctgacaacattccgcgaaaatag

SEQ ID NO: 36677 - protein, 756 aa, Frankia sp. CcI3
MTTHLDTAGTGLPPGGGRAPGHGRRTGRLRSIAIWTTVSAVGAISWAVLAMSRHESISAAWILLAGLGSFAIAYRFYARFIANRVLRVDDSRATPAERLDNGVDYEPTDRRVLFGHHFAAIAGAGPLVGPVLAVQMGYLPGTIWIIAGVIFAGAVQDMVTLFFSMRRDGKSLGQMARDEIGPVGGTAALVAVFAIMIILLAVLALVVVNALAASAWGTFSIAMTIPIALFMGIYLRVLRPGRVAEATAVGVAGLFAALVGGRWIQDSALASAFTLSPKALVACLVGYGFVASVLPVWLLLAPRDYLSTFMKVGTIGLLAIGVLVEFPVLQADAVSTFATRGNGPVFAGSLFPFVFITIACGALSGFHSLIASGTTPKMIQKESQVRFIGYGAMLTESLVALMALIAAAVLSPGLYYAMNAPGGVVGKTAASAASAVTDLGFTITPDALDSAARAVGESTLVARTGGAPTLAVGMSNILSGAFGGGRLAAFWYHFAIMFEALFILTTVDAGTRVGRFMLQDMLGNVWKPIGRVSWWPGVWLSSVLVVGTWGYFLWTGATDPLGGINQLFPLFGMANQMLAAIALAVVTTLFVKSGRARWAWVPGVPLGWDVAVTFTAAWQKVFSDDPKLGFLAQRHRYADALDDGRVLAPARSISDMHKVVQNSTVDGIIAIVFALLVLVVLADAVRVCIRAVRTRAPITTTEADYVASRFVASGGLLAIAEERQLLADAVQAAGAPQPEPVTPPLRRCAADNIPRK

SEQ ID NO: 36678 - DNA, 2070 bp, Methylobacillus flagellatus KT
  CDS (1)..(2070): transl_table=11
atgaataaaatcttgcaatacttgatctggctacttgtcgccgtcgtcggggcttctgcggtgggtggcattgccctgcaccgcggcgaaagcatcaatgccttgtggtttgtggcggcggcggtctgtgtgttcgcgcttgcctatcgtttctatgcggcctggattgccgcccgtgtcctgatggtggatgccacccgggcgaccccggcggagcgtctggacaatggccgagactacgtcccgaccaacaaatgggtggtattcggtcatcatttcgccgcgattgcaggtccggggccgctggtggggccgacgctggcggcgcagttcggttacctgccgggcaccttgtggatattggtgggtgccgtgctgggtggtgcggtgcaggacatggtgaccctattcctgtcaacacggcgcaatggccgcagcctgggtcagatggcgcgagacgagctggggccggttggtggctttgccgccttggtgggaacgttcaccatcatggtgatcctgattgcggtgctcggactggtggtagtcaacgccatgaagcatagtccctgggcgacatcgaccgtggcggccacgataccgattgccatgatcgtcggcctctatatgcgtcatttgcggccaggccgtgtgctggaagcctcggtactcggggtggtgttgctgctgctctcggtcttcggtggcggatacatcgatcatcatccctacttgggcagcctgttcaatcatgacgggctcacgcttgcctggtgggtcatcgcttatggctttgccgccgctatcctgccggtttggttattgctggcgccgcgcgattatctttcgaccttcatgaagctgggcaccattttcctgctggctgtcgcgatcatcctgctgcagcccgaggtcaagatgccggcgttgacccagttcattgacggcaccgggccgattttcggcggggccttgtttccgttcgtcttcatcactattgcctgcggcgcggtatccggctttcatgccttgatcgcttcgggcacgacgcccaagctgattgccaatgaaggggatatccgcctcattggctatggtgccatgctgctggagtcctttgtcgccatcatggcaatgattgccgctacggtgctcgatccgggtgtgtttttcgcgatcaacagcccggccggcttggtgggcaaggaggccgcagatgcggtggcggtaatttccagctgggggttcccggtcacagtggcgcagatggaaaccctcgcgcgccagatgggcgaggctaccttgtttgcgcgaaccggtggtgcgccctctcttgctgtgggtatggcgagtattttcggcagcgcattcggcgagcacttgctggcattgtggtaccacttcgccatcatgttcgaggcaatcttcatcctcacgacgctggatgccggcacccgcgtgggacggttcatgctgcaggacatgctgggaaatgtctggcccaggatcggccggacctcgtggtatccctcagtgctgctgaccagcgcgattgtagtggccggctggggctatttcctttacatcggtgtcatcgacccgaacggcggagtgaatatcctctggccgttgttcggcatttctaaccagatgctggcggcgattgcgttatcggcagggacaggcattctcatcaagtccggcagactcaagtatgcctgggtgactggcttgccgctgagctggctggtggtggtgacgacgacggccgcctgggaaaagatcaccagtacggacgtccgcgttggcttcattgccgctgccaatgatatgtcggcaaagcttgcggcgggggtgctgcctcccgagaaggccgccgtggcgccgcagttgatattcaatcagcagctcgatgccgtgttgaccttgttcttcgtggcggtgctatggatcgtgatcatcgatatgctacgcgtgagttgccgcagcctcagcggcaagtccgtgcgcccttccgctgaggcggcttatgtcgaaaccaagctcggtgcagcctgggggcgggattga

SEQ ID NO: 36679 - protein, 689 aa, Methylobacillus flagellatus KT
MNKILQYLIWLLVAVVGASAVGGIALHRGESINALWFVAAAVCVFALAYRFYAAWIAARVLMVDATRATPAERLDNGRDYVPTNKWVVFGHHFAAIAGPGPLVGPTLAAQFGYLPGTLWILVGAVLGGAVQDMVTLFLSTRRNGRSLGQMARDELGPVGGFAALVGTFTIMVILIAVLGLVVVNAMKHSPWATSTVAATIPIAMIVGLYMRHLRPGRVLEASVLGVVLLLLSVFGGGYIDHHPYLGSLFNHDGLTLAWWVIAYGFAAAILPVWLLLAPRDYLSTFMKLGTIFLLAVAIILLQPEVKMPALTQFIDGTGPIFGGALFPFVFITIACGAVSGFHALIASGTTPKLIANEGDIRLIGYGAMLLESFVAIMAMIAATVLDPGVFFAINSPAGLVGKEAADAVAVISSWGFPVTVAQMETLARQMGEATLFARTGGAPSLAVGMASIFGSAFGEHLLALWYHFAIMFEAIFILTTLDAGTRVGRFMLQDMLGNVWPRIGRTSWYPSVLLTSAIVVAGWGYFLYIGVIDPNGGVNILWPLFGISNQMLAAIALSAGTGILIKSGRLKYAWVTGLPLSWLVVVTTTAAWEKITSTDVRVGFIAAANDMSAKLAAGVLPPEKAAVAPQLIFNQQLDAVLTLFFVAVLWIVIIDMLRVSCRSLSGKSVRPSAEAAYVETKLGAAWGRD

SEQ ID NO: 36680 - DNA, 1821 bp, Moorella thermoacetica ATCC 39073
  CDS (1)..(1821): transl_table=11
atgaatgcactggtactgttaattatagcggcgctggtatttgtcctggcctaccgcttttacggcgcctttatggccgccaaggtcctggccctggacccggggcaccagaccccggccctgatccataacgacggccgggactatgtgccgaccaaccgctggttggttttcggccatcactttgcagccatagccggcgccggacccctcatcggcccggtcctggcggcccagttcggctacctgcccgggttcctgtggatcctcatcggcgccgtggtcgccggcgccgtccatgatatggtgatcctcttcgcttccgtgcgccatgacggccagtcgctggcggaaatagcgcgcagcgaagtgagcaacttttcctactggatggcttcaatcgcccttttgtttcttttaattgtcgtcctggccggcaccagtgtctcggtagtcaatgccctctatcagagcccctgggggacttttaccgtaggcgtgactatccctatcgccatttttatcggtgcttatctgaaatggctgcgccccggccgtatcggggaggctactgttatcggcgtagccctgattgtcgccggcgtcgtcctgggaccggtcatccagcattcgtccctggcttccttactaacctttgataaacaacagctctccctgctcatcgccgcctacggttttctggcggcggtgctgccggtatggctcctgctggtacccagggactacctgagcacttatatgaaaatcggcaccatgttattgctggccgttggcgtcattgccgtcaaccccgtcctgcagatgccttcggtgactaaatttgtggccggcggcggcccggtcattccgggcaaagtttggccctttatgtttatcaccatcgcctgcggggccctctccggtttccacgccatggtctccagcggcactacgccgaaaatgatcaccagtgaggctgacatcaaggttgtcggttacggggccatgctggtggaaggctttgtggccctcatggccctgatcgcggctaccgtcctggccccggcagactactttgccattaacagcgccccggaggtctttgccaaactgggtatgcatgtccaggacctgcccgtgctttcccagctggtgggagaaaacctggccggcaggccgggcggcgctgtatccctggcggcgggcatggcccacattttctccagcatcggcggtttaaggcacctgatgggttactggtaccatttcgccattatgtttgaagccctgttcattctgacgttgattgacgccggtacccgggtcgggcgctacctgctgcaggaaattggtggggtaatctacaaacctttgaaagacaccaattggtggccgggtattatcctcaccagtggtatctttactctagcctggggttatctcctttacggaggtaccatatccaccatctggccccttttcggggtaaacaaccagctcctgggaagcatggccctggccatcggcaccaccatgctcatcaggatgggcaaggtccgctacgcctggacgacctttatccctatggtctttttgacggtaactactataaccgcaggttatcaaaatatctttataaactatctaccggcccataattacctgctggcagtaatttccatcattatgcttctgatggtcatcgctatcattatcgactctgtaagggtgtggttccagctcctctccgggagcaaaacggaactggaaaagggccgggctgcttcattaaacgaaaccggttcggcccacacttattaa

SEQ ID NO: 36681 - protein, 606 aa, Moorella thermoacetica ATCC 39073
MNALVLLIIAALVFVLAYRFYGAFMAAKVLALDPGHQTPALIHNDGRDYVPTNRWLVFGHHFAAIAGAGPLIGPVLAAQFGYLPGFLWILIGAVVAGAVHDMVILFASVRHDGQSLAEIARSEVSNFSYWMASIALLFLLIVVLAGTSVSVVNALYQSPWGTFTVGVTIPIAIFIGAYLKWLRPGRIGEATVIGVALIVAGVVLGPVIQHSSLASLLTFDKQQLSLLIAAYGFLAAVLPVWLLLVPRDYLSTYMKIGTMLLLAVGVIAVNPVLQMPSVTKFVAGGGPVIPGKVWPFMFITIACGALSGFHAMVSSGTTPKMITSEADIKVVGYGAMLVEGFVALMALIAATVLAPADYFAINSAPEVFAKLGMHVQDLPVLSQLVGENLAGRPGGAVSLAAGMAHIFSSIGGLRHLMGYWYHFAIMFEALFILTLIDAGTRVGRYLLQEIGGVIYKPLKDTNWWPGIILTSGIFTLAWGYLLYGGTISTIWPLFGVNNQLLGSMALAIGTTMLIRMGKVRYAWTTFIPMVFLTVTTITAGYQNIFINYLPAHNYLLAVISIIMLLMVIAIIIDSVRVWFQLLSGSKTELEKGRAASLNETGSAHTY

SEQ ID NO: 36682 - DNA, 1473 bp, Shewanella baltica OS155
  CDS (1)..(1473): transl_table=11
atgttaattttctttatttgtatcgcactcttagtgcttgcgtacaagttctatagcccctttgtggaacgtcaagcgggtatagatcctaaagccaagacgccgcaggcgagattcgaagatggcgtcgattatgttccggttcatccggctaaagcgtttctgatccaattcctcaatgtcgcaggtgtgggaccgatatttggcccgatcctcggtgccttgtacggtcccattgccttagtgtggattgtgttggggaacattattggcggtgcggtgcacgattatttttctggcgtgctcagcattaaagaagacggtaagagtttgcctgagatcgctggccactactttaatatctactttaaaggcgtgatgttgctgtttaccgccatgctactgttttttgtgggcgtggtctttatcatgagcccagcaggtttgctgagtaatctcgattatttcaaagacaccatctttggcaataacaccttctgggtgttagtgattttagcctattactttttggcgactatgctgccgatcgataaaattatcactaaactgtatcccgcatttggtttgttgatgatagtgatgacggtttctatcgcagttgccctgatgctcaatgcgccgcagttacctgaaatgggtgatgtgtttgcttattttgatcacagccattacaacaacgagttacttgagccaaatccagacggcttacctgtatggccactgttgtttgtgactattacctgtggtgcgatcagtggtttccattcgacccaagcgcctatcatggcccgttgtttgaccaacgagaagtatgtgcgtcccgtgtactatggcgctatggttgctgaaggtattgttgcttgtgtatgggcaacggccggtattgcggctttccctggtggttatgttgagcttaagagtctgctcgaccaaggtggcccaggtttagtggttaaccaagtggcgacgacttatctcggtgtggtgggcggcattatggcgattgtggccgtggctatcttcccgatcacctctggtgataccgcgttccgttcgctgcgactgacgattatcgacgccttccatattccgcaaagtatgcgtaatcgtttacttgtcgcggtacctatcctcacgattgcgtactttatgacgaagatcgatttctccttgatttggcgctactttgccttctcaaatatgctgctatcaaccagtgtattgtggttagcgactaagtatttgttcgatcgcgggaccttccattggattgtcagcctgccagccattggcggcaccagcgtcacggtttcttacattatgactgcgggtattggtctgggtttaccacaacctttgagccagcctgtgggtatcgcagtcggggttatctgtttagttgcgctgatcattgcgcacaaccgccgcaaacctgtggcagacgtgaaatag

SEQ ID NO: 36683 - protein, 490 aa, Shewanella baltica OS155
MLIFFICIALLVLAYKFYSPFVERQAGIDPKAKTPQARFEDGVDYVPVHPAKAFLIQFLNVAGVGPIFGPILGALYGPIALVWIVLGNIIGGAVHDYFSGVLSIKEDGKSLPEIAGHYFNIYFKGVMLLFTAMLLFFVGVVFIMSPAGLLSNLDYFKDTIFGNNTFWVLVILAYYFLATMLPIDKIITKLYPAFGLLMIVMTVSIAVALMLNAPQLPEMGDVFAYFDHSHYNNELLEPNPDGLPVWPLLFVTITCGAISGFHSTQAPIMARCLTNEKYVRPVYYGAMVAEGIVACVWATAGIAAFPGGYVELKSLLDQGGPGLVVNQVATTYLGVVGGIMAIVAVAIFPITSGDTAFRSLRLTIIDAFHIPQSMRNRLLVAVPILTIAYFMTKIDFSLIWRYFAFSNMLLSTSVLWLATKYLFDRGTFHWIVSLPAIGGTSVTVSYIMTAGIGLGLPQPLSQPVGIAVGVICLVALIIAHNRRKPVADVK

SEQ ID NO: 36684 - DNA, 1434 bp, Shewanella amazonensis SB2B
  CDS (1)..(1434): transl_table=11
atgacttggtttttactctgtgtcggcctgcttctcgtcggctactttgtttacggcgccttcgtcgagaaggtattcggaattaacgccaaacggcaaaccccggcgtttgcccaaaccgatggcgtggactatgtgcccatgtccaaaggcaaggtctatctgatccaactgctgaatatcgccggtgtcggccccatcttcggcccgatcctcggtgccctatacggcccagccgccatgttgtggattgtgattggctgtatttttgccggtgcggtacacgactacttctccggtatgctgtcggtgcgaaacggtggccagtctgtgcccaaccttgccggtaaatacctgggtaaaagtgctaaacactttatgaacgtgtttgccaccattctgctgctgctcgtgggtgtggtatttatttccgctccagcgggcctgcttggaaaactcactggccttagcgtcagcctgtttgtgggcatcattttcgtttactacctgattgcgaccattgtgccggtagacaaaatcatcggtcgtctgtaccccttcttcggcgccctgttgctgtttatgtctgtgggtctgactgtggcactcatcgtctcttctgagcacagcttgctgcccggtgttgaagcctctgatttcctcaccaacctcaaccccaatgacatgccactgtggcctgctctctttatcaccatcgcctgcggcgccgtatctggcttccacgccactcagtctcccctgatggcacgctgcatggaaaacgaaaccaatggccgctttgtgttttacggcgccatgattggtgaaggcatcatcgcccttatttggtgtgccattgccctgtcgttcttcggaggtgttgaaggcctggcaaccggtatggccggtaaccctgccaacgtggtgtacgaagcgtctaccggcctgctgggtgcagtgggtggctttatggcggtgcttggagtgattattctgcccattacctctggtgatactgcattccgttcagcgcgtcttatcctggctgaattcttcaacatgccacaaacccaactgcctaagcgattgatgctggccatcccgctgttcgtgctgggcggcatactgactcaggtcgatttcggtgtgatctggcgttacttcggtgtggctaaccaggcaacagccgtgctgatgctgtggactgcctcagcctatctgctgcgccacaacaagctgcactggatttgcaccattccggccatgttcatgacctcagtggtagtgaccttcctgctgaactccgcaaccctgggtgcaggcctgccaatgaccatctccacggtcgtgggtgtgctggtcgccttcgcagtggctacgctgctggtgattaaaatcaagggtaaatcggtggaactggctgaagaagcctaa

SEQ ID NO: 36685 - protein, 477 aa, Shewanella amazonensis SB2B
MTWFLLCVGLLLVGYFVYGAFVEKVFGINAKRQTPAFAQTDGVDYVPMSKGKVYLIQLLNIAGVGPIFGPILGALYGPAAMLWIVIGCIFAGAVHDYFSGMLSVRNGGQSVPNLAGKYLGKSAKHFMNVFATILLLLVGVVFISAPAGLLGKLTGLSVSLFVGIIFVYYLIATIVPVDKIIGRLYPFFGALLLFMSVGLTVALIVSSEHSLLPGVEASDFLTNLNPNDMPLWPALFITIACGAVSGFHATQSPLMARCMENETNGRFVFYGAMIGEGIIALIWCAIALSFFGGVEGLATGMAGNPANVVYEASTGLLGAVGGFMAVLGVIILPITSGDTAFRSARLILAEFFNMPQTQLPKRLMLAIPLFVLGGILTQVDFGVIWRYFGVANQATAVLMLWTASAYLLRHNKLHWICTIPAMFMTSVVVTFLLNSATLGAGLPMTISTVVGVLVAFAVATLLVIKIKGKSVELAEEA

SEQ ID NO: 36686 - DNA, 2076 bp, Ralstonia metallidurans CH34
  CDS (1)..(2076): transl_table=11
atgaatcgcatcggacaacacctgttgtggctggccgtcgccgtgctcggcgccttcgccttcgccactgtcgcgctgtcgcgcggcgaggccgtcagtgccctgtggatcgtggttgccgcgctctgcatctacctgatcgcctaccgctactacagccgcttcatcgccgacaaggtgatgcagctcgaccccaatcgcatgacgcccgcctggcgccacaacgatggcctggactacgtgccgaccaacaaggcggtgctgttcggccaccatttcgccgccatcgccggcgccgggccgctggtgggccccgtgctggccgcgcaaatgggctatatgccgggcatgttgtggattctggccggcgtggtattcgccggtgcggtgcaggatttcatgatcctgttcatctcaacgcgccgcgacggccgttcgctgggcgacctggtcaagtccgagatgggcaccgtgccgggcatgatcgccctgttcggctgcttcatgatcatgatcatcatcctggccgtgctggcgctgatcgtggtgaaggcactggccggctcgccgtggggcaccttcaccgtggcggtgacgattcccatcgcgctgttcatgggcatctacacgcgctacatccgtcccggccgcatcggcgaagtgtcggtcatcggcttcgtgctgctgatgctcgccatcatcggcggccagtacgtacatgaaagcgccgtgctggcaccgctgttcacgtacgacggcaaggccctgacatggatgctgatcatctacggcttcatcgccgccgtgctgccggtgtggctgctgctggccccgcgtgactacctgtcgaccttcctgaagatcggcacgatcatcgcactggccatcggcatcctgatcgtcgcgccggaactgaagatgccggcgttcacgcagttcgcccaaggtggcggcccggtgtggtcgggcaacctgttcccgttcctcttcatcacgatcgcctgcggcgccgtttcgggcttccacgcgctgatctcgtcgggcaccacgccgaagctgctggaaaatgaatcgcacgcgcgcttcattggctacggcgcgatgctggccgagtcgttcgtcgccatcatggcgctggtggccgcctcggtgatcgagccgggcgtgtacttcgcgatgaacagcccggcggccgtgatcggcaacacgccggaagccgtggcgcacgtggtctccacctggggcttcgtgatcacgccggacgtgctgatccagaccgccaaggacgtgggcgagaacacgatcatctcgcgcgccggtggcgcaccgacgctggccgtcggcatcgcccacatcctgcatcaggtggtgggtggccaggccatgatggccttctggtaccacttcgcgatcctgttcgaggcgctgttcatcctgaccgccgtggacgcgggcacccgtgccggccgcttcatgctgcaggatctgctgggcagcttcgtgccgtccctgcagcgtaccgactcgctgccggccaacctgatcgccaccgcgctgacagtggcggcctggggctacttcctgtaccagggcgtggtcgatccgctgggcggcatcaacacgctgtggccgctgttcggtatctccaaccagatgctggcagccgtggcgctggtgctgggcacctgcgtgctggtcaagatgaagcgcgggcagtacgcctgggtaacgctgctgccgacctgctggctgctgatctgcacgctgaccgccggctggcagaagctgttcgacgccgatccgaaggtcagcttcctgacccacgcatcgaagttcagcgccgcgatcgccgaaggcaaggtactggctccggccaagacgatggagcagatgcaccgcatcgtcttcaacgactacctggatgccggcctgtgcgcgctgttcatgttcgtggtgctgtcgatcgtgttctatgggttcaagaccgcgatgtcggcccgcgccatctcgaagcgcacggaccgcgaaacgccgttcgagccgatgcctgcccaggcttcggcggcgtcgcactga

SEQ ID NO: 36687 - protein, 691 aa, Ralstonia metallidurans CH34
MNRIGQHLLWLAVAVLGAFAFATVALSRGEAVSALWIVVAALCIYLIAYRYYSRFIADKVMQLDPNRMTPAWRHNDGLDYVPTNKAVLFGHHFAAIAGAGPLVGPVLAAQMGYMPGMLWILAGVVFAGAVQDFMILFISTRRDGRSLGDLVKSEMGTVPGMIALFGCFMIMIIILAVLALIVVKALAGSPWGTFTVAVTIPIALFMGIYTRYIRPGRIGEVSVIGFVLLMLAIIGGQYVHESAVLAPLFTYDGKALTWMLIIYGFIAAVLPVWLLLAPRDYLSTFLKIGTIIALAIGILIVAPELKMPAFTQFAQGGGPVWSGNLFPFLFITIACGAVSGFHALISSGTTPKLLENESHARFIGYGAMLAESFVAIMALVAASVIEPGVYFAMNSPAAVIGNTPEAVAHVVSTWGFVITPDVLIQTAKDVGENTIISRAGGAPTLAVGIAHILHQVVGGQAMMAFWYHFAILFEALFILTAVDAGTRAGRFMLQDLLGSFVPSLQRTDSLPANLIATALTVAAWGYFLYQGVVDPLGGINTLWPLFGISNQMLAAVALVLGTCVLVKMKRGQYAWVTLLPTCWLLICTLTAGWQKLFDADPKVSFLTHASKFSAAIAEGKVLAPAKTMEQMHRIVFNDYLDAGLCALFMFVVLSIVFYGFKTAMSARAISKRTDRETPFEPMPAQASAASH

SEQ ID NO: 36688 - DNA, 2124 bp, Rubrobacter xylanophilus DSM 9941
  CDS (1)..(2124): transl_table=11
atgggtagccggctcaagcgctacggcatctgggtgctcgtggccgtcgtgggtgcggtgtgctggggtgttctggcgctcgcccgcggggagaccatcaacgccgggtggctgctgttcgcggccatagcatcctatgcgatagcctaccggttctacgccaggttcatccagacccgggtgctcgagaccgacgacagccgggccacgcccgccgagcggctcgagaacgggcgggacttcgtcccgatggaccgcaggatactcttcgggcaccacttcgccgccatagccggggcgggcccgctcgtcgggcccgtgctggcggcgcagatgggcttcctgccggggaccatctggatcatcttcggcgtcatcctcgccggcgcggtccaggacatgaccaccctcttcttctccatgcgccgggacgggaagaccctcggccagatggcgcgggaggagatcgggcccgtcggcggggcggcggcgctcatcgccgtcatgtccatcatggtcatcctgctggcggtgctggcgctggtggtcgtcaacgccctgaccgcctccccgtggggctccttctcgctgctgatgaccgtgcccatagcgatctttatgggcttctacctgcggttcttgcggcccgggcgggtcatcgaggtgtcgctcatagggtttgcgctgctcatcctcgcgatagtggggggcggttggatctcggagtccggctacgccgaggcctggacgttcgagggcaccacgataacctgggccctcataatctacggctttgtggcctccgtgctgccggtgtgggtgctgctcgccccgcgcgactacctctccaccttcatgaagatcgggaccgtgctgctgctggcggtcggcatcgcgctcaccctgccggcgatgcagatgccccgcaccacccagttcgccttcaacggcgaggggccggtcttctccgggccgctgttcccgttcgtgttcatcatcgtggcctgcggggcgctctccggcttccactccctcatcgccagcggaaccaccccgaagctgatcgccaaggagtcgcaggtgcggatgatcggctacggggcgatgctcatggagtccttcgtggcggtgatggcgatgatcgccgcctgcatcctggaccccggcgtgtacttcgcgatgaacgccccggcgggggtgctcggcgagaccgcccggtcggcggccgaggcggtgcggggcttcgggttcaccgtcaccccggagaccctcaaccagatcgcccagaacgtcggtgaggagtcgatcatcgcccgcaccggcggcgccccgacgctggcggttgggatgagccagatcctctcctccctcctcggcggcacgacgctgcaggcgttctggtaccacttcgccatcatgttcgaggcgctgttcatcctcaccacggtggacgccgggacgcgggtgggccgcttcatgctgcaggacatgatcggcaacgtatggcggcccttcgcccgcacctcctggctgccggccaacatcgtggcgagcgccctcatcgtggcggcctggggttacttcctctacgccggcgtcaccgacccgctgggcggcatcaaccagctcttcccgctcttcgggatcgcgaaccagctcctggcggcggtcgcgctcaccgtcgggaccaccatcctgataaagatgggcaagctgaagtgggcctgggtgacggccctgccgctggcctgggacgcctcggtgaccctgacggcgagctggtacaagatcttctcccccgatccctccatcggcttcttcgcccagcgggcggccttccaggaggcgctcgccaacggcgaggtcgtcgcccccgcccagtcgctggaggacatgcggcaggtggtgctgaactcgacggtggacgggatactctccatcctgttcgccctgatgatcatcatcgtcatcctggacgccgccagggtgtgggtcggcgtgatcacgggccgcaagccggccgagaccaccgaggccccctacgagcgttcgcggctggaccacgaggggaagcccctggagcccgagccggtgggcgcgggcggctctccgtcctcctcatag

SEQ ID NO: 36689 - protein, 707 aa, Rubrobacter xylanophilus DSM 9941
MGSRLKRYGIWVLVAVVGAVCWGVLALARGETINAGWLLFAAIASYAIAYRFYARFIQTRVLETDDSRATPAERLENGRDFVPMDRRILFGHHFAAIAGAGPLVGPVLAAQMGFLPGTIWIIFGVILAGAVQDMTTLFFSMRRDGKTLGQMAREEIGPVGGAAALIAVMSIMVILLAVLALVVVNALTASPWGSFSLLMTVPIAIFMGFYLRFLRPGRVIEVSLIGFALLILAIVGGGWISESGYAEAWTFEGTTITWALIIYGFVASVLPVWVLLAPRDYLSTFMKIGTVLLLAVGIALTLPAMQMPRTTQFAFNGEGPVFSGPLFPFVFIIVACGALSGFHSLIASGTTPKLIAKESQVRMIGYGAMLMESFVAVMAMIAACILDPGVYFAMNAPAGVLGETARSAAEAVRGFGFTVTPETLNQIAQNVGEESIIARTGGAPTLAVGMSQILSSLLGGTTLQAFWYHFAIMFEALFILTTVDAGTRVGRFMLQDMIGNVWRPFARTSWLPANIVASALIVAAWGYFLYAGVTDPLGGINQLFPLFGIANQLLAAVALTVGTTILIKMGKLKWAWVTALPLAWDASVTLTASWYKIFSPDPSIGFFAQRAAFQEALANGEVVAPAQSLEDMRQVVLNSTVDGILSILFALMIIIVILDAARVWVGVITGRKPAETTEAPYERSRLDHEGKPLEPEPVGAGGSPSSS

SEQ ID NO: 36690 - DNA, 2229 bp, Kineococcus radiotolerans SRS30216
  CDS (1)..(2229): transl_table=11
gtgggtcgcgggcgcggcgcagcgcccgcagcgacccgcgaggaggcggccgtgagccgggtgcagaccgaccccaccgatcccaccgacaccgtccggcggcggccctcgccgcggtcggtggccgtctggagcgcggtggccctcgtcggggcggtcgcctggaccgtcctcgccctggcccggggggagtcggtcaacgcgctgtggatcctcttcgccgcgctcgcctcctacgccatcggctaccgcttctactcccggttcatcacctaccgcgtgctgcgcgccgacgaccggcgcgcgacccccgcggagcggtacgagaacggcgtcgacttcgaggtcaccgaccggcgggtgctcttcgggcaccacttcgccgcgatcgccggggcgggcccgctggtcgggccggtgctggccgcgcagatggggtacctgccggggacgatctggatcgtcgtcggggtcctgttcgccggggcggtgcaggacctcacggtgctgttcttctcgatgcgccgcggcggcaagagcctggggcagatggtgcgcgaggagatcggggtcgtcggcggcgtcgccgcgctcgtcgccgtgttcgccatcatgatcatcatcctggcggtgctggccctcatcgtcgtcaactccctcgccgagtccccctggggcgtgttctccatcgccctgacgatccccatcgccctgttcatgggcgtctacctgcgcttcctgcgcccgggccgggtgctggaggccaccgcgatcggcgtcgtcctgctgctggcggcgatcgtcgggggcggctacgtcgaggcgtggggcctcggcgacgccctgaccctcacccccgagaccctggtcgtcgccctcgtcggctacggcttcgtcgcctcggtgctgccggtctggctgctgctgaccccccgcgactacctgtccacgttcatgaagatcggcgtcatcgtcctgctcgcggtgagcctgctggtggcccggccggtgctcgccaacgacgcggtgacctccttcgcccgggaggggaacggccccgtgttcgcggggtcgctgttcccgttcgtcttcatcaccatcgcctgcggggcgctgtccggcttccacgccctcatctcctcggggaccaccccgaagatggtcgccaaggagcgccaggtccgcctcatcggctacggcgggatgctcgtggagagcttcgtcgccatcagcgcgctcatcgcggcctcggtcatcgaccagggcatctactacgcggtgaactccccggccggggccaccggtggcacccccgccaccgccgcgcagttcgtcaccggcctgggcttcacgacctccccggaggcgatcgaggccgcggcccgggcggtgggggaggagagcgtcgtctcccgcaccgggggcgcgcccgcgctggcgctggggatctcccaggtgttccaccaggcgttcggcggggggttgcaggcgttctggtaccacttcgcgatcatgttcgaggcgctgttcatcctcaccgccgtggacgcgggcacccgggtcgggcggttcatgctgcaggacaccctcggcaacgtctggaagaagatgggcgacctgtcctggcggcccggcaacgtcatcgccagcgccgtcgtcgtcggcgcctggggctacttcctccataccggcgtcaccgaccccctgggcgggatcaaccagctgttcccgctgttcggcatcgccaaccagctcctcgcggcgatcgcgctgaccctcgtcaccacgctgctggtcaagcacggccgcgcccgctacgcctgggtcaccggggtgccgctggtgtgggacctcgtcgtgacgatgaccgccagcgcccagaaggtgttctccgacgacccgaagatcggcttcttcgcccagcgcgagcgctacgccgacgcgctggccgccggcgaggtcctggccccggccaaggacgcggggcagatgcagcaggtcgtcacgaactccacggtcaacggggtgctgcaggcgctgttcgccctcctggtcgtcgtgatcgccgtcaacgcggccgtcgtggtggtccgcgccctgcgcgcgggcgggctggcgacgacggaggaaccggccgtgccctcccgcctggtcgaaccctccgggctggtcgtcacggccgaggagcgccaccgcctcgccgcgctgcgcgaggagctgaccccgtga

SEQ ID NO: 36691 - protein, 742 aa, Kineococcus radiotolerans SRS30216
MGRGRGAAPAATREEAAVSRVQTDPTDPTDTVRRRPSPRSVAVWSAVALVGAVAWTVLALARGESVNALWILFAALASYAIGYRFYSRFITYRVLRADDRRATPAERYENGVDFEVTDRRVLFGHHFAAIAGAGPLVGPVLAAQMGYLPGTIWIVVGVLFAGAVQDLTVLFFSMRRGGKSLGQMVREEIGVVGGVAALVAVFAIMIIILAVLALIVVNSLAESPWGVFSIALTIPIALFMGVYLRFLRPGRVLEATAIGVVLLLAAIVGGGYVEAWGLGDALTLTPETLVVALVGYGFVASVLPVWLLLTPRDYLSTFMKIGVIVLLAVSLLVARPVLANDAVTSFAREGNGPVFAGSLFPFVFITIACGALSGFHALISSGTTPKMVAKERQVRLIGYGGMLVESFVAISALIAASVIDQGIYYAVNSPAGATGGTPATAAQFVTGLGFTTSPEAIEAAARAVGEESVVSRTGGAPALALGISQVFHQAFGGGLQAFWYHFAIMFEALFILTAVDAGTRVGRFMLQDTLGNVWKKMGDLSWRPGNVIASAVVVGAWGYFLHTGVTDPLGGINQLFPLFGIANQLLAAIALTLVTTLLVKHGRARYAWVTGVPLVWDLVVTMTASAQKVFSDDPKIGFFAQRERYADALAAGEVLAPAKDAGQMQQVVTNSTVNGVLQALFALLVVVIAVNAAVVVVRALRAGGLATTEEPAVPSRLVEPSGLVVTAEERHRLAALREELTP

SEQ ID NO: 36692 - DNA, 1473 bp, Shewanella denitrificans OS-217
  CDS (1)..(1473): transl_table=11
atgttgatttttttgatttgtattggcctgctattactcgcctataagttttacagcccctttgtcgagcgtcaagcgggcatagaccccaaggctcaaacgcctcaggcacggtttgatgatggggtggattatgtcaaagtgcatccccttaaagcttaccttattcaatttcttaatgtggctggggtcgggcctattttcggcccgattttaggcgcactttatgggcctatcgccttagtctggattgtgctgggtaatatcatcggcggcgcagtgcatgattatttctcgggtgtgttgagcattaaggaagatggcaagagcctgcctgaaatcgccggtcattactttaatggctactttaaagccgtcatgctgctgttcaccgccatgctgctgttcttcgtcggggtggtgtttatcatgagcccggcgggattactcagtaatctagcactgtttgaaggcacaatactggccaataacaccttttgggtgttggttattttagcctattactttttggcgaccttactgccgattgataaaattatcactaagttgtatcccgcttttggcctcttgatgatagtcatgacagtctctattgggctggcaattctttttaatgcaccagagttacctgtgatgggagatgtgctggcttactttgatcatagccattataacaatgagttgttggcgcctaatcccgatggcttgcctgtgtggcccttgttgtttgtgactatcacttgcggcgctatcagtgggtttcattccactcaagcgccgataatggcgcgctgtttaaccaatgagcgttatgtgcggcctgtatattacggcgctatgatttctgaaggtgtggtggcctgtgtttgggcgaccgcgggcatggcggcatttcccggtggttatcttgagctcaaaactttgcttgatcaaggcggcccaggtttagtggttaaccaagtggccagcagttatttaggggttgctggcggcgtgatggccattattgccgtggccgtgttccctattacgtcgggcgataccgcctttagatcgctgcgcctcaccctgatagatgcctttaatattccccagagtgtgcgtaatcgtttgctggtggcgattcccattttggttatcgcttacttaatgacaaaaatcgatttctccttgatttggcgctattttgccttttctaacatgctgttatccactagcgtcctgtggcttgccactaaatatttatttgatcgaggtgccttccattggatagtgagcttgccggctattatgggcaccagcgtgactgtctcttacatagtcaccgccggcataggcctaggtttaccgcaatcattgagccagcctgtggggatagctgtggctgtgattggtttgatggccttaacactcactcatgttaagcataagcgtcaacggcaagtgctttag

SEQ ID NO: 36693 - protein, 490 aa, Shewanella denitrificans OS-217
MLIFLICIGLLLLAYKFYSPFVERQAGIDPKAQTPQARFDDGVDYVKVHPLKAYLIQFLNVAGVGPIFGPILGALYGPIALVWIVLGNIIGGAVHDYFSGVLSIKEDGKSLPEIAGHYFNGYFKAVMLLFTAMLLFFVGVVFIMSPAGLLSNLALFEGTILANNTFWVLVILAYYFLATLLPIDKIITKLYPAFGLLMIVMTVSIGLAILFNAPELPVMGDVLAYFDHSHYNNELLAPNPDGLPVWPLLFVTITCGAISGFHSTQAPIMARCLTNERYVRPVYYGAMISEGVVACVWATAGMAAFPGGYLELKTLLDQGGPGLVVNQVASSYLGVAGGVMAIIAVAVFPITSGDTAFRSLRLTLIDAFNIPQSVRNRLLVAIPILVIAYLMTKIDFSLIWRYFAFSNMLLSTSVLWLATKYLFDRGAFHWIVSLPAIMGTSVTVSYIVTAGIGLGLPQSLSQPVGIAVAVIGLMALTLTHVKHKRQRQVL

SEQ ID NO: 36694 - DNA, 1470 bp, Shewanella frigidimarina NCIMB 400
  CDS (1)..(1470): transl_table=11
atgctgattttcctcatttgtatcgggctgctcgtgctcggattcaaattttacagtccgttcgttgagcgacaagctggtatcgaccctactgctaaaacccctcaagaacgatttactgatggcgttgactatgttcctgttcatccagttaaagctttcttaattcaatttcttaatatcgccggtgtcggaccgatattcgggccaattttaggtgcattatatggccctattgcactggtttggattgtgattggtaacgtacttggtggcgccgttcacgattacttctctggtgtgatgagtattaaagaagacggtaaaagtttacctgaaattgccggccattatttcaatgtgtactttaaaggtgccatgttgatatttaccgcgatgttgctcttcttcgttggtgttgtatttatcatgagcccagcagggctgctaagtaacttagattattttaaagacacctttttgagtaacaataccttttgggtattacttattttaggttactacttcctcgcgactttgttaccgatagataaaattattacaaaactgtatccattatttggtttactaatgattgtaatgacaacatcaattgctgttgcattgctaatccatgcgccgcaactacctactgttgacggtatctttgcttatttcgatcacagtcactacaacaatgatttattggagcctaatcctagtggtttaccagtatggccattgttgtttgtcactattacctgtggcgcaatcagcggattccattcaactcaagcaccgattatggcgcgttgtttaactaacgaaaaatacgttcgtcctgtgtactatggtgcaatggttgcggaaggtgttgtggcatgtgtgtgggctactgcaggtatcgcagctttccctggtggttatatcgaacttaagagtgttctcgatattggtggccctggtatggttgttaaccaagtggcgaccacttacttaggtgtcgcgggtggtattatggcaattatcgcggttgcggttttcccaattacctcaggtgacactgcgtttagagcattgcgattaaccattattgatgcgtttaaaattccgcaaagcgtcagaaaccgtttactggttgccattcctattctgattattgcttattttatgactaagattgatttcaccctaatctggcgttatttcgcattctcaaatatgttgttatcaactagcgtattgtggcttgcgactaagtatctgtttgatcgcggtaccttccattggattgtcagtattccagcgattattggtacttgtgtgacagtgtcgtacatcatgaccgcaggtataggttttggattgccgcaagcgctgagccagcccgtgggtattactgtaggtgtaatatgtcttattgcgctgattatcgcgcacaataaacgtaaagtgattactactcagtaa

SEQ ID NO: 36695 - protein, 489 aa, Shewanella frigidimarina NCIMB 400
MLIFLICIGLLVLGFKFYSPFVERQAGIDPTAKTPQERFTDGVDYVPVHPVKAFLIQFLNIAGVGPIFGPILGALYGPIALVWIVIGNVLGGAVHDYFSGVMSIKEDGKSLPEIAGHYFNVYFKGAMLIFTAMLLFFVGVVFIMSPAGLLSNLDYFKDTFLSNNTFWVLLILGYYFLATLLPIDKIITKLYPLFGLLMIVMTTSIAVALLIHAPQLPTVDGIFAYFDHSHYNNDLLEPNPSGLPVWPLLFVTITCGAISGFHSTQAPIMARCLTNEKYVRPVYYGAMVAEGVVACVWATAGIAAFPGGYIELKSVLDIGGPGMVVNQVATTYLGVAGGIMAIIAVAVFPITSGDTAFRALRLTIIDAFKIPQSVRNRLLVAIPILIIAYFMTKIDFTLIWRYFAFSNMLLSTSVLWLATKYLFDRGTFHWIVSIPAIIGTCVTVSYIMTAGIGFGLPQALSQPVGITVGVICLIALIIAHNKRKVITTQ

SEQ ID NO: 36696 - DNA, 1461 bp, Shewanella frigidimarina NCIMB 400
  CDS (1)..(1461): transl_table=11
atgacgtggtttttactctgtgtaggcctgctaattggtggctattttatttatggcgcttttgtcgaaaaagtgttcggcattaacactcaaagacaaacgcccgctttcactcaaacagacggtgtcgacttcgtaccgatgtctaaagggaaagtctatttaattcaattgttaaacattgctggtgtcggtccaatttttggcccaattctaggtgccctttatggcccagcggcgatgctatggattgtatttggttgtatttttgccggtgcagtgcacgattacttttcggggatgttatcggtacgcaataatggtcaatcagttcctaacttggccggtaaatacttaggtaacaacgccaagcactttatgaacttgtttgccattatcttattgttactagttggcgtagtgtttatctctgctcctgcaggattactaagcaaacttaccggactggatgtcactctctttgttggtatcatttttgtttattatttaattgctaccatcgtacctatcgacaagattattggtcgcttatacccattctttggcgcattactggtctttatgtcactcggactgattatagcgttagcattatcaaccgaacataccatgttacctggttttgaaatgggtgacttctttaccaacttaaaccctaatgacatgccattatggccagccttattcatcacgattgcatgtggtgcagtatcgggtttccatgcaactcaatcacctttaatggcgcgttgtgttgaaaatgaatcaaacggtcgctttgtgttttttggtgccatgattggtgaaggtgttattgcattaatttggtgtgcaattgcattatcattctttggtggtgtagaaggattgaatgccggaatggcaggcaacccagcaaacgttgtgtacgaagcatctaatgggctattaggaacatttggtggcttcttggctatcttaggtgtcattgtattgcctatcacctctggcgatacagcatttcgctcagcgcgattaatattggcagagttctttaacatcaagcaaatcgagttaccgaagcgtttaatgctcgcgttaccattatttgtcgtcggtgccgtgttaacccaagtagactttggcattatctggcgctactttggtgttgcaaaccaaaccacagcggtattgatgttatggaccgcttcagcttacttactacgacacaataaattccattggatttgtactgtaccggctatgttcatgacctgtgttgtgattagctttatgttgaactcatcaacattgggtgctggtttaccaatgacagtgtcaactattgcaggtttagtcactaccgcaatcattgcgacaatgattattattaagaccaaaggcaaaggcgatattgatactgacgaagaagacaaagttgaactagccaacgagttatag

SEQ ID NO: 36697 - protein, 486 aa, Shewanella frigidimarina NCIMB 400
MTWFLLCVGLLIGGYFIYGAFVEKVFGINTQRQTPAFTQTDGVDFVPMSKGKVYLIQLLNIAGVGPIFGPILGALYGPAAMLWIVFGCIFAGAVHDYFSGMLSVRNNGQSVPNLAGKYLGNNAKHFMNLFAIILLLLVGVVFISAPAGLLSKLTGLDVTLFVGIIFVYYLIATIVPIDKIIGRLYPFFGALLVFMSLGLIIALALSTEHTMLPGFEMGDFFTNLNPNDMPLWPALFITIACGAVSGFHATQSPLMARCVENESNGRFVFFGAMIGEGVIALIWCAIALSFFGGVEGLNAGMAGNPANVVYEASNGLLGTFGGFLAILGVIVLPITSGDTAFRSARLILAEFFNIKQIELPKRLMLALPLFVVGAVLTQVDFGIIWRYFGVANQTTAVLMLWTASAYLLRHNKFHWICTVPAMFMTCVVISFMLNSSTLGAGLPMTVSTIAGLVTTAIIATMIIIKTKGKGDIDTDEEDKVELANEL

SEQ ID NO: 36698 - DNA, 1680 bp, Psychrobacter cryohalolentis K5
  CDS (1)..(1680): transl_table=11
atgaatagtgcaatcgtgctattgtttgctgttgccgctatgctttgcggttatctgttttactcaaaatttatcgccactaaaatcttggcattggataatagtatccccacgccagcacatactatgaaggatggggtagattatattcccactaataaatatgtgttgtggggacaccattttacttcagtcgcaggggcagcaccgattattggtcctgccattgcggttatttggggctgggtacctgctatcatttgggtggtattaggtactatttttatggcaggtgtccacgacatgtctgccatttgggcaagtatgcgcaatcgaggtcaatcgattggctcgattgccggtacggtcatgggtacacgtgtgcgcagcttgatgatgatcgtcatctttttattattactaatggtaaatgcggtattcggcgtcgctattgctaatatgatgataaaaaccccatccgctgtactgccagtttggggtgctttgatagtcgcctttatcatcggtcaatgcatttatcgctataagatgaatctggtttgggtatcaatcattggggtcacggctttatatgggcttatctatcttggtcctatgttccccattgtgttacctgagacatttttaggcttacctgacaatgctgtttggattattattttatttgtctatgcggcaatcgcgtctttgttaccagtctggatgctgttgcagccgcgcgattacatcaatggcttgcagttatttgtcggtctgattttattatatgccgctatctttattgcgactcctaatattgtcgcgccagcgatcaacacagcattgccaatcggtacgccatctatgctgcctttattgtttgtgaccattgcttgtggtgcaatctcaggctttcatggtttggtagcgacaggtacgacgtctaagcaaattgataaagaagaagatgtgcgattcgttggttacttcggtgccatgggtgagggcatgctagcactcggtgcgatacttgcggcaacagcaggctttgcaacccttggcgactggcaagccgtttatcaaaaatttggcgacggctctattggtgcctttatcgatggcggtgcgactatcttgaatgcaggtgttggcattgatatggttttatcgcagacgatgctgacggtaatggcagcattgttcgctggtaccacgatggatactggagtacgtttgcaacgctatatcttccaagaatttggtgaaatttataaactgcctgttctaaataaaagtgtggtggccacattgcttgccgttggtagctgtttgttattagcattcggtgctggtggcatcgatggtgctggtggtatgattatttggccgttatttggcacgacgaatcagctcatggcagcattaaccttaatgattgtaaccgttattttattacgtaaaggcagaccagtatggtataccttagggccattgtcgttcttactggtcatgacggtttttgcattattgattcagctaaaaacctttttcaatgacggtaattggctgcttattattatggatatcattatcttgatagccacaattttagtgacgtttgagagtttatcagtactccgtaaagaatggtcgatacacagaggcaaaagcaacctctaa

SEQ ID NO: 36699 - protein, 559 aa, Psychrobacter cryohalolentis K5
MNSAIVLLFAVAAMLCGYLFYSKFIATKILALDNSIPTPAHTMKDGVDYIPTNKYVLWGHHFTSVAGAAPIIGPAIAVIWGWVPAIIWVVLGTIFMAGVHDMSAIWASMRNRGQSIGSIAGTVMGTRVRSLMMIVIFLLLLMVNAVFGVAIANMMIKTPSAVLPVWGALIVAFIIGQCIYRYKMNLVWVSIIGVTALYGLIYLGPMFPIVLPETFLGLPDNAVWIIILFVYAAIASLLPVWMLLQPRDYINGLQLFVGLILLYAAIFIATPNIVAPAINTALPIGTPSMLPLLFVTIACGAISGFHGLVATGTTSKQIDKEEDVRFVGYFGAMGEGMLALGAILAATAGFATLGDWQAVYQKFGDGSIGAFIDGGATILNAGVGIDMVLSQTMLTVMAALFAGTTMDTGVRLQRYIFQEFGEIYKLPVLNKSVVATLLAVGSCLLLAFGAGGIDGAGGMIIWPLFGTTNQLMAALTLMIVTVILLRKGRPVWYTLGPLSFLLVMTVFALLIQLKTFFNDGNWLLIIMDIIILIATILVTFESLSVLRKEWSIHRGKSNL

SEQ ID NO: 36700 - DNA, 1644 bp, Prosthecochloris vibrioformis DSM 265
  CDS (1)..(1644): transl_table=11
atgaacaccattcttcttgcagctctttccctcctgctgctctacctcggttaccgttactacagcccggttctcgcccgtcagcttggcattgatgaatcggaagagactccggccgtcaaacagcatgacggtgtcgatttcgtgccggcaaaacattggctgattcttttcggccatcattttgcctccattgcaggggcggctcccattatcggcccggtcatcgcctgcctttattggggctggcttcccgctctggcatggatagtgttcggcagcatcttcatgggtgctgtgcacgaccttgcttcccttgccatctccgccaaaaacgaggggcgttcaatagctgaccttacggaaaacatcctcgaccgcaatgcaaaaatcgtcttcagcctctttgttttcctgacactcatcctcattgtggcggtgtttgctgccatagctggccagacccttgccaacacccctgaagtggtgcttcccacccttggcctcattcctgttgctgcgctcatcggctggttgatgtaccatcgtggcttctcgattctcctctcttcgctgctgggtgttgccatgctgtttggtctcatcgtcctcggctacagccaccccctgagcctgccggtgtcgaacccggcacaatggtggaccatcattctcatcatttacggcatgattgcctctgtcactccggttaccctgctcctgcagccgcgcgaccatcttgccgcccttgtcctgtttgccggcatgtttttcggcttccttgggctgctgctctcccgtcctgaactccacgctcctccggtggtctccttttcctccgatcagggctggatgttccccatgcttttcatcactatcggctgcggagcggtatcgggcttccacagccttgtagccagcggcaccaccgccaagcagcttcccacaatgaaagatatccgggccgtcggttacggggccatggtcactgaatctgctcttgctgttctggcaattgttgccgttacagcaggtctctactggaaagagattccggttggtcagcacgggttcgtttatcaggaggtgtttcagaaggggggatggataaagaccttcggcctcggctatggtgaaattaccaagccggtgctcggtgctttcggcgctctcatcggcatcaccatgctgaaaacttttgtgatgaccacgctcgactctgccacccgcattacgcgctatataggaactgagcttctcggtgagactttcggtattccgggcatgaaaaataaatacggggttacccttcttataggatttctggccggagtactggcacttggcaactggaaggccatctggcccatattcggttcagccaaccagcttgtcgcgagcgtggtgttcatagtcacaagcgtgtggctgttcgcaagggggaagaactggaaactgaccgctgtgccggcagtcctgatgctcatcaccaccatcagtgctctcgtcgtgaaaaccaatgagttcctcaccgccgagccggctaaatacctgctcgcctcaatagccgttatccttatcgccctggcgctcttcatccttgtgcagagcatccgcgttgtgcggagccgtgggccggtctag

SEQ ID NO: 36701 - protein, 547 aa, Prosthecochloris vibrioformis DSM 265
MNTILLAALSLLLLYLGYRYYSPVLARQLGIDESEETPAVKQHDGVDFVPAKHWLILFGHHFASIAGAAPIIGPVIACLYWGWLPALAWIVFGSIFMGAVHDLASLAISAKNEGRSIADLTENILDRNAKIVFSLFVFLTLILIVAVFAAIAGQTLANTPEVVLPTLGLIPVAALIGWLMYHRGFSILLSSLLGVAMLFGLIVLGYSHPLSLPVSNPAQWWTIILIIYGMIASVTPVTLLLQPRDHLAALVLFAGMFFGFLGLLLSRPELHAPPVVSFSSDQGWMFPMLFITIGCGAVSGFHSLVASGTTAKQLPTMKDIRAVGYGAMVTESALAVLAIVAVTAGLYWKEIPVGQHGFVYQEVFQKGGWIKTFGLGYGEITKPVLGAFGALIGITMLKTFVMTTLDSATRITRYIGTELLGETFGIPGMKNKYGVTLLIGFLAGVLALGNWKAIWPIFGSANQLVASVVFIVTSVWLFARGKNWKLTAVPAVLMLITTISALVVKTNEFLTAEPAKYLLASIAVILIALALFILVQSIRVVRSRGPV

SEQ ID NO: 36702 - DNA, 1758 bp, Syntrophobacter fumaroxidans MPOB
  CDS (1)..(1758): transl_table=11
atgaacgccgcagttctaatggtcgtagcattcgttttattcttcattgcgtatcgtatttacgggaaatacatctccaaggtgttcgaggaaaacgacgcaaatcccacaccggcatgcgcaatgaaggatgattgcgattatgtgcccacaaagccgattgttctcttcgggcaccactttgccagcatcgcgggcggtggtcccatcatcggacccacggtggccatgcttttcggattcatacccgtatggctgtgggcggtgttcgggagtatcttcgtcggtgcggtgcacgacatgacgacgcttttcgcaagcgtccgggagaaggggaaatccgttgccgaaatcgcgaaggcgaccctgggaaacacggggttctttctcttcatttcatttaacatactcatgctcctgctggtcacgtccgcatttctgggcctgacggcaacggccctgacttccctgctgcccctggacgtgctcaagctcgaaccttcgcaaaccctggtgaagaccatagaggccggcggggtcgtcaaggcgcagataggcggcatcgcctccacctcggtcatcatcatcacctgctgtgcgccctttctcggttttctggtgtacaagaagggaatcaacgcatatctcgcctccgccatcgcgatcgtcgtatgtattgtttccgttgtcgttggaatggaaattccggtttccttcaacgccaacacatggatgatcatactctgcttttacacgttgctggccgcgggcattcccgtctggctgatcttgcagccccgggatttcaccaactcgttcctgctctacgcgggagttgcgggactgttcatcgcgagcatcgcggcgggtttcaaaggggttaccttcaacgccccgttgacgaacctcgcggcggggtcggccaagctgggacccatatggccgttcctgttcattactgtggcctgcggcgccatttcgggctttcattgcctggttgcgggcggcacgtcgtccaaacagatctcgaaagaatcggacgtcaggagaatcggttacgggggcatgctgctggaaggcctgctcgccatcggcgtcctggtcgccgtcggatgcggcatcgcctttcaggattattcgaacatcgtgttcccgacgaccgccggggtaagatcgaacccgatcctggcctttgccgccggcgcgggcggcctgttcgacaaagggcttggtatatcgcccgtgtacggaacgattttcggaatccttctcgtggagggtttcgtggtcacgacgctggatacggccgttcggctcaaccggtacttgttcgaagagctgtggcaggtgatgttcacgaatgttccgaagatcatgaaaacctatttgttcaactcggcgctttgcgtgttcctcatgtatattttggcctacaacaatgcgttcctggttatatggcccgcgttcggctccgcgaatcaattgcttgcctcgctggccctgatagccgtatcggtgtggttggtgaacaaggggaaaaatgccgtgtttaccgtgatcccggccattttcatgatggtgacgaccttgtattccctggtcagtctgcttgtaaacacctatcttcccaagcagaactacatgttggccgctgttgcgatattgctgaccattctctcgatcggcgtcatttcaatggcgttcaacgcgtggaggaagatcaggagggaagctgtagtgcccgcccgcgcggcatga

SEQ ID NO: 36703 - protein, 585 aa, Syntrophobacter fumaroxidans MPOB
MNAAVLMVVAFVLFFIAYRIYGKYISKVFEENDANPTPACAMKDDCDYVPTKPIVLFGHHFASIAGGGPIIGPTVAMLFGFIPVWLWAVFGSIFVGAVHDMTTLFASVREKGKSVAEIAKATLGNTGFFLFISFNILMLLLVTSAFLGLTATALTSLLPLDVLKLEPSQTLVKTIEAGGVVKAQIGGIASTSVIIITCCAPFLGFLVYKKGINAYLASAIAIVVCIVSVVVGMEIPVSFNANTWMIILCFYTLLAAGIPVWLILQPRDFTNSFLLYAGVAGLFIASIAAGFKGVTFNAPLTNLAAGSAKLGPIWPFLFITVACGAISGFHCLVAGGTSSKQISKESDVRRIGYGGMLLEGLLAIGVLVAVGCGIAFQDYSNIVFPTTAGVRSNPILAFAAGAGGLFDKGLGISPVYGTIFGILLVEGFVVTTLDTAVRLNRYLFEELWQVMFTNVPKIMKTYLFNSALCVFLMYILAYNNAFLVIWPAFGSANQLLASLALIAVSVWLVNKGKNAVFTVIPAIFMMVTTLYSLVSLLVNTYLPKQNYMLAAVAILLTILSIGVISMAFNAWRKIRREAVVPARAA

SEQ ID NO: 36704 - DNA, 1845 bp, Pelobacter propionicus DSM 2379
  CDS (1)..(1845): transl_table=11
atgagtgtcatctggctgctgctctccgccctctgtgtgcttgtcctggcgtaccgctactatgctgctttcattgccgccagggtgttgatgctggatgatcgcaacgtcacgccgtcggttacccgcaatgacggcaaggattttgttccaacgaacaagtgggtcgtgttcggccatcacttcgccgccatcgccggagctgggccaatgatcggtcccaccctggcggcccagtacggctgggggccgggctttttctggatcctcttggggtcggtcttcgccggctgcgtccatgacatgatccttctgttcgcctccatccgtcaccagggggagtccctgtcggtcatcgcccgcagggacgtgagcaggttgaccggcgtaaccaccgccttcgtgaccctgttcatcatcatcgtcgccctggccggtcttgctgtggcggtcaccaatgccctgtacaacaacccctggggcgtgttcaccatcggcatgaccatccccatcgccatgatcaccgggctctatatgttcaaactcaggccgggcgcgatcctgtccggctccctggccggagtcacggccgtggttgccgccgtatacttcggggctcccgtcgcccagtcgtccatcgccggatggttcaccttcagcaaggagagtctggcgatcatcctgccgctgtacggcttctgcgcggctgccctgccggtgtggttgctgcttgcgccccgggattacctgagcacctacatgaaaatctcggtcatcggcgggctggccctggggctcttctttgtcaacccgagcgtgcagatgcccttcgcgacccggttcatcgccggcggaggaccgatcatccccggccccgtctggccctatgtgttcatcaccatcgcctgcggcgccatttccgggttccacgcactgatcggctccggcacgacccccaagatgctggagaaggagagtcagatccccctggtggggtacggcgccatgctgaccgaggcctttgtggggctgatggcgctcctggcggcggtgacgctggtgcccaatgactactttgccatcaactcatcggccgaagccttcgcgcgcctgaacatgccggtgcgggatctgccggaattgtgccgcctggtggggctcgacgtcagccaccgtcccggcggggcgatatcgctggctgtgggcatggcccacatcttttcccgtgtcggtgtggggttgcagcacacgatgaaatactggtttcagttcatcatcatgttcgaggcgctcttcatcctgactaccatcgacgcgggaaccagggtggcgcgctacctcctgcaggatatcctggcaaacgtccaccaaaagctgggacagaccgattgggtgccgggcatcgtcctgaccagcgccgccgtctcctctgcctggggatacatgctctacaccggggatgtttcctccatctggcccatgttcggcgttaccaaccaggcactggcatgtctggctctggccattgggacaaccatcctcctgcgcatcgccaggaaaaaacgctatgccctggttacggcgctgccttgcgccttcatggccgtgaccagctttgccgcgggtttcatgaacatcaggctctacctctccagggggatggtgctcaacgccgctctcagtatggttatcattgctctggtcgcggttatcatcgtggaaaacatccgggtctggctggccctgttcgggaacgagcgtgccatgggtatgaacgacgggcgggacgaaatctttcctctggcggttccggtccgcgtttccaacgacgcgacgcgggagtga

SEQ ID NO: 36705 - protein, 614 aa, Pelobacter propionicus DSM 2379
MSVIWLLLSALCVLVLAYRYYAAFIAARVLMLDDRNVTPSVTRNDGKDFVPTNKWVVFGHHFAAIAGAGPMIGPTLAAQYGWGPGFFWILLGSVFAGCVHDMILLFASIRHQGESLSVIARRDVSRLTGVTTAFVTLFIIIVALAGLAVAVTNALYNNPWGVFTIGMTIPIAMITGLYMFKLRPGAILSGSLAGVTAVVAAVYFGAPVAQSSIAGWFTFSKESLAIILPLYGFCAAALPVWLLLAPRDYLSTYMKISVIGGLALGLFFVNPSVQMPFATRFIAGGGPIIPGPVWPYVFITIACGAISGFHALIGSGTTPKMLEKESQIPLVGYGAMLTEAFVGLMALLAAVTLVPNDYFAINSSAEAFARLNMPVRDLPELCRLVGLDVSHRPGGAISLAVGMAHIFSRVGVGLQHTMKYWFQFIIMFEALFILTTIDAGTRVARYLLQDILANVHQKLGQTDWVPGIVLTSAAVSSAWGYMLYTGDVSSIWPMFGVTNQALACLALAIGTTILLRIARKKRYALVTALPCAFMAVTSFAAGFMNIRLYLSRGMVLNAALSMVIIALVAVIIVENIRVWLALFGNERAMGMNDGRDEIFPLAVPVRVSNDATRE

SEQ ID NO: 36706 - DNA, 2079 bp, Burkholderia ambifaria AMMD
  CDS (1)..(2079): transl_table=11
atgaatcgggcttccagtaccctgctctggatcgcggtcgcgctgctcggcgcgttcgcattcgggacgatcgcacttgggcacggcgaacgtgtcagcgcgctatggatcgtgatcgccgcagtctgcgtgtatctgatcgcatatcgcttctacagccgcttcatcgccagcaaggtcatgcagctcgacgggctgcggatgaccccggcggtcaagtacaacgacggcctcgactacgtaccgaccaacaagtacgtgctgttcggccatcacttcgccgcgatcgccggcgccgggccgctcgtcggccccgtgctcgccgcgcagatgggctacacgcccggcatgctgtggatcctggccggcgtcgtgttcgccggcgcggtgcaggacttcatcgtgctgttcatctcgacgcgccgcgacggccgctcgctcggcgacctcgtcaagatggagctcggcacggtgcccggcgtgatcgcgctgttcggcgcgttcctgatcatggtgatcatcctcgcggtgctcgcgctgatcgtcgtgaaggcgctgacgaattcgccgtggggcacgttcacggtcgccgcgacgattccgatcgcgctgttcatgggcatctacacgcgctacatccgtccgggccgcatcggcgaagtgtcgatcatcggcttcgtgctgttgatggcatcgatcgcgttcggccaacacgtgcacgattcggcgacgctcgccgcgtggttcacgttcaacggcacgcagctcacgtggatcctgatcggctacggcttcgtcgcatcggtgctgccggtgtggctgctgctcgcgccgcgcgactacctgtcgacgttcctgaagatcggcacgatcctcggcctcgcgatcggcatcctggtcgtcgcaccggaactgaagatgcccgcgctgacgaagttcgtcgacggcacgggcccggtgtggtcgggcaacctgttcccgttcctgttcatcacgatcgcgtgcggcgcggtgtcgggtttccacgcgctgatctcgtcgggcacgacgccgaagctgatcgacaacgaatccaacgcgcgcttcatcggttacggtgcgatgctgatggaatcgttcgtcgcgatcatggcgctcgtcgccgcgtgcgtgatcgagccgggcatctacttcgcgatgaacgcgccggcggccgtgctcggctcgacgccggaagccgtcgcgaacacggtcacgcaatggggcttcgtgctgacgcccgacatgctgacgcagaccgcgaaggccgtcggcgagacgacgatcatcgcgcgcgcgggcggcgcaccgacgctggccgtcggcatggcgcacatcctgcaccaggtgatcggcggcgaagcgatgatggcgttctggtatcacttcgcgatcctgttcgaggcgctgttcatcctgacggccgtcgacgccggcacgcgcgcgggccgcttcatgctgcaggacctgctcggcacgttccatccggcgctcaagcgcaccgagtcgctgcccgcgaacctggtggccaccgcgctgtgcgtggccgcgtggggctacttcctgtaccagggcgtggtcgatccgctcggcggcatcaacacgctgtggccgctgttcggcatctcgaaccagatgctcgccgcgatcgcgctggtgctcggcaccgtcgtgctgttcaagatgaagcgcgagcgctacgcgtgggtgacgatcgtgccgaccgcgtggctgctgatctgcacgctgacggccggctggcagaagattttcgattcgaatccgaaggtcagcttcctcgcgcacgccgcgaagctgcaggccgcggtggacgaaggcaaggtgctcgcgccggcgaagtcgatcgcgcagatgcagcggatcatcttcaacgactacatcgatgcggcgctggccggcctgttcatcttcgtcgtcgtggcgatcgcggtgtacggcctgctcgccgtgctgcgcgcgcgccgcgagtcgaagccgaccgtgcgcgagacgccgtacgaggcgatgccggccgcgcaggcgctcggcagcggccgataa

SEQ ID NO: 36707 - protein, 692 aa, Burkholderia ambifaria AMMD
MNRASSTLLWIAVALLGAFAFGTIALGHGERVSALWIVIAAVCVYLIAYRFYSRFIASKVMQLDGLRMTPAVKYNDGLDYVPTNKYVLFGHHFAAIAGAGPLVGPVLAAQMGYTPGMLWILAGVVFAGAVQDFIVLFISTRRDGRSLGDLVKMELGTVPGVIALFGAFLIMVIILAVLALIVVKALTNSPWGTFTVAATIPIALFMGIYTRYIRPGRIGEVSIIGFVLLMASIAFGQHVHDSATLAAWFTFNGTQLTWILIGYGFVASVLPVWLLLAPRDYLSTFLKIGTILGLAIGILVVAPELKMPALTKFVDGTGPVWSGNLFPFLFITIACGAVSGFHALISSGTTPKLIDNESNARFIGYGAMLMESFVAIMALVAACVIEPGIYFAMNAPAAVLGSTPEAVANTVTQWGFVLTPDMLTQTAKAVGETTIIARAGGAPTLAVGMAHILHQVIGGEAMMAFWYHFAILFEALFILTAVDAGTRAGRFMLQDLLGTFHPALKRTESLPANLVATALCVAAWGYFLYQGVVDPLGGINTLWPLFGISNQMLAAIALVLGTVVLFKMKRERYAWVTIVPTAWLLICTLTAGWQKIFDSNPKVSFLAHAAKLQAAVDEGKVLAPAKSIAQMQRIIFNDYIDAALAGLFIFVVVAIAVYGLLAVLRARRESKPTVRETPYEAMPAAQALGSGR

SEQ ID NO: 36708 - DNA, 2061 bp, Rhodoferax ferrireducens DSM 15236
  CDS (1)..(2061): transl_table=11
atgaatctcgtttccaaacatgccatttggttgtttttgacggtggtcggggtattttcccttggcaccgtggcgttgtcccggggcgaaaccatcaacgccttgtggatcattacggctgcagttgctatctacctggtcgcgtaccggtactacagcctgtttatcgccgaaaaggtcttgcaaattgatccgacgcgggcgacgccagcggtgcgccacaacgacggtcttgatttcgttccaaccaacaagtacgtcctgttcggccatcactttgccgccattgccggtgcgggccccctggtcgggccggtgctggcagcgcagatgggctacctgccgggaacgctctggatcatcgtcggtgtcgtgcttgcgggcgcggtgcaggacttcatggtgctgtttgtatcaatgcgtcgggacggacgctcacttggcgacctcgtcaagtcggaactcggtctcgttccgggcatgattgctctggtcggcacttttgtgatcatggtgatcatcctcgcggtgctggcactgattgtggtcaaggcgctggccgcaagcccatggggaaccttcaccgtggccgctacgattgtcattgccatgttcatgggcgtctacagccgttatatccgccccggacgtgtgggcgaaatatcgatcatcggctttgtgttgcttatcgcctccatcatccttggtggccaggtcgcgcaaagcgcgacgtgggcgccgctgttcactttcgacgccaaacagctgagttggatgctgatcatctacggttttgtggcctcggtcctgcccgtgtggctgctgctcgcgccgcgtgactatctgtcgaccttcctgaagatcggaaccatcgtcggcttggcgctggccatggtctttgtcgcaccgaatttgcgcatgccagcggtcacccagtttatcgatggcaccggtccggcttggtcgggtagcctctttccgttcatttttatcacgattgcctgcggcgcggtctcgggattccatgcgttgatcgcgtccggaaccacccccaagctgctcgacaacgagaagaatacccgcatgatcggttatggcgccatgttgatggagtcctttgtggccatcatggcgatcgtgacagcctcggtgatcgatccgggcgtctatttcgccatgaacagcccggccgcaatcattggcacgagtgtcgacggcgccgcacagatcatttcccagtggggttttatcatcacgcctgacgtgctgcttcaaaccgcaaaggatgtgggtgagagttccattctttcgcgtgcgggcggtgcgcccacgctggcagttggcatggcccaaatattctctcaggtgattggcggcaaggccatgatggccttctggtaccacttcgccatcctgttcgaggcgctattcatcctgaccgcctgtgacgccggtacgcgtgccggacgcttcatgctgcaggacctgctgggcaccttcgttccctccttgaagcggaccaactcctggggcgccagcctgaccgccaccggtctgtgcgtcgcggcctggggatatattctttaccagggtgtagtcgatcctcttgggggcatcaacagcctgtggccgctcttcggcatttccaaccagatgctcgctagcgttgcgctcatgctttgcacggtggtgctgttcaaaatgaagcggcaaaaatacgcatgggtcacgattttgccaacatcctggctgctgatttgcaccctggcggcgggctgggaaaaggtttttgacagcaatccaaaaattggtttcctcgcccttgccaacaagttccaggcggctgtggacaaaggcgttcttctcgctccggcaaaaagccttgaacagatgaagcagattgttttcaataattatttggacgccgcactggccgtcttcttcatcttcgtggtggttagcatgttgtactacacggtcatcgcctgcatgaaggctttgcgtgaggacaagatgaccagttgtgaactgccgtacgtggccatacctgccgcgctttga

SEQ ID NO: 36709 - protein, 686 aa, Rhodoferax ferrireducens DSM 15236
MNLVSKHAIWLFLTVVGVFSLGTVALSRGETINALWIITAAVAIYLVAYRYYSLFIAEKVLQIDPTRATPAVRHNDGLDFVPTNKYVLFGHHFAAIAGAGPLVGPVLAAQMGYLPGTLWIIVGVVLAGAVQDFMVLFVSMRRDGRSLGDLVKSELGLVPGMIALVGTFVIMVIILAVLALIVVKALAASPWGTFTVAATIVIAMFMGVYSRYIRPGRVGEISIIGFVLLIASIILGGQVAQSATWAPLFTFDAKQLSWMLIIYGFVASVLPVWLLLAPRDYLSTFLKIGTIVGLALAMVFVAPNLRMPAVTQFIDGTGPAWSGSLFPFIFITIACGAVSGFHALIASGTTPKLLDNEKNTRMIGYGAMLMESFVAIMAIVTASVIDPGVYFAMNSPAAIIGTSVDGAAQIISQWGFIITPDVLLQTAKDVGESSILSRAGGAPTLAVGMAQIFSQVIGGKAMMAFWYHFAILFEALFILTACDAGTRAGRFMLQDLLGTFVPSLKRTNSWGASLTATGLCVAAWGYILYQGVVDPLGGINSLWPLFGISNQMLASVALMLCTVVLFKMKRQKYAWVTILPTSWLLICTLAAGWEKVFDSNPKIGFLALANKFQAAVDKGVLLAPAKSLEQMKQIVFNNYLDAALAVFFIFVVVSMLYYTVIACMKALREDKMTSCELPYVAIPAAL

SEQ ID NO: 36710 - DNA, 1521 bp, Actinobacillus succinogenes 130Z
  CDS (1)..(1521)
atgttgtggttttttatctgcgtgacgattttacttctgggttatttcctttacagtaaagttgtcgaaaaaatttttgtgattaatccggcacgtaaaacacccgcctattctatgggcgacggtgtggactatgtgccgatgtcaaaaaataaaatctggctgattcagttattgaatattgctggtacggggccgattttcggtccgattttgggtgcgttatacgggccttccgctatgctttggattgtcttcggttgcgtatttggcggtgcggtacacgattatttcagcggtatgctgagtattcgcaacggcggtgccaatattcctttcttggcggggaaatatctcgggcgcccggcaaaacattttatgaatttcattgcgattttactgcttttgttggttggagtggtattcgtggcgagcccggcctcgctgttaaccaatatcaccggtgatatcatgaattccggcggtgtcggtgcggcggcggtaagtgatgcgagcggcgtaagcaataccaatactctgatgatgtggacgggaattatcttcgtttattacatcattgccacattggtgccgatcgataaaattatcggtcgggtttacccgattttcggcgctttattgatgtttatgacattgggtatgttattcggtttattattcgaaggtattccgttcttccgtaccattacggcggaactgggccatgaggttactttggcggatttccttgccaacttacatccgaaagaggggacgccgctttggccgttattattcgtcaccattgcctgcggtgcggtttcaggtttccatgcgacccaatctccgttaatggcacgttgtacgcaaaacgaaaaagaaggtcgtttcattttctatggcgcaatgatcggtgaaggtataatcgcgttaatttggtgtatggtgggtctaagtttctacgatgatcaggcttcattgcttgaggctttaaaaggtacaccgtctaaagtggtctatgattcggccataggtatgcttggcgtattcggcggtatcttggcggtattaggtgtggtggtattgccgattacctccggcgataccgcgtttcgtgcggcacgtttgttaattgcggattttttcaaatttgagcaacgttcgttaataaaacgtttggtcattgcgattccgttatttattatcggtttctgggtatccaccgtggacttccaagtgttatggcgttatttcggctgggctaaccaaacgacggcgatggtgatgttatggaccgcatccgcttacttgttccgtcatcaaaaattccattggattacgacgattccggccatctttatgactttggtttgtgcaacctatattgccaatgctcaaatcggtttcggtttgtcttatgacgtatccgtttgggtcggtatcgcagccactattgttgcgttgatttctttctttgtattcttaaaaccgattcctaaagatcaacaggaaaacgattaa

SEQ ID NO: 36711 - protein, 506 aa, Actinobacillus succinogenes 130Z
MLWFFICVTILLLGYFLYSKVVEKIFVINPARKTPAYSMGDGVDYVPMSKNKIWLIQLLNIAGTGPIFGPILGALYGPSAMLWIVFGCVFGGAVHDYFSGMLSIRNGGANIPFLAGKYLGRPAKHFMNFIAILLLLLVGVVFVASPASLLTNITGDIMNSGGVGAAAVSDASGVSNTNTLMMWTGIIFVYYIIATLVPIDKIIGRVYPIFGALLMFMTLGMLFGLLFEGIPFFRTITAELGHEVTLADFLANLHPKEGTPLWPLLFVTIACGAVSGFHATQSPLMARCTQNEKEGRFIFYGAMIGEGIIALIWCMVGLSFYDDQASLLEALKGTPSKVVYDSAIGMLGVFGGILAVLGVVVLPITSGDTAFRAARLLIADFFKFEQRSLIKRLVIAIPLFIIGFWVSTVDFQVLWRYFGWANQTTAMVMLWTASAYLFRHQKFHWITTIPAIFMTLVCATYIANAQIGFGLSYDVSVWVGIAATIVALISFFVFLKPIPKDQQEND

SEQ ID NO: 36712 - DNA, 1749 bp, Escherichia coli
  CDS (1)..(1749): transl_table=11
atgccaggttttactatggatacgaaaaaactattcaagcacataccctgggtgattctcggaatcatcggtgcattctgcctcgcggtagttgcattacgtcggggggagcacgtcagcgccctgtggatcgtggtcgcctctgtgtcggtgtatctggtggcgtatcgctactacagtttgtatatcgcccagaaggtgatgaaactcgaccccacgcgcgcgacgcctgcggttattaacaacgacggtctgaactacgttccgaccaaccgttacgtgttgtttggtcaccacttcgccgctatcgccggtgctggtccgctggttggtccggttctcgccgcgcagatgggcatcctacctggcacgctgtggctgctggcgggggtagtactggccggtgcggttcaggactttatggtgctgtttatctcctctcgccgtaacggaccatctctcggtgagatgatcaaagaagagatgggaccactaccggggactatcgcgctgtttggctgtttcttaatcatgatcatcatcctcgccgtcctggcgctgattgtggttaaagccctggccgaaagtccgtggggtgtcttcaccgtttgctcaaccgtaccgattgcgctgtttatgggtatctacatgcgctttatccgtccggggcgtgtgggtgaagtctctgtcattggtatcgtgctgctggttgcctctatctacttcggtggcgtgattgctcacgatccgtactggggtccggcactgacctttaaagacaccaccattaccttcgcgctgattggctatgcgtttgtttccgcactgctgccggtgtggctgatcctcgcaccgcgcgactatctggcaaccttcctgaaaatcggcgttatcgtcggcctggcgctgggtatcgtggtgctgaacccggaactgaaaatgcctgcgatgacccagtacattgacggtactggcccgctgtggaaaggcgctctgttcccgttcctgttcatcaccatcgcctgtggtgcggtatctggcttccacgcgctgatctcttccggtacgacgccaaaactgctggctaacgaaaccgacgcgcgtttcattggctacggcgcaatgctgatggagtccttcgtggcgattatggcgctggttgcagcgtccatcatcgaaccgggtctttacttcgcgatgaataccccgcctgctggccttggcatcaccatgcctaacctgcatgaaatgggtggcgagaacgcgccgatcatcatggcgcagctgaaagacgttaccgcacacgcgcagaccgtcacctcctggggcttcgtgatttcgccagagcagatcctgcaaaccgcgaaagacattggtgagccttctgtcctgaaccgtgcaggtggtgcgccaacgctggcggtaggtatcgctcacgtgttccacaaagtgctgccagtggctgacatgggcttctggtatcacttcggtattctgttcgaagccctgttcatcctgaccgcgctggatgcgggtactcgttctgcccgctttatgctgcaagacctgctgggtaacttcatcccgttcctgaaaaaaaccgactctctggttgccggtatcatcggtactgcgggctgtgtgggtctgtggggctacctgctgtatcagggcgtggtcgatccgctgggcgcgttaagagcctgtggccgctgttcggtatttccaaccagatgctggcagccgtag

SEQ ID NO: 36713 - protein, 582 aa, Escherichia coli
MPGFTMDTKKLFKHIPWVILGIIGAFCLAVVALRRGEHVSALWIVVASVSVYLVAYRYYSLYIAQKVMKLDPTRATPAVINNDGLNYVPTNRYVLFGHHFAAIAGAGPLVGPVLAAQMGILPGTLWLLAGVVLAGAVQDFMVLFISSRRNGPSLGEMIKEEMGPLPGTIALFGCFLIMIIILAVLALIVVKALAESPWGVFTVCSTVPIALFMGIYMRFIRPGRVGEVSVIGIVLLVASIYFGGVIAHDPYWGPALTFKDTTITFALIGYAFVSALLPVWLILAPRDYLATFLKIGVIVGLALGIVVLNPELKMPAMTQYIDGTGPLWKGALFPFLFITIACGAVSGFHALISSGTTPKLLANETDARFIGYGAMLMESFVAIMALVAASIIEPGLYFAMNTPPAGLGITMPNLHEMGGENAPIIMAQLKDVTAHAQTVTSWGFVISPEQILQTAKDIGEPSVLNRAGGAPTLAVGIAHVFHKVLPVADMGFWYHFGILFEALFILTALDAGTRSARFMLQDLLGNFIPFLKKTDSLVAGIIGTAGCVGLWGYLLYQGVVDPLGALRACGRCSVFPTRCWQP

SEQ ID NO: 36714 - DNA, 2214 bp, Erwinia amylovora
  CDS (1)..(2214): transl_table=11
atgcctgctatcagcatgcattgctcgcttgactttttcctgcataaaaccgggttcactatgcataaaaataaaattcttaaacatattccctggatgatcgtcgggatcatcgctgcctgctgcctggccgtggttgccctgcggcgtggtgagcatatcagtgcgctgtggatcgttgtggcatccgtctcggtctatctggtggcatatcgctactacagcctgtttatcgcgcaaagggtcatgaaactggatgcgagccgtgccacgcctgccgtggtcaacaacgacgggctgaactacgtacccacgcaccgcaacgtattgtttggtcaccactttgcggcgattgccggggcggggccgctggttggcccggtactggcggcacagatgggttacctgcccggcgtactgtggctgctggctggcgtggtgctggccggggcagtacaggattttatggtgctgtttatctcttctcgccgcaatggcgcatcgctcggcgagataatcaaaaatgagatgggcgccatacccggtagtgtcgcgctgttcggctgcttcctgatcatgattattatcctcgcggtgctggcgctgattgtcgtgaaggcgttggcggaaagtccgtggggcgtatttaccgtgtgctcaacgctgccgatagccctgtttatgggcatttatatgcgctttatccgccccggacgcgtgggcgaaattgcactgattggcgtgttactgctgatcgccagcatctggtttggcggcgtgattgcgcaagatgcttactggggaccggcgctgacctttaaagacaccacgattaccttcaccctgatcggctacgcgtttgtttctgcactgctgccggtgtggttaatcctcgccccgcgtgactatctggcgactttcctgaaaattggcgttatcgtcggcctggcggtcggcatcatcatcctgaatccgcagctgaagatgccagcgctgactccttttatcgatgggtcagggccgctatggaaaggcgcgctgttcccgttcctgtttatcactatcgcctgcggcgcggtctccggtttccacgccctgattgcctccggcaccacgccgaagctgctggcttgtgaaagcgatgcgcgctttatcggctacggtgccatgctgatggaatccttcgtcgcggtaatggcgctggtggccgcttcgattatcgagccagggctttactttgccatgaacacgcctcccgccgggttgggaattaccatgccgaacctgcaccagttgggtggggctggtgcaccgctgattatggcgcagctccagcaggtcaccgcccaggctgcggcgaccgtcagttcctggggctttgtcatcagtcctgaacagatcatgcaaaccgctaaagacatcggggagccttcggtgcttaaccgtgccgggggagcaccaacgctggcggtcggcattgcttacgtttttgacaaaatgatgccgatcgccgatatggggttctggtatcacttcggcattttgtttgaagccctgtttatccttaccgcgctggatgccggtacgcgctccggccgctttatgctgcaggatctgctgggtcattttctgccgttcctgaaaaaaaccgactcgctgctggcgggcgtcgtcagcacggctggctgcgtggggctttggggttacctgttgtatcagggcgtggtcgatccgctgggcggtgtgaaaagcctgtggccactgttcggcatttcgaaccagatgctggccgccgtggcgctggtgctggctaccgtcgtgctgattaaaatgaagcgcatgcgttacatttgggtaaccgtgatccctgccgtctggctacttatctgcaccacctgggcgctggggctgaagctgttcagccagaatccacagatggaaggcttcttctacatggcgggcgagtaccgggcaaaagtggccgctggcggcgcaaatcatagcgcccgcgagattgccgatatgcatcatatcgtggttaacaactacaccaatgccgggctgagtattctgtttctggtcgtggtgtacagcattctcttttacggcatcaaagcctggctgcgcgcacgccagattgaccagcggacagatactgaaacagcctgtgtcgcggtgcccgaagaaggggtagaactctcttctggccactga

SEQ ID NO: 36715 - protein, 737 aa, Erwinia amylovora
MPAISMHCSLDFFLHKTGFTMHKNKILKHIPWMIVGIIAACCLAVVALRRGEHISALWIVVASVSVYLVAYRYYSLFIAQRVMKLDASRATPAVVNNDGLNYVPTHRNVLFGHHFAAIAGAGPLVGPVLAAQMGYLPGVLWLLAGVVLAGAVQDFMVLFISSRRNGASLGEIIKNEMGAIPGSVALFGCFLIMIIILAVLALIVVKALAESPWGVFTVCSTLPIALFMGIYMRFIRPGRVGEIALIGVLLLIASIWFGGVIAQDAYWGPALTFKDTTITFTLIGYAFVSALLPVWLILAPRDYLATFLKIGVIVGLAVGIIILNPQLKMPALTPFIDGSGPLWKGALFPFLFITIACGAVSGFHALIASGTTPKLLACESDARFIGYGAMLMESFVAVMALVAASIIEPGLYFAMNTPPAGLGITMPNLHQLGGAGAPLIMAQLQQVTAQAAATVSSWGFVISPEQIMQTAKDIGEPSVLNRAGGAPTLAVGIAYVFDKMMPIADMGFWYHFGILFEALFILTALDAGTRSGRFMLQDLLGHFLPFLKKTDSLLAGVVSTAGCVGLWGYLLYQGVVDPLGGVKSLWPLFGISNQMLAAVALVLATVVLIKMKRMRYIWVTVIPAVWLLICTTWALGLKLFSQNPQMEGFFYMAGEYRAKVAAGGANHSAREIADMHHIVVNNYTNAGLSILFLVVVYSILFYGIKAWLRARQIDQRTDTETACVAVPEEGVELSSGH

SEQ ID NO: 36716 - DNA, 2166 bp, Escherichia coli
  CDS (1)..(2166): transl_table=11
atgccaggttttactatggatacgaaaaaactattcaagcacataccctgggtgattctcggaatcatcggtgcattctgcctcgcggtagttgcattacgtcggggggagcacgtcagcgccctgtggatcgtggtcgcctctgtgtcggtgtatctggtggcgtatcgctactacagtctgtacatcgcccagaaggtgatgaaactcgaccccacgcgcgcgacgcctgcggttattaacaacgacggtctgaactacgttccgaccaaccgttacgtgttgtttggtcaccacttcgccgctatcgccggtgctggtccgctggtcggtccggttctcgccgcacagatgggctacctgcctggcacgctgtggctgctggcgggggtagtactggccggtgcggttcaggactttatggtgctgtttatctcctctcgccgtaacggcgcatctctcggtgagatgatcaaagaagagatgggaccagtaccggggactatcgcgctgtttggctgtttcttaatcatgatcatcatcctcgccgttctggcgctgattgtggttaaagccctggccgaaagtccgtggggtgtcttcaccgtttgctcaaccgtaccgattgcgctgtttatgggtatctacatgcgctttatccgtccggggcgtgtgggtgaagtctctgtcattggtatcgtgctgctggttgcctctatctacttcggtggcgtgattgctcacgatccgtactggggtccggcactgacctttaaagacaccaccattaccttcgcgctgattggctatgcgtttgtttccgcattgctgccggtgtggctgatcctcgcaccgcgcgactatctggcaaccttcctgaaaatcggcgttatcgtcggcctggcgctgggtatcgtggtgctgaacccggaactgaaaatgcctgcgatgacccagtacattgacggtactggcccgctgtggaaaggcgctctgttcccgttcctgttcatcaccatcgcctgtggtgcggtatctggcttccacgcgctgatctcttccggtacgacgccgaaactgctggctaacgaaaccgacgcgcgtttcattggctacggcgcaatgctgatggaatccttcgtggcgattatggcgctggttgctgcgtccatcatcgaaccgggtctttacttcgcgatgaacaccccgcctgcgggccttggcatcaccatgcctaacctgcatgaaatgggtggcgagaacgcgccgatcatcatggcgcagctgaaagacgttaccgcacacgcggcggcgaccgtcagctcctggggctttgtgatttcgccagagcagatcctgcaaaccgcgaaagacattggtgagccttctgtcctgaaccgtgcaggtggtgcgccgacgctggcggtaggtatcgctcatgtgttccacaaagtgctgccgatggctgacatgggcttctggtatcacttcggtattctgttcgaagcactgttcatcctgaccgcgctggatgcgggtacccgttctggccgctttatgctgcaagatctgctgggtaacttcatcccgttcctgaaaaaaaccgactctctggttgccggtatcatcggtactgcgggctgtgtgggtctgtggggctacctgctgtatcagggcgtggtcgatccgctgggcggcgttaagagcctgtggccgctgttcggtatctccaaccagatgctggcagccgtagcgctggtactgggcaccgttgtgctaattaagatgaagcgcacccaatacatctgggtaactgttgttccggctgtatggctgcttatctgcaccacctgggcgctgggcctgaaactattcagcaccaacccgcagatggaaggcttcttctacatggcaagccagtacaaagagaagattgctaacggtactgacctgacggcgcagcagattgccaacatgaaccacatcgttgtgaacaactacaccaacgcaggtctgagtattctgttcctgattgtggtgtacagcatcatcttctacggtttcaaaacctggcttgcggtgcgtaacagcgacaaacgtactgacaaagaaacaccatacgttccaatcccggaaggcggcgtgaagatcttttcgcaccactaa

SEQ ID NO: 36717 - protein, 721 aa, Escherichia coli
MPGFTMDTKKLFKHIPWVILGIIGAFCLAVVALRRGEHVSALWIVVASVSVYLVAYRYYSLYIAQKVMKLDPTRATPAVINNDGLNYVPTNRYVLFGHHFAAIAGAGPLVGPVLAAQMGYLPGTLWLLAGVVLAGAVQDFMVLFISSRRNGASLGEMIKEEMGPVPGTIALFGCFLIMIIILAVLALIVVKALAESPWGVFTVCSTVPIALFMGIYMRFIRPGRVGEVSVIGIVLLVASIYFGGVIAHDPYWGPALTFKDTTITFALIGYAFVSALLPVWLILAPRDYLATFLKIGVIVGLALGIVVLNPELKMPAMTQYIDGTGPLWKGALFPFLFITIACGAVSGFHALISSGTTPKLLANETDARFIGYGAMLMESFVAIMALVAASIIEPGLYFAMNTPPAGLGITMPNLHEMGGENAPIIMAQLKDVTAHAAATVSSWGFVISPEQILQTAKDIGEPSVLNRAGGAPTLAVGIAHVFHKVLPMADMGFWYHFGILFEALFILTALDAGTRSGRFMLQDLLGNFIPFLKKTDSLVAGIIGTAGCVGLWGYLLYQGVVDPLGGVKSLWPLFGISNQMLAAVALVLGTVVLIKMKRTQYIWVTVVPAVWLLICTTWALGLKLFSTNPQMEGFFYMASQYKEKIANGTDLTAQQIANMNHIVVNNYTNAGLSILFLIVVYSIIFYGFKTWLAVRNSDKRTDKETPYVPIPEGGVKIFSHH

SEQ ID NO: 36718 - DNA, 2205 bp, Corynebacterium glutamicum
  CDS (1)..(2205): transl_table=11
gtgaagaagtcccctaaaatgtcaccgaccgcccgcgttggtctccttgtctttggggttatcgcggcggtgggttggggagcaatcgctttctcccgtggcgaaacaatcaactctgtgtggctggttttggcggcagttggttcctatatcattgcgttttctttctatgcccgactgattgaatacaaagttgttaagccgaaagatcagcgagcaaccccggcggaatacgttaatgacggcaaggactatgtcccaacggatcgtcgtgtgctttttggccaccactttgcagctattgcaggtgccggtccattggttggacctgtcatggccgcgcagatgggctacctgccaggcaccttgtggattatcctcggtgtgattttcgccggtgcagtgcaggactacctagtgctgtgggtgtctactcgtaggcgtggacgctcacttggccagatggttcgtgatgaaatgggcacggtcggtggagctgccggtatcttggcgaccatctccatcatgatcatcattatcgcggtgctcgcattgatcgtggttaatgcactggctgattcaccatggggcgttttctccatcaccatgaccatcccaattgcactgttcatgggtgtgtacttgcgttacctgcgcccaggtcgtgttactgaagtgtccatcatcggtgtggcactgctcctgctggctatcgttgctggtggttgggttgcagacacctcatggggcgtggaatggttcacctggtctaagaccactttggcgttggccttgatcggttacggaatcatggctgcgattttgccggtgtggctgctgcttgcaccgcgcgattacctgtctacctttatgaagatcggcgtcatcggtctgttggcagtgggtattttgttcgcacgtcctgaggtgcagatgccttccgtgacctccttcgcacttgagggcaacggtccggtgttctctggaagtctgttcccattcctgttcatcacgattgcctgtggtgcactgtctggtttccacgcactgatttcttcaggaaccacaccaaagcttgtggagaaggaatcccagatgcgcatgctcggctacggcggcatgttgatggaatctttcgtggcgatgatggcactgatcaccgctgttattctggatcgtcacctgtacttctccatgaacgctccgctggcactgactggtggagatccagcaaccgcagctgagtgggttaactccattgggctgacaggtgcggatatcaccccggaacagctgtcggaagctgctgaaagtgtcggagaatccactgttatttcccgtaccggtggcgcaccaaccttggcgttcggtatgtctgaaatcctctccggattcatcggcggcgctggaatgaaggcgttctggtaccacttcgccatcatgtttgaggctctgttcatcctcactactgtggatgcaggtactcgtgtggctcgctttatgatgaccgataccttgggcaatgttccaggtctgcgccgtttcaaggatccttcatggactgtcggtaactggatttctaccgtgtttgtgtgtgctctatggggtgctattttgctcatgggtgttaccgatccactgggcggcatcaacgtgcttttcccactattcggtatcgctaaccagctgctcgccgctattgcacttgctctcgtgctggttgttgtggtgaagaagggcctgtacaagtgggcgtggattccagctgttcctttggcatgggatctcattgtcacgatgactgcgtcatggcagaagattttccactctgatccggctattggctactgggctcagaacgcgaacttccgcgatgcaaagtctcaaggccttaccgaatttggtgccgctaaatctcctgaggcaatcgatgcggttatccgaaacaccatgattcagggcatcttgtccatcctgttcgcggtgctcgtcctcgttgttgtcggcgcagccattgcggtgtgcatcaagtccatcagggctcgtgcagccggaacacctttggagaccactgaagagcctgatactgaatctgagttcttcgccccaactggattccttgcatcttccagggataaggaagtccaggccatgtgggacgagcgctacccaggcggtgcgcccgtgtcttctggagggcactaa

SEQ ID NO: 36719 - protein, 734 aa, Corynebacterium glutamicum
MKKSPKMSPTARVGLLVFGVIAAVGWGAIAFSRGETINSVWLVLAAVGSYIIAFSFYARLIEYKVVKPKDQRATPAEYVNDGKDYVPTDRRVLFGHHFAAIAGAGPLVGPVMAAQMGYLPGTLWIILGVIFAGAVQDYLVLWVSTRRRGRSLGQMVRDEMGTVGGAAGILATISIMIIIIAVLALIVVNALADSPWGVFSITMTIPIALFMGVYLRYLRPGRVTEVSIIGVALLLLAIVAGGWVADTSWGVEWFTWSKTTLALALIGYGIMAAILPVWLLLAPRDYLSTFMKIGVIGLLAVGILFARPEVQMPSVTSFALEGNGPVFSGSLFPFLFITIACGALSGFHALISSGTTPKLVEKESQMRMLGYGGMLMESFVAMMALITAVILDRHLYFSMNAPLALTGGDPATAAEWVNSIGLTGADITPEQLSEAAESVGESTVISRTGGAPTLAFGMSEILSGFIGGAGMKAFWYHFAIMFEALFILTTVDAGTRVARFMMTDTLGNVPGLRRFKDPSWTVGNWISTVFVCALWGAILLMGVTDPLGGINVLFPLFGIANQLLAAIALALVLVVVVKKGLYKWAWIPAVPLAWDLIVTMTASWQKIFHSDPAIGYWAQNANFRDAKSQGLTEFGAAKSPEAIDAVIRNTMIQGILSILFAVLVLVVVGAAIAVCIKSIRARAAGTPLETTEEPDTESEFFAPTGFLASSRDKEVQAMWDERYPGGAPVSSGGH

SEQ ID NO: 36720 - DNA, 2304 bp, Pseudomonas putida
  CDS (1)..(2304): transl_table=11
atgaacaacaataatagcctgctacgccatattccgtggctggcgctggcagtcataggcgcctgcgcactgggtgtggttgccctgcgtcgcggcgaggcgatcaacgccttgtggatcgtggtcgcggcagtggccatctacctggtcgcctatcgttactacagcctgttcatcgccwccaaggtgatgcamctcgacccgcgccgtgccaccccggcggtgctcaacarcgacggcctggactacgtcccgaccaacaaacacattcttttcggtcaccacttcgctgccatcgccggcgcaggccccttggtcgggccggtactcgccgcgcaaatgggctacctgcccggcacgctctggctgatcgccggcgtggtgctggccggtgcggtgcaggacttcatggtcctgttcctgtctacccgccgcaacgggcgctcgctgggcgacatggtgcgcgaggaaatgggcagaatcccgggcaccatcgccctgttcggctgtttcctgatcatgatcatcatcctcgcggtgctggcgttgatcgtggtcaaggccctggccgaaagcccatggggcatgttcacggtgatggcgaccatcccgatcgcgatgttcatgggcatctacatgcgctacatccgtccgggccgtattggcgaaatctcggtcgttggtgtggtactgctgctggcctcgatctggctgggcggcgtgatcgctgcggacccggtgtggggcccggcgttcacgttcaccggcgtgcagatcacctggatgctggtgggctacggttttgtcgccgccgtgctgccagtgtggctggtgctggcgccgcgtgactacctgtcgaccttcctcaagatcggcacgatccttggcctggccatcggtatcctgatcatcgcacctgagctgaaaatgccggcgctgacccagttcaccgacggtacgggcccggtgtggaagggtaccctgttcccgttcctgttcatcaccattgcctgtggtgcggtgtccggcttccacgcgctgatttcctcggggaccacccccaagctgctggataacgaaaccaacgcccgctatatcggctacggcggcatgctgatggaatcgttcgtcgccatcatggccatggttgcggcctcggtgatcgaaccgggcgtgtacttcgccatgaacagcccggcggcagtggtcggtaccgatgtcgcgtcggtggcgcagactgtcagcagttggggcttcctgattacacccgagcagctcgaagccgttgcccgtgacatcggcgagcacaccatcctggcccgtgccggcggtgcgccaaccctggcggtcggtatcgcgcagatcctgcaccaggtgttgccaggtgaaaacaccatggccttctggtaccacttcgcgatcctgttcgaggcgctgttcattctcacggcggtagacgctggtacccgtgccgggcgcttcatgctgcaggacctgctgggcagcttcgtgcctgcgctcaaacgcaccgaatcgtggggggcaaacctgcttgccactgctggctgcgtggcgctctggggctatctgctgtaccagggcgtcatcgacccgctgggtggcatcaacaccctgtggccgctgtttggtatctccaaccagatgctggccggtatcgccttgatgctcggtactgtggtgctgatcaagatgaaggctcagcgctacatctgggtcaccctgctgccggccgtatggctgctgatctgcaccacggctgcaggcctgatcaagctgttcgaccccaacccggctgtcggcttcctggccttggccaagaagtacagcactgcgctggacgccggccaggtactggccccggccaaggacatcgggcagatgcagcacgtggatcttcacgcctacaccaacgcgggcctgacgatcttgttcctgctggtggtcttcagcatcctgttcttcgccatcaaggtcggctacgccgccttgggccgcaaagaacgcagcgacaaggaaaccccgttccaggcgttgcctgacgacgtaatcgagaggactgcaatcatatccgttcaacgacttgggtcgactgggcaaatacctggggcaggcagcccgcctgatggtcggcatgcccgactacgacaactatgtcgaacacatgcagaaaacgcatccggacaagccggtgatgagctacgaggcattcttccgcgaacgtcaggaagcacgttacggtggcaagtccgggcccaagtgctgttgagcctgcggttcgtgtaa

SEQ ID NO: 36721 - protein, 767 aa, Pseudomonas putida
  misc_feature (61)..(61): Xaa can be any naturally occuring amino acid
  misc_feature (65)..(65): Xaa can be any naturally occuring amino acid
  misc_feature (78)..(78): Xaa can be any naturally occuring amino acid
MNNNNSLLRHIPWLALAVIGACALGVVALRRGEAINALWIVVAAVAIYLVAYRYYSLFIAXKVMXLDPRRATPAVLNXDGLDYVPTNKHILFGHHFAAIAGAGPLVGPVLAAQMGYLPGTLWLIAGVVLAGAVQDFMVLFLSTRRNGRSLGDMVREEMGRIPGTIALFGCFLIMIIILAVLALIVVKALAESPWGMFTVMATIPIAMFMGIYMRYIRPGRIGEISVVGVVLLLASIWLGGVIAADPVWGPAFTFTGVQITWMLVGYGFVAAVLPVWLVLAPRDYLSTFLKIGTILGLAIGILIIAPELKMPALTQFTDGTGPVWKGTLFPFLFITIACGAVSGFHALISSGTTPKLLDNETNARYIGYGGMLMESFVAIMAMVAASVIEPGVYFAMNSPAAVVGTDVASVAQTVSSWGFLITPEQLEAVARDIGEHTILARAGGAPTLAVGIAQILHQVLPGENTMAFWYHFAILFEALFILTAVDAGTRAGRFMLQDLLGSFVPALKRTESWGANLLATAGCVALWGYLLYQGVIDPLGGINTLWPLFGISNQMLAGIALMLGTVVLIKMKAQRYIWVTLLPAVWLLICTTAAGLIKLFDPNPAVGFLALAKKYSTALDAGQVLAPAKDIGQMQHVDLHAYTNAGLTILFLLVVFSILFFAIKVGYAALGRKERSDKETPFQALPDDVIERTAIISVQRLGSTGQIPGAGSPPDGRHARLRQLCRTHAENASGQAGDELRGILPRTSGSTLRWQVRAQVLLSLRFV

SEQ ID NO: 36722 - DNA, 1668 bp, Aquifex aeolicus
  CDS (1)..(1668): transl_table=11
atgcatgcccttccgttaatagggattgctttccttctttacgctttcggttacttcgtttactcaaagtatctggcagaaaagatttttcagcttgacgattcaagacctactcctgcaaaggaaataaacgacggggttgattacgttcctacgaacaagtggatacttctcggacaccactttacttctataacgggagcgggacctattgtgggacctgcaatagctgttatatggggatggcttcctgcctttttgtgggtggttctgggagctgtattcatcggtggagttcacgactttaccgctcttgtaacgtctataagacataaaggaaagtccatcgggactatcctcggtgaatacgcaggagaaaaggcgagggtcttatttttactcctcctgcttgcccttgcgatactcgttaacgcggttttcgcttacgtgatttcccttctctttgtaaagtatccctcaagtgtgcttcccgcgtggcttgtaattccactcgccgtgattttcggttttagcgtttacaggctaagggtgaacttcttaatccttacggtaatttttctgagtatcctgtattttggtatttacctcgggagtgtatccccgatagatgtaaagcctttagcagagtctctgggactttctcccataatgttgtggataatcgttctctttacttacgccttttttgcctcatctctgcccgtttgggttttgctccagccgagggacttcttaaacggtttgcaactccttatccttcttattttactctacatcggtgcggtaattgcaaatcctaagatagtagcccctgcggttaatttaaatccggagggagcaccgcctatattcccgtttctgtttataacgatagcctgcggggcgctgagtggttttcacgctttggtgtcttcgggaacttcatcaaaacagcttgaaaaggagagcgacgcgagggcggtcgggtatctcggatttatgggtgaaagctccctcgcccttgcggttataatcgcaaccactgcgggaatagccatgttttccgctgaaaagttccaggaactctactcttcgtggtcctccataaagtcctcaagtctcgttgcagtagttgacggcggggctaatctgctcggtgccgtcggcattcccgtagacttcgggaaaactgtaattgccactcttgttgttctctttgcagcaactactatggacacgagcgtgaggatacagaggtatatcctcggagagctcggagagatatacggggtgcgtttgcttacgaacccttgggtagcttccggagttgcggtactgacgtccatggctcttgttctttccaaagaaggcgggaagggtggtatggttttctggcccgttttcggtgctgcaaaccagcttctcgctgggctcgctctcctgataggatacctttacctaaaaagggtaaacaggcctactctccctatcctgattcccatgattttcgttctctttataacttccctcgccatggctatgaacgcttggaacaacttaatgaagggagacttactcctcttttccgttagctttataatactgctccttgaaatgtttataatctttgagtccttcagggctgtcaggcgtgctcccgctttttaa

SEQ ID NO: 36723 - protein, 555 aa, Aquifex aeolicus
MHALPLIGIAFLLYAFGYFVYSKYLAEKIFQLDDSRPTPAKEINDGVDYVPTNKWILLGHHFTSITGAGPIVGPAIAVIWGWLPAFLWVVLGAVFIGGVHDFTALVTSIRHKGKSIGTILGEYAGEKARVLFLLLLLALAILVNAVFAYVISLLFVKYPSSVLPAWLVIPLAVIFGFSVYRLRVNFLILTVIFLSILYFGIYLGSVSPIDVKPLAESLGLSPIMLWIIVLFTYAFFASSLPVWVLLQPRDFLNGLQLLILLILLYIGAVIANPKIVAPAVNLNPEGAPPIFPFLFITIACGALSGFHALVSSGTSSKQLEKESDARAVGYLGFMGESSLALAVIIATTAGIAMFSAEKFQELYSSWSSIKSSSLVAVVDGGANLLGAVGIPVDFGKTVIATLVVLFAATTMDTSVRIQRYILGELGEIYGVRLLTNPWVASGVAVLTSMALVLSKEGGKGGMVFWPVFGAANQLLAGLALLIGYLYLKRVNRPTLPILIPMIFVLFITSLAMAMNAWNNLMKGDLLLFSVSFIILLLEMFIIFESFRAVRRAPAF

SEQ ID NO: 36724 - DNA, 1797 bp, Bacillus subtilis
  CDS (1)..(1797): transl_table=11
atgaatgcggttacaattgtgatagcatcaatgtgtattttggctattgcctatcgtttatacggaacatttatgatggtgaaggttctcaaagtgaatgatgacaagccaacacctgctcatgcgcttgaggatgggaaagactatgtgcctacaaataaatgggtttcgttcggccaccactttgccgcgatcgcagcggccgggccgctggtcggaccaattctggcggcgcagtttggctatttgccgggattattgtggctgttaatcggggcggtaattgggggagccgtccatgatattgtggtgttgtttgcatcgatgcgcaaaaacggaaaatcgctgtcggaagtggcgaaggatgagcttggccctgttgcaggattttgtacaggactgtccatgctgtttatcatcacgatcacaatggcgggcctgtcgatggttgtcttgcatgcgcttgaacgtaatccatggggaacatttgcggtggggattacgattccgattgcgatgggtgtgggcttattttataagaaaacgggaaatttaaagctcgcttcaacggtcggctttctctttttaatggcaggagtctttatcggtccatgggtacagactaccgcgctcggtgactttttaacgctagatacgaaaacgcttgcaatcgcgcttcctgtttatgcgttttttgcggctgcgcttcccgtttggctgcttctggctccgcgtgattatttaagcagctttatgaaaatcggtgtttttatcgctttgattgttggtgtgtttgtcgtcaatccgtccattccgttccctgcgtttacagaattcgtaaaaggcggagggccggtgctggcaggacctgtctggccgttcatctcaataaccatcgcctgcggggcgatctctgggttccatgcctttgtcggctcaggaacgacaccgaaaatgctgaataaatggagtgatatgaagccggttgcgtttggcgcaatgcttgttgagtgtcttgtcggtatcatggcgctgattgcagcgaccgctttacagcctgctgattactttgcgattaacagcacgcctgaggttttccgtacgcttggcatgaatgtcgtacatttgcctgaattgagcggggaaatcggtttggacttagaaggaagaacagggggagccgtcacgcttgcggtagggatgacttatatttttaccggaatgccgtttttcagccatttggcctcatactttttccaatttgtcattatgtttgaagcggtctttattttaacagcgattgacgccggcacacgtgtcgcccgttatttgatccaggacttcttcggggaggtgtataagccgctgaagaaaacagactggattccgggctctgtatttgccagcgcgcttgcctgtttgatgtgggggtacttgctgtattcaggagatatcggttccatttgggcgctcttcggcgtttctaatcggctgatggcttcagtggggctgattatcggagcgacgatcgtgctgaaaatcgccgataaacgccggtacattctgacttgccttatcccgcttgcctatttatatgtcactgtcaattatgcgggctattggatggtgcgcaatgtgtatctcaatcctgaagcagcaggatatagtgtattgaatggcgtattatctatcatcatgctggtgttaggcttcatcattatcgtggcggctgtgaaaaaatgggcgcagatgtggaaagatccgagcttaaggatggaagcatctataccgggctag

SEQ ID NO: 36725 - protein, 598 aa, Bacillus subtilis
MNAVTIVIASMCILAIAYRLYGTFMMVKVLKVNDDKPTPAHALEDGKDYVPTNKWVSFGHHFAAIAAAGPLVGPILAAQFGYLPGLLWLLIGAVIGGAVHDIVVLFASMRKNGKSLSEVAKDELGPVAGFCTGLSMLFIITITMAGLSMVVLHALERNPWGTFAVGITIPIAMGVGLFYKKTGNLKLASTVGFLFLMAGVFIGPWVQTTALGDFLTLDTKTLAIALPVYAFFAAALPVWLLLAPRDYLSSFMKIGVFIALIVGVFVVNPSIPFPAFTEFVKGGGPVLAGPVWPFISITIACGAISGFHAFVGSGTTPKMLNKWSDMKPVAFGAMLVECLVGIMALIAATALQPADYFAINSTPEVFRTLGMNVVHLPELSGEIGLDLEGRTGGAVTLAVGMTYIFTGMPFFSHLASYFFQFVIMFEAVFILTAIDAGTRVARYLIQDFFGEVYKPLKKTDWIPGSVFASALACLMWGYLLYSGDIGSIWALFGVSNRLMASVGLIIGATIVLKIADKRRYILTCLIPLAYLYVTVNYAGYWMVRNVYLNPEAAGYSVLNGVLSIIMLVLGFIIIVAAVKKWAQMWKDPSLRMEASIPG

SEQ ID NO: 36726 - DNA, 2064 bp, Helicobacter pylori J99
  CDS (1)..(2064): transl_table=11
atgcaaaaaagtttagtttctttggcttgggtttttgtcgctattttaggggcgatctgtttaggggtgttagccttacacaagggcgagagcattaacacgctatggcttgtagtagcgagcgcttgcatttatagcataggctatcgtttttatagccattttatcgcttatcgggtgttaaagctagacgatagcagagccacgcccgcatgcgtaaggaatgacggaaaggattttgtgccaaccgataaagccatcacctttgggcatcatttcgccgctattgctggggctggccctttagtaggcccgatattagccgctcaaatgggttacttgccctctattctatggattttgataggctcggttttagggggttgcgtgcatgattttgtggtgctttttgcttccattaggcgcgatggcaagtctttaggcgaaatgatcaagcttgaaatgggtaaatttgtagggatgatcgcaagtcttggcattttagggatcatgctcattatcattgcgattttggcgatggtggtggtgaaggctttagcgcattcgccttggggcttttttacgatcgctatgaccattcccattgcgattcttatggggctttacatgcggtttttcaggccgcataagattttagaagtttctgttatcggctttattttgttgattatagcgatttatgcgggtaaatacgtttctttagatcccaaactagcgtcaatttttacttttgaggccggctctttagcgtggatgatcatgggttatggttttgtggcttctattttgccggtatggtttttactcgctccacgagactatttaagcacttttttaaaaattggcgttataggggtgttggttgtggctattgtttttgtcgctccgcccttacaaatccctaaaatcacgccctttgtagatggcagtgggcctgtgtttgcaggaagcgtgttccctttcttgtttatcacggtggcttgcgggacgattagcggattccatgctttaatttcttcaggcacgacccctaaaatgctcgctaaagaaagcgacgccaggctagtgggctatggctctatggtgatggagagcgtcgtggctcttatggcgttggtgtgcgcagggattttacacccagggctttatttcgctatcaattccccagaagtgagcatcggtaaagatatagctgatgcggcttcggtgattagctcatgggggtttagtatcagcgctgaagaaatccgtgagatgactaaaaacattggcgaaagctccattttgagccgcaccggtggggcgcccacttttgcgatcggtttagcgatgatcgtgtatcacattttaggggatccaagcgtgatggcgttttggtaccattttgcgattttgtttgaagctttgttcattttaaccgctgtggatgctggcacacgaaccgctcgttttatgatccaagatttgctcggtaatatttataagcctttgggcgatcttagttcctataaggctgggatttttgccactcttttgtgcgtggcagggtgggggtatttcttgtatcaaggcacgatcgatcctaaaggggggatttatacgctatggcctttatttggcgtgagtaaccagatgttagcgggcatggcgttgttgttggttacggtggtgttgtttaaaatggggcgttttaagggggcgataataagcgccttgccggcagttttgatcttagcaatcactttttatagcggtattttaaaagtgatgccaaagagtaatgatagcgtgcttaataacgtttcgcatgtggcgcaaatgcaaatcatcaaagaaaaaatcgcgctcactacggatgaaaaagcgctaaaaacgctccaaaaatccttttttaaccatgcgattgatgcgattttgtgcgtgtttttcatgctggtggcgcttctagtgctgatcgtgagcgttaggatttgctcaaacgcttattttaaaaatcaaatttacccaccactggctgaaacgccctacatcaaagccgcttga

SEQ ID NO: 36727 - protein, 687 aa, Helicobacter pylori J99
MQKSLVSLAWVFVAILGAICLGVLALHKGESINTLWLVVASACIYSIGYRFYSHFIAYRVLKLDDSRATPACVRNDGKDFVPTDKAITFGHHFAAIAGAGPLVGPILAAQMGYLPSILWILIGSVLGGCVHDFVVLFASIRRDGKSLGEMIKLEMGKFVGMIASLGILGIMLIIIAILAMVVVKALAHSPWGFFTIAMTIPIAILMGLYMRFFRPHKILEVSVIGFILLIIAIYAGKYVSLDPKLASIFTFEAGSLAWMIMGYGFVASILPVWFLLAPRDYLSTFLKIGVIGVLVVAIVFVAPPLQIPKITPFVDGSGPVFAGSVFPFLFITVACGTISGFHALISSGTTPKMLAKESDARLVGYGSMVMESVVALMALVCAGILHPGLYFAINSPEVSIGKDIADAASVISSWGFSISAEEIREMTKNIGESSILSRTGGAPTFAIGLAMIVYHILGDPSVMAFWYHFAILFEALFILTAVDAGTRTARFMIQDLLGNIYKPLGDLSSYKAGIFATLLCVAGWGYFLYQGTIDPKGGIYTLWPLFGVSNQMLAGMALLLVTVVLFKMGRFKGAIISALPAVLILAITFYSGILKVMPKSNDSVLNNVSHVAQMQIIKEKIALTTDEKALKTLQKSFFNHAIDAILCVFFMLVALLVLIVSVRICSNAYFKNQIYPPLAETPYIKAA

SEQ ID NO: 36728 - DNA, 2064 bp, Helicobacter pylori
  CDS (1)..(2064): transl_table=11
atgcaaaaaagtttagtttctttggcttgggtttttgtagctattttaggggcgatctgtttaggggtgttagccttacacaagggtgagagcattaacacgctatggcttgtagtagcgagcgcttgtatttatagcataggctatcgtttttatagccattttatcgcttataaggtgttaaagctagatgatagcagagccacgcccgcatgcgtaaggaatgatggcaaggattttgtgccaaccgataaagcgatcacttttgggcaccatttcgccgctattgctggggctggccctttagtaggcccgatactagccgctcaaatgggttacttgccctctatcttatggattttgataggctcggttttagggggttgcgtgcatgattttgtggtgctttttgcttctattaggcgcgatggcaagtctttaggcgaaatgatcaaacttgaaatgggccaatttgtaggcatgatcgcaagtctgggcattttagggatcatgctcattatcattgcgattttagcgatggtggtggtgaaggctttagcgcattcgccttggggcttttttacgatcgcaatgactattcccattgcgattcttatggggctttacatgcggtttttcaggccacacaagattttagaggtttctgttattggctttatcctattgattatagcgatttatgcgggtaaatacgtttctttagatcctaaattagcgtcaatattcacttttgaggccagttctttagcgtggatgatcatgggctatgggtttgtggcttctattttaccggtatggtttttactcgctccacgagattatctaagcacttttttaaaaattggcgttataggggtgttggttgtggccattatttttgtcgctccgcctttacaaatccctaaaatcacgccctttgtagatggcagtgggcctgtgtttgcaggaagcgtgttccctttcttgtttatcacggtggcttgcgggacgattagcggattccatgctttaatttcttcaggcacgacccctaaaatgctcgctaaagaaagcgacgcaaggctagtgggctatggctctatggtgatggagagcgttgtggctcttatggcgttggtgtgcgcagggatcttgcacccagggctttatttcgctatcaattcgccagaagtgagcatcggtaaagatatagctgatgcggcttcagtgattagctcatgggggtttaatatcagcgctgaagaaattcgtgagatgactaaaaacatcggcgaaagctccattttgagccgcaccggtggggcgcccacttttgcgatcggtttagcgatgattgtgtatcacattttaggggatccaagcgtgatggcgttttggtatcattttgcgattttgtttgaagctttgttcattttaaccgctgtggatgctggcacacgaaccgctcgtttcatgattcaagatttgctcggtaatgtttataagcctttgggcgatcttagctcttataaggctgggatttttgccactcttttgtgcgtggcagggtgggggtatttcttgtatcaaggcacgattgatcctaaaggggggatttatacgctatggcctttatttggcgtgagcaatcagatgttagcgggcatggcgttgttgttggtcacggtggtgttgtttaaaatggggcgttttaagggggcgatgataagcgccttaccggcagttttgattttatccatcactttttatagcggtattttaaaggtggtgccaaagagcgataacagcgtgctgaataatgtttcccatgtggcgcaaatgcaaatcatcaaagaaaaaatggctaccactaccgatgaaaaagcgctcaaaacgctccaaaaatccttttttaaccacgctattgatgcgattttgtgcgtgtttttcatgcttgtggcgctattggttttaatcgtgagcgttaggatttgctcaaacgcttattttaaaaacaaaatttacccaccgctggctgaaacgccctacatcaaagcctcttga

SEQ ID NO: 36729 - protein, 687 aa, Helicobacter pylori
MQKSLVSLAWVFVAILGAICLGVLALHKGESINTLWLVVASACIYSIGYRFYSHFIAYKVLKLDDSRATPACVRNDGKDFVPTDKAITFGHHFAAIAGAGPLVGPILAAQMGYLPSILWILIGSVLGGCVHDFVVLFASIRRDGKSLGEMIKLEMGQFVGMIASLGILGIMLIIIAILAMVVVKALAHSPWGFFTIAMTIPIAILMGLYMRFFRPHKILEVSVIGFILLIIAIYAGKYVSLDPKLASIFTFEASSLAWMIMGYGFVASILPVWFLLAPRDYLSTFLKIGVIGVLVVAIIFVAPPLQIPKITPFVDGSGPVFAGSVFPFLFITVACGTISGFHALISSGTTPKMLAKESDARLVGYGSMVMESVVALMALVCAGILHPGLYFAINSPEVSIGKDIADAASVISSWGFNISAEEIREMTKNIGESSILSRTGGAPTFAIGLAMIVYHILGDPSVMAFWYHFAILFEALFILTAVDAGTRTARFMIQDLLGNVYKPLGDLSSYKAGIFATLLCVAGWGYFLYQGTIDPKGGIYTLWPLFGVSNQMLAGMALLLVTVVLFKMGRFKGAMISALPAVLILSITFYSGILKVVPKSDNSVLNNVSHVAQMQIIKEKMATTTDEKALKTLQKSFFNHAIDAILCVFFMLVALLVLIVSVRICSNAYFKNKIYPPLAETPYIKAS

SEQ ID NO: 36730 - DNA, 2277 bp, Mycobacterium tuberculosis
  CDS (1)..(2277): transl_table=11
gtggcagcgccgaccccgtcgaatcggatcgaagaacgctccggacacgccagctgcgtccgcgccgatgccgacctgccacccgtggccatcctcggtcgctcccccatcacgcttcggcacaagatcttcttcgtggccgttgccgtgatcggcgctctcgcctggaccgtcgtcgcgttcttccgcaacgagccggtcaacgcggtctggatcgtggtcgcagcgggctgcacctacatcatcgggttccggttttatgcgcggctgatcgaaatgaaagtcgtccgtccccgcgacgatcacgccaccccggccgaaatcctcgacgacggcaccgactacgtgcccaccgaccggcgggtggtattcggacaccacttcgccgccatcgccggtgccgggccgcttgtcggaccagtactggccacccagatgggttacttacccagcagcatctggattgtcgtcggcgcggtgctggccggatgtgtccaggactacctggtgttgtggatctccgtgcggcggcgtggccgctccctgggtcagatggttcgcgacgaactcggcgccaccgccggagtggccgccctcgttggaatcccggtcattatcaccattgtgatcgcggtgctggcgctggtggtcgtgcgggccctggccaagagcccatggggcgtcttctcgatcgccatgaccatccccatcgccatcttcatgggctgctacttgcggttcctacgtcccgggcgggtgtcggaagtttcattgatcgggatcggactgctgctgctcgccgttgtctccggtgattgggttgcccatacctcctggggcgcagcgtggttcagcttgtcaccggtgacactgtgttggcttctcatcagctatggcttcgcagcttcggtgctgccggtgtggctgctgctcgcgccacgcgactacctgtcaacgttcatgaaggtcggcaccatcgcgcttctcgcgatcggtgtttgtgcggctcacccgatcatcgaggccccagcggtgtcgaaattcgccggtagcggcaacggcccggtgttcgccggctcactgtttccattcctgttcatcaccatcgcgtgcggggcgctgtctggattccacgcgctcatctgctcgggcacgacgccgaagatgctggagaaggaaggccagatgcgcgtgatcggctacggcggcatgatgaccgagtccttcgtcgccgtcatagcactactcaccgcggcgatcctcgaccagcacctatacttcaccctcaacgcgccgtccctgcatacccacgacagcgcagccaccgccgccaagtacgtcaacgggctcggtttgacgggctcaccggtgaccccagaccacatcagccaggccgccgccagcgtcggcgaacagacgatcgtgtcgcgcaccggcggtgcgccgacgctggcgttcggcatggcggagatgctgcatcgagtggtcggcggtgtgggcctcaaggcgttctggtatcacttcgcgatcatgtttgaggctctgttcatcctcaccaccgtcgacgccggcaccagggccgcgcgcttcatgatctccgatgcgctgggcaactttggcggtgtgctgcgcaaactgcagaatccgagctggcgtcccggtgcgtgggcttgccgtttggtggtcgtcgcggcgtggggcagcatcctgctgctcggtgtgaccgatccgctgggcggcatcaacacgctgttcccgctgttcggcattgccaaccagttgcttgccggaattgcgctgaccgtcatcaccgtcgtcgtcatcaagaaggggcgactgaagtgggcttggataccgggtattccactgctgtgggatctggcggtcaccctgaccgcatcgtggcagaagatcttctccgctgatccttctgtcggctactggactcagcatgctcactacgcggcagcccagcacgcaggcgagaccgcgttcggctcggccaccaacgccgatgagatcaacgacgtcgtccggaacacattcgtccagggcaccctgtcgatcgtcttcgtggtggtcgtcgtgctggttgttgtcgccggagtcatagtggcgctgaagacaattcgcggccgcggcataccgttggccgaggacgatccggcgccgtcgacgttgttcgcgcccgctggcctgattcctacagccgcagagcgaaagttgcaacgacgtttgggcgcgccggcctcggcttccgtcgcggcgcccgactag

SEQ ID NO: 36731 - protein, 758 aa, Mycobacterium tuberculosis
MAAPTPSNRIEERSGHASCVRADADLPPVAILGRSPITLRHKIFFVAVAVIGALAWTVVAFFRNEPVNAVWIVVAAGCTYIIGFRFYARLIEMKVVRPRDDHATPAEILDDGTDYVPTDRRVVFGHHFAAIAGAGPLVGPVLATQMGYLPSSIWIVVGAVLAGCVQDYLVLWISVRRRGRSLGQMVRDELGATAGVAALVGIPVIITIVIAVLALVVVRALAKSPWGVFSIAMTIPIAIFMGCYLRFLRPGRVSEVSLIGIGLLLLAVVSGDWVAHTSWGAAWFSLSPVTLCWLLISYGFAASVLPVWLLLAPRDYLSTFMKVGTIALLAIGVCAAHPIIEAPAVSKFAGSGNGPVFAGSLFPFLFITIACGALSGFHALICSGTTPKMLEKEGQMRVIGYGGMMTESFVAVIALLTAAILDQHLYFTLNAPSLHTHDSAATAAKYVNGLGLTGSPVTPDHISQAAASVGEQTIVSRTGGAPTLAFGMAEMLHRVVGGVGLKAFWYHFAIMFEALFILTTVDAGTRAARFMISDALGNFGGVLRKLQNPSWRPGAWACRLVVVAAWGSILLLGVTDPLGGINTLFPLFGIANQLLAGIALTVITVVVIKKGRLKWAWIPGIPLLWDLAVTLTASWQKIFSADPSVGYWTQHAHYAAAQHAGETAFGSATNADEINDVVRNTFVQGTLSIVFVVVVVLVVVAGVIVALKTIRGRGIPLAEDDPAPSTLFAPAGLIPTAAERKLQRRLGAPASASVAAPD

SEQ ID NO: 36732 - DNA, 2166 bp, Escherichia coli
  CDS (1)..(2166): transl_table=11
atgccaggttttactatggatactaaaaagatattcaagcacataccctgggtgattctcggaatcatcggtgcattctgcctcgcggtagttgcattacgtcggggggagcacatcagcgccctgtggatcgtggtcgcctctgtatcggtgtatctggtggcgtatcgctactacagtctgtacatcgcccagaaggtgatgaaactcgaccccacgcgcgcgacgcctgcggttattaacaacgacggtctgaactacgttccgaccaaccgttacgtgttgtttggtcaccacttcgccgctatcgccggtgctggtccgctggtgggtccggttctcgccgcgcagatgggctacctgcctggcacgctgtggctgctggcgggggtcgtgctggccggtgcggttcaggactttatggtgctgtttatctcctctcgccgtaatggcgcatctcttggtgagatgatcaaagaagagatgggaccagtaccggggactatcgcgctgtttggctgtttcttaatcatgatcatcatcctcgccgtcctggcgctgattgtggttaaagccctggccgaaagtccgtggggtgtcttcaccgtttgctcaaccgtaccgattgcgctgtttatgggtatctacatgcgctttattcgtccggggcgtgtgggtgaagtctctgtcattggtatcgtgctgctggttgcctctatctacttcggtggcgtgattgctcacgatccgtactggggtccggcactgacctttaaagacaccaccattaccttcgcgctgattggctatgcgtttgtttccgcactgctgccagtgtggctgatcctcgcaccgcgcgactatctggcaaccttcctgaaaatcggcgttatcgtcggcctggcgctgggtatcgtggtgctgaacccggaactgaaaatgcctgccatgacccagtacattgacggtactggcccgctgtggaaaggcgctctgttcccgttcctgttcatcaccatcgcctgtggtgcggtatctggcttccacgcgctgatctcttccggtacgacgccaaaactgctggctaatgaaaccgacgcgcgtttcatcggctacggcgcaatgctgatggagtccttcgtggcgattatggcgctggttgctgcgtccatcatcgaaccgggtctttacttcgcgatgaacaccccgcctgctggccttggcatcaccatgcctaacctgcatgaaatgggtggcgagaacgcgccgatcatcatggcgcagctgaaagacgttaccgcacacgcggcagcgaccgtcagctcctggggcttcgtgatttcgccagagcagatcctgcaaaccgcgaaagacattggtgagccttctgtcctgaaccgtgcaggtggcgcgccgacgctggcggtaggtatcgcgcacgtgttccacaaagtgctgccgatggctgacatgggcttctggtatcacttcggtattctgttcgaagccctgttcatcctgaccgcgctggatgcgggtacccgttctggccgctttatgctgcaagacctgctgggtaacttcatcccgttcctgaaaaaaaccgattctctggttgccggtatcatcggtactgcgggctgtgtgggtctgtggggctacctgctgtatcagggcgtggttgatccgctgggcggcgttaagagcctgtggccgctgttcggtatctccaaccagatgctggcagccgtagcgctggtactgggcaccgttgtgctgattaagatgaagcgcacccaatacatctgggtaactgttgttccggctgtatggctgcttatctgcaccacctgggcgctgggcctgaaactgttcagcaccaacccgcagatggaaggcttcttctacatggcaagccagtacaaagagaagattgctaacggtactgacctgacggcgcagcagattgccaatatgaaccacatcgttgtgaacaactacaccaacgcaggtctgagtattctgttcctgattgtggtgtacagcatcatcttctacggtttcaaaacctggcttgcggtgcgtaacagcgacaaacgtactgacaaagaaacaccgtacgttccaatcccggaaggcggcgtgaagatctcttcgcaccactaa

SEQ ID NO: 36733 - protein, 721 aa, Escherichia coli
MPGFTMDTKKIFKHIPWVILGIIGAFCLAVVALRRGEHISALWIVVASVSVYLVAYRYYSLYIAQKVMKLDPTRATPAVINNDGLNYVPTNRYVLFGHHFAAIAGAGPLVGPVLAAQMGYLPGTLWLLAGVVLAGAVQDFMVLFISSRRNGASLGEMIKEEMGPVPGTIALFGCFLIMIIILAVLALIVVKALAESPWGVFTVCSTVPIALFMGIYMRFIRPGRVGEVSVIGIVLLVASIYFGGVIAHDPYWGPALTFKDTTITFALIGYAFVSALLPVWLILAPRDYLATFLKIGVIVGLALGIVVLNPELKMPAMTQYIDGTGPLWKGALFPFLFITIACGAVSGFHALISSGTTPKLLANETDARFIGYGAMLMESFVAIMALVAASIIEPGLYFAMNTPPAGLGITMPNLHEMGGENAPIIMAQLKDVTAHAAATVSSWGFVISPEQILQTAKDIGEPSVLNRAGGAPTLAVGIAHVFHKVLPMADMGFWYHFGILFEALFILTALDAGTRSGRFMLQDLLGNFIPFLKKTDSLVAGIIGTAGCVGLWGYLLYQGVVDPLGGVKSLWPLFGISNQMLAAVALVLGTVVLIKMKRTQYIWVTVVPAVWLLICTTWALGLKLFSTNPQMEGFFYMASQYKEKIANGTDLTAQQIANMNHIVVNNYTNAGLSILFLIVVYSIIFYGFKTWLAVRNSDKRTDKETPYVPIPEGGVKISSHH

SEQ ID NO: 36734 - DNA, 25 bp, Artificial sequence
  Primer sequence
atgaacaaatcagggaaatacctcg

SEQ ID NO: 36735 - DNA, 22 bp, Artificial sequence
  Primer sequence
ttagtgtgcgccttttgcctgc

SEQ ID NO: 36736 - protein, 846 aa, Artificial sequence
  Consensus
  Variant (2)..(7): Xaa in position 2 to 7 is any amino acid
  Variant (9)..(12): Xaa in position 9 to 12 is any amino acid
  Variant (16)..(17): Xaa in position 16 to 17 is any amino acid
  Variant (19)..(20): Xaa in position 19 to 20 is any amino acid
  Variant (23)..(32): Xaa in position 23 to 32 is any amino acid
  Variant (33)..(35): Xaa in position 33 to 35 is any or no amino acid
  Variant (39)..(42): Xaa in position 39 to 42 is any amino acid
  Variant (45)..(45): Xaa in position 45 is any amino acid
  Variant (50)..(54): Xaa in position 50 to 54 is any amino acid
  Variant (55)..(55): Xaa in position 55 is any or no amino acid
  Variant (58)..(60): Xaa in position 58 to 60 is any amino acid
  Variant (62)..(63): Xaa in position 62 to 63 is any amino acid
  Variant (67)..(67): Xaa in position 67 is any amino acid
  Variant (71)..(71): Xaa in position 71 is any amino acid
  Variant (77)..(82): Xaa in position 77 to 82 is any amino acid
  Variant (83)..(84): Xaa in position 83 to 84 is any or no amino acid
  Variant (86)..(86): Xaa in position 86 is any amino acid
  Variant (91)..(91): Xaa in position 91 is any amino acid
  Variant (93)..(93): Xaa in position 93 is any amino acid
  Variant (95)..(95): Xaa in position 95 is any amino acid
  Variant (100)..(100): Xaa in position 100 is any amino acid
  Variant (102)..(107): Xaa in position 102 to 107 is any amino acid
  Variant (109)..(109): Xaa in position 109 is any amino acid
  Variant (111)..(112): Xaa in position 111 to 112 is any amino acid
  Variant (114)..(114): Xaa in position 114 is any amino acid
  Variant (117)..(118): Xaa in position 117 to 118 is any amino acid
  Variant (120)..(123): Xaa in position 120 to 123 is any amino acid
  Variant (126)..(133): Xaa in position 126 to 133 is any amino acid
  Variant (134)..(142): Xaa in position 134 to 142 is any or no amino acid
  Variant (144)..(146): Xaa in position 144 to 146 is any amino acid
  Variant (149)..(149): Xaa in position 149 is any amino acid
  Variant (153)..(159): Xaa in position 153 to 159 is any amino acid
  Variant (161)..(171): Xaa in position 161 to 171 is any amino acid
  Variant (175)..(175): Xaa in position 175 is any amino acid
  Variant (177)..(181): Xaa in position 177 to 181 is any amino acid
  Variant (182)..(360): Xaa in position 182 to 360 is any or no amino acid
  Variant (362)..(363): Xaa in position 362 to 363 is any or no amino acid
  Variant (365)..(366): Xaa in position 365 to 366 is any or no amino acid
  Variant (369)..(369): Xaa in position 369 is any amino acid
  Variant (374)..(375): Xaa in position 374 to 375 is any amino acid
  Variant (378)..(382): Xaa in position 378 to 382 is any amino acid
  Variant (384)..(384): Xaa in position 384 is any amino acid
  Variant (385)..(389): Xaa in position 385 to 389 is any or no amino acid
  Variant (391)..(391): Xaa in position 391 is any amino acid
  Variant (393)..(397): Xaa in position 393 to 397 is any amino acid
  Variant (399)..(400): Xaa in position 399 to 400 is any amino acid
  Variant (403)..(411): Xaa in position 403 to 411 is any amino acid
  Variant (413)..(421): Xaa in position 413 to 421 is any amino acid
  Variant (422)..(442): Xaa in position 422 to 442 is any or no amino acid
  Variant (446)..(446): Xaa in position 446 is any amino acid
  Variant (462)..(463): Xaa in position 462 to 463 is any amino acid
  Variant (464)..(464): Xaa in position 464 is any or no amino acid
  Variant (466)..(469): Xaa in position 466 to 469 is any amino acid
  Variant (471)..(471): Xaa in position 471 is any amino acid
  Variant (473)..(474): Xaa in position 473 to 474 is any amino acid
  Variant (476)..(478): Xaa in position 476 to 478 is any amino acid
  Variant (480)..(480): Xaa in position 480 is any amino acid
  Variant (482)..(482): Xaa in position 482 is any amino acid
  Variant (488)..(488): Xaa in position 488 is any amino acid
  Variant (490)..(491): Xaa in position 490 to 491 is any amino acid
  Variant (496)..(499): Xaa in position 496 to 499 is any amino acid
  Variant (501)..(508): Xaa in position 501 to 508 is any amino acid
  Variant (509)..(594): Xaa in position 509 to 594 is any or no amino acid
  Variant (596)..(601): Xaa in position 596 to 601 is any amino acid
  Variant (602)..(604): Xaa in position 602 to 604 is any or no amino acid
  Variant (606)..(616): Xaa in position 606 to 616 is any amino acid
  Variant (617)..(632): Xaa in position 617 to 632 is any or no amino acid
  Variant (636)..(638): Xaa in position 636 to 638 is any amino acid
  Variant (640)..(641): Xaa in position 640 to 641 is any amino acid
  Variant (644)..(645): Xaa in position 644 to 645 is any amino acid
  Variant (647)..(647): Xaa in position 647 is any amino acid
  Variant (649)..(649): Xaa in position 649 is any amino acid
  Variant (651)..(652): Xaa in position 651 to 652 is any amino acid
  Variant (654)..(654): Xaa in position 654 is any amino acid
  Variant (657)..(657): Xaa in position 657 is any amino acid
  Variant (659)..(687): Xaa in position 659 to 687 is any amino acid
  Variant (688)..(710): Xaa in position 688 to 710 is any or no amino acid
  Variant (713)..(714): Xaa in position 713 to 714 is any amino acid
  Variant (717)..(717): Xaa in position 717 is any amino acid
  Variant (721)..(721): Xaa in position 721 is any amino acid
  Variant (724)..(724): Xaa in position 724 is any amino acid
  Variant (726)..(726): Xaa in position 726 is any amino acid
  Variant (728)..(733): Xaa in position 728 to 733 is any amino acid
  Variant (735)..(735): Xaa in position 735 is any amino acid
  Variant (737)..(742): Xaa in position 737 to 742 is any amino acid
  Variant (743)..(746): Xaa in position 743 to 746 is any or no amino acid
  Variant (748)..(749): Xaa in position 748 to 749 is any amino acid
  Variant (752)..(753): Xaa in position 752 to 753 is any amino acid
  Variant (756)..(774): Xaa in position 756 to 774 is any amino acid
  Variant (775)..(834): Xaa in position 775 to 834 is any or no amino acid
  Variant (836)..(845): Xaa in position 836 to 845 is any amino acid
LXXXXXXVXXXXIAYXXYXXFIXXXXXXXXXXXXXTPAXXXXDGXDYVPXXXXXXLFXXXFXXIAGXGPLXGPVLAXXXXXXXXGXLWIVXGXVXAGAVXDXXXXXXSXRXXGXSLXXMXXXXLGXXXXXXXXXXXXXXXXXIXXXVLXLVVXXXXXXXPXXXXXXXXXXXIALXMXXXXXXXXXXXXXXXXXXXXXXXXXXXXXXXXXXXXXXXXXXXXXXXXXXXXXXXXXXXXXXXXXXXXXXXXXXXXXXXXXXXXXXXXXXXXXXXXXXXXXXXXXXXXXXXXXXXXXXXXXXXXXXXXXXXXXXXXXXXXXXXXXXXXXXXXXXXXXXXXXXXXXXXXXXXXXXXXXXXXXXXXLXXYXXVAXVLPVXXLLXXXXXLXXXXXXLXIXXXXXLXXGIXXXXXXXXXPXXXXXXXXXXXXXXXXXXXXXXXXXXXXXXLFPXLFITIACGAISGFHAXXXSXXXXKXLXXEXXXRXIXYGAMLXEXXVAIMXXXXAXXXXXXXXXXXXXXXXXXXXXXXXXXXXXXXXXXXXXXXXXXXXXXXXXXXXXXXXXXXXXXXXXXXXXXXXXXXXXXXXXXXXXXXXXXXXXXGXXXXXXXXXAXXXXXXXXXXXXXXXXXXXXXXXXXXXAILXXXLXXLTXXDXGXRXXRXMLXDXXXXXXXXXXXXXXXXXXXXXXXXXXXXXXXXXXXXXXXXXXXXXXXXXXXXLWXXFGXSNQXLAXIXLXXXXXXLXKXXXXXXXXXXVXXVPXXFLXXXXXXXXXXXXXXXXXXXXXXXXXXXXXXXXXXXXXXXXXXXXXXXXXXXXXXXXXXXXXXXXXXXXXXXXXXXXXXXLXXXXXXXXXXI

SEQ ID NO: 36737 - protein, 88 aa, Artificial sequence
  Consensus
  Variant (3)..(3): Xaa in position 3 is Ala or Ser
  Variant (4)..(7): Xaa in position 4 to 7 is any amino acid
  Variant (8)..(8): Xaa in position 8 is Asp or Asn
  Variant (9)..(9): Xaa in position 9 is Asp or Gly
  Variant (10)..(10): Xaa in position 10 is any amino acid
  Variant (11)..(11): Xaa in position 11 is Asp, Glu or Asn
  Variant (12)..(12): Xaa in position 12 is Phe, His or Tyr
  Variant (13)..(24): Xaa in position 13 to 24 is any amino acid
  Variant (25)..(25): Xaa in position 25 is Phe or Leu
  Variant (26)..(26): Xaa in position 26 is Ala, Ile or Leu
  Variant (27)..(27): Xaa in position 27 is Ala, Gly, Asn, Ser or Thr
  Variant (28)..(28): Xaa in position 28 is Ile or Val
  Variant (29)..(29): Xaa in position 29 is Ala or Ser
  Variant (30)..(30): Xaa in position 30 is Ala or Gly
  Variant (31)..(31): Xaa in position 31 is any amino acid
  Variant (34)..(34): Xaa in position 34 is Ile, Leu, Met or Val
  Variant (35)..(35): Xaa in position 35 is any amino acid
  Variant (37)..(40): Xaa in position 37 to 40 is any or no amino acid
  Variant (42)..(43): Xaa in position 42 to 43 is any amino acid
  Variant (45)..(49): Xaa in position 45 to 49 is any amino acid
  Variant (50)..(50): Xaa in position 50 is any or no amino acid
  Variant (52)..(52): Xaa in position 52 is Ile or Leu
  Variant (53)..(53): Xaa in position 53 is Gly, Ile, Leu or Val
  Variant (54)..(54): Xaa in position 54 is any amino acid
  Variant (56)..(56): Xaa in position 56 is Ala, Cys, Gly, Ser, Thr or Val
  Variant (57)..(57): Xaa in position 57 is any amino acid
  Variant (58)..(58): Xaa in position 58 is Phe, Ile, Leu, Met or Val
  Variant (59)..(59): Xaa in position 59 is Ala, Gly, Ile or Val
  Variant (61)..(61): Xaa in position 61 is Ala, Cys, Gly or Ser
  Variant (63)..(63): Xaa in position 63 is any amino acid
  Variant (65)..(67): Xaa in position 65 to 67 is any amino acid
  Variant (68)..(68): Xaa in position 68 is Gly or Leu
  Variant (69)..(70): Xaa in position 69 to 70 is any amino acid
  Variant (72)..(72): Xaa in position 72 is any amino acid
  Variant (73)..(73): Xaa in position 73 is Lys or Arg
  Variant (74)..(75): Xaa in position 74 to 75 is any amino acid
  Variant (76)..(76): Xaa in position 76 is Ala or Gly
  Variant (77)..(78): Xaa in position 77 to 78 is any amino acid
  Variant (79)..(79): Xaa in position 79 is Ile, Leu, Met or Val
  Variant (80)..(86): Xaa in position 80 to 86 is any amino acid
  Variant (87)..(87): Xaa in position 87 is Ile, Leu, Met or Val
  Variant (88)..(88): Xaa in position 88 is Gly or Ser
TPXXXXXXXXXXXXXXXXXXXXXXXXXXXXXGPXXGXXXXAXXGXXXXXXWXXXGXXXXGXVXDXXXXXXSXXXXXXXXXXXXXXXXX

SEQ ID NO: 36738 - protein, 23 aa, Artificial sequence
  Consensus
  Variant (2)..(4): Xaa in position 2 to 4 is any amino acid
  Variant (5)..(5): Xaa in position 5 is any or no amino acid
  Variant (7)..(7): Xaa in position 7 is any amino acid
  Variant (8)..(8): Xaa in position 8 is any or no amino acid
  Variant (11)..(11): Xaa in position 11 is Ile or Val
  Variant (12)..(13): Xaa in position 12 to 13 is any amino acid
  Variant (14)..(15): Xaa in position 14 to 15 is Ile or Leu
  Variant (16)..(22): Xaa in position 16 to 22 is any amino acid
  Variant (23)..(23): Xaa in position 23 is Ala, Gly, Gln, Ser or Thr
YXXXXAXXLPXXXXXXXXXXXXX

SEQ ID NO: 36739 - protein, 44 aa, Artificial sequence
  Consensus
  Variant (3)..(3): Xaa in position 3 is Ala, Ser or Thr
  Variant (7)..(7): Xaa in position 7 is Ile, Leu or Val
  Variant (12)..(14): Xaa in position 12 to 14 is any amino acid
  Variant (15)..(15): Xaa in position 15 is any or no amino acid
  Variant (17)..(17): Xaa in position 17 is Gly or Pro
  Variant (18)..(19): Xaa in position 18 to 19 is any amino acid
  Variant (20)..(20): Xaa in position 20 is Ala, Pro or Ser
  Variant (21)..(21): Xaa in position 21 is His, Lys or Arg
  Variant (22)..(31): Xaa in position 22 to 31 is any amino acid
  Variant (32)..(32): Xaa in position 32 is Ile, Leu or Val
  Variant (33)..(33): Xaa in position 33 is any amino acid
  Variant (34)..(34): Xaa in position 34 is Phe or Tyr
  Variant (35)..(37): Xaa in position 35 to 37 is any amino acid
  Variant (38)..(38): Xaa in position 38 is Ile, Leu, Met or Val
  Variant (39)..(39): Xaa in position 39 is any amino acid
  Variant (41)..(41): Xaa in position 41 is Ala, Cys, Gly or Ser
  Variant (42)..(43): Xaa in position 42 to 43 is any amino acid
  Variant (44)..(44): Xaa in position 44 is Ala, Gly or Ser
TIXCGAXSGFHXXXXSXXXXXXXXXXXXXXXXXXXXXXXEXXXX

SEQ ID NO: 36740 - protein, 20 aa, Artificial sequence
  Consensus
  Variant (2)..(4): Xaa in position 2 to 4 is any or no amino acid
  Variant (6)..(6): Xaa in position 6 is Ala, Ser or Thr
  Variant (7)..(7): Xaa in position 7 is any amino acid
  Variant (9)..(9): Xaa in position 9 is Ala, Ser or Thr
  Variant (10)..(10): Xaa in position 10 is Ala or Gly
  Variant (11)..(11): Xaa in position 11 is any amino acid
  Variant (13)..(14): Xaa in position 13 to 14 is any amino acid
  Variant (16)..(18): Xaa in position 16 to 18 is any amino acid
  Variant (19)..(19): Xaa in position 19 is Ala, Glu, Gln, Ser or Thr
  Variant (20)..(20): Xaa in position 20 is Asp or Glu
LXXXTXXDXXXRXXRXXXXX

SEQ ID NO: 36741 - protein, 39 aa, Artificial sequence
  Consensus
  Variant (2)..(3): Xaa in position 2 to 3 is any amino acid
  Variant (5)..(5): Xaa in position 5 is Ala, Gly, Ser or Thr
  Variant (6)..(6): Xaa in position 6 is any amino acid
  Variant (7)..(7): Xaa in position 7 is Ala, Gly, Asn, Ser or Thr
  Variant (9)..(11): Xaa in position 9 to 11 is any amino acid
  Variant (12)..(12): Xaa in position 12 is Ala, Gly or Ser
  Variant (13)..(15): Xaa in position 13 to 15 is any amino acid
  Variant (17)..(22): Xaa in position 17 to 22 is any amino acid
  Variant (23)..(23): Xaa in position 23 is any or no amino acid
  Variant (25)..(36): Xaa in position 25 to 36 is any amino acid
  Variant (37)..(38): Xaa in position 37 to 38 is any or no amino acid
WXXFXXXNXXXXXXXLXXXXXXXLXXXXXXXXXXXXXXP

SEQ ID NO: 36742 - DNA, 1386 bp, Escherichia coli
  CDS (1)..(1386)
atgctgacattcattgaactccttattggggttgtggttattgtgggtgtagctcgctacatcattaaagggtattccgccactggtgtgttatttgtcggtggcctgttattgctgattatcagtgccattatggggcacaaagtgttaccgtccagccaggcttcaacaggctacagcgccacggatatcgttgaatacgttaaaatattactaatgagccgcggcggcgacctcggcatgatgattatgatgctgtgtggatttgccgcttacatgacccatatcggcgcgaatgatatggtggtcaagctggcgtcaaaaccattgcagtatattaactccccttacctgctgatgattgccgcctattttgtcgcctgtctaatgtctctggccgtctcttccgcaaccggtctgggtgttttgctgatggcaaccctatttccggtgatggtaaacgttggtatcagtcgtggcgcagctgctgccatttgtgcctccccggcggcgattattctcgcaccgacttcaggggatgtggtgctggcggcgcaagcttccgaaatgtcgctgattgacttcgccttcaaaacgacgctgcctatctcaattgctgcaattatcggcatggcgatcgcccacttcttctggcaacgttatctggataaaaaagagcacatctctcatgaaatgttagatgtcagtgaaatcaccaccactgcccctgcgttttatgccattttgccgttcacgccgatcatcggtgtactgatttttgacggtaaatggggtccgcaattacacatcatcactattctggtgatttgtatgctgattgcctccattctggagttcctccgcagctttaatacccagaaagttttctctggtctggaagtggcttatcgcgggatggcagatgcgtttgctaacgtggtgatgctgctggttgccgctggggtattcgctcaggggcttagcaccatcggctttattcaaagtctgatttctatcgctacctcgtttggttcggcgagtatcatcctgatgctggtattggtgattctgacaatgctggcggcagtcacgaccggttcaggcaatgcgccgttttatgcgtttgttgagatgatcccgaaactggcgcactcttccggcattaacccggcgtatttgactatcccgatgctgcaggcgtcaaacctgggccgtaccctttcgcccgtttctggcgtagtcgttgcggttgccgggatggcgaaratctcgccgtttgaagtcgtaaaacgcacctcggtaccggtgcttgttggtttggtgattgttatcgttgctacagagctgatggtgccaggaacggcagcagcggtcacaggcaagtaa

SEQ ID NO: 36743 - protein, 461 aa, Escherichia coli
MLTFIELLIGVVVIVGVARYIIKGYSATGVLFVGGLLLLIISAIMGHKVLPSSQASTGYSATDIVEYVKILLMSRGGDLGMMIMMLCGFAAYMTHIGANDMVVKLASKPLQYINSPYLLMIAAYFVACLMSLAVSSATGLGVLLMATLFPVMVNVGISRGAAAAICASPAAIILAPTSGDVVLAAQASEMSLIDFAFKTTLPISIAAIIGMAIAHFFWQRYLDKKEHISHEMLDVSEITTTAPAFYAILPFTPIIGVLIFDGKWGPQLHIITILVICMLIASILEFLRSFNTQKVFSGLEVAYRGMADAFANVVMLLVAAGVFAQGLSTIGFIQSLISIATSFGSASIILMLVLVILTMLAAVTTGSGNAPFYAFVEMIPKLAHSSGINPAYLTIPMLQASNLGRTLSPVSGVVVAVAGMAKISPFEVVKRTSVPVLVGLVIVIVATELMVPGTAAAVTGK

SEQ ID NO: 36744 - DNA, 1350 bp, Pasteurella multocida subsp. multocida str. Pm70
  CDS (1)..(1350): transl_table=11
atggatttaattattggcttaattgccgttattctcgttggttattacattgtcaaaggctattctgccactggcgtgctaatgaccgtcggcttattgttattgctttgtagtgtgttattagacaaagccattctgccgaacagtgtcaaatcaacgggtagtctctacctcgatgtgtttgaatatgtcaaataccttttaatgaatcgtgggggcaaccttggtatgctgattatggtgttgtgtggttttgcggcttacatgactcatataggggcaaacgacatggtagtaaaactcgcctcccaaccgctcaaatacatcaaatccccttatctcttaatgattgttgcttattttcttgcctgtttaatgtcattagccgttccttctgcaacgggattaggggtcttattaatggcaacactgtttcctatcatggtcaatgtgggtatttcacgcggtgccgccgcctctatttgtgcctcccctgctgccattattctgtcgcccacttctggtgatgtcgtacttgcagcagaagtatcaaaaatgccgttattagattttgcttttcatctcaccttaccaatttccattctgacaattatctctatcgcgattgcccatttcttttggcagcgttacctcgatcgtaaagagggacatcgtgcagaaatgttagcagtgagtgaaatccaaacttcagcaccgcgtttttatgcgattttacccttcacccccattgttggcgtactggtctttgatggcaaaatagcaccagaacttcatatcattacgattattgtcatttgtttactcttggtcgccctgatcgattttttaagaacctttagtgcgaaaaaagtctatgaaaacttaaatgttgcttatcaaggtatggcggatgctttctctggcgtggtgattttgcttgtagccgcgggtgtttttgcacaaggattgagtactataggctttatccatgccttaattgattccgtccaatcagtcagcagtggtggtttcctcatgatgctcgcgctagcacttatcactgcactagccgcaattaccactggttcaggcaatgcccctttctatgcgtttgttgaattaattcccaaattagccgcccatatgggaattaacccggcttacctaaccattccaatgttacaagcctccaatattggtcgcagcctctcaccagtatctggtgtggttgtggcagtatcgggcatggcaaaaatctccccatttgaagtggtaaaacggatttcagtaccgatgttagtcggactcattgtcgtgattgttgcgacagaaattatggtggttgcctaa

SEQ ID NO: 36745 - protein, 449 aa, Pasteurella multocida subsp. multocida str. Pm70
MDLIIGLIAVILVGYYIVKGYSATGVLMTVGLLLLLCSVLLDKAILPNSVKSTGSLYLDVFEYVKYLLMNRGGNLGMLIMVLCGFAAYMTHIGANDMVVKLASQPLKYIKSPYLLMIVAYFLACLMSLAVPSATGLGVLLMATLFPIMVNVGISRGAAASICASPAAIILSPTSGDVVLAAEVSKMPLLDFAFHLTLPISILTIISIAIAHFFWQRYLDRKEGHRAEMLAVSEIQTSAPRFYAILPFTPIVGVLVFDGKIAPELHIITIIVICLLLVALIDFLRTFSAKKVYENLNVAYQGMADAFSGVVILLVAAGVFAQGLSTIGFIHALIDSVQSVSSGGFLMMLALALITALAAITTGSGNAPFYAFVELIPKLAAHMGINPAYLTIPMLQASNIGRSLSPVSGVVVAVSGMAKISPFEVVKRISVPMLVGLIVVIVATEIMVVA

SEQ ID NO: 36746 - DNA, 1389 bp, Pasteurella multocida subsp. multocida str. Pm70
  CDS (1)..(1389): transl_table=11
atgctaggactactgcttggattagcggtaaccattcttgttggttatctcattgtcaaaaagtacaaagcacaatttgtgttactgtgtggtggtattatcttgatgtgttttgcggtgctatttggactgggtgaaattctgcctgccaataagtcaactggttgggtcggtttcgatatttttgaatttatcaaaaacctatttagtacacgtgctgccgatttaggtttaatgattatggctgtcggcggatttgctcgttatatggataaaatcggtgccagtgaagcgttagtgaatattgcagtcaagccactcaacgccattaaagcgccttatttagtcttggccttagcctatattgttggacaaatcctcaatatttttattccaagtgcatcaggactcggtcttcttttaatgctcactattttcccgatcttagtcaatttaggcgtaagtcgagaaggtgcagccgcgcttatcgcgactacggcctgtttggatttaggacccgcatctggtaatgcggtattagctgccaaaactgccaatattgacattgcagaatactttgtcggttatcaattaaaattagccattatcacgatgttagtgatttcaacctcacatttcttcgtgcaaaaatggtttgataaaagacaagctctcacgggtggtggttctgaatatgacgcaagtctagaagttaaccttgacaaacaagacaagcaagcctcgccggtacctgctgtttatgtcctgctccccctcctacctttagttctcatcttaacctttagtaaattattggtgagtagcattaaaatgaatgttgccaccgcaatgatcatcagcttatttattgctatgctatttgagtttgtgcgcaaaaaagatgtcaaacaggtgtttgccgaaatgcaagtgttctttgatggcatgggaaaacaatttgcagcggtagtcaccctcattgtggcgggtgaaaccttcgctaaagggttaaccgctgtcggcgcgattgataccattatttcaggtgcacaaacctttggctttggtgttttcttaatgacattggtgatggtcttaattattgccctttctgctattgttatgggttcggggaatgcacctttcttcgcctttgccgctttagcccctaaagtcgctagcggattaggtatttcacctgtcttgatggttctcccaatgcaactggtagcaggtattgcaagaagtatgtcgccaattacggctgtcattgtcgcagtatccggtgtggcgaatgtgtcaccgtttgatttgattaagcgtaccgcgttgccaatggcctttgccttgattacggtattcttgggtaccttcctactctaccactaa

SEQ ID NO: 36747 - protein, 462 aa, Pasteurella multocida subsp. multocida str. Pm70
MLGLLLGLAVTILVGYLIVKKYKAQFVLLCGGIILMCFAVLFGLGEILPANKSTGWVGFDIFEFIKNLFSTRAADLGLMIMAVGGFARYMDKIGASEALVNIAVKPLNAIKAPYLVLALAYIVGQILNIFIPSASGLGLLLMLTIFPILVNLGVSREGAAALIATTACLDLGPASGNAVLAAKTANIDIAEYFVGYQLKLAIITMLVISTSHFFVQKWFDKRQALTGGGSEYDASLEVNLDKQDKQASPVPAVYVLLPLLPLVLILTFSKLLVSSIKMNVATAMIISLFIAMLFEFVRKKDVKQVFAEMQVFFDGMGKQFAAVVTLIVAGETFAKGLTAVGAIDTIISGAQTFGFGVFLMTLVMVLIIALSAIVMGSGNAPFFAFAALAPKVASGLGISPVLMVLPMQLVAGIARSMSPITAVIVAVSGVANVSPFDLIKRTALPMAFALITVFLGTFLLYH

SEQ ID NO: 36748 - DNA, 1299 bp, Pasteurella multocida subsp. multocida str. Pm70
  CDS (1)..(1299): transl_table=11
atggtggcattgaaagcaattattgcgcttactggcattattgttgctgtctatttattaataaagaaatatgaaacacgcacagtattaattggtgtagggttgttcatggcgattgcaacacttaacccaatgggggcactcgatgcatttgcgaaaagcatgacatcggcagggctaattatggcaatttgttcgagtatgggctttgcttatgtgatgaaatatacgcaatgcgatacgcatttagtccatttattaacaaaaccattaagtggcttgaagtttttcttaattcctatcgccacaatcattaccttctttgttaacattgcgattccttctgcagcaggttgtgcggcagccgtgggggcgacgctcattccagtattaaaaagttccggtgttcgtccagcaacagcaggggcagcaattcttgcgggaacgtttggatcgatgatgagtccgggatcgtcgcattcagccatgttaagtgaaatgtcaggtttaacggtgacacaagttaacttatctcatgcgccttatacgatgattgcaggggcgatcggggctgtgatgttaacgattttagcgattgtgtttaaagattatggggaagaacaccgtcaagcgtatttgcttgaaaataaagagagtgagcaaaatgcagaaaatatgaaagtgaatattttttatgcattagcaccattagtacctttagtgattttagttattggtggaacatctttacaaaaaatgccgggtttagaatggacgaaaatgggtgtaccacaagcgatgttaattggttcattatatgctgttgtgatgacacgcatttcaccggtcaaaattacaaatgagttctttaatggaatgggtaattcttatgcgaatgtgttaggtatcatcattgcggcaagcgtctttgttgcgggtttaaaatcaacaggagccattgatagcgcgattgaattcctgaaacattcaaatgaatttgtgcgttggggagcaaccataggaccattcttaatgggcattgtgactggatcgggagatgctgccgcgattgcgttcaataccgcggtgacgcctcatgcagtcgaattaggttatacccacgttaatttaggtatggctgctgcgattgcgggggcaattggacgtacagcctctccaattgctggcgtgacaattgtctgtgcaggtttagcgatggttagtccggttgaaatggtcaaacgcactgcaccaggcatgattctcgcgatcttatttttagcattgtttatgttgtaa

SEQ ID NO: 36749 - protein, 432 aa, Pasteurella multocida subsp. multocida str. Pm70
MVALKAIIALTGIIVAVYLLIKKYETRTVLIGVGLFMAIATLNPMGALDAFAKSMTSAGLIMAICSSMGFAYVMKYTQCDTHLVHLLTKPLSGLKFFLIPIATIITFFVNIAIPSAAGCAAAVGATLIPVLKSSGVRPATAGAAILAGTFGSMMSPGSSHSAMLSEMSGLTVTQVNLSHAPYTMIAGAIGAVMLTILAIVFKDYGEEHRQAYLLENKESEQNAENMKVNIFYALAPLVPLVILVIGGTSLQKMPGLEWTKMGVPQAMLIGSLYAVVMTRISPVKITNEFFNGMGNSYANVLGIIIAASVFVAGLKSTGAIDSAIEFLKHSNEFVRWGATIGPFLMGIVTGSGDAAAIAFNTAVTPHAVELGYTHVNLGMAAAIAGAIGRTASPIAGVTIVCAGLAMVSPVEMVKRTAPGMILAILFLALFML

SEQ ID NO: 36750 - DNA, 1281 bp, Pasteurella multocida subsp. multocida str. Pm70
  CDS (1)..(1281): transl_table=11
atgattgcattcttagttttaattgcacttgttctacttgttatgattaatgtgcctatcgcagtagcaattggtattgtttcactcataggtatgttaattacaaatagttttgatgcaatatataacgtcgcactgtctgtttttgatggcgcctctaatttttcattacttgctattccgcttttcattttagcaggagcattaatgaatacagggggaatatcggttaggctgattaattttgttaatgctttaatcggcttcgtccgaggtgggcttgcaatggtcaatgtgggtgtttccatgatctttgctgaaatttccggatcttctgtagcggatgttgccgcactgggttctatcctcattcctgcaatgaaaaaaagaggttataaatcaagcttttctgctgctgttacttcatcatcggcttccttagcggtgattatcccaccctcacttcccatgattatttatggtgcgatggcggatgtttctatttctaagctttttgtggcaggacttgccgcaggtggtgtagcttcgttaggtatgtttgctgtatgttattattatgcggttaaatataatttaccgagggaagaacacttcagcatgtccaaattatgcacagcattcaaaaatgcgttctgggcgttaacgttacctgttctaattttaggtgggattatttcaggttttaccactgcaacagaagcggccggcttagctgtacttttagcattaatcattggttttttcatttacaaagagctcacactcaatgcagtatataaagcattggtagaaagtgtaaatggaacatccgttgtcatgctactggttgcgacgtcagctgttttgggattgtttttaacagaacagaaagtacctcaacaaatggctgcagcaattttaaatatctcggacaataaatatatcgttttaatgatgctaaatgtcatgttatttattgttggtatgtttttacatggcgcggcggccattattttagtcgtccctattgttatgcctctgattacacaattgggcattgatccgattcattttggtatcatcttaacgttaaacattgcagtgggtcagcaaacaccaccggtggcaagtgtattaatcacagcctcatctatcgcgaaaaaagatatttggagtgtcactaaggataatgtttggtttattgttgtattattaatttctttaatgatggtcacttatattcctgcattgacggttggtatggtggacctattctattaa

SEQ ID NO: 36751 - protein, 426 aa, Pasteurella multocida subsp. multocida str. Pm70
MIAFLVLIALVLLVMINVPIAVAIGIVSLIGMLITNSFDAIYNVALSVFDGASNFSLLAIPLFILAGALMNTGGISVRLINFVNALIGFVRGGLAMVNVGVSMIFAEISGSSVADVAALGSILIPAMKKRGYKSSFSAAVTSSSASLAVIIPPSLPMIIYGAMADVSISKLFVAGLAAGGVASLGMFAVCYYYAVKYNLPREEHFSMSKLCTAFKNAFWALTLPVLILGGIISGFTTATEAAGLAVLLALIIGFFIYKELTLNAVYKALVESVNGTSVVMLLVATSAVLGLFLTEQKVPQQMAAAILNISDNKYIVLMMLNVMLFIVGMFLHGAAAIILVVPIVMPLITQLGIDPIHFGIILTLNIAVGQQTPPVASVLITASSIAKKDIWSVTKDNVWFIVVLLISLMMVTYIPALTVGMVDLFY

SEQ ID NO: 36752 - DNA, 1365 bp, Escherichia coli O157:H7
  CDS (1)..(1365): transl_table=11
atgttcggcataattatatctgtcatcgtattaattacgatgggctatttgatcctgaaaaactacaaacctcaggtggtgctggctgcaggtatcttcctgatgatgtgcggtgtctggttagggttaggtggtgtactcgatcccgccaaaagcagcggctacttgatcgtcgatatttataatgaaatcctgcgcatgctgtccaaccgcattgccggattggggctgtcgattatggcggtgggcggttatgcccgctacatggagcgcacaggagccagtcgcgcgatggtgagcttgttaagccgcccgttaaaactcattcgctcgccgtatattattctgtcggcaacttacgtcatcggccaaatcatggcgcagtttattaccagcgcctccggcctgggtatgttgctgatggtcaccttatttccgacactggtgagtctgggagtaagccgtctctctgcggtggcggttatcgcaaccacaatgtccattgagtgggggattctggaaacgaactccatttttgcagcccaggtagcgggaatgaaaattgccacttacttcttccactaccagcttccggtcgcctcttgcgtcattatctcggtggcgatctcccactttttcgtgcaacgcgcttttgacaaaaaagataaaaatatcaatcacgaacaggcagagcaaaaagctctcgataatgtcccgccgctctattacgccattttacctgtgatgccgttaatcctgatgctcggctcgctattccttgcccacatcgggctgatgcagtcagaactgcatctggtggtggtgatgttactgagtttgacgatgtttgttgagttcttccgcaagcataacttgcgcgaaacaatggacgatgtgcaggcgttttttgacggcatgggtacgcagtttgccaacgtggtaacgctggtggtcgcgggtgaaatatttgcgaaaggcttaacgacgattggcactgtcgatgcggttatcaggggtgcggagcattctggtctgggcggtattggcgtgatgattattatggcgctggtcattgccatttgtgccattgtgatgggctctggcaatgcgccgtttatgtcatttgccagtcttattccgaatatcgcagccggactacatgtaccagcggttgtaatgattatgccgatgcattttgccacgacgctagcgcgcggtttcgccgattactgcggtggtggtcgttacgtcaggaattgcaggcgtttcgccttttgcggtggtgaagcggacagcgatccccatggcagtcggtttcgtggtgaatatgattgccacaatcacgctattttattaagtcattaa

SEQ ID NO: 36753 - protein, 454 aa, Escherichia coli O157:H7
MFGIIISVIVLITMGYLILKNYKPQVVLAAGIFLMMCGVWLGLGGVLDPAKSSGYLIVDIYNEILRMLSNRIAGLGLSIMAVGGYARYMERTGASRAMVSLLSRPLKLIRSPYIILSATYVIGQIMAQFITSASGLGMLLMVTLFPTLVSLGVSRLSAVAVIATTMSIEWGILETNSIFAAQVAGMKIATYFFHYQLPVASCVIISVAISHFFVQRAFDKKDKNINHEQAEQKALDNVPPLYYAILPVMPLILMLGSLFLAHIGLMQSELHLVVVMLLSLTMFVEFFRKHNLRETMDDVQAFFDGMGTQFANVVTLVVAGEIFAKGLTTIGTVDAVIRGAEHSGLGGIGVMIIMALVIAICAIVMGSGNAPFMSFASLIPNIAAGLHVPAVVMIMPMHFATTLARGFADYCGGGRYVRNCRRFAFCGGEADSDPHGSRFRGEYDCHNHAILLSH

SEQ ID NO: 36754 - DNA, 1386 bp, Salmonella typhimurium LT2
  CDS (1)..(1386): transl_table=11
atgctaacagttatagagctccttatcggagtcgtcgttattgtgggtgtagcgcgctacatcattaagggatattccgccactggcgttttatttgtcggcggtctggctctgcttattatcagcgcgctgatggggcataaggtattacctgccagcgaaaccagtaccggctataccgcaacagatattgttgaatacatcaaaattttgcttatgagtcgcggcggcgatcttggcatgatgatcatgatgctgtgcggctttgccgcctatatgacgcatatcggcgcgaatgatatggtcgtgaagctggcgtcgaaacctttacagtacataaactcgccctacctgttgatgattgccgcctattttgtcgcctgcctgatgtcgctggccgtctcttccgcgacggggcttggcgtactgctcatggctactctcttcccggtgatggtcaacgtcggcattagccgcggcgcggcggcggctatttgcgcctctccggccgccatcatcctctcgccaacgtctggcgatgtggttttagccgcaaaagcggcggagatgccgttaatcgatttcgcgttcaaaactacgctgccaatttccatcgccgccattatcggtatggcgattgcgcactttttctggcaacgctatctggataaaaaagagaacatttcacatgagatgctggacgtggcggagattaccaccacggccccggcgttttatgcccttttgccgttcacgcccattatcggcgtactgatttttgacggtaaatgggggccgcagttgcacattattaccattctggtgatctgtatgctgctggccgccgtgctggaattcgtgcgcggtttcaacacgcaaaatgtgttttccggcctggaagtggcttatcgcggcatggcggatgcgtttgccggcgttgtgatgctgttggtcgcggcgggcgttttcgcccaggggctgagcaccattggctttatccaaagtctgatctcgattgccacttcttttggctccgccagcattattctgatgctggtcttagtgattttaaccatgctggccgcgatgaccaccggttcaggcaatgcgcctttttacgcctttgttgagatgatccctaaactggcgcactcctccggtatcaacccagcctatttatccatcccaatgctgcaagcctcaaacctggggcgcacgatttcgccggtctccggcgtcgtggtcgctgtcgccgggatggctaaaatatcaccgtttgaagtggtgaagcgcacgtccgttccggttatcgtcggtctgttgatcgtcattatcgccacggaaattatggtgccaggcgcctcttccagcgttactggcggctga

SEQ ID NO: 36755 - protein, 461 aa, Salmonella typhimurium LT2
MLTVIELLIGVVVIVGVARYIIKGYSATGVLFVGGLALLIISALMGHKVLPASETSTGYTATDIVEYIKILLMSRGGDLGMMIMMLCGFAAYMTHIGANDMVVKLASKPLQYINSPYLLMIAAYFVACLMSLAVSSATGLGVLLMATLFPVMVNVGISRGAAAAICASPAAIILSPTSGDVVLAAKAAEMPLIDFAFKTTLPISIAAIIGMAIAHFFWQRYLDKKENISHEMLDVAEITTTAPAFYALLPFTPIIGVLIFDGKWGPQLHIITILVICMLLAAVLEFVRGFNTQNVFSGLEVAYRGMADAFAGVVMLLVAAGVFAQGLSTIGFIQSLISIATSFGSASIILMLVLVILTMLAAMTTGSGNAPFYAFVEMIPKLAHSSGINPAYLSIPMLQASNLGRTISPVSGVVVAVAGMAKISPFEVVKRTSVPVIVGLLIVIIATEIMVPGASSSVTGG

SEQ ID NO: 36756 - DNA, 1314 bp, Corynebacterium glutamicum ATCC 13032
  CDS (1)..(1314): transl_table=11
atgttgtcgccagcagctgtagcagctttaattcttgtcatcggcattgtggtgctcatcatcgcatcagtgcccgttgccattgccatcggtttgccatcactttttgccgcgatggccgtgcttggcccagaaaacgccgcgcaggccgtcgcgcagcgcatgtttaccggcacaaactcctttacactccttgccattccgttcttcgtgttggcgggtttgctgatgaactcgggtggtattgccacgcggcttatcgacgccgcgaaggtgcttgtcggccgcatgcctgcctccatggccaatacgaatatcgcagcaaatggtctcttcggagcagtttcaggggcagcggtagcatcagcttctgccgtgggaaccgtcatgacaccaaaaatgaaggaagagggctactcgcgcgcttacgcagcggccgtcaacgtggcttcagcacctgcgggcatgctgatcccgccatcaaacacttttattgtgtattccttggtgtcctcgacatcaattgcagcactatttatggccggtgttggacccggtctgctctggattctggcctgtgtcatcgtgggaacttggttagcgcgaaaggaaaactacaagcgcgagcagattcatccaacattcaagcagtcgctcgttgtgctgtggagggcgctgccttcactgctcatgatcgtcattgttgttggaggtatcttgctgggctggttcactccaactgaatccgctgctattgctgtagtgtactgcctggtcttgggctttatttaccgcacaatcaaggtgggagatctggcagatattttgctcaaggcaactcgcaccacatcaattgtcatgttgctcattgcagtttctgcagcactgtcgtgggtgatggcctttgccaagatccctcagatgatctctgatgcgcttctttcggtatccgattccaaggttgtcatcttgttgatcatgatgttcatcctgttactcatcggtaccgtaatggacccaacaccagcaattttgatcttcgtcccgatcttccttccagtggttaccgaacttggtgtggacccagtccacttcggtgcgatggtggtaatgaacctgtccgtgggcgtgattaccccaccagtaggcaacgtgttgttcgttggttcgcaagtggcagggctgcgtgtggaaactgtgatcagacgactgtggccgtatctcattgccattattgttgcgctgttcgtggttgttttcgtaccgcagatctctatctggctgcccacaacaatgggattgatgggaggctaa

SEQ ID NO: 36757 - protein, 437 aa, Corynebacterium glutamicum ATCC 13032
MLSPAAVAALILVIGIVVLIIASVPVAIAIGLPSLFAAMAVLGPENAAQAVAQRMFTGTNSFTLLAIPFFVLAGLLMNSGGIATRLIDAAKVLVGRMPASMANTNIAANGLFGAVSGAAVASASAVGTVMTPKMKEEGYSRAYAAAVNVASAPAGMLIPPSNTFIVYSLVSSTSIAALFMAGVGPGLLWILACVIVGTWLARKENYKREQIHPTFKQSLVVLWRALPSLLMIVIVVGGILLGWFTPTESAAIAVVYCLVLGFIYRTIKVGDLADILLKATRTTSIVMLLIAVSAALSWVMAFAKIPQMISDALLSVSDSKVVILLIMMFILLLIGTVMDPTPAILIFVPIFLPVVTELGVDPVHFGAMVVMNLSVGVITPPVGNVLFVGSQVAGLRVETVIRRLWPYLIAIIVALFVVVFVPQISIWLPTTMGLMGG

SEQ ID NO: 36758 - DNA, 1263 bp, Oceanobacillus iheyensis HTE831
  CDS (1)..(1263): transl_table=11
atgattattgttattttcatccttcttttgattattggtgcaccgattgctgtagcaataggtttgtccagttttgttgccatgatgcaagaaggagtttcaattgatgtattctccagaaccatttttgcaggaatagactcgtttactctcatggccatacctttttttatctttgctggagatttgatgttagccgggggcacgtcgaaaagattaatagattttgctaaaaagttagtcggctggtcaactggtggattacccattgcaggtgtaatgtcttccatgctatttgcagcactatcaggatcaagcccggccacggtagctgcaatcggtggtataatgattccttcattaaatgatgctggctattcacgaaaatttgcaataggtttaatgacgactgccggtaccttaggaattattatcccaccaagtatcacacttttagtgtatggttcatccgctgaggtgtccatcagtaatttgtttcttgctggaatcgttccaggagtttttataggattggtacttattattgtaagttatatcatctcaaaaaaggaaggatttaaaccagaaggcagggcgagcctaggagcagttggaaaatcatttatctctgccatatgggggatattacttccggttattgttttaggaggcatctattttggcgtcttcacgcctacagaagctgctgctgttgcgatcgtttatagcctaattattggattatttgtttataaggaattaacgttaagaagtttgatcgatgttacgaagaaatcagttattacttcttctatgattatgcttgttattgcagcctctaatgtgtttagctggtatctgacctttgagcaaatacctactaatcttgcatctgttttgcttaattatgcgaatacagaagtagctttcttattccttgttatagttattttattactagttggaatgttcatggatacaagtgctgcggtgttaatatttgttcctttattccttcctatggtaagtcaactgggtattgaccccattcattttggaataattatgatagtcgctctatctattggaatgattacaccaccatttggtctgaatctatttgtggcttcagggatcagtaaagtatcattagtagaagtaatcaaaagtacagcgccatttattttggttatgatattcgccttacttgttattacattcgttccagaactttccttatttttactcgggatttttgaataa

SEQ ID NO: 36759 - protein, 420 aa, Oceanobacillus iheyensis HTE831
MIIVIFILLLIIGAPIAVAIGLSSFVAMMQEGVSIDVFSRTIFAGIDSFTLMAIPFFIFAGDLMLAGGTSKRLIDFAKKLVGWSTGGLPIAGVMSSMLFAALSGSSPATVAAIGGIMIPSLNDAGYSRKFAIGLMTTAGTLGIIIPPSITLLVYGSSAEVSISNLFLAGIVPGVFIGLVLIIVSYIISKKEGFKPEGRASLGAVGKSFISAIWGILLPVIVLGGIYFGVFTPTEAAAVAIVYSLIIGLFVYKELTLRSLIDVTKKSVITSSMIMLVIAASNVFSWYLTFEQIPTNLASVLLNYANTEVAFLFLVIVILLLVGMFMDTSAAVLIFVPLFLPMVSQLGIDPIHFGIIMIVALSIGMITPPFGLNLFVASGISKVSLVEVIKSTAPFILVMIFALLVITFVPELSLFLLGIFE

SEQ ID NO: 36760 - DNA, 1431 bp, Bifidobacterium longum NCC2705
  CDS (1)..(1431): transl_table=11
atggaactggtgattatgtacctcgtggcaattgccgcggttggcattgtgggctttatgctcgtgaagaaaatggacatcaagatttccctgttcctcatcggcattgtgctgatgtacatcgcattgctgatgggcaaggacatctcattcaccgacttcgtttccagtggtgtcacttggcttgatccgttcaaggttgtaggcgatcagttcgtgagcacgctcacttctgctggcttcatcatcctcatccttggtggctacaccggctacatgtcccatatcggagccaatgaagtcacggtaagtgtgctcgccaagccgattgcgcacatcaagtccccgtatatactcgtgccgattaccttcttgttgggcaacctgttgtctctggtcattccgagtgcttccaacctggctatcatccttatggcaacgctgtacccggtgcttcgccaagctggtatgagcctgctgagcgcagctgcagtcattgccactactgcaacgattatgccgaccccgcttggctccgacaatgttgccatcgccgctgaactcgctaagaccgacatgttctccggcctgaccgccagcgattacgtcttccgttatcacgtgctcgtttccatcccgaccttgctcgtcatggcactggcacactacttctggcagaagttcatggacaagcgcgctggctcggatttgaccgacggtgatgttgacctggctgaggttaaggctgtcgaaggtagcgctctctaccgcactgtgtatgcgattttgccgctgctgccgatcatcatgcttctcatcgtgttcgccatcacttccaccaccggcgcaaagatcgacctgagtgttgaactcgcttccattctctccttcgtgatcgccattatctgcgagctcatccgcactcgcaagggcaaggaaaccctcgctggcaccgagtccttcttcaagggcatgggtggcgcaatgccgattgtggcactgttggtcgctgcttctgtgttcgtcgttggtcttaagtccattggtctgatcaccgaactgcagaacgcaatgaccggcctgtccggctctggtatgggcttcgtgctgccgcttatccttgtcggcctcactgcgctcatcgtgctactctccggttccggtaccgcactgttcttcgcgatggttccgctcatggttccgctggccgctgctgctggtatcaatgtgctcgctgtgtccatcccgatgggtctcgctggcaatctgctgcgcgctgtctcgccggtctccgctgtggtgatgatcgtcgccggctccatcaagaagagcccaatcgacattgtgcgccgtaccagtgtgccgatgatcgctggcgtaatcgtcatgttcatcctgtccatggcaatcttcctgccgatgggtgcgtga

SEQ ID NO: 36761 - protein, 476 aa, Bifidobacterium longum NCC2705
MELVIMYLVAIAAVGIVGFMLVKKMDIKISLFLIGIVLMYIALLMGKDISFTDFVSSGVTWLDPFKVVGDQFVSTLTSAGFIILILGGYTGYMSHIGANEVTVSVLAKPIAHIKSPYILVPITFLLGNLLSLVIPSASNLAIILMATLYPVLRQAGMSLLSAAAVIATTATIMPTPLGSDNVAIAAELAKTDMFSGLTASDYVFRYHVLVSIPTLLVMALAHYFWQKFMDKRAGSDLTDGDVDLAEVKAVEGSALYRTVYAILPLLPIIMLLIVFAITSTTGAKIDLSVELASILSFVIAIICELIRTRKGKETLAGTESFFKGMGGAMPIVALLVAASVFVVGLKSIGLITELQNAMTGLSGSGMGFVLPLILVGLTALIVLLSGSGTALFFAMVPLMVPLAAAAGINVLAVSIPMGLAGNLLRAVSPVSAVVMIVAGSIKKSPIDIVRRTSVPMIAGVIVMFILSMAIFLPMGA

SEQ ID NO: 36762 - DNA, 1368 bp, Shigella flexneri 2a str. 301
  CDS (1)..(1368): transl_table=11
atgttcggcataattatatctgtcatcgtattaattacgatgggctatttgatcctgaaaaactacaaacctcaggtggtgctggctgccgcaggtgtcttcctgatgatgtgcggagtctggttagggttcggtggtgtactcgatcccgccaaaagcagcggctacttgatcgtcgacatttataatgaaatcctgcgcatgctgtccaaccgcattgccggattggggctgtcgattatggcggtgggcggttatgcccgctacatggagcgcataggagccagttgcgcgatggtgagcttgctaagccgcccgttaaaactcattcgctcgccgtatattattctgtcggcaacttacgtcatcggccaaatcatggcgcagtttattaccagcgcctccggtctgggtatgttgctgatggtcaccttatttccgacgctggtgagtctgggagtaagtcgcctctctgcggtggcggttatcgcaaccacgatgtccattgagtgggggattctggaaacgaactccatttttgcagcccaggtcgcgggaatgaaaattgccacatacttcttccactaccagcttccggtcgcctcttgcgtcattatctcggtggcgatctcccactttttcgtgcaacgcgcttttgacaaaaaagataaaaatatcaatcacgaacaggcagagcaaaaaactctcgataatgtcccgccgctctattacgccattttacctgtgatgccgttaatcctgatgctcggctcgctgttcctcgcccacgtcgggctgatgaagtcagaactgcatctggtggtggtgatgttactaagtttgacggtgacgatgtttgttgagttcttccgcaagcataacttgcgcgaaacaatggacgatgtgcaggcgttttttgacggcatgggtacgcagtttgtcaacgtggtaacgctggtggtcgcgggtgaaatatttgcgaaaggcttaacgacgattggcactgttgatgcggttatcaggggtgcggagcattctggtctgggcggtattggcgtgatgattattatggcgctagtcattgccatttgtgccattgtgatgggctctggcaatgcgccgtttatgtcatttgccagtcttattccgaatatcgcagccggactacatgtaccagcggttgtaatgattatgccgatgcattttgccacgacgctagcgcgcgcggtttcgccgattactgcggtggtggtcgttacgtcaggaattgcaggcgtttcgccttttgcggtggtgaagcggacagcgatccccatggcagtcggtttcgtggtgaatatgattgccacaatcacgctattttattaa

SEQ ID NO: 36763 - protein, 455 aa, Shigella flexneri 2a str. 301
MFGIIISVIVLITMGYLILKNYKPQVVLAAAGVFLMMCGVWLGFGGVLDPAKSSGYLIVDIYNEILRMLSNRIAGLGLSIMAVGGYARYMERIGASCAMVSLLSRPLKLIRSPYIILSATYVIGQIMAQFITSASGLGMLLMVTLFPTLVSLGVSRLSAVAVIATTMSIEWGILETNSIFAAQVAGMKIATYFFHYQLPVASCVIISVAISHFFVQRAFDKKDKNINHEQAEQKTLDNVPPLYYAILPVMPLILMLGSLFLAHVGLMKSELHLVVVMLLSLTVTMFVEFFRKHNLRETMDDVQAFFDGMGTQFVNVVTLVVAGEIFAKGLTTIGTVDAVIRGAEHSGLGGIGVMIIMALVIAICAIVMGSGNAPFMSFASLIPNIAAGLHVPAVVMIMPMHFATTLARAVSPITAVVVVTSGIAGVSPFAVVKRTAIPMAVGFVVNMIATITLFY

SEQ ID NO: 36764 - DNA, 1284 bp, Vibrio vulnificus CMCP6
  CDS (1)..(1284): transl_table=11
atggctggttcaatttttggttggctaggcttgctttttgctggcatgccagttggcttttctctgatttttgtggcgttggtttttcttattgttaccaacagcacaggtattaacttcgcagcgcagcagatgctgggcggcattgataattttacgttattggccgtaccattcttcgtcctaacgggccatttgatgaacagtgccggtattactgagcgaatttttaactttgccaaatccatggttggccatatcacaggtagtctagggcatgtaaacatcatggcgagtttactattttctggtatgtctggctctgcgcttgccgatgccggaggcttggggcagcttgaaatcaaatcgatgcgtgacgcgaaatacgatgatgactttgctggtggtctcacggcggcctcgtgcatcattggtccgcttgttccgccttctgtgccattggtgatttatggtgtagtgtccaacacatcgattggtgcgctgtttttagccggtgcaataccaggcattttgtgctgcgtggctttgatggtgatgagctatttcatctgtaagaaacgtggctacatgaccttgcccaaagcgtcgagaaaagagcagttcacatcgttcaaagaggcatttctttctctaatgactccggtcatcatcattggcgggatcttttcgggtaagttcaccccgacggaagcagcagtggtttcctctctttatgcgctgttccttggtaccgtggtgtacaaacagctgaccttgacggggtttgtggaaattcttcgcgaaaccgtgaataccaccgccgttgttgccttgatggtgatgggggtaacggtgtttggctggatcgtggcgcgtgagcaattgccacagatgcttgcggattatttcttgtcaatcagtgaaaacccattggtactactgctactcatcaacttgctcttactgtttttgggaaccttcattgaatcactcgcgttattgctattgctggttccatttttagtcccagtggcatcggcggtcgggattgaccctgtgcactttggtgttatggccattttgaacttgatgatcggcattctcacgccaccaatgggcatggctttatatgtggtatcacgtgtcggagacattccatttcataccttaactcgaggcgtacttcctcttctggtgccattgtttattgtgctggcgttggtggcggtattccctcaaatcaccttgctattgcctgagctgcttttgggttacggacaataa

SEQ ID NO: 36765 - protein, 427 aa, Vibrio vulnificus CMCP6
MAGSIFGWLGLLFAGMPVGFSLIFVALVFLIVTNSTGINFAAQQMLGGIDNFTLLAVPFFVLTGHLMNSAGITERIFNFAKSMVGHITGSLGHVNIMASLLFSGMSGSALADAGGLGQLEIKSMRDAKYDDDFAGGLTAASCIIGPLVPPSVPLVIYGVVSNTSIGALFLAGAIPGILCCVALMVMSYFICKKRGYMTLPKASRKEQFTSFKEAFLSLMTPVIIIGGIFSGKFTPTEAAVVSSLYALFLGTVVYKQLTLTGFVEILRETVNTTAVVALMVMGVTVFGWIVAREQLPQMLADYFLSISENPLVLLLLINLLLLFLGTFIESLALLLLLVPFLVPVASAVGIDPVHFGVMAILNLMIGILTPPMGMALYVVSRVGDIPFHTLTRGVLPLLVPLFIVLALVAVFPQITLLLPELLLGYGQ

SEQ ID NO: 36766 - DNA, 1467 bp, Vibrio vulnificus CMCP6
  CDS (1)..(1467): transl_table=11
atgagcttaattattgcgttattagggctggtgtttgctggccgtttgatcttgaagaattacaacccgcaagcggtcctattctttactgggattgtgttgatggcgatctccatcttcaccaacaacgccagctttgttgcgaaatcgaccggttgggtgggcttcgacatttttgagtacatcagccaagtgtttagcaagcaaagtggtggtttgggtttgaacatcatgctgattggtggttttgcgctgttcatgtcggccattggcgccagtcaggtgatggtcaaagtggcagctaagccgttgatgaagctcaattcaccctatttgatgctggcgttggccttcattcttggtcaagctttgtcgctgtttatctcaagcgcgacggggttagctctgctgcttatggcgacgttatacccagtgttgattcgcttgggctgtagcaaagcgggcgtggcggcggtgctggccagtacctgtgcgattgagtttggcccagcgtcaggtaactcgattcttgccgcgcaaactgcgggcatggacatcacggcgttttttgttggcgagcagctgccgattgtcactgtgctgatcatcgctgtggcactgattcacgccttaacgcagcgctactttgacagattggatgagaagtcgaatgccgagcaagactcgctggctcacgtggacgatgcacaaagtgatgcccccatgttctatttgctgctgccgatgttgccgctgttcttcatgctgactttcagcaaattgggcattgagagcattaaggtgagcttagccaatgcgattttgctgagtattttcattggattggtgtgcgagtttgttcgagtcaaacaagccaaaccggtgtttgacaagcttcaaggcatcttcaatgacatgggtaaggtgttcgcagcagtagtgaccttgattgtcgcgggtcagacgttttcgatgggtttgaaatcgattggtgccattgatgccatgcttgagatggccagcggggcgggcctatctgccgccatcatcatcctgtttatggcgatcttaaccttcaccatttctgccttaatgggctcggggaatgcagcctttttctcctttgctcctatggtgccgcaaatcgcgcagaaaattggtgccaacgcggcagacatgattttgcctatccagctttctgcgggaatggggcgtacaatctctcccatcgccggggtgatcatcgcggttgctggtatttctgggctctcgccttttgatatcgtgcgcagaacctttatcccgatgtttattggctggctattgatgttggcgatgacgtttgcacgtggcggccaactgatgcaactgttgccgttcttggtgctgatgctagtggccgtcggcgttggtgcatggctgttgcgtaagcgcaaagccgttcaaccagagcaggcgtctgcgtag

SEQ ID NO: 36767 - protein, 488 aa, Vibrio vulnificus CMCP6
MSLIIALLGLVFAGRLILKNYNPQAVLFFTGIVLMAISIFTNNASFVAKSTGWVGFDIFEYISQVFSKQSGGLGLNIMLIGGFALFMSAIGASQVMVKVAAKPLMKLNSPYLMLALAFILGQALSLFISSATGLALLLMATLYPVLIRLGCSKAGVAAVLASTCAIEFGPASGNSILAAQTAGMDITAFFVGEQLPIVTVLIIAVALIHALTQRYFDRLDEKSNAEQDSLAHVDDAQSDAPMFYLLLPMLPLFFMLTFSKLGIESIKVSLANAILLSIFIGLVCEFVRVKQAKPVFDKLQGIFNDMGKVFAAVVTLIVAGQTFSMGLKSIGAIDAMLEMASGAGLSAAIIILFMAILTFTISALMGSGNAAFFSFAPMVPQIAQKIGANAADMILPIQLSAGMGRTISPIAGVIIAVAGISGLSPFDIVRRTFIPMFIGWLLMLAMTFARGGQLMQLLPFLVLMLVAVGVGAWLLRKRKAVQPEQASA

SEQ ID NO: 36768 - DNA, 1308 bp, Pseudomonas syringae pv. tomato str. DC3000
  CDS (1)..(1308): transl_table=11
atgctgactttccttggctttgccatggtcattgcgttcatgtacctgatcatgagcaagcgcctgactgcgctgatcgccctgattctggtcccgatcatcttcgccctgttcggcggctttgccgcgcagatcggcccgatgatgctcgctggtattaccaagcttgcgccgaccggcgtgatgctgatgttcgccattctgtactttgcgctgatgatcgactccggcctgttcgacccggccgtgcgcaagatcctgaaaatggtcaaaggcgacccggtgcgcatctcggtcggtactgccgtgctggcgctggtggtgtccctcgacggtgacggcgcaaccacctacatgatctgcgtggccgccatgctgccgctgtacagtcgcgttggcatgagcccgcggatcatggccggtctgatcattctggccggtggcgtgatgaacatgacgccctggggcggcccgaccgctcgtgcggccagcgccctgcatgtcgatgcatcggatatcttcgtaccgatgatccccgccatgctggccggtgtggttgcgattctggcaattgcctacttctacggcaaacgcgaacgcgctcgtcttggcgaactgcatcttaaaggcgatgaagtcgatcacagcgaaatcagcgtctcgcagttcccggatgcccgccgtccaaaactgatctggttcaacggcgcactgaccctcgcactgatggtcgccctgatcatgggcctgttgccactgccggtcctgttcatgatcgcgttcagtatcgcgatgatcatcaactacccgaacctgcaggaccagaaagaccgtgtttcggctcacgccggtagcgttctggcggtggtcggcctgatcttcgcggcgggtatcttcaccggtattctgaccggcaccggcatggtcgatgcgatgtcgaaaagcctgctggcagtgatcccggacgcgctgggcccttacctcgccgtcatcaccgcgctggtcagcatgccgttcaccttcttcatgtctaacgatgcgttctactacggcgtattgccggtgctgtcggaagccgctgcccactacggcatcagcccggtcgaaatggcccgcgcttcgatcgtcggtcagccggttcacctgctcagcccgctggtgccatcgacttacctgctggttgcgctggccggtatcgagttcggcgaccaccagcgcttcactctgaaatgggcggttctggtgtgcatgtgcatcctggttgcggcgctgctgatgggtatcttcccgttctatagcagcatgtaa

SEQ ID NO: 36769 - protein, 435 aa, Pseudomonas syringae pv. tomato str. DC3000
MLTFLGFAMVIAFMYLIMSKRLTALIALILVPIIFALFGGFAAQIGPMMLAGITKLAPTGVMLMFAILYFALMIDSGLFDPAVRKILKMVKGDPVRISVGTAVLALVVSLDGDGATTYMICVAAMLPLYSRVGMSPRIMAGLIILAGGVMNMTPWGGPTARAASALHVDASDIFVPMIPAMLAGVVAILAIAYFYGKRERARLGELHLKGDEVDHSEISVSQFPDARRPKLIWFNGALTLALMVALIMGLLPLPVLFMIAFSIAMIINYPNLQDQKDRVSAHAGSVLAVVGLIFAAGIFTGILTGTGMVDAMSKSLLAVIPDALGPYLAVITALVSMPFTFFMSNDAFYYGVLPVLSEAAAHYGISPVEMARASIVGQPVHLLSPLVPSTYLLVALAGIEFGDHQRFTLKWAVLVCMCILVAALLMGIFPFYSSM

SEQ ID NO: 36770 - DNA, 1368 bp, Vibrio parahaemolyticus RIMD 2210633
  CDS (1)..(1368): transl_table=11
atgctagagctcttaattggcttggtagtaaccattgcggtgggctatttcattgtcaaaggttacaaggcagctggcgtacttttaaccgccggtatcagtttgcttcttatgactggctttttgggccatgacgttctgccatcaagcatcacctcaaccggtaacatggtgacagactcgctagaatacgtgaaatacatgctgcaataccgtggcggcggccttggtatgcaaatcatgttgctatgtggtttcgcctcttacatgactcacatcggcgcgaacaacgttgtcgtgaaacagttctctaaaccgctttctgttatcaagtctccttatgtccttttggtagcggcttacattgtggcgtgtttgatgtctctagcggtgagctctgcaacaggtcttggcgttctattgatggctaccctattcccaatgatggttgcgatgggtatctctcgtcctgcggctgtggcagtgtgtgcatctcctgctgctattattctttctcctacttcaggtgacgttgttattgctgcagaaaagtctggcttggcgctagatgtgtttgcggtacaaactgttcttcctgtttcgatttgtgcaatcgtcgtaatggcggcagcagctttcttctggaacaaatacctagataagaaagaaaatacgccgatggaaaaaatcgacgtatcagaaattaaagcagatgcaccagcgttttacgcagcactaccattcttaccaatcatcggtgtgttcctatttaatggccgtacgattcctggtcttagtctagatatctacaccatcgttgtgggttctattttccttggcgcacttatccattatgtcgtgaacaaattcgacggcaaaaaagcgcttgaagatttggattcatgctacgcaggcatggccgatgcatttaaaggcgttgtgatgttgttggttgcggcaggcgtatttgcacaaggtctgatgtctattggtgctatcgataatctacttcaccttgccgataacgcaggtgcgggtggcgttgcactaatgctgatcctaacaggtctaaccgttgcagcggctattgctactggttctggtaacgcgcctttctatgcgtttgtagaacttgcgccttctctagcagcgaaaatgggcatcaacccagcgttcctaatcatcccaatgcttcaagcatcaaacctaggtcgtaccatttcgccagtatctggcgtaatcgttgcgacatcaggtatggcgaacatcagcccatttgaagttgtaaaacgcacttcagtgcctgtgcttgctggcctattgacggtaatcatcggtactatggtacttgttccgatgacagcttag

SEQ ID NO: 36771 - protein, 455 aa, Vibrio parahaemolyticus RIMD 2210633
MLELLIGLVVTIAVGYFIVKGYKAAGVLLTAGISLLLMTGFLGHDVLPSSITSTGNMVTDSLEYVKYMLQYRGGGLGMQIMLLCGFASYMTHIGANNVVVKQFSKPLSVIKSPYVLLVAAYIVACLMSLAVSSATGLGVLLMATLFPMMVAMGISRPAAVAVCASPAAIILSPTSGDVVIAAEKSGLALDVFAVQTVLPVSICAIVVMAAAAFFWNKYLDKKENTPMEKIDVSEIKADAPAFYAALPFLPIIGVFLFNGRTIPGLSLDIYTIVVGSIFLGALIHYVVNKFDGKKALEDLDSCYAGMADAFKGVVMLLVAAGVFAQGLMSIGAIDNLLHLADNAGAGGVALMLILTGLTVAAAIATGSGNAPFYAFVELAPSLAAKMGINPAFLIIPMLQASNLGRTISPVSGVIVATSGMANISPFEVVKRTSVPVLAGLLTVIIGTMVLVPMTA

SEQ ID NO: 36772 - DNA, 1386 bp, Salmonella enterica subsp. enterica serovar Typhi Ty2
  CDS (1)..(1386): transl_table=11
atgctaacagttatagagctccttatcggagtcgtcgttattgtgggtgtagcacgctacatcattaagggatattccgccactggcgttttatttgtcggcggtctggttctgcttattatcagcgcgctgatggggcataaggtattacctgccagcgaaaccagtaccggctataccgcaacagatattgttgaatacatcaaaattttgcttatgagtcgcggcggcgatcttggcatgatgatcatgatgctgtgcggctttgccgcctatatgacgcatatcggcgcaaatgatatggtcgtgaagctggcgtcgaaacctttacagtatataaactcgccctacctgttgatgattgccgcctattttgtcgcctgcctgatgtcgctggccgtctcttccgcgacggggcttggcgtactgctcatggctactctcttcccggtgatggtcaacgtcggcattagccgcggcgcggcggcggctatttgcgcttcgccggccgccatcatcctctcgccaacgtctggcgatgtggttttagccgcaaaagcggcggagatgccgttaatcgatttcgcgttcaaaaccacgctgccgatttccatcgccgccattatcggtatggcgattgcgcattttttctggcaacgctatctggataaaaaagagaacatttcacatgagatgctggacgtggcggagattaccaccacggccccggcgttttatgcccttttgccgttcacgcccattatcggcgtactgatttttgacggtaaatgggggccgcagttgcacattattaccattctggtcatctgtatgctgctggccgccgtgctggaattcgtgcgcggcttcaacacgcaaaatgtgttttccggcctggaagtggcttatcgcggcatggcggatgcgtttgccggcgttgtgatgctgctggtcgcggcgggcgttttcgcccaggggctgagcaccattggctttatccaaagtctgatctcgattgccacttcttttgggtccgccagcattattctgatgctggtcttagtgattttaaccatgctggccgcgatgaccaccggttcaggcaatgcgcctttttacgcctttgttgagatgatccctaaactggcgcactcctccggtatcaacccagcctatttatccatcccaatgctgcaagcctcaaacctggggcgcacgatttcgccggtctccggcgtcgtggtcgctgtcgccgggatggctaaaatatcaccgtttgaagtggtgaagcgcacgtccgttccggtcatcgtcggtctgttgatcgtcattatcgctacggaaattatggtgccaggcgcctcttccgccgtcaccggcggctga

SEQ ID NO: 36773 - protein, 461 aa, Salmonella enterica subsp. enterica serovar Typhi Ty2
MLTVIELLIGVVVIVGVARYIIKGYSATGVLFVGGLVLLIISALMGHKVLPASETSTGYTATDIVEYIKILLMSRGGDLGMMIMMLCGFAAYMTHIGANDMVVKLASKPLQYINSPYLLMIAAYFVACLMSLAVSSATGLGVLLMATLFPVMVNVGISRGAAAAICASPAAIILSPTSGDVVLAAKAAEMPLIDFAFKTTLPISIAAIIGMAIAHFFWQRYLDKKENISHEMLDVAEITTTAPAFYALLPFTPIIGVLIFDGKWGPQLHIITILVICMLLAAVLEFVRGFNTQNVFSGLEVAYRGMADAFAGVVMLLVAAGVFAQGLSTIGFIQSLISIATSFGSASIILMLVLVILTMLAAMTTGSGNAPFYAFVEMIPKLAHSSGINPAYLSIPMLQASNLGRTISPVSGVVVAVAGMAKISPFEVVKRTSVPVIVGLLIVIIATEIMVPGASSAVTGG

SEQ ID NO: 36774 - DNA, 1374 bp, Enterococcus faecalis V583
  CDS (1)..(1374): transl_table=11
atgattgaaagtttattggtattggtcgttttagttgttgtagcctatttgattgtaaaaaattatcatcccgcactcagcttaattattggtgcgcttgttctacttgcatgtgcatggatgttagggcatcccatttatcctgcaggagaaggaaccggttttggattatttgatattttcttgaagtttaaagatacaattattgcacaagtgagttcagcaggaattgtaattatgattctttttggttattcaggctatatgaatgcaatcggggccaatcagatggctgtcaactttttggtgaaaccattaatgaagattaaacgtaaatcgttatttgtccctgtggtctttttaattggaaatttaatgtcactagtagttcctagtgcatcaagtttagcgattattttaatgtctatattatatccgatgctagccagcatggggatttcatcattaactgctgcaggtgtgattgcaatgacggcaactatcatgccaacacctttaggcgcggataacgtaatcgccgcaaatacccttggttatgatgtgttaaattatgttgtatggaatgccaaaatttcgctgccatcgttattaatcattgcggttgcacagtacttctggcaaaaatactgcgataaaaaagaaggtgaggctgcctatgtctcattaaatgaagagggcttaagcaaacaaaaagaatttgatgttcctaaattttatgcaatattgccaatattaccgctattattaattgttggagtgggaatcgcaggaatgtttattaaaggaataacgatggatatttttgttcttacatttatttctttcttcatcgctgtattggttgagacgcttcgcttgaaatcttttaaaaaggttcaagatacagctgtcgagatgtttaaaggaatggggcaagggtttagtcaagttgtgatgcttgtcgtaggcggttcattattcacgtctgcgattcaaacgttaggaattattgatagtattatggcatctgtcgaagcatcaagttcagcaggaattgtcacgaccttaattttcagcggtgcaacgaccctttttggaattttaagcggtggtggtctggcaatgttttatgcggttatcgaactaatccctgggattgctgaaaaagctgggattgatggcatcttaatttccttgccaatgcagatgattgcgaatttaactagaacgatttctcctgtagcagcagttgtcatgattgtcgcatcaacagtaggagttagtcccatcagaattttaaaacggacgagtgtaccgaccatcattggcattattagtgtgattgtcttgtcgattctattgttaccttattaa

SEQ ID NO: 36775 - protein, 457 aa, Enterococcus faecalis V583
MIESLLVLVVLVVVAYLIVKNYHPALSLIIGALVLLACAWMLGHPIYPAGEGTGFGLFDIFLKFKDTIIAQVSSAGIVIMILFGYSGYMNAIGANQMAVNFLVKPLMKIKRKSLFVPVVFLIGNLMSLVVPSASSLAIILMSILYPMLASMGISSLTAAGVIAMTATIMPTPLGADNVIAANTLGYDVLNYVVWNAKISLPSLLIIAVAQYFWQKYCDKKEGEAAYVSLNEEGLSKQKEFDVPKFYAILPILPLLLIVGVGIAGMFIKGITMDIFVLTFISFFIAVLVETLRLKSFKKVQDTAVEMFKGMGQGFSQVVMLVVGGSLFTSAIQTLGIIDSIMASVEASSSAGIVTTLIFSGATTLFGILSGGGLAMFYAVIELIPGIAEKAGIDGILISLPMQMIANLTRTISPVAAVVMIVASTVGVSPIRILKRTSVPTIIGIISVIVLSILLLPY

SEQ ID NO: 36776 - DNA, 1344 bp, Haemophilus ducreyi 35000HP
  CDS (1)..(1344): transl_table=11
atgtcctcgatgttttttttacaatttgccatagttttactatgtattttaatcggtgcgcgtgtgggtggcatcggattaggtgtatttggtggtttaggtttagcgatcctctctttcggtttcgggttaaaacctgcgggcttgcctattgatgtcatgtttatgattatggcggttgtttctgcagctgctgcaatgcaagcggctggaggtttagattatatgatcaaaatcgccaccaaaatcctacgccgtaatcctaagtacattacttttatcgcgccattagtcacttgtacttttactgtattagcaggcacgggacacgtagcctattctgtcttacccgttattgcggaagtaagccgtcataatggtatccgcccagagcgccctctttctatggcggtgatcgcttcacaatttgcaattgttgctagccctatctccgctgccgtcgtggctgtagtggcattattagaaccacaaggtattacacttcctaatatattaatggtaacgattcctgctaccctattaggcttagcacttgcttgtgtattcgtgaataaaatgggtaaagaacttaaagatgatccagaatatcaacgccgtttgcaagatcctgaatatgtcaaagccaaccataccaacacagattcaacaaacatcgagcttaaaccaacggcaaaactttctgttagtttattcctattcggcgctttattagtggtattaatgggcgccgtgccatcattacgaccaatctttgatggcaagccaatgggaatggcacacaccattgaaattattatgctgacaataagtgccttaatcattttcttctgtaaaccaaatggtaacgaaattaccaaaggttctgtattccatgcaggtatgcgtgcagttatcgccatttttggtattgcctggttaggggatacattaatgcaaagccatataactgaagtgaaaagtatggtatcaggcctcgttgaaactgcgccttgggcatttgcttttgcgctctttattttatctatcttagtaaacagccaaggggcaaccgttgctacacttttcccattggcaattgctatcggtattcctgtacccgttctgattggggtctttgttgccgtaaatggttacttcttcattcctaactatggcccaatcattgcctcaattgactttgatactaccggcaccactaaaattggcaaatatattttcaaccatagctttatgctacctggtttattaagtatggtatttagtatctgctttggtttgctaatcgccaatatgctaccgagtttattaaatatgattatttaa

SEQ ID NO: 36777 - protein, 447 aa, Haemophilus ducreyi 35000HP
MSSMFFLQFAIVLLCILIGARVGGIGLGVFGGLGLAILSFGFGLKPAGLPIDVMFMIMAVVSAAAAMQAAGGLDYMIKIATKILRRNPKYITFIAPLVTCTFTVLAGTGHVAYSVLPVIAEVSRHNGIRPERPLSMAVIASQFAIVASPISAAVVAVVALLEPQGITLPNILMVTIPATLLGLALACVFVNKMGKELKDDPEYQRRLQDPEYVKANHTNTDSTNIELKPTAKLSVSLFLFGALLVVLMGAVPSLRPIFDGKPMGMAHTIEIIMLTISALIIFFCKPNGNEITKGSVFHAGMRAVIAIFGIAWLGDTLMQSHITEVKSMVSGLVETAPWAFAFALFILSILVNSQGATVATLFPLAIAIGIPVPVLIGVFVAVNGYFFIPNYGPIIASIDFDTTGTTKIGKYIFNHSFMLPGLLSMVFSICFGLLIANMLPSLLNMII

SEQ ID NO: 36778 - DNA, 1281 bp, Bordetella parapertussis 12822
  CDS (1)..(1281): transl_table=11
atgacgctggcaatctttgtcttcgtgctgctggcgggcctggccatcggcttgccggtcgcgtacgcgctgatcctcacgggcgtggcgctgatgtaccagctggacttctacgacgcccagatcgtggcccagaacctgctcaacggcgccgacagctttcccctgatggcggtgccgttcttcatgctcgccggcgcggtcatgaacgccggcggcctgtcggcgcgcatcgtcgacctggccctcaaactggtgggccacatcaagggcgggctgggatacgtcaccatcctggccgcctgcattctggccagcctgtcgggctcggcggccgccgatgcggcggccctgtcggccctgctggtgcccatgatgatgaaagccgggcacagccgcgcgcgctccagcgggctggtggcctcgtccggcatcatcgcgctggtcatccccccttccatcggcctggtgctgatcggcgtcaccggcaacatcagcatcaccggcctgttcatggccggcatcgtgcccgggatacttatgggcatgtcgctgtgcgtggcctggtggctgctgtcgcgcaaggaacggatccagcccctgccgcgggtggatcgtgccgaggtccggcagtcgctggtaagaagtttctgggccctgatgctgccggtcatcatcatcgtcggcctgcgcttcggcatcttcacgcccaccgaagcgggcgtggtggccgcggtgtacgccatcttcgtggccacctgcatttaccgcgaactgcccatgcgccggctctacgaggtcttcctgacctccgccaagatgaccgcgatggtgatgttcctggtggccggcgcgctcgtctcgggatggatgatcaccgttgccgggctgccggcgcaggtctccgacatcatcagccccttcagcgacacgccgaccttgctgatgctggtcatcatcggcctggtgatcgtgatcggcatggccatggacatgattcccatcgtcctgatcctgatccccgtgctgctgccttcggtgacggccgccggcatcgacccggtctacttcggcgtcgtcttcatgctggcctgcgccatcggactcatcacgccgccggtgggcgccgttctcaacgtggtggccggcgtgacgggcacccgcatggtcgaactcgtcaagggcgtctggccgttcctgctggcgcaatgcgcgaccctgctgctgctgatcccgtttccgcagctggtgctggccccgtatcgctggatcatgcattga

SEQ ID NO: 36779 - protein, 426 aa, Bordetella parapertussis 12822
MTLAIFVFVLLAGLAIGLPVAYALILTGVALMYQLDFYDAQIVAQNLLNGADSFPLMAVPFFMLAGAVMNAGGLSARIVDLALKLVGHIKGGLGYVTILAACILASLSGSAAADAAALSALLVPMMMKAGHSRARSSGLVASSGIIALVIPPSIGLVLIGVTGNISITGLFMAGIVPGILMGMSLCVAWWLLSRKERIQPLPRVDRAEVRQSLVRSFWALMLPVIIIVGLRFGIFTPTEAGVVAAVYAIFVATCIYRELPMRRLYEVFLTSAKMTAMVMFLVAGALVSGWMITVAGLPAQVSDIISPFSDTPTLLMLVIIGLVIVIGMAMDMIPIVLILIPVLLPSVTAAGIDPVYFGVVFMLACAIGLITPPVGAVLNVVAGVTGTRMVELVKGVWPFLLAQCATLLLLIPFPQLVLAPYRWIMH

SEQ ID NO: 36780 - DNA, 1281 bp, Bordetella bronchiseptica RB50
  CDS (1)..(1281): transl_table=11
atgacgctggcaatctttgtcttcgtgctgctggcgggcctggccatcggcttgccggtcgcgtacgcgctgatcctcacgggcgtggcgctgatgtaccagctggacttctacgacgcccagatcgtggcccagaacctgctcaacggcgccgacagctttcccctgatggcggtgccgttcttcatgctcgccggcgcggtcatgaacgccggcggcctgtcggcgcgcatcgtcgacctggccctcaaactggtgggccacatcaagggcgggctgggatacgtcaccatcctggccgcctgcattctggccagcctgtcgggctcggcggccgccgatgcggcggccctgtcggccctgctggtgcccatgatgatgaaagccgggcacagccgcgcgcgctccagcgggctggtggcctcgtccggcatcatcgcgctggtcatccccccttccatcggcctggtgctgatcggcgtcaccggcaacatcagcatcaccggcctgttcatggccggcatcgtgcccgggatactgatgggcatgtcgctgtgcgtggcctggtggctgctgtcgcgcaaggaacggatccagcccctgccgcgggtggatcgtgccgaggtccggcagtcgctggtaagaagtttctgggccctgatgctgccggtcatcatcatcgtcggcctgcgcttcggcatcttcacgcccaccgaagcgggcgtggtggccgcggtgtacgccatcttcgtggccacctgcatttaccgcgaactgcccatgcgccggctctacgaggtcttcctgacctccgccaagatgaccgcgatggtgatgttcctggtggccggcgcgctcgtctcgggatggatgatcaccgttgccgggctgccggcgcaggtctccgacatcatcagccccttcagcgacacgccgaccttgctgatgctggtcatcatcggcctggtgatcgtgatcggcatggccatggacatgattcccatcgtcctgatcctgatccccgtgctgctgccttcggtgacggccgccggcatcgacccggtctacttcggcgtcgtcttcatgctggcctgcgccatcggactcatcacgccgccggtgggcgccgttctcaacgtggtggccggcgtgacgggcacccgcatggtcgaactcgtcaagggcgtctggccgttcctgctggcgcaatgcgcgaccctgctgctgctgatcctgtttccgcagctggtgctggccccgtatcgctggatcatgcattga

SEQ ID NO: 36781 - protein, 426 aa, Bordetella bronchiseptica RB50
MTLAIFVFVLLAGLAIGLPVAYALILTGVALMYQLDFYDAQIVAQNLLNGADSFPLMAVPFFMLAGAVMNAGGLSARIVDLALKLVGHIKGGLGYVTILAACILASLSGSAAADAAALSALLVPMMMKAGHSRARSSGLVASSGIIALVIPPSIGLVLIGVTGNISITGLFMAGIVPGILMGMSLCVAWWLLSRKERIQPLPRVDRAEVRQSLVRSFWALMLPVIIIVGLRFGIFTPTEAGVVAAVYAIFVATCIYRELPMRRLYEVFLTSAKMTAMVMFLVAGALVSGWMITVAGLPAQVSDIISPFSDTPTLLMLVIIGLVIVIGMAMDMIPIVLILIPVLLPSVTAAGIDPVYFGVVFMLACAIGLITPPVGAVLNVVAGVTGTRMVELVKGVWPFLLAQCATLLLLILFPQLVLAPYRWIMH

SEQ ID NO: 36782 - DNA, 1371 bp, Vibrio vulnificus YJ016
  CDS (1)..(1371): transl_table=11
gtgaaacatatggtcgctttactcgcactgcccatcgtatttggcgcaggatttttaatcataaagaaatacaacactcaagccgtgctgtttggagcgggcattttgatgatgctgatcggtgtgatggcgggcgagccggattttttacccaaaggggtaaaaacatcgggtgcaacagtcgttgatttcttcctagttattcaatccatcagctcttccactctcgctaaactgggtttgatcattatggcggttgggggattctcaaaatacatggggcatatcggcgctgccaatgcccttgttaaagtcaccactaaacctctttctgtgatcagtaatccttacgtaattttggcgctagcctatcttctggggcaatttttaaacgtgtttatccctagcgcagttgggctggccatgttgttgttagttgccttgtacccagttctggtcagtattggttgtacgccagcttcagtcgcggctgtgttagcaacaaccgcttgtttggatttaggaccggcttctggggcctcgaataaagccgcagaagtgattggaattgatgccgcttcctactttgttgagcatcaactctttgttggcgtctgcactgcgttagtgattgccacattgcattttgttgctcaaaaatggttcgacaaacgtgatgagaagaacggtgtctcttatgaactgcaagaaaaagaagacacttcccgtgatgcgcccatttggtttgcggtgctccctgttcttcctctcgttctacttttaacctttagcaagtttgctatcacgtctatcaaaattgatgtcgtaaccgcgatgtttattagcttagcggtcgccatgctgtgtgattttatttactccaaaaatggcagagcagtcgcggcatcgctcaaagtttacctacaaggtatgggcgatgtgtttgccagcgttgtctctttgatcattgccgcgcagacctttgtgattggcttggaaggtatcggttttatctcaggaatgctgggggttgcgactcatcttgggtttggttataccatgatggtgattatgctcgtcggtattattggggtgacagcgctgatgtcaggatcgggtaacgcggctttcttcagcttctctaacttggcacctgaagtggcgacccatgttggcgtctctacggcggctcttgcattacctatgcagctttcagcggggatcttccgctcattttcacctgttgcgggggttgtgattgcttgtgctggagttgcaggcattcctccgattgaactggtcaaacgtacggctatcccaatgctgggtggtttggtgactgtgttagccatcacttttattggagcttag

SEQ ID NO: 36783 - protein, 456 aa, Vibrio vulnificus YJ016
MKHMVALLALPIVFGAGFLIIKKYNTQAVLFGAGILMMLIGVMAGEPDFLPKGVKTSGATVVDFFLVIQSISSSTLAKLGLIIMAVGGFSKYMGHIGAANALVKVTTKPLSVISNPYVILALAYLLGQFLNVFIPSAVGLAMLLLVALYPVLVSIGCTPASVAAVLATTACLDLGPASGASNKAAEVIGIDAASYFVEHQLFVGVCTALVIATLHFVAQKWFDKRDEKNGVSYELQEKEDTSRDAPIWFAVLPVLPLVLLLTFSKFAITSIKIDVVTAMFISLAVAMLCDFIYSKNGRAVAASLKVYLQGMGDVFASVVSLIIAAQTFVIGLEGIGFISGMLGVATHLGFGYTMMVIMLVGIIGVTALMSGSGNAAFFSFSNLAPEVATHVGVSTAALALPMQLSAGIFRSFSPVAGVVIACAGVAGIPPIELVKRTAIPMLGGLVTVLAITFIGA

SEQ ID NO: 36784 - DNA, 1380 bp, Vibrio vulnificus YJ016
  CDS (1)..(1380): transl_table=11
atggagatttctatgctagagctcttaattggactggtagtgaccgttgcggttggttacttcattgtcaagggttataaagcggcaggtgtgctactgaccgcgggtgttcttctactgatcctaacaggcgttcttggccacactgtcttgcctgccaaaatcacctcaacaggtaacatgatcacagactcattagagtacgtgaagtttatgctgcaaaatcgcggtggcggtttagggatgcagatcatgctactttgcggtttcgccgcttacatgacacatatcggcgcgaataatgtcgttgtaaaacagttttctaaacctctttccgtcattaaatcgccttacgttttgttggtagcagcctatattgttgcgtgcttaatgtctcttgccgtgagctctgcaactggtctgggtgtgcttttgatggcaacccttttcccaatgatgactgcaatggggatttctcgcccggcggcagcggccgtgtgtgcgtcacccgccgcgatcattttgtccccgacttctggtgacgttgttattgctgcggaaaaatcaggcctcgctttggatgtgtttgcagtgcaaaccgttttgcctgtctccatttgtgcaatcattgtcatgtcggtcgccgctttcttctggaacaaataccttgataagaaagacaacaccccaatggaaaagatcgatgtttcggaaatcaaagccgatgcacctgcattctatgcgctgcttccattcctaccgatcatcggtgttttcttatttaatggccgcacaattcctggattaagcctcgatatctataccattgttgtactgtcgatctttatcggtgctttggttcactacgtggtgaacaagtttgatggtaagaaatcacttgaagatctcgatgcgtgttacgacggcatggcagatgccttcaaaggcgttgtgatgttattagttgccgctggcgtatttgcccaaggccttatgtcgatcggcgcgattgacaaccttcttcatcttgcagaaaccgcaggtgcaggtggtatcgcgctcatgctgattttgactggtcttacggttgcagccgctattgcaacgggatcgggtaatgcccctttctacgcgtttgtggagctcgccccatctctggccgcaaaaatgggactgaatccagcattcttgattattccaatgttgcaagcctctaaccttggtcgcaccatttctcccgtttctggcgtggtggtggctacctctggtatggcacacatcagcccatttgaagtagtaaaacgcacttctgttcctgtgctagcgggcttgattaccgtcatccttggcacaatgatattggtaccaatgagcgcctaa

SEQ ID NO: 36785 - protein, 459 aa, Vibrio vulnificus YJ016
MEISMLELLIGLVVTVAVGYFIVKGYKAAGVLLTAGVLLLILTGVLGHTVLPAKITSTGNMITDSLEYVKFMLQNRGGGLGMQIMLLCGFAAYMTHIGANNVVVKQFSKPLSVIKSPYVLLVAAYIVACLMSLAVSSATGLGVLLMATLFPMMTAMGISRPAAAAVCASPAAIILSPTSGDVVIAAEKSGLALDVFAVQTVLPVSICAIIVMSVAAFFWNKYLDKKDNTPMEKIDVSEIKADAPAFYALLPFLPIIGVFLFNGRTIPGLSLDIYTIVVLSIFIGALVHYVVNKFDGKKSLEDLDACYDGMADAFKGVVMLLVAAGVFAQGLMSIGAIDNLLHLAETAGAGGIALMLILTGLTVAAAIATGSGNAPFYAFVELAPSLAAKMGLNPAFLIIPMLQASNLGRTISPVSGVVVATSGMAHISPFEVVKRTSVPVLAGLITVILGTMILVPMSA

SEQ ID NO: 36786 - DNA, 1290 bp, Vibrio vulnificus YJ016
  CDS (1)..(1290): transl_table=11
gtggttatggctggttcaatttttggttggctaggcttgctttttgctggcatgccagttggcttttctctgatttttgtggcgttggtttttcttattgttaccaacagcacaggtattaacttcgcagcgcagcagatgctgggcggcatcgataattttacgttattggccgtaccattcttcgtcctaacgggccatttgatgaacagtgccggtattacggagcgaatttttaactttgccaaatccatggttggccatatcacgggcagtctagggcatgtaaacatcatggcgagtttactcttttctggtatgtctggctctgcgcttgccgatgccggaggcttggggcagcttgaaatcaaatcgatgcgtgacgcgaaatacgatgatgactttgctggtggtctcacggcggcctcgtgcatcattggtccgcttgttccgccttctgtgccattggtgatttatggtgtagtgtccaacacatcgattggtgcgctgtttttagccggtgcaataccaggcattttgtgctgcgtggctttgatggtgatgagctatttcatctgtaagaaacgtggctacatgaccttgccaaaagcgtcgagaaaggagcagttcacatcgttcaaagaggcatttctttctctaatgactccggtcatcatcattggcgggatcttttcgggtaagttcaccccgacggaggcggcagtggtttcctctctttacgctttgttccttggtaccgtggtgtacaaacagctgaccttgacggggtttgtggaaattcttcgcgaaacggtgaataccaccgccgttgttgccttgatggtgatgggggtaacggtgtttggctggatcgtggcgcgtgagcaattaccacagatgcttgcggattatttcttgtcgatcagtgaaaacccattggtactactgctactcatcaacttgctcttactgtttttgggaaccttcattgaatcactcgcgctattgctattgctggttccatttttagtcccagtggcatcggcggtcgggattgaccctgtgcactttggtgttatggctattttgaacttgatgatcggcattctcacgccaccaatgggcatggctttatatgtggtatcacgtgtcggagacattccatttcataccttaactcgaggcgtacttcctcttctggtgccattgtttattgtgctggcgttggtggcggtattccctcaaatcaccttgctattgcctgagctgcttttgggttacggacaataa

SEQ ID NO: 36787 - protein, 429 aa, Vibrio vulnificus YJ016
MVMAGSIFGWLGLLFAGMPVGFSLIFVALVFLIVTNSTGINFAAQQMLGGIDNFTLLAVPFFVLTGHLMNSAGITERIFNFAKSMVGHITGSLGHVNIMASLLFSGMSGSALADAGGLGQLEIKSMRDAKYDDDFAGGLTAASCIIGPLVPPSVPLVIYGVVSNTSIGALFLAGAIPGILCCVALMVMSYFICKKRGYMTLPKASRKEQFTSFKEAFLSLMTPVIIIGGIFSGKFTPTEAAVVSSLYALFLGTVVYKQLTLTGFVEILRETVNTTAVVALMVMGVTVFGWIVAREQLPQMLADYFLSISENPLVLLLLINLLLLFLGTFIESLALLLLLVPFLVPVASAVGIDPVHFGVMAILNLMIGILTPPMGMALYVVSRVGDIPFHTLTRGVLPLLVPLFIVLALVAVFPQITLLLPELLLGYGQ

SEQ ID NO: 36788 - DNA, 1413 bp, Corynebacterium diphtheriae NCTC 13129
  CDS (1)..(1413): transl_table=11
gtgctttatcttctcatagccctcatttccttcgccgcagtgatgtacctaattatcaagaaagtcaacgctgctgctgcgattttcttcgtgggtgtacttcttcttatgattgcggctatttctgggaaggccgaaccgtcagtagaaattaaaccatctggtaatagtttttacgatgagctgcttgtcatcgaggcactttttaaatccagattttctggtattggcatggccatcatggtgctctttggttttgtctcctacatgcgcacaatcggtgccgacgccaaagcagtcgttcttttgtccgcaccactccaaaaaatgcgcggttcttactggatggtaccgatcggttttaccattggaactgcgttgtccctgattgtgccatcagcgtccgcactttctctgctattggtcgctaccctattaccagcactcgtcgcagccggtctcaccccactcaccgtggccgctatcatcgtcacctcatcaaccatcgtagctacacctttggaagctggacttatccaaggtgctgatctcgtgggtatgccaatttcagaatatgtgtacggcaacgttgctaaggccactattccaactcttgtgatcactgcttttgtccacatggcttggcaacatcattgcgacaaagtagacgcacgcaaatcagcacttcccacaagtgatgctccttcgattcagcatgacacgtcagcagttgacgacgcgctccggcgcgccgctggcctccccgcatactatgccctactccccttgcttccactccttctcattttggtgacagccgtcttacatcgcgcagacctactatcttttgaagctggcattttgccggtgacaattgtgtcactattcatttcgctgataatcgaagccatccggcatcgaagcctcatgaatgcactagaaacagtgaaactcttttttaaaggcatgggagaaggcgctgcgggtgtggtcgcactattggttgcagctgcggtactcgtcgagggcgtaacccagctaggcgtgatcgatatgctgattaatgctactgaaggatcctctggcgctactgtgattatcattttggcattcgtagcttcaacagcacttatgtcagctttaacgggatctggcactgccccttacttcgcattctctgaagtcgtaccgtcacttgcagcccagactggtgttctccccgttcaaatgcttacggcaatttggggaacgtcgaatttgatgcgccaggtgtcccccgtcaacgcggcagtcattattgtttcgactgcgattaatgtcagccctatcaaactcgtcaaacgtacatctgtaccgatgattgttgccacgattttgaacgttgtgtttgcattccttttcattcacgtttag

SEQ ID NO: 36789 - protein, 470 aa, Corynebacterium diphtheriae NCTC 13129
MLYLLIALISFAAVMYLIIKKVNAAAAIFFVGVLLLMIAAISGKAEPSVEIKPSGNSFYDELLVIEALFKSRFSGIGMAIMVLFGFVSYMRTIGADAKAVVLLSAPLQKMRGSYWMVPIGFTIGTALSLIVPSASALSLLLVATLLPALVAAGLTPLTVAAIIVTSSTIVATPLEAGLIQGADLVGMPISEYVYGNVAKATIPTLVITAFVHMAWQHHCDKVDARKSALPTSDAPSIQHDTSAVDDALRRAAGLPAYYALLPLLPLLLILVTAVLHRADLLSFEAGILPVTIVSLFISLIIEAIRHRSLMNALETVKLFFKGMGEGAAGVVALLVAAAVLVEGVTQLGVIDMLINATEGSSGATVIIILAFVASTALMSALTGSGTAPYFAFSEVVPSLAAQTGVLPVQMLTAIWGTSNLMRQVSPVNAAVIIVSTAINVSPIKLVKRTSVPMIVATILNVVFAFLFIHV

SEQ ID NO: 36790 - DNA, 1296 bp, Wolbachia endosymbiont of Drosophila melanogaster
  CDS (1)..(1296): transl_table=11
atgttttatcttacaaattttttgcctattttactgttcctatttctttttgtaggaagtggtatatattttactattcttggcgtgtcaaatgctttttatcagttatctccactggtagccattgttcctgccatagctctgggttgggttttatacaagggcaatactgaagaaaaaatgtatgcctttctagatggggtaagagatcgtaatattatcactatgtgtatcattttcttacttgcaggtgcattcagtgaagtaactaaagcaatcggtagtgctgatgccacagttaatttggctctttcatttataccaacacaatttttactcataggattattttttgtagcagctttcatctccactgctattggtacatcaatgggcaccattgcaacaattgctcctattgcagttgaactgacacaagctgggatttctccttccttaggagttgcaaccgttgtaggaggagcaatgtttggcgacaatttatctattatctctgatactacaattgcatctgtgatgtctcaaaaggctgatataaagaaaaaattaaaactgaatgcaaaagtggcactaattgcttctatattcacaataattatattattttatagctcaagcaatagtgctgctatttcagttaaggagtattctttattgcttgtgactccttacataatacttatattgcttgcaaactttggaataaatgtatttacggcattggttttaagcataacttttgctggaatcattggatttataaataacaacaatcatggtttattgtttttaagccaaaacatcaccaaagggtttatgagtatgcatgaaattatgctactgtcattgatggttggcgggctttcaggactggtaggtaaaaattctaaggagcttgcagataaactttcatcttgggttatgatacaacgtggtggacaaaaaactgcgcaattatttattgcaaaaatagtcagcatatttgatattttacttgcaaataacaccatcgctataatttttagtggtgaaattgctagagatattgctaagaaatatgaaataccgcctcactatagtgcagcatggctaggcatattttcttgtgtatttcaaggattaataccgtatggcgctcaattgcttttggctagcactattgctggagtttcacctttggcagtcgtgccacacgtatactattgctatgttttaggtattattgcagtgttatatattgtattgaacaaaattgagaaaaaagattgtgcttaa

SEQ ID NO: 36791 - protein, 431 aa, Wolbachia endosymbiont of Drosophila melanogaster
MFYLTNFLPILLFLFLFVGSGIYFTILGVSNAFYQLSPLVAIVPAIALGWVLYKGNTEEKMYAFLDGVRDRNIITMCIIFLLAGAFSEVTKAIGSADATVNLALSFIPTQFLLIGLFFVAAFISTAIGTSMGTIATIAPIAVELTQAGISPSLGVATVVGGAMFGDNLSIISDTTIASVMSQKADIKKKLKLNAKVALIASIFTIIILFYSSSNSAAISVKEYSLLLVTPYIILILLANFGINVFTALVLSITFAGIIGFINNNNHGLLFLSQNITKGFMSMHEIMLLSLMVGGLSGLVGKNSKELADKLSSWVMIQRGGQKTAQLFIAKIVSIFDILLANNTIAIIFSGEIARDIAKKYEIPPHYSAAWLGIFSCVFQGLIPYGAQLLLASTIAGVSPLAVVPHVYYCYVLGIIAVLYIVLNKIEKKDCA

SEQ ID NO: 36792 - DNA, 1353 bp, Erwinia carotovora subsp. atroseptica SCRI1043
  CDS (1)..(1353): transl_table=11
atgctcgaacttttgattggtgttgctgtaacgattctggttggtcgttacattataaaagggtactccgcgacgggcgtgttgctggtgggaggcctcttactcttggcaatcagtgccatgctgggcaaaaacatattgccagccagtgtgaaggcgacgggctggagtgctacggatatttttgaatacgtaaaaattttgctgatgagccgtggtggcgatctcggcatgatgattatggtgctgtgtgggtttgcggcttacatgacgcacatcggggcgaatgatgtcgtcgttaagctggtttcgcgaccgcttaaaatgatcaactcgccttatttgctgatgattgcggcctattttgtcgcctgtttgatgtcgctggcggtgtcatcggccactgggctgggtgtgttattaatggcaacgctgttccctgtcatggtgaatgtcgggattagccgcggtgccgctgcggcaatctgcgcatcccctgtggcgttgatcctgtcgccaacgtcgggcgacgtggtgcttgctgcgcaggcatcgcagatgaaattagtggatttcgcctttaaggctacgctgcccatatccatcattgctatcgtgtgcatggccgtcgcgcatttcttctggcagcgctatttggacaacaaagagaatgctagtcatgagattctggatgtcagcgagatcacgacgaatactccgcgtttttacgccattctgccgtttacgcctatcatgggcgtactggtatttgatggcaaatgggggccggagcttcacattatcaccgtactggttatttgtatggtgttggccgcggtgctggaatttgtccgttcattcaatgcgaaaaaagtatttgatgggttagatgtagcttatcgcggcatggccgatgctttctctagcgtcgtaatcctgctggttgctgctggtgtttttgctcagggacttggcacaattggctttatcagcggactgattggcctcgcgcagtcatttggcagcggtgggttggtgattatgctggtgctggtggtaatcacgatgctggcggcgatgacgacgggttctggcaatgcgccgttctatgcgtttgttgagctgattccaaagctggcgtcacaaatgggtatcaaccctgcctatctggccattccgatgcttcaggcttccaatttaggacgtaccatttctccggtatccggcgtggtggttgcggtggcggggatggcgaagatatcgccgtttgaggtggtgaagcgcacatctgttcctgttctggtcgggctgattgtggtggtggttgccacagaaattatgatacccgcctga

SEQ ID NO: 36793 - protein, 450 aa, Erwinia carotovora subsp. atroseptica SCRI1043
MLELLIGVAVTILVGRYIIKGYSATGVLLVGGLLLLAISAMLGKNILPASVKATGWSATDIFEYVKILLMSRGGDLGMMIMVLCGFAAYMTHIGANDVVVKLVSRPLKMINSPYLLMIAAYFVACLMSLAVSSATGLGVLLMATLFPVMVNVGISRGAAAAICASPVALILSPTSGDVVLAAQASQMKLVDFAFKATLPISIIAIVCMAVAHFFWQRYLDNKENASHEILDVSEITTNTPRFYAILPFTPIMGVLVFDGKWGPELHIITVLVICMVLAAVLEFVRSFNAKKVFDGLDVAYRGMADAFSSVVILLVAAGVFAQGLGTIGFISGLIGLAQSFGSGGLVIMLVLVVITMLAAMTTGSGNAPFYAFVELIPKLASQMGINPAYLAIPMLQASNLGRTISPVSGVVVAVAGMAKISPFEVVKRTSVPVLVGLIVVVVATEIMIPA

SEQ ID NO: 36794 - DNA, 1287 bp, Desulfotalea psychrophila LSv54
  CDS (1)..(1287): transl_table=11
atgagtatgtctgtaacagctgttttattttgctcttttgcgggattactgcttttgggagcacccattaccgtggcgcttggcgtttctgccatggtgtcatttatggtcgtggggcaggatcttggaaccctcattcaaattgcctttacctcggtaaactcctttcctattatggctctgcccgcctttgttttggccggggccttgatggataaggctggtgtttccaagagacttgtcaccgtggctgaaaagatggtaggtcccattcccggtggtcttgctgtttctactgccctcgcctgtgtcttctttggcgcaatttcaggttccggccctgcgacaactgcagcggttggcatgttgatgattcctgccatggtcaataagggttatgataagggatatgctgcggcagctactgctacagcgggtggtgtaggtattattattcctccaagtattccaatggttatctatggtgtagcctctcaggaatctatcaccagaatgtttcttggtggtgttgttcccggtttgatcatcagtcttggcctctgtgcaatgcatctctggatgtgtcgtaagatgaagcctgctgaaggggatgaggcgtggtcagctcaagagctgattaaatctgttaaggatggcttttgggctatcatggccccggttgttatcctcggtggtatctatactggtatctttacccctacagaggctgctatcgtagcaatcttctatgtgctctttgtcggtatctttatttatcgtgaacttaccttcaagtctgtgcagaaatgtctcgagaccacctcttggattaccggtcgtgttcttgttatcatgtttaccgcctatgcctttggtcgtttgctcattcagtaccgtattcccaatcagatcgtagagtggcttttgaccatgacaaccaatgtaaatctggtttggatatttgttcttatccttctccttttctttggtatgttcatggagaccctggccatcatcctcttggtaactcctgtactgcttcctgtaatgacagcatttggggttgacccaattcactttggtgttgttctggtttgttgttgtggtgttggtttctctacaccgcctctgggggaaaatatatttattgcctcgggtattgccgatgtctcaattgagaaaatttccgtgaaggccctgcccttctgtgcggttaccatcggtgtgattctgttgatcaccttctgcccgcaaatcgtactgtggttgcctaatttgttgatgtag

SEQ ID NO: 36795 - protein, 428 aa, Desulfotalea psychrophila LSv54
MSMSVTAVLFCSFAGLLLLGAPITVALGVSAMVSFMVVGQDLGTLIQIAFTSVNSFPIMALPAFVLAGALMDKAGVSKRLVTVAEKMVGPIPGGLAVSTALACVFFGAISGSGPATTAAVGMLMIPAMVNKGYDKGYAAAATATAGGVGIIIPPSIPMVIYGVASQESITRMFLGGVVPGLIISLGLCAMHLWMCRKMKPAEGDEAWSAQELIKSVKDGFWAIMAPVVILGGIYTGIFTPTEAAIVAIFYVLFVGIFIYRELTFKSVQKCLETTSWITGRVLVIMFTAYAFGRLLIQYRIPNQIVEWLLTMTTNVNLVWIFVLILLLFFGMFMETLAIILLVTPVLLPVMTAFGVDPIHFGVVLVCCCGVGFSTPPLGENIFIASGIADVSIEKISVKALPFCAVTIGVILLITFCPQIVLWLPNLLM

SEQ ID NO: 36796 - DNA, 1869 bp, Desulfotalea psychrophila LSv54
  CDS (1)..(1869): transl_table=11
atgtcttcagcgacaccaccacagatgccggcggccaataaaaattggatgcattggcttgatgataattttgaaaagccctttcttatcttgggaatgctctctatcattctcatcagtgtcttccaaacctcctaccgttatatcggcgtacctcttggtgctgacccgagtgctggtgtttggaccgaagaacttgcccgttttatctttatctggatctcttatctggcagttcccatagcgatcaagaatcgaagtaatattcgagttgatattgtttatgatcgccttcctccgcgtttgcaacggataagctgggttgtggttgatgtcttctttttgatcctcacttcagtaattttgtatatgggtatcaagcatatcggtatgcagatcagatatccacagactacagcagccttgcaaataccgtactatataccctatttgattctgcccattgcctttggcctgatgtctctgcgcctgcttcaggatcttttcaagcaggttaaggaaacgggtattcttgattcacttgttggtgtggggctctgtgctgctatctctttgcctataatcttatttagtggctttaacgtattgtcagtgctctttggctactttgccctctttttggtaattggtgtgcccattgccatcagtcttggccttgcagctcttgccaccgttgtggccaacggctctctccccattgagtatgtggcgcaggtgagttttacctccattgatagctttcccatcatggcaattccattttttattgctgccggtgtgttcatgggctgtggtgggctttcccgccgtctactggatcttgccgatgaacttctcggtgccctgcccggtggtctggcccttgcgaccattgcaacctgtatgttctttgccgcaatctctggttctggccctgcaaccgttgctgcaattggctccctgaccattcctgccatgatggcacgtggctatgataagtacttttcctgtgccgttgtggcaaccgccggtgcgatcggggtaatgattcctccatccaacccctttgtcgtctacggtgtttccgcccaggtatcggtaggtgatctctttattgccggtattgttcccggtcttcttaccggacttgccctgatggtttttagtttcttttattcgaagaagcgtggctggaagggtgaggtgaaagaacgtaattttaagacatttgctcgggcattttgggatgcaaagcttgccctgatggtaccggtgattgttctcggtggtatctacggtggtatcatgacccccaccgaagccgctgccgttgcagccttctacggtttggttgttggtatctttgtctaccgcgagctgaacatgaagaatctggctcctgcctttattgaggcctgttcaacctcggcgattgttattgtccttatggccatggccaagatttttggtaacgtcatgaccgtggagcaggtaccggctatgattgccgacttcattcttggcatgacttccaataaaattgttatcctgctcttgatcaacgttctgcttctggtcgttggtacctttatggaggccctggcagccattgttattttggtacccatcctcctgccgattgtcatgaaggtaggtgttgatccactgcattttggtatcatcatggtggtcaacctggccattggttttgttaccccgcctgttggggtcaacctctttgttgccgctggggttgctaatgttaagattgagcaggtctccaaggttgttattccatttttgggcgtcatgatattggtactgcttgctgtaacctttattccgcaactctccctcttcatgatctag

SEQ ID NO: 36797 - protein, 622 aa, Desulfotalea psychrophila LSv54
MSSATPPQMPAANKNWMHWLDDNFEKPFLILGMLSIILISVFQTSYRYIGVPLGADPSAGVWTEELARFIFIWISYLAVPIAIKNRSNIRVDIVYDRLPPRLQRISWVVVDVFFLILTSVILYMGIKHIGMQIRYPQTTAALQIPYYIPYLILPIAFGLMSLRLLQDLFKQVKETGILDSLVGVGLCAAISLPIILFSGFNVLSVLFGYFALFLVIGVPIAISLGLAALATVVANGSLPIEYVAQVSFTSIDSFPIMAIPFFIAAGVFMGCGGLSRRLLDLADELLGALPGGLALATIATCMFFAAISGSGPATVAAIGSLTIPAMMARGYDKYFSCAVVATAGAIGVMIPPSNPFVVYGVSAQVSVGDLFIAGIVPGLLTGLALMVFSFFYSKKRGWKGEVKERNFKTFARAFWDAKLALMVPVIVLGGIYGGIMTPTEAAAVAAFYGLVVGIFVYRELNMKNLAPAFIEACSTSAIVIVLMAMAKIFGNVMTVEQVPAMIADFILGMTSNKIVILLLINVLLLVVGTFMEALAAIVILVPILLPIVMKVGVDPLHFGIIMVVNLAIGFVTPPVGVNLFVAAGVANVKIEQVSKVVIPFLGVMILVLLAVTFIPQLSLFMI

SEQ ID NO: 36798 - DNA, 1257 bp, Symbiobacterium thermophilum IAM 14863
  CDS (1)..(1257): transl_table=11
atgttgccgtgggttggcgtgctcatcgtcatcctcaccgtctacgcgatcctgaagcggtacgagacccgcctggtgctgttcaccgccggcctgctgatggcgctcatcgccctgaagccgatggaggccttcagccagttccagaagtcgatgaccaacgccggcctgatcagcgccatctgctcggtcatgggattcgcctacgtgatgaagctgacccagtgcgaccagcacctggtccacgcggtcgccaacaccgtcgcgcgggcgcgggcgatcctgatcccggcgaccaccatcgccaccttcctgatcaacatcgccctgcccagcgcggcgggctgcgccgccgccgtgggggcggtgatgatcccggtcctgatggccgccggcgtccacccggcggtggccgcggccgccgtgctcgcgggcaccttcggctccgtgctcagccccggcagctcccacatcgtgatggtcgccgagatgtccggcgcctcggtggtggacaccatcgccacggtcacgccggcgacggtggtcaccggcctgatcggcgccggcgtcctgaccatcctggcgttcctccgccgggaggaccgcgggcacgcctctgagaccgtgaccgaatccccgcaattccggcccaaccccctttatgccctggtcccgatcgttcccctggtgctgctggtgctgggcgcgacggtgccggcgatgaagaactggaggctcaccgtgcccgcgtgcatgctcatcggcaccattctcgccctgctcgtgacccgtatgaaccccgccgaggtgaccaagtccttcttcgacggcatgggcaaggcgtacggcgacgtcatcggcatcatcatcgccgcgggcgtgttcgccgcggggctgacccaggtgggcctcatcgacctgctgttgaacgcggccaccggggccaggggcgcgatcggggccgcggggacgtggggccccttcctggtggccatcctcagcggatccggtgacgccgccaccatagccttcaacgaggccgtcaccccccatgccgccagcttcggcctgaccatccccaagctggggacgctggcctccctggccggctcccttggccgctccatgagtcccgtcgcgggcgcggccatcatcgtctccggcatcgcgggcgtgagcccgatagaggtggcgaagcgcaacgcccccggcatgatcctggccagcgtcgtcgcgttcctcatgcaggggctctga

SEQ ID NO: 36799 - protein, 418 aa, Symbiobacterium thermophilum IAM 14863
MLPWVGVLIVILTVYAILKRYETRLVLFTAGLLMALIALKPMEAFSQFQKSMTNAGLISAICSVMGFAYVMKLTQCDQHLVHAVANTVARARAILIPATTIATFLINIALPSAAGCAAAVGAVMIPVLMAAGVHPAVAAAAVLAGTFGSVLSPGSSHIVMVAEMSGASVVDTIATVTPATVVTGLIGAGVLTILAFLRREDRGHASETVTESPQFRPNPLYALVPIVPLVLLVLGATVPAMKNWRLTVPACMLIGTILALLVTRMNPAEVTKSFFDGMGKAYGDVIGIIIAAGVFAAGLTQVGLIDLLLNAATGARGAIGAAGTWGPFLVAILSGSGDAATIAFNEAVTPHAASFGLTIPKLGTLASLAGSLGRSMSPVAGAAIIVSGIAGVSPIEVAKRNAPGMILASVVAFLMQGL

SEQ ID NO: 36800 - DNA, 1278 bp, Mannheimia succiniciproducens MBEL55E
  CDS (1)..(1278): transl_table=11
atgacggtcgtaatttttcttgctgttttattaggtgcgattattttaggtattcctgtcgccttctcattgcttgtgtgcggtgtggcgttaatggttcacctggatttattcgattcgcaaattttagcccaacaaatcgttagcggtgcggacagtttctccctgatggcgattccgttctttattcttgccggcgagctgatgaatgaagggggcttatccaaacgaattattgatttaccgatgaagcttgtcggtcataaacgcggcggattaggcttcgttgccatccttgccgccatgattatggcgagtctttccggttctgcggtggcggatacggcagcggttgccgctatgttgttgccgatgatgaaaaccaccggttatccggaagcccgttccgccggcttaatcggtaccgcagggattattgcgccgattattccgccgtccattccttttatcgttttcggggtggccagcggcgtatctatcaccaaattattcatggccggtattttcccgggcattatgatgggtatttgcttaggcatgctttggtggtggcaggcaaaacgcttaaatttaatgaccttttccaaagccaccagacaagatctttgtatctcctttaaaaacagtatttgggcattgttattaccggttattatcatcggcggattccgtaccggtatctttactccgacggaagccggtgccgtggcgactttctatgctttggtcgtttcaatgtttatttatcgcgaattaaaattcaaagatctttataaagtgctgttggccgctgctaaaacaaccgcagtggtaatgttcttggttgccgccgccaacgttaccggttggttaatcaccgttgccgaattaccggccatgttaaccgagttactcgaacctttacttggtaatccgacagtcttattgcttgttgtgatgttagcggtatttgttatcggtatggtaatggacttaaccccgaccgtgttgatcttaaccccggtattaatgccgttaattgaagaagcgggaatcgacccggtatatttcggcgtactatttatcctaaatacatccatcggcttaattacaccgcctgtgggcaacgtattaaacgtgattacgggtgtgtctaaacttccgtttgaccaagcggcgaaaggcatcttcccgtatttaatcatgatgattttattgcttttattatttgtattcgttccttcacttattctcgttccattaagttggatgttgtaa

SEQ ID NO: 36801 - protein, 425 aa, Mannheimia succiniciproducens MBEL55E
MTVVIFLAVLLGAIILGIPVAFSLLVCGVALMVHLDLFDSQILAQQIVSGADSFSLMAIPFFILAGELMNEGGLSKRIIDLPMKLVGHKRGGLGFVAILAAMIMASLSGSAVADTAAVAAMLLPMMKTTGYPEARSAGLIGTAGIIAPIIPPSIPFIVFGVASGVSITKLFMAGIFPGIMMGICLGMLWWWQAKRLNLMTFSKATRQDLCISFKNSIWALLLPVIIIGGFRTGIFTPTEAGAVATFYALVVSMFIYRELKFKDLYKVLLAAAKTTAVVMFLVAAANVTGWLITVAELPAMLTELLEPLLGNPTVLLLVVMLAVFVIGMVMDLTPTVLILTPVLMPLIEEAGIDPVYFGVLFILNTSIGLITPPVGNVLNVITGVSKLPFDQAAKGIFPYLIMMILLLLLFVFVPSLILVPLSWML

SEQ ID NO: 36802 - DNA, 1293 bp, Mannheimia succiniciproducens MBEL55E
  CDS (1)..(1293): transl_table=11
atggacgtgatcattcctatttcaattttattgattctctttgttattggtacgccggttgcattttgtattttctgttctacgctgacttatttcttaatgagccatcaaccaatggttattttaattcaacgtttagcgggtggattagaaagtgtcacattgcttgcaataccattctttattatggccggtgtctttatgaaccatacagggattagtgagcggttattaaaattctgtgaagtacttaccggtcatatgaacggcggtttagcgcaagtaaacgttgcattaagtacattaatgggtggtttatccggttcaaatattgccgatgcggcaatgaactctaaattgcttgtaccacaaatggttgctcgtggttatagtgcatcattttcagcagcggtaactgcagcaggttcattaatcacacctattattccgcctggcattgcgatgattatttacggttatgtcaataatgtttctattggtcgcttattcttggccggtgtcgttccgggtacaatgctctgtattctaatgatgatcttagtgtcaatcatttctaaaaaacgaggctatttacctatccgtgaaaaacgtgcaagttgcaaagaagtcattgtttcggcaaaagatgccgtattagcacttttacttccgattatcattatcggcggcatccgtatgggggtatttacgcctacggaagctggtgcggtggcggttatttatgcgcttatccttggtatgtttatttaccgcaatatggatgctaagaaattatggttagcaacgcgtgaatcggcattaggtgcggcaaacgtactattaattatttgtgtcgccgttgcattttcaaaattcttaacttgggagcgtgttccacaggctcttgcgagttggatgacaacggtggtagatagtccaatagcatttttgatgctagtgaatgtcgcattattagtcttaggtatgtttttagaaggtaatgcgattatgatcgtattagccccgttgcttgccccgattgcacattcatacggtattgatccaatccattttggtattgtgtttatttttaatggtgcaatcggaacaattaccccgccattaggtacagtaatgtttaccacctgttcaattactgaagttccgattgagaaatttattaaagatgtgcttccattctggggcttacttttattagaacttgttcttttaacttatatcccgacaatcacaacatggttaccaaacttagtttatggcgtagcacaataa

SEQ ID NO: 36803 - protein, 430 aa, Mannheimia succiniciproducens MBEL55E
MDVIIPISILLILFVIGTPVAFCIFCSTLTYFLMSHQPMVILIQRLAGGLESVTLLAIPFFIMAGVFMNHTGISERLLKFCEVLTGHMNGGLAQVNVALSTLMGGLSGSNIADAAMNSKLLVPQMVARGYSASFSAAVTAAGSLITPIIPPGIAMIIYGYVNNVSIGRLFLAGVVPGTMLCILMMILVSIISKKRGYLPIREKRASCKEVIVSAKDAVLALLLPIIIIGGIRMGVFTPTEAGAVAVIYALILGMFIYRNMDAKKLWLATRESALGAANVLLIICVAVAFSKFLTWERVPQALASWMTTVVDSPIAFLMLVNVALLVLGMFLEGNAIMIVLAPLLAPIAHSYGIDPIHFGIVFIFNGAIGTITPPLGTVMFTTCSITEVPIEKFIKDVLPFWGLLLLELVLLTYIPTITTWLPNLVYGVAQ

SEQ ID NO: 36804 - DNA, 1293 bp, Mannheimia succiniciproducens MBEL55E
  CDS (1)..(1293): transl_table=11
atggatgaattgaaacctgttattgccgttgccggtattattgcgaccatttatttgctgattaaaaaatatgaaacccgaaccgtactgatcggggtcgggttgttgatgtcgctccttacgcttaatccgatgggcgcattggacgcattcgccaaaagtatgacttccggcggactgattatggcgatctgttctagtatgggttttgcctatgtaatgaaatatactcaatgcgatactcatttagtacatttgctgaccaaaccactgggaggattaaaattctttttgatcccggtagcgacggtgatcactttctttattaatatcgcgattccttctgcggccggatgcgcggctgcggtgggagcaacgttgattccgatactgaaaagtgccggcgtccgtccggcgacagccggggcggccattctggcggggactttcggttccatgatgagccccggttcttctcactcggcgatgatcagtgaaatgtcgaaactaacgattactgaagttaacctgactcatgctccttatactatggttgcgggcgctatcggtgcggttatgctgacattgttggcgctgttttttaaagattacggcgatgaacaccgtcaagcttatttaagagaacagaaagaagcggaagataaattcgttaaagttaatgttctgtttgctttagcgcctttggtgccgttggtgattctggttattggcggtacatcgttgcaacaggtgtcctggttagggtggacccaaatgggcgtaccgcaggcaatgttaatcggggcgatttacggcattttggtcacccgtatttctccggtgaaaatcaccgaagaattctttaacggaatgggtaattcttatgccaacgtactcggtatcattattgcggcgggcgtgtttgtggccgggttaaaatccaccggcgctattgactctgccatcgggttcctcaaacattccaacgaatttgtgcgctggggtgcgactatcggaccgttcctgatggggatcatcaccggttccggcgatgcggcggcaatcgcctttaactccgccgttacaccgcatgcggtcgaactcggttatactcatgttaatctcggtatggcggcggcaatttcgggcgcgatcggacgtaccgcctcgccgattgcaggtgtcaccatcgtctgtgcgggcctggcaatggtcagcccgatggaaatgatcaaacgtaccgcattgggaatggttttagcaatcttatttcttgctctgtttatgctgtaa

SEQ ID NO: 36805 - protein, 430 aa, Mannheimia succiniciproducens MBEL55E
MDELKPVIAVAGIIATIYLLIKKYETRTVLIGVGLLMSLLTLNPMGALDAFAKSMTSGGLIMAICSSMGFAYVMKYTQCDTHLVHLLTKPLGGLKFFLIPVATVITFFINIAIPSAAGCAAAVGATLIPILKSAGVRPATAGAAILAGTFGSMMSPGSSHSAMISEMSKLTITEVNLTHAPYTMVAGAIGAVMLTLLALFFKDYGDEHRQAYLREQKEAEDKFVKVNVLFALAPLVPLVILVIGGTSLQQVSWLGWTQMGVPQAMLIGAIYGILVTRISPVKITEEFFNGMGNSYANVLGIIIAAGVFVAGLKSTGAIDSAIGFLKHSNEFVRWGATIGPFLMGIITGSGDAAAIAFNSAVTPHAVELGYTHVNLGMAAAISGAIGRTASPIAGVTIVCAGLAMVSPMEMIKRTALGMVLAILFLALFML

SEQ ID NO: 36806 - DNA, 1368 bp, Photobacterium profundum SS9
  CDS (1)..(1368): transl_table=11
atgttagaactattgattggcctggtggttaccatcgcagtaggctatttcattgtaaaaaactataaacctgctggcgtattattaaccgcgggtttagtgcttcttattactgcaggtgctataggccataccgtactaccatcatctattgcatcaacaggtaacatactgacagattcacttgaattcgtgaaatacatgcttaagtaccgtggcggcggcttaggtatgcaaatcatgcttttatgtggcttcgcttcttacatgacacatattggcgcaaacaatgttgtggttaaacagttttctaagcccctttcgttcatcaaatcgccttatattcttttagtcgcagcttatatcgtagcttgtctaatgtctttagctgttagctcagcgactggccttggtgtactactaatggcaacactattcccaatgatgacggcaatgggtatttcccgtcctgccgcagtggcagtgtgtgcgtcaccagcagcaatcattctttcaccaacatctggtgacgttgttgttgcggctgaaaaagcgggtatgccattacacgtatttgctgttgaaacagttcttcctgtatcaatttgtgcaatcatcgtaatggctgccgcggcttatttctggaataaatacctagataaaaaagaaaatacgccaatggaaaaggtcaacatttctgaaatggaagtgaaagcacctgcgtattacgcaatcttgcctttcttacctatcgtgggtgttttcttatttaatggcgaaacaatcaaaggcctatcattagacatttacaccattgttgttgcttctatcttcttgggtgcaatggttgatttcgttgccaagcgtttcaacggtaaagaaacactggaagatctagaatcttgttatgtaggtatggctgatgcattcaaaggcgtggtaatgctattggttgccgctggtgtatttgctcaaggtcttatgtctattggtgctatcgataatctaattggccttgcagaagctgctggtgcgggtggtttcgcattgatggttcttctaacagctctaactgttgctgccgctattgcgacaggttctggtaatgcacctttttacgcattcgtagaactagcgccaacactagccgctaagatgggtttaaaccctgcattcttgattatcccgatgctacaggcttctaaccttggtcgtactatttcaccggtttctggtgttatcgttgcaacatctggtatgggtaaaatcagcccattcgaagttgttaaacgtacatcggttcctgttatttgtggcttaattaccgttattattggcaccgtggttcttgtaccaatgtacacataa

SEQ ID NO: 36807 - protein, 455 aa, Photobacterium profundum SS9
MLELLIGLVVTIAVGYFIVKNYKPAGVLLTAGLVLLITAGAIGHTVLPSSIASTGNILTDSLEFVKYMLKYRGGGLGMQIMLLCGFASYMTHIGANNVVVKQFSKPLSFIKSPYILLVAAYIVACLMSLAVSSATGLGVLLMATLFPMMTAMGISRPAAVAVCASPAAIILSPTSGDVVVAAEKAGMPLHVFAVETVLPVSICAIIVMAAAAYFWNKYLDKKENTPMEKVNISEMEVKAPAYYAILPFLPIVGVFLFNGETIKGLSLDIYTIVVASIFLGAMVDFVAKRFNGKETLEDLESCYVGMADAFKGVVMLLVAAGVFAQGLMSIGAIDNLIGLAEAAGAGGFALMVLLTALTVAAAIATGSGNAPFYAFVELAPTLAAKMGLNPAFLIIPMLQASNLGRTISPVSGVIVATSGMGKISPFEVVKRTSVPVICGLITVIIGTVVLVPMYT

SEQ ID NO: 36808 - DNA, 1284 bp, Geobacillus kaustophilus HTA426
  CDS (1)..(1284): transl_table=11
atggcgttagtcgtctttatcgggtcgcttttaggggtcatggcgctcgggatgccgatcgcgtttgcgctgcttgtcagcggcgttgctctcatgttttacttgaatatttttgatacgcaaatcatcgcgcaaaatttaatcagcggcgcggacagctttcctctgatggcgattccgttctttatgctcgctggggagctgatgaacgccggcggcatttcgaagcggatcatccgctttgccatggcgcttgtcggccatatccgcggcgggctcggatatgtggcgatcatcgcaagcgtgctgtttgccggtttgtcggggtcggcggtggccgatacggcggcgcttggggccattctcatcccgatgatggtgaaagccggatacaaccgcaaccggtcggccggcctcatcgccgccggcggcatcatcgcgccgatcattccgccgagcatcccgatgatcatctttggggtgacgagcggcgtgtcgattacgaaactgtttatggccggcattgttccggggattctgcttgggatttctttggcggtttgttggtggtgggtgacccggagagatcaagtggacgtgcttccgcgccaatcggcgaaagacatttggcgggcgacccgcgaggcgttttgggcgttgctgctgccggtgatcatcgtcggtgggctgcgcggaggagtgtttacgccgaccgaggcggcggtggtggccgcgttttacgcgttgattgtcggcttgtgcatttaccgtgagctgaaagtgaaagacttgtttcacgtgctcgtggccgcggcgaaaacgacaagtgtcgtcatgtttttggtggcagccgccatggtgtcggcctggctcattacggtcgccaacattccggcgatcgtcacggacgtgctcgcgccgctcatcgatcatccgctggcgctgctgctggccattaacgccttggtgctgcttgtggggacggcgatggatttgacgccgacggtgctcattttgacgccggtgttgatgccgattattcaaaaagcgggaatcgacccggtgtacttcggggtgctgtttatcctgaacaactgcatcgggctgctcacgccgccggtcggcacggtgctgaacgtcgcctgcggggtcgggaaaatcagcatggaagacattatgaaaggagtttggccgtttttgcttgtggaaacgctcctgttgcttttgttgattttcttcccgtctcttgtgaccgtgccgctcggatggtttacgggcagttga

SEQ ID NO: 36809 - protein, 427 aa, Geobacillus kaustophilus HTA426
MALVVFIGSLLGVMALGMPIAFALLVSGVALMFYLNIFDTQIIAQNLISGADSFPLMAIPFFMLAGELMNAGGISKRIIRFAMALVGHIRGGLGYVAIIASVLFAGLSGSAVADTAALGAILIPMMVKAGYNRNRSAGLIAAGGIIAPIIPPSIPMIIFGVTSGVSITKLFMAGIVPGILLGISLAVCWWWVTRRDQVDVLPRQSAKDIWRATREAFWALLLPVIIVGGLRGGVFTPTEAAVVAAFYALIVGLCIYRELKVKDLFHVLVAAAKTTSVVMFLVAAAMVSAWLITVANIPAIVTDVLAPLIDHPLALLLAINALVLLVGTAMDLTPTVLILTPVLMPIIQKAGIDPVYFGVLFILNNCIGLLTPPVGTVLNVACGVGKISMEDIMKGVWPFLLVETLLLLLLIFFPSLVTVPLGWFTGS

SEQ ID NO: 36810 - DNA, 1386 bp, Salmonella enterica subsp. enterica serovar Paratyphi A str. ATCC
  CDS (1)..(1386): transl_table=11
atgctaacagttatagagctccttatcggagtcgtcgttattgtgggtgtagcacgctacatcattaagggatattccgccactggcgttttatttgtcggcggtctggttctgcttattatcagcgcgctgatggggcataaggtattacctgccagcgaaaccagtaccggctataccgcaacagatattgttgaatacatcaaaattttgcttatgagtcgcggcggcgatcttggcatgatgatcatgatgctgtgcggctttgccgcctatatgacgcatatcggcgcaaatgatatggtcgtgaagctggcgtcgaaacctttacagtatataaactcgccctacctgttgatgattgccgcctattttgtcgcctgcctgatgtcgctggccgtctcttccgcgacggggcttggcgtactgctcatggctactctcttcccggtgatggtcaacgtcggcattagccgcggcgcggcggcggctatttgcgcctctccggccgccatcatcctctcgccaacgtctggcgatgtggttttagccgcaaaagcggcggagatgccgttaatcgatttcgcgttcaaaaccacgctgccaatttccatcgccgccattatcggtatggcgattgcgcactttttctggcaacgctatctggataaaaaagagaacatttcacatgagatgctggacgtggcggagattaccaccacggccccggcgttttatgccattttgccgttcacgcccattatcggcgtactgatttttgacggtaaatgggggccgcagttgcacattattaccattctggtgatctgtatgctgctggccgccgtgctggaattcgtgcgcggtttcaacacgcaaaatgtgttttccggcctggaagtggcttatcgcggcatggcggatgcgtttgccggtgtcgtgatgctgctggtcgcggcgggcgttttcgcccaggggctgagcaccattggctttatccaaagtctgatctcgattgccacttcttttggctccgccagcattattctgatgctggtcttagtgattttaaccatgctggccgcgatgaccaccggttcaggcaatgcgcctttttacgcctttgttgagatgatccctaaactggcgcactcctccggtatcaacccagcctatttatccatcccaatgctgcaagcctcaaacctgggacgcacgatttcgccggtctccggcgtcgtggtcgctgtcgccgggatggctaaaatatcaccgtttgaagtggtgaagcgcacgtccgttccggtcatcgtcggtctgttgatcgtcattatcgccacggaaattatggtgccaggcgcctcttccgccgttactggcggctga

SEQ ID NO: 36811 - protein, 461 aa, Salmonella enterica subsp. enterica serovar Paratyphi A str. ATCC
MLTVIELLIGVVVIVGVARYIIKGYSATGVLFVGGLVLLIISALMGHKVLPASETSTGYTATDIVEYIKILLMSRGGDLGMMIMMLCGFAAYMTHIGANDMVVKLASKPLQYINSPYLLMIAAYFVACLMSLAVSSATGLGVLLMATLFPVMVNVGISRGAAAAICASPAAIILSPTSGDVVLAAKAAEMPLIDFAFKTTLPISIAAIIGMAIAHFFWQRYLDKKENISHEMLDVAEITTTAPAFYAILPFTPIIGVLIFDGKWGPQLHIITILVICMLLAAVLEFVRGFNTQNVFSGLEVAYRGMADAFAGVVMLLVAAGVFAQGLSTIGFIQSLISIATSFGSASIILMLVLVILTMLAAMTTGSGNAPFYAFVEMIPKLAHSSGINPAYLSIPMLQASNLGRTISPVSGVVVAVAGMAKISPFEVVKRTSVPVIVGLLIVIIATEIMVPGASSAVTGG

SEQ ID NO: 36812 - DNA, 1281 bp, Silicibacter pomeroyi DSS-3
  CDS (1)..(1281): transl_table=11
atgacccttgctctcttccttggcgttctgttggtttcgatctttctcggactgcctgtcgccttcgcgctcttgctggcgtcgattgccctgatgttccagctggatacgttcagcaccgatattcttgctcaatccttgatcaacggggtcgatagtttccccttgctggcgattcccttctttctggtcgctggcgaggtgatgtccgccggcgggctgtcgcaacggatcgtgcgtctggccaccagccttgtcgggcatcgccgtggcggcctgggatatgtggcgatctttacctcgatcctgcttgccggtctgtcaggatctgcggttgccgatgcggctgcattggtcagtattctttatccgatgatgaagaaggccggctatccagagggccattcgatgggattgctcgcatcgggcggtatcatcgcaccggtcattccgccctcgctgcccctgatccttatcggtgtcgctggtggtatttcgatcaaaagcctgttcctgggcgggatcgtgcccgggctcttgatggggctgactttggtcctggtctggggcgttctgatgcgcaaggaagacctcgaggttgcgccgcgcgccaccgcgggtgaacggctgcgcgctgtcagagagggtttctgggccttgctgcttccggtgatcatcattggcggtattcgcttcggcgttttcaccccgaccgaagcggcggttgtggcggcagtttacgccatttttgtttcaactttggtttatcgtgaactcaacttgaaagccttgttccatgtgctggtcagtgcagggcgggcgacggcgatggtgatgttccttgtggggtgcgccatggttgcggcttggctgatcacgatcgcacagttgccccaacagcttgccgcgatgctcggcccgctggtcgatcatccccggctgttgatggccgtgatcatgctgatcgtgctggccgtgggcatggtgatggatctggccccgacggttctgatcctggtccccttgctgatgccggtggtcaagctggcggggatcgacccggtctacttcggcctcatgttcgtcatcaacacctcgatcggtctgatcacaccgcccgtggggaatgtactgaatgtcgtgtgtggcgtggggcgggtgccgatgtctgctgccgtcaggggcgtcgcgcccttcattctcgcctatctcgcgctgctcgctctctttgtcgtttttccaaacatcatcatcaccccgatgaaattcatcatcggataa

SEQ ID NO: 36813 - protein, 426 aa, Silicibacter pomeroyi DSS-3
MTLALFLGVLLVSIFLGLPVAFALLLASIALMFQLDTFSTDILAQSLINGVDSFPLLAIPFFLVAGEVMSAGGLSQRIVRLATSLVGHRRGGLGYVAIFTSILLAGLSGSAVADAAALVSILYPMMKKAGYPEGHSMGLLASGGIIAPVIPPSLPLILIGVAGGISIKSLFLGGIVPGLLMGLTLVLVWGVLMRKEDLEVAPRATAGERLRAVREGFWALLLPVIIIGGIRFGVFTPTEAAVVAAVYAIFVSTLVYRELNLKALFHVLVSAGRATAMVMFLVGCAMVAAWLITIAQLPQQLAAMLGPLVDHPRLLMAVIMLIVLAVGMVMDLAPTVLILVPLLMPVVKLAGIDPVYFGLMFVINTSIGLITPPVGNVLNVVCGVGRVPMSAAVRGVAPFILAYLALLALFVVFPNIIITPMKFIIG

SEQ ID NO: 36814 - DNA, 1305 bp, Bacillus clausii KSM-K16
  CDS (1)..(1305): transl_table=11
atggatatagcaatattatcggtattacttctttttggaatattcttctttcttcttgcgataggtgttccaatatcaataagcattggtctatcctctattgtatctgttatggtagctacgccgttagacgtgatcctttatacgagtgcgcaacgtttattttctggaatgaacagttttgcgttattagctatcgtcttttttattatgtcaggaagcattatgaataatggaggaatcgcattacgattaattaatttagcaaagttgattgcaggaaggttacctggatcattggcacatacaaatgtagttgggaatatgctttttggctctatttcagggtcagcagtggcttctgcggcagcaattggcagtgttatggctcctttgcagaagaaagaaggctatgacaaaggtttttcggcagctgtaaatataacttcttcaccagtgggcattttgatcccccctagtggtgtattaatcctctattcattagtcagtggaggaacttctgtttctgcattattcatggctggatatttgcctggcattttgatgggattaacagttatgatcgttgcttactttattgctaaaaaaaatcattatacgatttctgaaaaaataggtctaaaagaggcaaacagaatcatcatacaatcaattcctagtttactattgattgttattgtgattggtggaattgtagcaggcatttttactgctacagaaggtgccgcagttgcggttctatattctttaattctttcattgatttatcgctccttaacgtgggcccatattcctaaaattttcaaggaaacaattgtgatgacaggaattgttttatttttagttgctgtctcttctatcatgtcatgggcaatggcattaacaggcatgccggcagctattagtaacgggcttttaagtatctcagataatcgctatattgtattgttgattatgatgttgattttattagttgttggcatttttatggacctcacgccagcagtactcatttttacacctattttcttgccgattgttgtgcaaatgggggtagaccctgtccattttggaatcatgcttgtatttaatctggctattggtgctatgacaccaccggtagggagtgttttatttataggttgtagcgtagggaaagtgtccattgaagaagtgataaaacctttgagctatttctttatagcgcttgttgcagcattatttatagtggtttatatcccttccattagtctaattatccctaaactttttaacctgttataa

SEQ ID NO: 36815 - protein, 434 aa, Bacillus clausii KSM-K16
MDIAILSVLLLFGIFFFLLAIGVPISISIGLSSIVSVMVATPLDVILYTSAQRLFSGMNSFALLAIVFFIMSGSIMNNGGIALRLINLAKLIAGRLPGSLAHTNVVGNMLFGSISGSAVASAAAIGSVMAPLQKKEGYDKGFSAAVNITSSPVGILIPPSGVLILYSLVSGGTSVSALFMAGYLPGILMGLTVMIVAYFIAKKNHYTISEKIGLKEANRIIIQSIPSLLLIVIVIGGIVAGIFTATEGAAVAVLYSLILSLIYRSLTWAHIPKIFKETIVMTGIVLFLVAVSSIMSWAMALTGMPAAISNGLLSISDNRYIVLLIMMLILLVVGIFMDLTPAVLIFTPIFLPIVVQMGVDPVHFGIMLVFNLAIGAMTPPVGSVLFIGCSVGKVSIEEVIKPLSYFFIALVAALFIVVYIPSISLIIPKLFNLL

SEQ ID NO: 36816 - DNA, 1284 bp, Bacillus clausii KSM-K16
  CDS (1)..(1284): transl_table=11
atgatgcttcttttgatcgttagtgtgattgtgcttctaattgtcctgaatgttcctgtagcttacgcgatgcttgcaggtgtggctatttactttattgtcaatccaagctttatgaatgaaacattgacgcaacgggtagtaagcggagttgaatcctttccgttgcttgggattgtcttttttatcactgctggcgttttgatgaactataccggaattacaaaacgaatgcttgtatttgccaaacttgtaaccggacacttgactggcggattggcgaaagtgaatgtgttgcttagtgtgctaatgggtggcttatcgggttcgaatgtagcggacgccgcaatgcaatcaaaaattgtcgtcccagaaatggtcaaaaaagggtacgcgcctggtttttcagcagcattaacagcgacaagctcgctcattacgccgattttgcctccaggaattgctttgatcttatatggctatgtaggcaatgtctctatcggtgatttatttattgccggtattatcccaggttttttgttggcggcgattttactcgtttatgtccactttgccgctaaaaagcgtggctttgagcaagaaatgaaccctttcccttctttcaaacaagtagcgattgcttcaaaagacgctttgcttgctcttttgctgccaattcttattatcggtggcatccgtttagggatgtttggcccgactgaagctggagccgttgcagtcttgtatgcacttgttattggcttgtttatatacagggaaatgacgttcaaggatttagtctccgctgcgaaagaatccgtgcaaattattgccactgtcatgattattattgcagcaggcaccgcattcggctggatgttgacgcttgagcaagtcccacaacagcttgcttccgcaatgactacttcagtcgaacagccacttgcatttttagtgttattgttggtgtttctgctcattgtcgggatgtttattgaaggaaacgtcatgctcattattttaacgccaatctttatgcccatgctagagacatacggaattgaccctgttcattttggaatcttttttattctttgtttgagcattggcacaattacaccaccgatcggcacgattatgttcacaaccgcctcgattacaaaggtgaaaattgaaacgttcattaaagaggtcataccattttggctgctgctgattggcttaactctaatcattattttcatcccggctttgtcgttgtggttgccgtctgtcttgtcttaa

SEQ ID NO: 36817 - protein, 427 aa, Bacillus clausii KSM-K16
MMLLLIVSVIVLLIVLNVPVAYAMLAGVAIYFIVNPSFMNETLTQRVVSGVESFPLLGIVFFITAGVLMNYTGITKRMLVFAKLVTGHLTGGLAKVNVLLSVLMGGLSGSNVADAAMQSKIVVPEMVKKGYAPGFSAALTATSSLITPILPPGIALILYGYVGNVSIGDLFIAGIIPGFLLAAILLVYVHFAAKKRGFEQEMNPFPSFKQVAIASKDALLALLLPILIIGGIRLGMFGPTEAGAVAVLYALVIGLFIYREMTFKDLVSAAKESVQIIATVMIIIAAGTAFGWMLTLEQVPQQLASAMTTSVEQPLAFLVLLLVFLLIVGMFIEGNVMLIILTPIFMPMLETYGIDPVHFGIFFILCLSIGTITPPIGTIMFTTASITKVKIETFIKEVIPFWLLLIGLTLIIIFIPALSLWLPSVLS

SEQ ID NO: 36818 - DNA, 1332 bp, Bacillus clausii KSM-K16
  CDS (1)..(1332): transl_table=11
atgttatcggcgttgctctttgtattgttcttctgtttgttgttgatccacgtgcctgttgcctttgcattaggtgtatcagctttggtcattctcgtgttgggctcggggttttcgtcgttggcgcttctccctagcattatgtattcctccatttcttcatttacgttattggcaattccgtttttcgtgttagctggcgtcattatgagctattcgggcatttctaaacggcttgttgactttgcctacctttgttttggccacaagaaaaacggcatcgtcatcgtcgccattgtcgctgcgttgtttttctcggctatttctggctcagggccggcgacggttgccgcaatgggcgcgatcctcatccctgcccttgttaagaatggctttaacaaaaatagtgcttcggcgttgattgccagttcaggcgcattagggattattttgccgccaagcattgcctttatcatttttggcgtcatagccaatgactttgttggcatctcgattagccgcctgtttgtcgcaggcatcataccgggccttttacttgctgccggtcttctcgttgctagcatttttgcaagtaagcgcgtttctcacttgcaaacagctagcaagcgcccagatgaagcggcagccagcgtggaacgcgcctctttggcagcaattttgaaagcgttttaccgagcgcttttcgggttgcttgtccctgtcatcattatgggcggtatctattcaggcatgtttacgccaacggaggctgccgttgtcgcggtgttttatgcactgctcgtcggcggggtgttttaccgagaaataaaactgaaacatctcggccgaattttagtcgattcgtctgtacaatcagcggtcattatgttcattattggcgctgcttcattgttctcttatctcgtgacgacgcaacatgtagcggaagggatgacgcaagctgtgctagggatgacggaaaaccgcgtcctcctattgcttctgacagccgtgattttgttggtgattggcgcgtttatagacgccatttccgcattttatatctttgtaccgattttgatgccgattttgcttgaagtcggcgttgacccgactacgattggcgtgctcatgacggtcgcattggcaattggcctgtttacgccacctgtcggattgaatttgtttgtggccagtggcatttctggtgtgccatctgaacaaattgtaaggggaattggtccttttctagtttcttctattgttgtgttgctcatcgtcatgtatgttccagctgtatccaattggttgccagatttattgaatctttaa

SEQ ID NO: 36819 - protein, 443 aa, Bacillus clausii KSM-K16
MLSALLFVLFFCLLLIHVPVAFALGVSALVILVLGSGFSSLALLPSIMYSSISSFTLLAIPFFVLAGVIMSYSGISKRLVDFAYLCFGHKKNGIVIVAIVAALFFSAISGSGPATVAAMGAILIPALVKNGFNKNSASALIASSGALGIILPPSIAFIIFGVIANDFVGISISRLFVAGIIPGLLLAAGLLVASIFASKRVSHLQTASKRPDEAAASVERASLAAILKAFYRALFGLLVPVIIMGGIYSGMFTPTEAAVVAVFYALLVGGVFYREIKLKHLGRILVDSSVQSAVIMFIIGAASLFSYLVTTQHVAEGMTQAVLGMTENRVLLLLLTAVILLVIGAFIDAISAFYIFVPILMPILLEVGVDPTTIGVLMTVALAIGLFTPPVGLNLFVASGISGVPSEQIVRGIGPFLVSSIVVLLIVMYVPAVSNWLPDLLNL

SEQ ID NO: 36820 - DNA, 1302 bp, Staphylococcus epidermidis RP62A
  CDS (1)..(1302): transl_table=11
atgaaagagatgaagaatggcaatgcttgggcattaattcctttattgttatttgtcttactatttctaggtgttggtattatttctggtgattttaccactatgccattaaatgttgctattacaattactgttattgttgccttacttatgaaccgcaaggaaacttttgcaaaaaaagtagaggtatttacaaaaggtgcaggtcactctaatatcattttgatgatgcttatttttatccttgctggagctttttcgacgactgctgaaaaaatgggaggcgtgtcatctacagttaatttaggcttatcacttattcctcaaaatctaataattgttgggctatttattatttgtatgtttgtatcaatttcaatggggacttctgttggcacagttgcagctattgcaccagtaggttttggatttgcacaagcaacagatgtaccagctgcattagccatggcaacagttgttgggggagcgatgtttggtgataatctatctatgatttctgataccactattgcagcagtaagaacacaaaaaacaaaaatgagtgataaatttaaagtcaattttaaaattgtactaccaggtgcgattattacaatcatcattttattctttttaacaaatggtatttctatagatcatactaaaaactatgattataatttaattaaagtcataccatacttattagttttgattcttgcgttagttggtattaatgtaattattgtattaataggaggtactgtattagccggtataattggactgattgatggttcttttggttggaatggccttttaaatgctatttctaaaggtattatcggaatggaagatattgctatgattgcattgcttataggtggtctagtaggaattatccaacataatggtggtattgattggttgcttaattttgtaaggtcaaaagtaaaatcaaagcgtggtgcagaactaggtatagcgagtttagtgagtgcagctgacatttcaacagcaaataatacaatttctattattatggctggaccattagctaaaaatattgctgatgaatatgatgtcgatccaaggaaatcagcaagtatattagatatctttggtgggtgttttcaaggattattaccatacagtccacaagtgatttcagcagcaggtgtagccggaatttccccattcctaatgttacaatatagtatttatccaatattattaggtgtttgtggattagtagcaattattttaagagtacctcgtttaaatcaatcgtcaaagaaataa

SEQ ID NO: 36821 - protein, 433 aa, Staphylococcus epidermidis RP62A
MKEMKNGNAWALIPLLLFVLLFLGVGIISGDFTTMPLNVAITITVIVALLMNRKETFAKKVEVFTKGAGHSNIILMMLIFILAGAFSTTAEKMGGVSSTVNLGLSLIPQNLIIVGLFIICMFVSISMGTSVGTVAAIAPVGFGFAQATDVPAALAMATVVGGAMFGDNLSMISDTTIAAVRTQKTKMSDKFKVNFKIVLPGAIITIIILFFLTNGISIDHTKNYDYNLIKVIPYLLVLILALVGINVIIVLIGGTVLAGIIGLIDGSFGWNGLLNAISKGIIGMEDIAMIALLIGGLVGIIQHNGGIDWLLNFVRSKVKSKRGAELGIASLVSAADISTANNTISIIMAGPLAKNIADEYDVDPRKSASILDIFGGCFQGLLPYSPQVISAAGVAGISPFLMLQYSIYPILLGVCGLVAIILRVPRLNQSSKK

SEQ ID NO: 36822 - DNA, 1368 bp, Vibrio fischeri ES114
  CDS (1)..(1368): transl_table=11
atggcttcgttattacttgttcttatcgttgttgttattgcggcaaggatgattttaaaggggtataaagctgaacctactttattaatgtcagggacgatattgattttcgcaactggactttttggctggggcccaatgttgccagcttcggttacatcgactaatttttcaggatttgagccctttaaatacatacaatttttaatggggtatcgagcgggagcgctggggttaatgattatggctttggtcggttttgctgattatatgagtcatattggagctaacgatgttgtcgttcgtttagccactaagccactaagtcgtattcaaaataaaaacattatgttgttctttgcttactgtatggcaagtatcttacaactggcaattccttcagctaccggtcttggcgtgttattgatgggaacactttatcctgtgatgttgggattgggtatttctcgtggtagcgccgcggcggttattgctagttcattagcggtaagttttacgccaacaggggtggatgcaatacgtgcaagtgaagctttaggtatggacttgatgagttatgtttctcattatcaagctccaacatcggtagcaactatggtggttatcggtattatgcatgttatttggcagacacaggttgataaaaagcatcctgaacaattcgaacaagcatcaattgaacagacacaaaaagaggaagtgttagcacctagttattatgtcattttacctttgcttcctattattatggctgttgtgttttctaaactcgtcatttcaacgatcaatatggatgtgacgacgattgtatttgtttcaatgtttgttgctatgttgtgtgaatgcataacgaaaagaagtttaaaaacggtttttgatggtttcaatgtgttctcaaaaggaatggggagtgcatttagcagtgtggttgtattattagttgctgctggtgtttttgcttatggaattcaagcgacaggagcgattaccaacctaatcatgatggctaaatcagtgggcttaccaagtgtagcgatgacatttgtttttgctgttgtgacgttaatggctgcggtgattatggggtcggggaatgcgccattcttggcgtttgttgaattaattcctactatagcttccagtatgggagccaacgcagcggcaatgctaatgccaatgcaacaagcctcagcaataggtcgagcaatgtctcctgtttctgctgttgttattgcttcagcaacgggtgccaagttaagtccatttgaagttgcaaagcgaacatctgttccagtcttagtaggctttgtgtttcattttgttattgtttacgctttttatagctaa

SEQ ID NO: 36823 - protein, 455 aa, Vibrio fischeri ES114
MASLLLVLIVVVIAARMILKGYKAEPTLLMSGTILIFATGLFGWGPMLPASVTSTNFSGFEPFKYIQFLMGYRAGALGLMIMALVGFADYMSHIGANDVVVRLATKPLSRIQNKNIMLFFAYCMASILQLAIPSATGLGVLLMGTLYPVMLGLGISRGSAAAVIASSLAVSFTPTGVDAIRASEALGMDLMSYVSHYQAPTSVATMVVIGIMHVIWQTQVDKKHPEQFEQASIEQTQKEEVLAPSYYVILPLLPIIMAVVFSKLVISTINMDVTTIVFVSMFVAMLCECITKRSLKTVFDGFNVFSKGMGSAFSSVVVLLVAAGVFAYGIQATGAITNLIMMAKSVGLPSVAMTFVFAVVTLMAAVIMGSGNAPFLAFVELIPTIASSMGANAAAMLMPMQQASAIGRAMSPVSAVVIASATGAKLSPFEVAKRTSVPVLVGFVFHFVIVYAFYS

SEQ ID NO: 36824 - DNA, 1290 bp, Vibrio fischeri ES114
  CDS (1)..(1290): transl_table=11
atgcttatgtctatatttatattaacattaatgattttatctctaatatataagagaaaatacatacctttgatttttatattgttagggattgttgtttccttgtttaatggcgtagaattacgagaaatcgctttaaacttctctaatgcattaagctctgtttttttatctatcgggttaaatattgttgttattatagcgttctctgaatatgttaataaaaatggggcaacaaaagatttagttttactcgtttataaaccaataagtaaaataaaagatagatacttaatccttgctatgttttatttaataggattagcattaagcacagtaatcacatccgcatcagctctatctatgatatatatgtctactgtattccctatactgatatctaagggaataagtaaagaaggtgcagcgggaatgatcgcttcagttggagtaatagaatttggtcacttaaaatcgagtactatttttatggctgaagagcaaaatagattaataaatgattatgttattaatggacaattatttttatttattggtatcgctattgtcggtgcaattagccattacttctggcaacgttacctcgataaccgtttgactaatgataacgatgaaaaatcattaacagataatctagattatcagcataaaatcagtatatttacggcactgctaccgttacttccgctatttcttattttacctgaacatctattcactaaactaaacttgccactttggactattgggatgatatgtatttcaatctcgtttattttagatctaaaatccaataaatttaatgttaaagaacaattatctttctttttaactagcattagtaactcatttttctttatcgtatctgtcattgttggcggtaaatttctagtcaattcgttaccgatagaaagtattattaatatttatagccatatgtctttaggttctataaacccgattattttatcatcagtattattattggctatcgtgttattttgtactttgcttggttctggaacggtctcttttattacaataacgtcaataatgtcaaaatttaaaatcgtatcgatgaatcagttcagttcaacatttacatcgatgcaaatgatatcaggaataggaagaacaatatcccctgtatctccaactacattattatgctcccaaatttctggagttacactatctagcataatattaagaaatattgtcccaaccatacttattgtaattttatcaatcatatacagcaatatttga

SEQ ID NO: 36825 - protein, 429 aa, Vibrio fischeri ES114
MLMSIFILTLMILSLIYKRKYIPLIFILLGIVVSLFNGVELREIALNFSNALSSVFLSIGLNIVVIIAFSEYVNKNGATKDLVLLVYKPISKIKDRYLILAMFYLIGLALSTVITSASALSMIYMSTVFPILISKGISKEGAAGMIASVGVIEFGHLKSSTIFMAEEQNRLINDYVINGQLFLFIGIAIVGAISHYFWQRYLDNRLTNDNDEKSLTDNLDYQHKISIFTALLPLLPLFLILPEHLFTKLNLPLWTIGMICISISFILDLKSNKFNVKEQLSFFLTSISNSFFFIVSVIVGGKFLVNSLPIESIINIYSHMSLGSINPIILSSVLLLAIVLFCTLLGSGTVSFITITSIMSKFKIVSMNQFSSTFTSMQMISGIGRTISPVSPTTLLCSQISGVTLSSIILRNIVPTILIVILSIIYSNI

SEQ ID NO: 36826 - DNA, 1461 bp, Vibrio fischeri ES114
  CDS (1)..(1461): transl_table=11
atgagtttatttattgcattatgtgggttgattcttgcgggaagattaattttaaaaaactataacccccaaggcgtactcttctttgttggtatcgttatgatgaccatatcaatctttactaacaatgctacttttgtcgataaatcgacgggttggatagggtttgatgtttttgaatatataagcatggtttttggcaaacaatccggtggtttaggtttaaaaataatgcttataggagggtttgccttattaatgtcagctataggagcaagccaagtaatggtaaagttaacagctaagccattaatgaagctaaattcaccttacttgatgctagcacttgcctttattcttggtcagatgttatcactctttatctcaagcgcaacgggacttggtttattgttgatggcaacactttatcctgtattgattagactgggctgtagtaaagcgggtgttgcttctgtattagcgagtacttgcgctattgagtttggtcctggttcaggaaactcaattttagctgctcaaaccgctggtctagagattacggaatactttgttggggaacaattaccaattattagcgtattgattatagttgtggcaattatgcatgcaattacacaacgtttttttgaccgtaatgacgaaaaaaatcagacattagagccaataaattatgaagatattgaatcggaacaaagtgctcccttctattatgtaatacttccaatgttaccattattttttatgcttacatttagtagccttggcgtgaagacaattaatgtgggtatggcaactgctatcattttgagtatttttattagccttgtatttgaatttattcgagaaagagaagtaaaacctgtatttgaaaaactacaaggagtatttgatgatatgggaaaagtttttgcttctgttgtaactttaattatagcaggccagactttttctatgggattaaagtcaataggagctattgattcaatgttacatatggcaagtagcgttgggctttctgctgctgttattattttgtttatggctctattaactttcattatttctgcattaatgggatcagggaatgcggcctttttctcttttgctccaatggtgccccaaattgctcataaaataggtgcgaatactgtagatatgatcttaccaattcaattatctgcaggttttggtagaacaatatctccgattgcaggtgttatcattgctgttgccggtatttcaggtttgtctccatttgatatagttcgtcgaactttgataccaatggtaagtggttggttattaatgctaattttaactttttctaagggaggacaattagagcaattaatgccatttttgattgtaatattagttctttctgttggtgtcggttggataatgaagagaaagaataatagaacacaattgactcagtaa

SEQ ID NO: 36827 - protein, 486 aa, Vibrio fischeri ES114
MSLFIALCGLILAGRLILKNYNPQGVLFFVGIVMMTISIFTNNATFVDKSTGWIGFDVFEYISMVFGKQSGGLGLKIMLIGGFALLMSAIGASQVMVKLTAKPLMKLNSPYLMLALAFILGQMLSLFISSATGLGLLLMATLYPVLIRLGCSKAGVASVLASTCAIEFGPGSGNSILAAQTAGLEITEYFVGEQLPIISVLIIVVAIMHAITQRFFDRNDEKNQTLEPINYEDIESEQSAPFYYVILPMLPLFFMLTFSSLGVKTINVGMATAIILSIFISLVFEFIREREVKPVFEKLQGVFDDMGKVFASVVTLIIAGQTFSMGLKSIGAIDSMLHMASSVGLSAAVIILFMALLTFIISALMGSGNAAFFSFAPMVPQIAHKIGANTVDMILPIQLSAGFGRTISPIAGVIIAVAGISGLSPFDIVRRTLIPMVSGWLLMLILTFSKGGQLEQLMPFLIVILVLSVGVGWIMKRKNNRTQLTQ

SEQ ID NO: 36828 - DNA, 1371 bp, Vibrio fischeri ES114
  CDS (1)..(1371): transl_table=11
atgttggagttattaattggtttagtaatcaccatatttgttggttactttatcgtaaaaggatataaagctgcaggcgtgttactgacagcaggtttagcactgctaattattgcaggtcttttaggtcattcagttcttcctgcaaaagtaacggctacaggtagcctactaacagatgcgcttgagtatgtaaaatacatgcttcagtaccgtggcggcggcttaggtatgcaaatcatgctactttgtggttttgcctcttacatgactcacatcggtgcaaacaatgtggttgttaagcaattttcaaaaccactggcattcattaaatcaccttacattctattagttgccgcttatatcgtagcatgtctaatgtctcttgctgtaagttcagctacgggccttggggttctattaatggcaaccctattcccgatgatgacggcaatgggtatctcacgccctgcagcagttgcagtgtgtgcatcaccagcagcaatcatcctttcacctacatcaggtgacgtcattgttgcagcagaaaaatcaggtttacctcttcatgttttcgcagttgaaaccgtacttcctgtatcaatttgtgcaatcatcgttatggcagcagccgcgttcttctggaataaataccttgataagaaagaaaacacaccaatggagaaagtcgatatttctgcaatggaagtgaacgcaccatcttactatgcgattcttcccttcttacctatcgtaggtgttttcctgtttaacggcgagacaatcccaggtctatctttagatatttacactatcgttgttggttctatctttattggtgcgttagttaactttacgaccaataaactgaacggtaaaaaaacattagaagatttagaatcttgttatgaaggtatggctgatgcatttaaaggcgtagttatgctattggttgctgcgggtgtatttgctcaaggtctaatgtctgttggcgcaattgataacctacttcacttagctgataaagcaggtgcgggtggtatggctctaatgcttctactaaccggtttaaccgttgctgctgctatcgcaacaggttctggtaatgcgcctttctacgcattcgtagagcttgctcctcagcttgctggtaaaatgggtcttagccctgcattccttatcattccaatgcttcaagcatctaaccttggtcgtactatttcaccagtatctggcgttatcgttgcgacatctggtatggcaaaaatcagcccatttgaagtggtaaaacgtacatctgttccggttatctgtggcttaatcacagtaatcatcggtactatggttcttgttccaatgtacgcgcagtaa

SEQ ID NO: 36829 - protein, 456 aa, Vibrio fischeri ES114
MLELLIGLVITIFVGYFIVKGYKAAGVLLTAGLALLIIAGLLGHSVLPAKVTATGSLLTDALEYVKYMLQYRGGGLGMQIMLLCGFASYMTHIGANNVVVKQFSKPLAFIKSPYILLVAAYIVACLMSLAVSSATGLGVLLMATLFPMMTAMGISRPAAVAVCASPAAIILSPTSGDVIVAAEKSGLPLHVFAVETVLPVSICAIIVMAAAAFFWNKYLDKKENTPMEKVDISAMEVNAPSYYAILPFLPIVGVFLFNGETIPGLSLDIYTIVVGSIFIGALVNFTTNKLNGKKTLEDLESCYEGMADAFKGVVMLLVAAGVFAQGLMSVGAIDNLLHLADKAGAGGMALMLLLTGLTVAAAIATGSGNAPFYAFVELAPQLAGKMGLSPAFLIIPMLQASNLGRTISPVSGVIVATSGMAKISPFEVVKRTSVPVICGLITVIIGTMVLVPMYAQ

SEQ ID NO: 36830 - DNA, 1386 bp, Salmonella enterica subsp. enterica serovar Choleraesuis str
  CDS (1)..(1386): transl_table=11
atgctaacagttatagaactccttatcggagtcgtcgttattgtgggtgtagcgcgctacatcattaagggatattccgccactggcgttttatttgtcggcggtctggttctgcttattatcagcgcgctgatggggcataaggtattacctgccagcgaaaccagtaccggctataccgcaacagatattgttgaatacatcaaaattttgcttatgagtcgcggcggcgatcttggcatgatgatcatgatgctgtgcggctttgccgcctatatgacgcatatcggcgcgaatgatatggtcgtgaagctggcgtcgaaacctttacagtacataaactcgccctacctgttaatgattgctgcctattttgtcgcctgcctgatgtcgctggccgtctcttccgcgacggggcttggcgtactgctcatggctactctcttcccggtgatggtcaacgtcggcattagccgcggcgcggcggcggctatttgcgcctctccggccgccatcatcctctcgccaacgtctggcgatgtggttttagccgcaaaagcggcggagatgccgttaatcgatttcgcgttcaaaaccacgctgccgatttccatcgccgccattatcggtatggcgattgcgcactttttctggcaacgctatctggataaaaaagagaacatttcacatgagatgctggacgtggcggagattaccaccacggccccggcgttttatgcccttttgccgttcacgcccattatcggcgtactgatttttgacggtaaatgggggccgcagttgcacattattaccattctggtgatctgtatgctgctggccgccgtgctggaattcgtgcgcggtttcaacacgcaaaatgtgttttccggcctggaagtggcttatcgcggcatggcggatgcgtttgccggcgttgtgatgctgttggtcgcggcgggcgttttcgcccaagggctgagcaccattggctttatccaaagtctgatctcgattgccacttcttttggctccgccagcattattctgatgctggtcttagtgattttaaccatgctggccgcgatgaccaccggttcaggcaatgcgcctttttacgcctttgttgagatgatccctaaactggcgcactcctccggcatcaacccagcctatttatctatcccaatgctgcaagcctcaaacctggggcgcacgatttcgccggtctccggcgtcgtggtcgctgtcgccgggatggctaaaatatcaccgtttgaagtggtgaggcgcacgtccgttccggtcatcgtcggtctgttgatcgtcattatcgccacggaaattatggtgccaggcgcctcttccgccgttaccggcggctga

SEQ ID NO: 36831 - protein, 461 aa, Salmonella enterica subsp. enterica serovar Choleraesuis str
MLTVIELLIGVVVIVGVARYIIKGYSATGVLFVGGLVLLIISALMGHKVLPASETSTGYTATDIVEYIKILLMSRGGDLGMMIMMLCGFAAYMTHIGANDMVVKLASKPLQYINSPYLLMIAAYFVACLMSLAVSSATGLGVLLMATLFPVMVNVGISRGAAAAICASPAAIILSPTSGDVVLAAKAAEMPLIDFAFKTTLPISIAAIIGMAIAHFFWQRYLDKKENISHEMLDVAEITTTAPAFYALLPFTPIIGVLIFDGKWGPQLHIITILVICMLLAAVLEFVRGFNTQNVFSGLEVAYRGMADAFAGVVMLLVAAGVFAQGLSTIGFIQSLISIATSFGSASIILMLVLVILTMLAAMTTGSGNAPFYAFVEMIPKLAHSSGINPAYLSIPMLQASNLGRTISPVSGVVVAVAGMAKISPFEVVRRTSVPVIVGLLIVIIATEIMVPGASSAVTGG

SEQ ID NO: 36832 - DNA, 1308 bp, Pseudomonas syringae pv. syringae B728a
  CDS (1)..(1308): transl_table=11
atgctgactttccttggctttgccatggttattgcgttcatgtacctgatcatgagcaagcgcctgactgcgctgatcgctctgatcctggttccgatcatcttcgccctgttcggtggcttcgcgtcgcagatcggcccgatgatgctggcaggtatcaccaagctggcgccgaccggcgtgatgctgatgttcgccattctgtactttgcgctgatgatcgactccggcctgttcgacccggccgtgcgcaagatcctgaaaatggtcaagggcgacccgatgcgcatttcggtcggcaccgccgtactggcgctggtggtgtccctcgacggtgacggcgcgaccacctacatgatctgcgttgccgccatgctgccgctgtacagccgcatcggcatgagcccgcgcatcatggccggcctgatcattctggccggcggcgtgatgaacatgacgccctggggcggcccgaccgctcgtgcggccagtgccctgcatgtcgacgcctccgatatcttcgtgccgatgatcccggccatgctggcaggtgtgatcgcgatcctggcgattgcctatttctacggcaagcgcgaacgtgcccgactgggtgaactgcacctgcagggcgatgaagtcgaccacagcgaaatcagcgtctcgcaattccctgatgcgcgccgtccaaagctgatctggttcaacgctgccctgaccctgaccctgatggtcgccctgatcatgggcctgctgcccctgccggtcctgttcatgatcgcgttcagtatcgcgatgatcatcaactacccgaacctgcaggaccagaaggaccgcgtatcggcccacgccggtagcgtgctggcggtggtcggcctgatcttcgctgcgggcatcttcaccggcatcctgtccggcaccggcatggtcgacgcgatgtcgaaaagcctgctggccgtgatccctgacgcgctgggcccgtacctcgcggtgatcaccgcgctggtgagcatgccgttcaccttcttcatgtccaacgacgcgttctactacggcgtactgccagtgctgtccgaagccgctgcccactacggcatcagcccggtggaaatggcccgcgcgtcgatcgtcggtcagccggttcacctgctcagcccattggtgccttcgacctacctgctggtggccctggccggtatcgagttcggtgaccaccagcgcttcacccttaaatgggcgattctggtgtgcatgtgcatcctggttgccgcactgctgatgggcatcttcccgttctatagcagcatgtaa

SEQ ID NO: 36833 - protein, 435 aa, Pseudomonas syringae pv. syringae B728a
MLTFLGFAMVIAFMYLIMSKRLTALIALILVPIIFALFGGFASQIGPMMLAGITKLAPTGVMLMFAILYFALMIDSGLFDPAVRKILKMVKGDPMRISVGTAVLALVVSLDGDGATTYMICVAAMLPLYSRIGMSPRIMAGLIILAGGVMNMTPWGGPTARAASALHVDASDIFVPMIPAMLAGVIAILAIAYFYGKRERARLGELHLQGDEVDHSEISVSQFPDARRPKLIWFNAALTLTLMVALIMGLLPLPVLFMIAFSIAMIINYPNLQDQKDRVSAHAGSVLAVVGLIFAAGIFTGILSGTGMVDAMSKSLLAVIPDALGPYLAVITALVSMPFTFFMSNDAFYYGVLPVLSEAAAHYGISPVEMARASIVGQPVHLLSPLVPSTYLLVALAGIEFGDHQRFTLKWAILVCMCILVAALLMGIFPFYSSM

SEQ ID NO: 36834 - DNA, 1293 bp, Pseudomonas syringae pv. syringae B728a
  CDS (1)..(1293): transl_table=11
atgctcgccacactcggtgtgataaccattcttgccatgctcgtcagcatcatgagcaaacgcatctctcctctggttgcattgatcgccctgccgatcatcgccgccctcctcgctggtttcggtctgcaaaccagtggcttcatcatcaccggcatcaagaacgttgcgcccgtcgtcgggatgtttgtattcgccattctgttcttcggcatcatgacggatgccggcatgctcgatccgatcatcgatcgcatcctcaaacgggtcggcacacggccaacccgcatcgtcatgggcaccgcactgctggcgctgctggtgcatctggacggctccggcgcggtaacctttcttgtgaccattcccgcaatgctgccgctgtacacgcgccttggcatggataaacgcatactggcgtgtgtgacggcgatggctgcgggggtcaacttcctgccctggacgggaccggtgctgcgctcttccgccgcccttcacgtgccggtttcggatctgtttcagccgctcattccggtgcagatcgtcggactgatcttcgtcttcacctgcgcatttttcctgggacggcgcgaagagcgacgcctgggcctgggccctgacaatcttgatgtaaaaccccaccaacgcgtgctcagcgacgctgagcgtgaactgcgcaaacctcggttgttctggatcaacctgctgctgacgctggtggtgatgggcgtgatgatcgcgggggttgtagacccggtggtgatgttcatgctcggcaccgtgattgccttgtgcatcaactaccctgccgtggacacacagcgggcacgcatcgatgcacacgccaagacagccctgaccatggccagcatcctgctggctgccggggtgtttacaggaatcatgcaaggcaccgggatgctgaaggccatggcagaagtggccgtgggccagatcccggccgggcacggcaagctgatcccggtggttgtaggctttatatcaatgcccttgagcctgcttttcgatccggactccttctacttcggcatcatgcccgtggtcgccgaggtcggcaaagccctcggtgtcgacccgatgcaggtcgcacaggcgtcgttgcttggcgtgcataccaccggcttcccggtcagcccgttgacgccagcgacctttctgctggtcggcctgtgcaagatcgagctggccgatcaccagcgcttcactatccctttcctgtttgcggcctcggtcatcatgaccctgaccgctatggtcataggagttttctga

SEQ ID NO: 36835 - protein, 430 aa, Pseudomonas syringae pv. syringae B728a
MLATLGVITILAMLVSIMSKRISPLVALIALPIIAALLAGFGLQTSGFIITGIKNVAPVVGMFVFAILFFGIMTDAGMLDPIIDRILKRVGTRPTRIVMGTALLALLVHLDGSGAVTFLVTIPAMLPLYTRLGMDKRILACVTAMAAGVNFLPWTGPVLRSSAALHVPVSDLFQPLIPVQIVGLIFVFTCAFFLGRREERRLGLGPDNLDVKPHQRVLSDAERELRKPRLFWINLLLTLVVMGVMIAGVVDPVVMFMLGTVIALCINYPAVDTQRARIDAHAKTALTMASILLAAGVFTGIMQGTGMLKAMAEVAVGQIPAGHGKLIPVVVGFISMPLSLLFDPDSFYFGIMPVVAEVGKALGVDPMQVAQASLLGVHTTGFPVSPLTPATFLLVGLCKIELADHQRFTIPFLFAASVIMTLTAMVIGVF

SEQ ID NO: 36836 - DNA, 1296 bp, Haemophilus influenzae 86-028NP
  CDS (1)..(1296): transl_table=11
atggaattatttaaatccatcgttgcagtgattggcattattgccacaatttattttctgattaaaaaagccgaaacccgaaccgttttgattggtgtcggtttaataatgtccattctaacgcttaatccaatgggtgcattagatgcttttgccaaaagcatgacatctggcggattaattatggctatctgttctagtatgggttttgcttatgtaatgaaatacactcaatgtgatactcatctagtgcatttacttaccaaaccattaagcggattaaaattcttcttaattccaattgcaacagtcattacctttttcatcaatattgctattccttctgctgctggttgtgctgctgcggttggcgcaacattaattcccgttttaaaaagtgcgggtgttcgaccagctactgctggtgcagctattttagcagggacttttggatcaatgatgagtccgggttcttctcactcagcaatgattagtgaaatgtcaggattaactatcactcaagtaaacctttcacatgctccatataacatgattgcgggagcaataggtgctgttgttttaaccattcttgcgcttgtttttaaagattatggtgaacaacatcgccaagcttatcttgcagaacaaaaagaaagtgaaattaaagttgttgaaggcgtcaatgtactttatgcccttgcaccattaataccattagttattttagtgattggtggaacatcattacaacaagtaccgggtcttgaatggactaaaatgggcgttcctcaagcgatgctaattggtgcaatttacggcattatcgtcactcgtatttccccagtaaaaatcactgaagaatttttcaatggtatgggaaattcttatgcaaacgtacttggtattatcattgcagccagtgtatttgtggcaggattaaaatctacgggcgcagtggatgctgcaatttctttcttaaaagaatccaacgaatttgtacgttggggtgcaacaattggaccattcttaatgggcttaattacaggctctggcgatgcagcagcgattgcctttaacactgccgtcacgccacatgctgtagaactcggctacacccatataaatcttggtatggcagcagccattgctggtgcaattggtcgtacagcttcaccaattgcaggcgtaactattgtttgtgcaggccttgcgatggtaagcccagtagaaatggtaaaacgtaccgcaccaggcatgatacttgctgttttattcttagcattatttatgttgtag

SEQ ID NO: 36837 - protein, 431 aa, Haemophilus influenzae 86-028NP
MELFKSIVAVIGIIATIYFLIKKAETRTVLIGVGLIMSILTLNPMGALDAFAKSMTSGGLIMAICSSMGFAYVMKYTQCDTHLVHLLTKPLSGLKFFLIPIATVITFFINIAIPSAAGCAAAVGATLIPVLKSAGVRPATAGAAILAGTFGSMMSPGSSHSAMISEMSGLTITQVNLSHAPYNMIAGAIGAVVLTILALVFKDYGEQHRQAYLAEQKESEIKVVEGVNVLYALAPLIPLVILVIGGTSLQQVPGLEWTKMGVPQAMLIGAIYGIIVTRISPVKITEEFFNGMGNSYANVLGIIIAASVFVAGLKSTGAVDAAISFLKESNEFVRWGATIGPFLMGLITGSGDAAAIAFNTAVTPHAVELGYTHINLGMAAAIAGAIGRTASPIAGVTIVCAGLAMVSPVEMVKRTAPGMILAVLFLALFML

SEQ ID NO: 36838 - DNA, 1308 bp, Pseudomonas syringae pv. phaseolicola 1448A
  CDS (1)..(1308): transl_table=11
atgctgactttccttggctttgccatggttattgcgttcatgtacctgatcatgagcaagcgcctgactgcgctgatcgccctgattctggttccaatcatcttcgccctgttcggtggcttcgcggcccagatcggcccgatgatgctggcaggtatcaccaagctggcgccaaccggcgtgatgctgatgttcgccatcctttattttgcgctgatgatcgactccggcctgttcgacccggccgtgcgcaagatcctgaaaatggtcaagggcgacccgatgcgcatttcggtcggcaccgccgtgctggcgctggtggtgtccctcgacggtgacggcgcgaccacctacatgatctgcgtcgccgccatgctgccgctgtacagccgcgtcggcatgagcccgcgcatcatggccggcctgatcattctggcgggtggcgtgatgaacatgactccgtggggtggcccgaccgctcgtgcggccagtgccctgcatgtcgatgcatccgacattttcgtaccgatgatcccggcaatgctggctggcgtggttgcgatcctggcaattgcctacttctacggcaaacgcgaacgcgctcgtctgggtgaactgcaccttaagggtgatgaagtcgatcacagcgaaatcagcgtctcgcaattcccggatgcacgtcgtccaaagctgatctggttcaacggcgcgctgaccttcgcactgatggttgccctgatcatgggcctgctgccgctgccggtactgttcatgatcgcgttcagtatcgcgatgatcatcaactacccgaacctgcaggaccagaaggaccgcgtatcagcccacgccggtagcgttctggcagtggtcggcctgatcttcgccgcaggtatcttcaccggtattctgtccggcaccggcatggtcgacgccatgtcgaaaagcctgctggcagtgatcccggatgcgctcggcccgtacctcgccgtgatcaccgcgctggtgagcatgccgttcaccttcttcatgtccaacgacgcgttctactacggcgtactgccggtgctgtccgaagccgctgcccactacggcatcagcccggttgaaatggcccgcgcctcgatcgtcggtcagccggtccacttgctcagcccgctggtgccatcgacctacctgctggttgccttggccggtatcgagttcggcgaccaccagcgcttcaccctgaaatgggcgattctggtgtgcatgtgcatcctggttgccgcgctgctgatggggatcttcccgttctatagcagcatgtaa

SEQ ID NO: 36839 - protein, 435 aa, Pseudomonas syringae pv. phaseolicola 1448A
MLTFLGFAMVIAFMYLIMSKRLTALIALILVPIIFALFGGFAAQIGPMMLAGITKLAPTGVMLMFAILYFALMIDSGLFDPAVRKILKMVKGDPMRISVGTAVLALVVSLDGDGATTYMICVAAMLPLYSRVGMSPRIMAGLIILAGGVMNMTPWGGPTARAASALHVDASDIFVPMIPAMLAGVVAILAIAYFYGKRERARLGELHLKGDEVDHSEISVSQFPDARRPKLIWFNGALTFALMVALIMGLLPLPVLFMIAFSIAMIINYPNLQDQKDRVSAHAGSVLAVVGLIFAAGIFTGILSGTGMVDAMSKSLLAVIPDALGPYLAVITALVSMPFTFFMSNDAFYYGVLPVLSEAAAHYGISPVEMARASIVGQPVHLLSPLVPSTYLLVALAGIEFGDHQRFTLKWAILVCMCILVAALLMGIFPFYSSM

SEQ ID NO: 36840 - DNA, 1305 bp, Ralstonia eutropha JMP134
  CDS (1)..(1305): transl_table=11
atgacactggtcgccatcatcctgttcgtggtctttatcggcctgatgctgctgggcgtgcccatcggcgtgtcgctgggccttggcgggcttgtcgccatcggcctgtcgaacctcgatacccagatgttcggcctgctggccgtgccgcagaacttctatgccggtctggccaagtatccgctgctggccattcccatgttcgtgctggtcggatcgatctttgatcgctctggcgtggcgcagcgcctggtgacgtttgccatcgctatcgtcgggcgtggccccggcatgctgccgctggtcgccattctggtggccatgtttctcggcggcatttcgggctctggccccgccaacgcggccgccgtcggcggcgtgatgatcgcggcgatgtcgcgggccggctatccgggttcgtacagcgcggcagtggtcggcgccgcggcggcgaccgacatcctgattccgccttcggtggccttcatcatctacagcgtgctggtgccgggtgcttcggtgcctgcgctgttcgcggccggcatgatcccgggcgtgctggccggcgtggcgctgatcgtgccggcggtgtggctggcccgcaagcacaacatgggcgccatcgaagccgcgctgccgcgcccgccgttctggaagagcctgcgcgaggcagcctggggcctggtcgcgccattcctaattctcggtggcatgcgtgccggctggttcacgccaaccgaagccgcggtggttgcggtggtctatggcctgttcgtgggcatggtgatctaccgcagcattggcatgaaggacctgttcgtgatcttccaggaggcggcggagacctcggccgtgatcctcctggtggtcgcgctggctggcatcttcgcgtatgcgctgtcgacgctcggcgtcattgacccgctcgcaaacgcgatcgccaactccggtctcggcgaatacggcgtgctggcgctgatcgtgctgctgctgatgacggttggcatgttcctggacggcatttctatcttcctgatcttcgtgccgctgctgctgccgatcgccaccgcgttccactggaacccggtgtggttcggggtggtgctcacgctcaaggtggcgctggggcagttcacgccgccgctggccgtgaacctgatggtgtcgtgccggattgcccgcgtgcgcatggaggagaccgtgccctgggtggtctggatgctgctggcgatgttcatcgccatgctgatggtgctggcctatccgccgctggcgacgtggttgccggactatctgggctattga

SEQ ID NO: 36841 - protein, 434 aa, Ralstonia eutropha JMP134
MTLVAIILFVVFIGLMLLGVPIGVSLGLGGLVAIGLSNLDTQMFGLLAVPQNFYAGLAKYPLLAIPMFVLVGSIFDRSGVAQRLVTFAIAIVGRGPGMLPLVAILVAMFLGGISGSGPANAAAVGGVMIAAMSRAGYPGSYSAAVVGAAAATDILIPPSVAFIIYSVLVPGASVPALFAAGMIPGVLAGVALIVPAVWLARKHNMGAIEAALPRPPFWKSLREAAWGLVAPFLILGGMRAGWFTPTEAAVVAVVYGLFVGMVIYRSIGMKDLFVIFQEAAETSAVILLVVALAGIFAYALSTLGVIDPLANAIANSGLGEYGVLALIVLLLMTVGMFLDGISIFLIFVPLLLPIATAFHWNPVWFGVVLTLKVALGQFTPPLAVNLMVSCRIARVRMEETVPWVVWMLLAMFIAMLMVLAYPPLATWLPDYLGY

SEQ ID NO: 36842 - DNA, 1329 bp, Staphylococcus saprophyticus subsp. saprophyticus ATCC 15305
  CDS (1)..(1329): transl_table=11
atgttctgtttgaacttaaaggaaagttggttttgtatggaggagacaaagaaaggtaatgcatgggcactgatacctttaattatttttgtgggtatgtttttaggtgttggtatcattaccggcgatttcactacaatgcccctaaatgttgcgatactagtagcgacaattgtgggacttgtattaaatagaaaagaatcatttcaaaagaaagttgaaatttttactaagggtgcaggacattccaatattatactaatgatgctcattttcttattagcaggagcgttttcgcaaacaactgaagatatgggtggcgtaaaatctacagtgaatttgggactatctttgattcctgagaatttaatcattgtaggtttattcgtgatatgtatgttcgtgtcactttctatgggtacatccgtgggcactgtagcagctatagcgcctgttggctttggactaagccaacaggcggatgtctctgcagccatcactatggcgacggtcgtaggtggggcgatgtttggtgataatttatcaatgatttcagatacaacgatagctgcggtaagaactcaaaaaacaaaaatgagtgataagtttaaggtgaatatcaaaatcgtgttacctggtgccatatttactgtcattgtactttggtttttaacaaatggagcacaaattgatgcatctaagagctacgattatgatcttataaaagtagtaccttatttatttgtactcatactcgcattattcggcgtcaacgttattattgtacttattggcggtattatactttcagcaattataggtttattttatggtacctttgattggattgggttattaagctctatttctaaagggattattggcatggaggatattgccattattgcactattaattggtggtctagtggcattgatacaacacaatggtggtattacatggttacttaattttgtgcgtaatagagtgaaatctaagcgtggcgcagaactaggaattgctggcttagtgagtgtggccgatatttcaactgctaataatacgatttctatattaatggcagggccattagctaaagacatttcagatgaatatggtgtagatccgcgtaaatcagcaagtattctagatatgtttgcaagctgtttccaaggactattaccgtatagtccacagcttattgcagcagcaggtgtggcatctatatcaccgtttgaattggtaccgtatgcgatttatccgatgatattagggatttgtggtctgattgctatcgcctttagattgccgagattggacaagaaataa

SEQ ID NO: 36843 - protein, 442 aa, Staphylococcus saprophyticus subsp. saprophyticus ATCC 15305
MFCLNLKESWFCMEETKKGNAWALIPLIIFVGMFLGVGIITGDFTTMPLNVAILVATIVGLVLNRKESFQKKVEIFTKGAGHSNIILMMLIFLLAGAFSQTTEDMGGVKSTVNLGLSLIPENLIIVGLFVICMFVSLSMGTSVGTVAAIAPVGFGLSQQADVSAAITMATVVGGAMFGDNLSMISDTTIAAVRTQKTKMSDKFKVNIKIVLPGAIFTVIVLWFLTNGAQIDASKSYDYDLIKVVPYLFVLILALFGVNVIIVLIGGIILSAIIGLFYGTFDWIGLLSSISKGIIGMEDIAIIALLIGGLVALIQHNGGITWLLNFVRNRVKSKRGAELGIAGLVSVADISTANNTISILMAGPLAKDISDEYGVDPRKSASILDMFASCFQGLLPYSPQLIAAAGVASISPFELVPYAIYPMILGICGLIAIAFRLPRLDKK

SEQ ID NO: 36844 - DNA, 1383 bp, Staphylococcus saprophyticus subsp. saprophyticus ATCC 15305
  CDS (1)..(1383): transl_table=11
gtgacaacacaagactatcaactattgattattacagtgataagtattttatttctcatctttttaatcacttcaaaattaaaattccatccactacttgcattactactaaccgcaatctttgtcggtttcacttctggattagacattgataaaattgttaaatctatagaaactggggctggttcaacactcggtgaaacgggcgtaaccatcgcgttaggtgccatgctaggtaagatactttctgattcaggtgccagcgacaaaattgcatcttcgatactacacaatgcgtcttacaaaaaattaccatggatgatggcgttagctgcgtttattattgggattccaatgtttttcgaagttggtttaattatgctactgccactgatttttacaattgctaaaaaattagaagatgaacataaaatgaaaggatcagcctatgtagccatcggtgtgcctgttatagcggcattagcaacgatgcatggtatggtgccaccacaccctggaccactaatttcagtgaatcagtttggtgcgaatatcgggataactatggtacttggtgtcatatgtgcaattccaaccattatcattgctggtccactttacggtaaatttattacaccacgattatctgtgaagccaaatcaagatttgttaaatcaatatacgaatgacaacaacgaaaacactcaagcaccatcaacattcatagccttttctactatattagttccagtgattatgatgttattacatgccattgctggtatcttttttggagaaaaaacattacaatacaagattttcgaattcttcggaagcccaatcatcgctatgtttgtgggtgtcctttatgccattatcgttctcggctatttaaaacatcgcgacacacaaaaaattcgagatgctttaggtagtagtttgaaacctatcgccggtatcatgctaatcattgcgggtggtggcgcattcggtcaagtccttgaagattctggcgtaggtacggcaattgttcaccttgcagacaatttctcattatctgcattattaatgggatgggtcgttgctgcattattatctatatcaacaggttccgcaaccgttggtattgttggcgcaaccaatttactttacccattgattcaagcagatccaagtatcaataaagaattattaacgatcgctattggttctggctctttattctttaactacgtaaatcatggtggcttctggttagtcaaagaatcctttggtatgtctatgggagaaacatttaaaacgattacgattgtacaatccattgtcggtatttgtggtctgattatggtactactcttgaatgctattattggtttgttttaa

SEQ ID NO: 36845 - protein, 460 aa, Staphylococcus saprophyticus subsp. saprophyticus ATCC 15305
MTTQDYQLLIITVISILFLIFLITSKLKFHPLLALLLTAIFVGFTSGLDIDKIVKSIETGAGSTLGETGVTIALGAMLGKILSDSGASDKIASSILHNASYKKLPWMMALAAFIIGIPMFFEVGLIMLLPLIFTIAKKLEDEHKMKGSAYVAIGVPVIAALATMHGMVPPHPGPLISVNQFGANIGITMVLGVICAIPTIIIAGPLYGKFITPRLSVKPNQDLLNQYTNDNNENTQAPSTFIAFSTILVPVIMMLLHAIAGIFFGEKTLQYKIFEFFGSPIIAMFVGVLYAIIVLGYLKHRDTQKIRDALGSSLKPIAGIMLIIAGGGAFGQVLEDSGVGTAIVHLADNFSLSALLMGWVVAALLSISTGSATVGIVGATNLLYPLIQADPSINKELLTIAIGSGSLFFNYVNHGGFWLVKESFGMSMGETFKTITIVQSIVGICGLIMVLLLNAIIGLF

SEQ ID NO: 36846 - DNA, 1323 bp, Shigella sonnei Ss046
  CDS (1)..(1323): transl_table=11
atgttcggcataattatatctgtcatcgtattaattacgatgggctatttgatcctgaaaaactacaaacctcaggtggtgctggctgccgcaggtgtcttcctgatgatgtgcggagtctggttagggttcggtggtgtactcgatcccgccaaaagcagcggctacttgatcgtcgacatttataatgaaatcctgcgcatgctgtccaaccgcattgccggattggggctgtcgattatggcggtgggcggttatgcccgctacatggagcgcataggagccagtcgcgcgatggtgagcttgctaagccgcccgttaaaactcattcgctcgccgtatattattctgtcggcaacttacgtcatcggccaaatcatggcgcagtttattaccagcgcctccggtctgggtatgttgctgatggtcaccttatttccgacgctggtgagtctgggagtaagtcgcctctctgcggtggcggttatcgcaaccacgatgtccattgagtgggggattctggaaacgaactccatttttgcagcccaggtcgcgggaatgaaaattgccacatacttcttccactaccagcttccggtcgcctcttgcgtcattatctcggtggcgatctcccactttttcgtgcaacgcgcttttgacaaaaaagataaaaatatcaatcacgaacaggcagagcaaaaaactctcgataatgtcccgccgctctattacgccattttacctgtgatgccgttaatcctgatgctcggctcgctgttcctcgcccacgtcgggctgatgaagtcagaactgcatctggtggtggtgatgttactaagtttgacggtgacgatgtttgttgagttcttccgcaagcataacttgcgcgaaacaatggacgatgtgcaggcgttttttgacggcatgggtacgcagtttgccaacgtggtaacgctggtggtcgcgggtgaaatatttgcgaaaggcttaacgacgattggcactgttgatgcggttatcaggggtgcggagcattctggtctgggcggtattggcgtgatgattattatggcgctagtcattgccatttgtgccattgtgatgggctctggcaatgcgccgtttatgtcatttgccagtcttattccgaatatcgcagccggactacatgtaccagcggttgtaatgattatgccgatgcattttgccacgacgctagcgcgcgcggtttcgccgattactgcggtggtaaagcggacagcgatccccatggcagtcggtttcgtggtgaatatgattgccacaatcacgctattttattaa

SEQ ID NO: 36847 - protein, 440 aa, Shigella sonnei Ss046
MFGIIISVIVLITMGYLILKNYKPQVVLAAAGVFLMMCGVWLGFGGVLDPAKSSGYLIVDIYNEILRMLSNRIAGLGLSIMAVGGYARYMERIGASRAMVSLLSRPLKLIRSPYIILSATYVIGQIMAQFITSASGLGMLLMVTLFPTLVSLGVSRLSAVAVIATTMSIEWGILETNSIFAAQVAGMKIATYFFHYQLPVASCVIISVAISHFFVQRAFDKKDKNINHEQAEQKTLDNVPPLYYAILPVMPLILMLGSLFLAHVGLMKSELHLVVVMLLSLTVTMFVEFFRKHNLRETMDDVQAFFDGMGTQFANVVTLVVAGEIFAKGLTTIGTVDAVIRGAEHSGLGGIGVMIIMALVIAICAIVMGSGNAPFMSFASLIPNIAAGLHVPAVVMIMPMHFATTLARAVSPITAVVKRTAIPMAVGFVVNMIATITLFY

SEQ ID NO: 36848 - DNA, 1293 bp, Haemophilus somnus 2336
  CDS (1)..(1293)
atgatacagtttaattctattgtggctattcttggcattatcgccacggtttatcttctcattaaaaaatatgaaactcgtacagtattaatcagtgttggtttgttgatggcaatgttgactttcaaaccaatggaggcgttagatgcttttgctaaatccatgaccagtagcggtttaatcatggctatttgttccagtatggggtttgcttatgtgatgaaatacactcaatgcgatacacatttggtacatttaatgactcgtccgttaagtggtttaaaattctttttaattccgattgcaacagttattacgttctttattaatattgctattccgtcagcagcaggttgtgcagcggctgttggtgccactttaattccagtattgaaaagtgcgggtgtacgtccggcaacggcaggtgcggcgattttggcagggacttttggttcaatgatgagtcctggatcttctcatagtgcaatgattagcgaaatgtcgaaattgaccattaccgaagtgaatttgtctcacgcaccttacactatgattgcaggtgcaatcggcacagtagttttaactttgttagcgattgtatttaaagattacggtgaggaacatcggaaagcctatttacaagaaaatcaagaaacggaaagtactttcagtaaggtgaatatattctatgctttagcacctctcgttccgttgattatattggttctcggcggaacctctttagctgaaaacccaggattagcgtggacaaaaatgggcgtgccacaagcaatgttaattggtgcgatttatgccattttagttacccgaatttctccggttaaaattaccgaagaattttttaatggaatgggtaattcttatgccaatgtattagggatcatcattgccgcaagtgtgtttgttgcaggcttaaaagcgacaggagcggtagattccgctattgaatttttgaaacattctaacgaatttgtccgttggggagcgactatcggaccattcttaatgggtttggtaacaggttcaggtgatgctgcggcaatcgcatttaataccgctgtaacaccacatgcagtggaattgggttatacccatgtcaatttaggaatggcggcggctattgccggagcgattggacgtaccgcttctccaattgcaggagtaaccattgtttgtgccggtttagcaatggtaagtcctgtagaaatagtgaaacgtactgcactgggtatgattttggcaaccttatttttaacgttatttatgttataa

SEQ ID NO: 36849 - protein, 430 aa, Haemophilus somnus 2336
MIQFNSIVAILGIIATVYLLIKKYETRTVLISVGLLMAMLTFKPMEALDAFAKSMTSSGLIMAICSSMGFAYVMKYTQCDTHLVHLMTRPLSGLKFFLIPIATVITFFINIAIPSAAGCAAAVGATLIPVLKSAGVRPATAGAAILAGTFGSMMSPGSSHSAMISEMSKLTITEVNLSHAPYTMIAGAIGTVVLTLLAIVFKDYGEEHRKAYLQENQETESTFSKVNIFYALAPLVPLIILVLGGTSLAENPGLAWTKMGVPQAMLIGAIYAILVTRISPVKITEEFFNGMGNSYANVLGIIIAASVFVAGLKATGAVDSAIEFLKHSNEFVRWGATIGPFLMGLVTGSGDAAAIAFNTAVTPHAVELGYTHVNLGMAAAIAGAIGRTASPIAGVTIVCAGLAMVSPVEIVKRTALGMILATLFLTLFML

SEQ ID NO: 36850 - DNA, 1293 bp, Actinobacillus pleuropneumoniae serovar 1 str. 4074
  CDS (1)..(1293)
atggatgaactcaaaccttttgttgccattctcggcattgtggtcacggtttacctgttgattaaaaaatatgaaacccgaacggtattaatcggtatcggtttgattatgtcggttgtaacgcttaatccgatgggagcattagatgcctttgctaaatcaatgacttcaagcggtctgattatggcgatttgttccagtatgggttttgcctatgtaatgaaatatacccaatgcgatacgcatttggtgcatttgctgactaaaccgttaagcggtcttaaattctttttaatcccgattgcgaccattattactttctttattaacattgcgattccgtctgcggcaggttgtgcggctgcggtgggggcaaccttaattccggtattaaaaagtgcgggagtacgccctgcaaccgccggtgcggcgattttggcaggaacattcggttcgatgatgagcccgggttcttctcactcggcaatgattagtgaaatgtcgaatttaactattaccgaagtgaacctttcccatgcgccttataccatgatcgccggcgctatcggcgcagtcgctttgactttaatggcaatcatttttaaagattacggtgaagagcatcgtaaagcttatttagctgaaaaccaaaatgcggaaaccaagtttagcggcgttaatccgttatatgcgcttgctccgttattaccgttaattatccttgttatcggtggtacagaattacaaaaaacaccgggcttagaatggacaaaaatgggcgtaccgcaagcgatgttaatcggtgcgatttatgcaattattgttacgcgtatttcgccagtgaaaattaccgaagaattcttcaacggtatgggtaattcgtatgctaatgttctcggtattattattgccgcaagcgtatttgtatccggcttaaaagcaactggtgcggtagattcggcaattgaattccttaaacactcaaatgaatttgtccgttggggggcgactatcggtccgttcctaatggggattgtgaccggttcgggcgatgcggcggcgattgcgtttaatactgcagtaacgcctcacgcagtggaattgggttatacccatgtgaatttaggtatggcggcagcgatcgccggtgctatcggtcgtacaatgtcaccgattgccggggtaaccattgtttgtgcgggcttggctatggtcagtccggtcgagatggtaaaacgtaccgcaccgggtatgattttagccaccttgttcttggcgttgtttatgttgtaa

SEQ ID NO: 36851 - protein, 430 aa, Actinobacillus pleuropneumoniae serovar 1 str. 4074
MDELKPFVAILGIVVTVYLLIKKYETRTVLIGIGLIMSVVTLNPMGALDAFAKSMTSSGLIMAICSSMGFAYVMKYTQCDTHLVHLLTKPLSGLKFFLIPIATIITFFINIAIPSAAGCAAAVGATLIPVLKSAGVRPATAGAAILAGTFGSMMSPGSSHSAMISEMSNLTITEVNLSHAPYTMIAGAIGAVALTLMAIIFKDYGEEHRKAYLAENQNAETKFSGVNPLYALAPLLPLIILVIGGTELQKTPGLEWTKMGVPQAMLIGAIYAIIVTRISPVKITEEFFNGMGNSYANVLGIIIAASVFVSGLKATGAVDSAIEFLKHSNEFVRWGATIGPFLMGIVTGSGDAAAIAFNTAVTPHAVELGYTHVNLGMAAAIAGAIGRTMSPIAGVTIVCAGLAMVSPVEMVKRTAPGMILATLFLALFML

SEQ ID NO: 36852 - DNA, 1296 bp, Haemophilus influenzae R2846
  CDS (1)..(1296)
atggaattatttaaatccatcgttgcagtgattggcattattgccacaatttattttctgattaaaaaagccgaaacccgaactgttttaattggtgtcggtttaataatgtccattctaacgctgaatccaatgggtgcattagatgcttttgccaaaagtatgacatctggcggattaattatggctatctgttctagtatgggttttgcttatgtaatgaaatacactcaatgtgatactcatctggtacatttacttaccaaaccattaagcggattaaaattcttcttaattccaattgcaaccgtcattacctttttcatcaatattgctattccttctgcagctggttgtgctgctgcggttggtgcaacattaattcccgttttaaaaagtgcgggtgttcgaccagctactgctggtgcagctattttagcagggacttttggatcaatgatgagtccgggttcttctcactcagcaatgattagtgaaatgtcaggcttaactatcactcaagtaaacctttcacatgcaccatataacatgattgcgggagcaataggtgcggttgttttaacaattcttgcgcttgtttttaaagattatggtgaacaacatcgtaaagcttatcttgcagaacaaaaagaaagtgaaattaaagttgttgaaggcgtcaatgtactttatgcccttgcaccattaataccattagttattttagtgattggtggaacgtcattacaacaagtaccaggtcttgaatggactaaaatgggcgttcctcaagcgatgctaattggtgcaatttacggcattatcgtaactcgtatttccccagtaaaaatcacagaagaatttttcaatggtatgggaaattcttatgcaaacgtacttggtattatcattgcagccagtgtatttgtggcaggattaaaatctacgggcgcagtggatgctgcaatttctttcttaaaagaatccaacgaatttgtacgttggggtgcaacaattggaccattcttaatgggcttaattacaggttctggcgatgcagcagcgattgcctttaacacagccgtcacgccacatgctgtagaactcggctacacccatgtaaatcttggtatggcagcagccattgctggtgcaattggtcgtacagcttcaccaattgcaggcgtaactattgtttgtgcaggccttgcgatggtaagcccagtagaaatggtaaaacgtaccgcaccaggcatgatacttgctgttttattcttagcattatttatgttgtag

SEQ ID NO: 36853 - protein, 431 aa, Haemophilus influenzae R2846
MELFKSIVAVIGIIATIYFLIKKAETRTVLIGVGLIMSILTLNPMGALDAFAKSMTSGGLIMAICSSMGFAYVMKYTQCDTHLVHLLTKPLSGLKFFLIPIATVITFFINIAIPSAAGCAAAVGATLIPVLKSAGVRPATAGAAILAGTFGSMMSPGSSHSAMISEMSGLTITQVNLSHAPYNMIAGAIGAVVLTILALVFKDYGEQHRKAYLAEQKESEIKVVEGVNVLYALAPLIPLVILVIGGTSLQQVPGLEWTKMGVPQAMLIGAIYGIIVTRISPVKITEEFFNGMGNSYANVLGIIIAASVFVAGLKSTGAVDAAISFLKESNEFVRWGATIGPFLMGLITGSGDAAAIAFNTAVTPHAVELGYTHVNLGMAAAIAGAIGRTASPIAGVTIVCAGLAMVSPVEMVKRTAPGMILAVLFLALFML

SEQ ID NO: 36854 - DNA, 1296 bp, Haemophilus influenzae R2866
  CDS (1)..(1296)
atggaattatttaaatccatcgttgcagtgattggcattattgccacaatttattttctgattaaaaaagccgaaacccgaactgttttgattggtgtcggcttaattatgtccattctaacgctgaatccaatgggtgcattagatgcttttgccaaaagtatgacatctggcggattaattatggccatctgttccagtatgggttttgcttatgtaatgaaatacactcaatgtgatactcatctggtacatttacttaccaaaccattaagcggattaaaattcttcttaattccaattgcaacagtcatcacctttttcatcaatattgctattccttctgctgctggttgtgctgctgcggttggtgcaacattaattcccgttttaaaaagtgcgggtgttcgaccagctactgctggtgcagctattttagcagggacttttggatcaatgatgagcccaggttcttctcactcagcaatgattagtgaaatgtcaggcttaactatcactcaagtaaacctttcacatgcaccatataacatgattgcgggagcaataggtgcggttgttttaacaattcttgcgcttgtttttaaagattatggtgaacaacatcgccaagcttatcttgcagaacaaaaagaaagtgaaattaaagttgttgaaggcatcaatgtactttatgcccttgcaccattaataccattagttattttagtgattggtggaacgtcattacaacaagtaccaggtcttgaatggactaaaatgggcgttcctcaagcgatgctaattggtgcaatttacggcattatcgtcactcgtatttccccagtaaaaatcactgaagaatttttcaatggtatgggaaattcttatgcaaacgtacttggtattatcattgcagccagtgtatttgtggcaggattaaaatctacaggtgcagtggatgctgcaatttctttcttaaaagaatccaacgaatttgtacgttggggtgcaacaattggaccattcttaatgggcttaattacaggttctggcgatgcagcagcgattgcctttaacacagccgtcacgccacatgctgtagaactcggctacacccatgtaaatcttggtatggcagcagccattgctggtgcaattggtcgtacagcttcaccaattgcaggtgtaaccattgtttgtgctggccttgcgatggtaagcccagtagaaatggtaaaacgtaccgcaccaggcatgatacttgctgttttattcttagcattatttatgttgtaa

SEQ ID NO: 36855 - protein, 431 aa, Haemophilus influenzae R2866
MELFKSIVAVIGIIATIYFLIKKAETRTVLIGVGLIMSILTLNPMGALDAFAKSMTSGGLIMAICSSMGFAYVMKYTQCDTHLVHLLTKPLSGLKFFLIPIATVITFFINIAIPSAAGCAAAVGATLIPVLKSAGVRPATAGAAILAGTFGSMMSPGSSHSAMISEMSGLTITQVNLSHAPYNMIAGAIGAVVLTILALVFKDYGEQHRQAYLAEQKESEIKVVEGINVLYALAPLIPLVILVIGGTSLQQVPGLEWTKMGVPQAMLIGAIYGIIVTRISPVKITEEFFNGMGNSYANVLGIIIAASVFVAGLKSTGAVDAAISFLKESNEFVRWGATIGPFLMGLITGSGDAAAIAFNTAVTPHAVELGYTHVNLGMAAAIAGAIGRTASPIAGVTIVCAGLAMVSPVEMVKRTAPGMILAVLFLALFML

SEQ ID NO: 36856 - DNA, 1347 bp, Pediococcus pentosaceus ATCC 25745
  CDS (1)..(1347)
atgttattaaagaaaaatgatattaaaatgatacttttatcactaggtttaattttgatgtacatcgctatattgttgggtaatgagctaaaggtaacgcaacctactggtacaaatttattaaatccatttcaggcaattgttgatcaattttcatcaactttagtaggaccaggatttgttattttaattttaggtggttatagcgcttatatgaaccacataggtgctaatcaagttaccgtacatgcacttaccaaaccgatcactaaaattaaatctatttatttactagctcccattgtttttcttattggaaacctattatcacttgtaattccaagtgcttcaaatctagcaattattctccttgcaactctatatcccgtattgcgttctgcaggcatgtcgcgactaacatcagcagctatcatcggaacttcagctacaatagttccaactcccttaggtgcagataacgtagctattgcatcccaatttcacatgtctgtaacagattatgtttttcaaaaacacgctttaatttctattccaaccttgctagctattactatagttcattatttatggcaaaaatatcaagacaaaaagcatcctgaagagttgtcatattcttcagagctttctcaaaataaagaacaggattcaacagcgtcacctaaggtaagttataaaggattcaaagcttttatttatggattactaccgctcttacctattgtaatattactaatcatctttttcaccaatatatttcttcacactaagctgaatattagtgttcaattagttagcttacttagttttgttattgctgtacttgtagaaatttttaataaaaagcatccccaaattgttttaaaagaaactagtaatttttttgaaggtatgggtagcgtaatgagtatcgtagcattactagtttccgcccaagtattcgtacaaggactaacttcgatagggataattgatttaattcaaaaaactatgcaaactatgaatagctcaggtattgttttaccagtagttatggttgtattcacggcaattattgtcttattaagtggaagtggaactgcgttactttatgcaatgattcctctgttattaccattatctaaagctgcaggtatttcccctatcgccctatcagtacctatgcaattagcagggaacttattgcgagcaatctctcctgtagcggcagttattttaatagttgctggaaccacaaagttatctccagtaaaaattgttaaacgcacttccgttccaatggtttttggagtaatcatgatgcttgttatgtccctactaatcttttag

SEQ ID NO: 36857 - protein, 448 aa, Pediococcus pentosaceus ATCC 25745
MLLKKNDIKMILLSLGLILMYIAILLGNELKVTQPTGTNLLNPFQAIVDQFSSTLVGPGFVILILGGYSAYMNHIGANQVTVHALTKPITKIKSIYLLAPIVFLIGNLLSLVIPSASNLAIILLATLYPVLRSAGMSRLTSAAIIGTSATIVPTPLGADNVAIASQFHMSVTDYVFQKHALISIPTLLAITIVHYLWQKYQDKKHPEELSYSSELSQNKEQDSTASPKVSYKGFKAFIYGLLPLLPIVILLIIFFTNIFLHTKLNISVQLVSLLSFVIAVLVEIFNKKHPQIVLKETSNFFEGMGSVMSIVALLVSAQVFVQGLTSIGIIDLIQKTMQTMNSSGIVLPVVMVVFTAIIVLLSGSGTALLYAMIPLLLPLSKAAGISPIALSVPMQLAGNLLRAISPVAAVILIVAGTTKLSPVKIVKRTSVPMVFGVIMMLVMSLLIF

SEQ ID NO: 36858 - DNA, 1272 bp, Haemophilus somnus 129PT
  CDS (1)..(1272)
atgttaggattatttttaggtagtttattcctatttttatttcttggtgtgccagtagcgttatcaatgttactgagtgccagttttatgttatggcatatggatatgtttgatactcaattaattgctgaaaactttgtaatgggtactaataactttcccttaatggcaattccattttttatgctgactggtgaaattatgaaatacggcggtatttctgagcggattatcaattttgctatgagtatggtaggacatattaaaggaggattaggttatgtagtgattatttcaggtttaatctttgctgggttatctggttctgctgtagcagacaccgcagcgttaggggcaattttaattccaatgatggtagctaaaaaatatgatgttgctcgttctacaggtttagtctgtgcggcaggaattatttcggtggtcattcctccaagtattccaatgattgtatatggaattaccgcaggtgcatccattaccaaattatttatgggtggcacggttcctggattattaatggttacaggattgtggttaatgtggaaatttttatatcgtaatcacgaagaaaatataaaaccgaaacaatctggtgcagaacgctggcaagcttttaaaaaagcttttttcccattattgttaccggtcattatcattgttgggttgcgtggcggtatttttactccaacagaagcaggtgtagttgcggcgatttatgcgggattggttagtcttggctatcgcagtttaaataaagaaaatttaatcgaagtctttttaaatacgattaaaactacttcaatggtgatgtttgttgcggctgcggcaatgatttctgcatttgcaattactgttgctcaaattccaacggagttggtgcaatttatcaaaggattaactgacaattcaacggtattaatgttggttattatgattttcttattactcgttggttgtgtaatggatttaattcctgcagtattaatttttgtacccgtattattgccggtattgagagcttacaatatcgatattgcttattttggcattatgatggtgattaacttatcgattggcttaatcacacctccagtgggaacggtactttatgttggttcgggaattgctaaacttggcataagtaaaattagtaagggaatttcgccgtttttgttagtttatgttgctattttaatgttgatggtgttctttcctgatgttgtgattgtgccaatgaattggttatcttag

SEQ ID NO: 36859 - protein, 423 aa, Haemophilus somnus 129PT
MLGLFLGSLFLFLFLGVPVALSMLLSASFMLWHMDMFDTQLIAENFVMGTNNFPLMAIPFFMLTGEIMKYGGISERIINFAMSMVGHIKGGLGYVVIISGLIFAGLSGSAVADTAALGAILIPMMVAKKYDVARSTGLVCAAGIISVVIPPSIPMIVYGITAGASITKLFMGGTVPGLLMVTGLWLMWKFLYRNHEENIKPKQSGAERWQAFKKAFFPLLLPVIIIVGLRGGIFTPTEAGVVAAIYAGLVSLGYRSLNKENLIEVFLNTIKTTSMVMFVAAAAMISAFAITVAQIPTELVQFIKGLTDNSTVLMLVIMIFLLLVGCVMDLIPAVLIFVPVLLPVLRAYNIDIAYFGIMMVINLSIGLITPPVGTVLYVGSGIAKLGISKISKGISPFLLVYVAILMLMVFFPDVVIVPMNWLS

SEQ ID NO: 36860 - DNA, 1293 bp, Haemophilus somnus 129PT
  CDS (1)..(1293)
atgatacagtttaattctattgtggctattcttggcattatcgccacggtttatcttctcattaaaaaatatgaaactcgtacagtattaatcagtgttggtttgttgatggcaatgttgactttcaaaccaatggaggcgttagatgcttttgctaaatccatgaccagtagcggtttaatcatggctatttgctccagtatggggtttgcttatgtgatgaaatacactcaatgcgatacacatttggtgcatttaatgactcgtccgttaagtggtttaaaattctttttaattccgattgcaacagttattacgttctttattaatatcgctattccgtcagcagcaggttgtgcagcggctgttggtgccactttaattccagtattgaaaagtgcgggtgtacgtccggcaacggcaggtgcggcgattttggcagggacttttggttcaatgatgagtcccggatcttctcatagtgcaatgattagcgaaatgtcgaaattgaccattaccgaagtgaatttgtctcacgcaccttacactatgattgcaggtgcaatcggcacagtggttttaactttgttagcgattgtatttaaagattacggtgaggaacatcggaaagcctatttacaagaaaatcaacaaacggaaagtactttcagtaaggtgaatatattccatgctttagcacctcttgttccattgattatattggttctcggcggaacctctttagctgaaaacccaggattagcgtggacaaaaatgggcgtgccacaagcaatgttaattggtgcgatttatgccattttagttacccgaatttctccggttaaaattaccgaagaattttttaatggaatgggtaattcttatgccaatgtattagggatcatcattgccgcaagtgtgtttgttgcaggattaaaagcgacaggagcggtagattccgctattgaatttttgaaacattctaacgaatttgtccgttggggagcgactatcggaccattcttaatgggtttggtaacaggttcaggtgatgctgcggcaatcgcatttaataccgctgtaacaccacatgcagtggaattgggttatacccatgtcaatttaggaatggcggcggctattgccggagcgattggacgtaccgcttctccaattgcaggagtaaccattgtttgtgccggtttggcaatggtaagtcctgtagaaatagtgaaacgtactgcactgggtatgattttggcaaccttatttttaacgttatttatgttataa

SEQ ID NO: 36861 - protein, 430 aa, Haemophilus somnus 129PT
MIQFNSIVAILGIIATVYLLIKKYETRTVLISVGLLMAMLTFKPMEALDAFAKSMTSSGLIMAICSSMGFAYVMKYTQCDTHLVHLMTRPLSGLKFFLIPIATVITFFINIAIPSAAGCAAAVGATLIPVLKSAGVRPATAGAAILAGTFGSMMSPGSSHSAMISEMSKLTITEVNLSHAPYTMIAGAIGTVVLTLLAIVFKDYGEEHRKAYLQENQQTESTFSKVNIFHALAPLVPLIILVLGGTSLAENPGLAWTKMGVPQAMLIGAIYAILVTRISPVKITEEFFNGMGNSYANVLGIIIAASVFVAGLKATGAVDSAIEFLKHSNEFVRWGATIGPFLMGLVTGSGDAAAIAFNTAVTPHAVELGYTHVNLGMAAAIAGAIGRTASPIAGVTIVCAGLAMVSPVEIVKRTALGMILATLFLTLFML

SEQ ID NO: 36862 - DNA, 996 bp, Campylobacter coli RM2228
  CDS (1)..(996): transl_table=11
atgctaggtattgttttttctttatttagtatttttttacttgtttttatgctttataaaaaaatcaatgctcatatggctttgcttttaagtggtttacttttactttccttagctgctatttttggactttctccacacattgtcgctaaaggttctttaaatttaggtttttttgatatttttcaagttttcaatcaaaccatgtcaaatacattagcagggcttggacttacacttatgactatagcaggtttttctgcttatatggatcatgtaggggcttcttatgcactttttaaagtttttgaaaaacctttaaaagccgtaaaatctccttatgttttactcatagttgcttattttatcgtgcaatttttagttcttttcatcccttctcacgcaggcttagcacttttacttatggttactatgtatcctatacttgtacgctctggtgtttcaaaactttctgccttaagtgtgattgcgatttgtcaatatatcgatcatggacctggaagtggaaatgtgatcatggcgtcaaaagtagctgaagttgatcctgcaatttattttgttcattatcaactccctacaaccttgcctatcattatagctgtaggtattgcgatatatctttgcaataaattttttgacaaaaaagataattttgtcttcaatgcacaagaaattgaaaaagaactaaatgaaaatgaaggtaaagaaaaagaacttaaaaagcctcctagaatttatgcgattttacctataattcctttggttttaatcctaggatttagttccgtgcttgatagcatcttggttttaatgggaataagtagcgctgaagaagttaaagcagctgctagcactgccattgaaatgaatgttccagtagcaatggtgatttcaacttttgtggctattatttttgaaatgatacgctataaaagtatagtagaaactcttaattctattatgattttcttttaa

SEQ ID NO: 36863 - protein, 331 aa, Campylobacter coli RM2228
MLGIVFSLFSIFLLVFMLYKKINAHMALLLSGLLLLSLAAIFGLSPHIVAKGSLNLGFFDIFQVFNQTMSNTLAGLGLTLMTIAGFSAYMDHVGASYALFKVFEKPLKAVKSPYVLLIVAYFIVQFLVLFIPSHAGLALLLMVTMYPILVRSGVSKLSALSVIAICQYIDHGPGSGNVIMASKVAEVDPAIYFVHYQLPTTLPIIIAVGIAIYLCNKFFDKKDNFVFNAQEIEKELNENEGKEKELKKPPRIYAILPIIPLVLILGFSSVLDSILVLMGISSAEEVKAAASTAIEMNVPVAMVISTFVAIIFEMIRYKSIVETLNSIMIFF

SEQ ID NO: 36864 - DNA, 1440 bp, Campylobacter lari RM2100
  CDS (1)..(1440): transl_table=11
atgttgggtttattttttgcaggatgttctgtatttttacttgtatttatgctctataaaaaaatcaacgcccatatggcgttgcttttaagtggtttattcttgctagctttggcaggaatttttggactttctcctatcattagtgaaaagcaatctttacatttaggtctttttgatattttccaagtagtaaataccaaaatgtcaagtactctagcaggacttggacttactttaatgtgtatagcagggttctctgcttatatggatcatgtgggcgcaagctatgctttatttaaagtatttgaaagacctttaaaggctgtaaaatcaccttatattttattgctagtttcatattttgtaatccagtttttagtgctttttataccttcacatgcaggtttagcgcttttgcttatggttacaatgtatcctattttagtacgctcaggtgtttctaagctttctgcgctttcgattattgctatttgtcaatacattgaccatggtccaggtagtggtaatgtgattttggctgcaaaaacagcagagattgatcctgcggtgtattttgtacattatcaacttcctacaacttgccctattattatagcagtaggtattgcggtttatttttgttcaaaatactttgataaaaaagaaaattttgtatttaatcgtgatgaggttgaaagagaattagcagagcatgatggtaataatgaagagttgaaaaaaccacctagaatttatgcaattttacctattttacctttggtgttgattttaggttttagtagtgttgtagatagcattatgattttaatgggaattaccaccatagaagaagtgaaagcagcttcatctactgctattaaaatgaatgtaccagttgcgatgatgatttcaacctttattgcaattatttttgaaatcattcgttatagaagtttgattgatactttaaattctattatggtattttttaaaggtatggggcatttgtttgtgattacggtgtctttgattatatgtggtcaagtttttgcaagtggacttttatcggttggttttgtagataccttgatagattttgcaaaaaatgcaggttttagtgtgtttgctattattatagcagtatctattttgcttgctgtgtgtgcatttttaatgggatctggaaatgcagcatttttttcttttgctccactcattcctaatatagcaaaatcttttggagtagatactatatccatgatcgcacctattcaaatcatgacaggctttggtagatgtatttcgccgattgcacctgctatattagctatttcagctatggcaaaagtaaatccactgcaagtggtaaaaagaacacttgtccctatgctagtagctgctattgtgaatatgatcatgacttatatttatttgtaa

SEQ ID NO: 36865 - protein, 479 aa, Campylobacter lari RM2100
MLGLFFAGCSVFLLVFMLYKKINAHMALLLSGLFLLALAGIFGLSPIISEKQSLHLGLFDIFQVVNTKMSSTLAGLGLTLMCIAGFSAYMDHVGASYALFKVFERPLKAVKSPYILLLVSYFVIQFLVLFIPSHAGLALLLMVTMYPILVRSGVSKLSALSIIAICQYIDHGPGSGNVILAAKTAEIDPAVYFVHYQLPTTCPIIIAVGIAVYFCSKYFDKKENFVFNRDEVERELAEHDGNNEELKKPPRIYAILPILPLVLILGFSSVVDSIMILMGITTIEEVKAASSTAIKMNVPVAMMISTFIAIIFEIIRYRSLIDTLNSIMVFFKGMGHLFVITVSLIICGQVFASGLLSVGFVDTLIDFAKNAGFSVFAIIIAVSILLAVCAFLMGSGNAAFFSFAPLIPNIAKSFGVDTISMIAPIQIMTGFGRCISPIAPAILAISAMAKVNPLQVVKRTLVPMLVAAIVNMIMTYIYL

SEQ ID NO: 36866 - DNA, 1293 bp, Campylobacter lari RM2100
  CDS (1)..(1293): transl_table=11
atgcaagctttatatcttttaattgctattttaggtgttattgctgtggtgtatttactaataaaaaaaatagaaaccaaaacagcattaatcggggtagggtttatcttgtgtttgctctctttaaaacctacagaggctttgagtgcttttactcacgctatggttcaacctgctttgattaaagcaatttgtgcgagtatgggttttgcttttgtgatgaaagttacaaaatgtgataagcatttggtaaaacttttaacagcacctttgaaaaatgtaggatttttcttaattccacttgcttttatggtaacttttttcatagctattgctataccttcagctgctgggtgttcggctgcagtaggagctactttaataccacttttaatggcttcgggtataaaacctgctatggcagcagctactgttctttgtggaactataggcggtattttaagtcctggggtttcacatacagctttaatctctgaaatttctggtaaaaatatacaagaaataatcttggtacaaactccaaatgctctaacagcaggagtgatagttatgatttctttgatgattatggctttgatttttaaagattatcaaaaaggtaaagcatttgaagtagcaaatcaaaatgtaaaagaagaaagtatagaaaaagtcaatattttatacgctttaatgcctttggtgcctttagcgattttgataataggtgcaagtcctttgcatgcgtatgaatttttgtcttggacttctaaaataggcgtggctgaagctatgcttttaggagctattatagctatagttgtaacttggagtaagcctgatacaatttcaaaagaatttttcaatggtatgggaaaatcttatgctgaaatcattggtattattatagcagcgagtgtttttgtggctggtcttaaagcatgtggggtaatagatataatcatagaatggcttaaaaatgagcaacattatgtgcgttttggtgggacttttataccatttttaatggctatgatcacaggaagcggagatgctgctgctatggcgtttaataaagcagtaacaatccatgctcaagatcttgggtttgatcaagttaaacttggtacagctgtagcaatgtctgctgtgcttggaagatatctttctcctattttgggagcttgtattatcgtttcagctattgctggggttagtcctttagagattgtcaaaagaacagctttaggatgcgtgatttcagtagtagtgattgcttttgtgttattataa

SEQ ID NO: 36867 - protein, 430 aa, Campylobacter lari RM2100
MQALYLLIAILGVIAVVYLLIKKIETKTALIGVGFILCLLSLKPTEALSAFTHAMVQPALIKAICASMGFAFVMKVTKCDKHLVKLLTAPLKNVGFFLIPLAFMVTFFIAIAIPSAAGCSAAVGATLIPLLMASGIKPAMAAATVLCGTIGGILSPGVSHTALISEISGKNIQEIILVQTPNALTAGVIVMISLMIMALIFKDYQKGKAFEVANQNVKEESIEKVNILYALMPLVPLAILIIGASPLHAYEFLSWTSKIGVAEAMLLGAIIAIVVTWSKPDTISKEFFNGMGKSYAEIIGIIIAASVFVAGLKACGVIDIIIEWLKNEQHYVRFGGTFIPFLMAMITGSGDAAAMAFNKAVTIHAQDLGFDQVKLGTAVAMSAVLGRYLSPILGACIIVSAIAGVSPLEIVKRTALGCVISVVVIAFVLL

SEQ ID NO: 36868 - DNA, 1374 bp, Campylobacter lari RM2100
  CDS (1)..(1374): transl_table=11
atggaggtttttctttctgttgtggctactttattttgtgtatttttagtagcctattttattcttaaaaaatacaatcctatctttactttttttctctcaggtattattatcttaatcatcatttctttagcaactggtgagtctgtgttaaaacaaagcttaggaaatcctgtttttgatgtctttggctttgtaactcaaacttttaaaactaacttagctggtgtggggcttattataatgtctgttgcaggttttgcagcttatatgaaacacattaatgcttcagcaaaattagcttttgtagcaaataaaccactaggcaagattaaaaataaatatctagttttaagtggaacttttgtggtgggtatggctttaaaaatagttatttcaagttacactggattgttgcttttattgcttgcttcgatttatcctgttttaattgccataggaattcgtcctattactgctgtgtcggttttatcattaatcgcacttgattatggtcctaaagatggaaattctataaatttagcagatatggtaggcattgaaaatgttgttgctatgttttttgaataccaaatttatcctgttatagcttatgttgttgtgatagctttgcttattccgttttattatagttatatggacaaaaaagacttagcaaaaggtgttgtagataatatcgaacacatggaaataaaaaacccaaattgccctttattttatattttcttgccttggcttcctatagtgtttttatttggtgcttattttgcaagtttatatgggtataaagtgaagttagatgtggtgagtgctaattttttaagtataagtttggtttttattttagagtatgttagacataaagatgcaaaaaaacttgcagatgatttaatggtgatactaaaagctatggcagaaatttttgtaagtgttgtttgtattatcattgcagcttctatttttgcagaaggcattaaagcgttaaaaggtatagaacatttagccttagcagtatcttctatgggggcttctgctgtgttgcttactattatagttttaagctttattgtgtattttgcaagtgtgattatgggtagtgggattgctgcttttaatgcttttggaagacttgctccagatattgctcaaaaactagggattaatcctatctcgctagctttgccacttgagattgcttcttgtttagggcgtgctgcctcgccgatatcgggtggagttttagccttagcaggttttgcaaaattagatcctatagccattgttaaaagatctactcctatgttgcttgtaggaatggctttaaatatcctaatagcttggtattttgcataa

SEQ ID NO: 36869 - protein, 457 aa, Campylobacter lari RM2100
MEVFLSVVATLFCVFLVAYFILKKYNPIFTFFLSGIIILIIISLATGESVLKQSLGNPVFDVFGFVTQTFKTNLAGVGLIIMSVAGFAAYMKHINASAKLAFVANKPLGKIKNKYLVLSGTFVVGMALKIVISSYTGLLLLLLASIYPVLIAIGIRPITAVSVLSLIALDYGPKDGNSINLADMVGIENVVAMFFEYQIYPVIAYVVVIALLIPFYYSYMDKKDLAKGVVDNIEHMEIKNPNCPLFYIFLPWLPIVFLFGAYFASLYGYKVKLDVVSANFLSISLVFILEYVRHKDAKKLADDLMVILKAMAEIFVSVVCIIIAASIFAEGIKALKGIEHLALAVSSMGASAVLLTIIVLSFIVYFASVIMGSGIAAFNAFGRLAPDIAQKLGINPISLALPLEIASCLGRAASPISGGVLALAGFAKLDPIAIVKRSTPMLLVGMALNILIAWYFA

SEQ ID NO: 36870 - DNA, 1524 bp, Campylobacter coli RM2228
  CDS (1)..(1524): transl_table=11
atgccaatttttatgatatgttctacacttttagcggtaattgtcgttgcttattatatacttaaaaaatacaatcctatttttgtattttttctttcaggtattatcttgcttatttttgctttttacatcacaggagcacctataccaaaagccccgagcagagaacatgcaagctttttgaatgttttacttgatagctatgcttttatcacagcgacttttaaaagtcagctttctggagtaggacttattatcatgagtgtggcaggttttgctgcttatatgaaacatatcaatgcttcggctaaactcgcttttttagcaaacaaacctttaggaaaaatcaaaaataaatatttgattttaagcggaacttttatcgttggaatggccttaaaaattgttatttctagctatgctggacttcttttgcttttattagcatgtatttatcctgttttaatctcacttaaaatccgtcctattacagctgtatgtgtgctttctttgattgcgcttgattatggtccaaaagatggaaattcaatcaatatggcagatatggtaggacaaagcgataatgtcgtggggctttttttaaattatcaaatttatagcgtgattgcttatgtgatggttattgctatcttaatacctttttactttgcttgggttgataaaagagataaagaaaaaggtgttttaaatgatgaagttgaaattccaccaatcattgatcctaaatgtcctactttttatatactctttccttggctgcctgtcgtatttttatttatagcatatttttttactatcaagcttgatgttgtaacagcaaattttttaagcatttctttagtttttcttgttgaatttgcaagacacagaaatgctagaaaattaggcgaagatatgatggtgattttaaaagctatggctgaaatttttatctcagtcgtaagcataatcatcgccgctggagtatttgctgaaggcattaaagcacttggtggagttaatatccttgctaacgcggtttcaaatcttggaacaggaaattttgcatggtttggaattcttttgagtatagctattttaagctttttagtttattttgctacagtgattatgggaagtgggattgctgcttttaatgcttttgggaaattagctcctgatatagctacaaaattaggcgttgcccctatcacttttgttttacctatagaaattgcatcttgtttaggtcgtgcagcttcaccaatagcaggcggaatcatagctttagctggatttgcaaaagtagctccaatggatattataaaacgaaccactcctcttttacttatcgctatgcttgtaaatgtgcttgtagccttttatctagcacaaaccaatcctttgccaaaagaacaaaacactacaaaaatagcagtatctttaaataataaatatttattattttataaaaactataaattttctaaattattttctgcttttttagtaaaaatttcataa

SEQ ID NO: 36871 - protein, 507 aa, Campylobacter coli RM2228
MPIFMICSTLLAVIVVAYYILKKYNPIFVFFLSGIILLIFAFYITGAPIPKAPSREHASFLNVLLDSYAFITATFKSQLSGVGLIIMSVAGFAAYMKHINASAKLAFLANKPLGKIKNKYLILSGTFIVGMALKIVISSYAGLLLLLLACIYPVLISLKIRPITAVCVLSLIALDYGPKDGNSINMADMVGQSDNVVGLFLNYQIYSVIAYVMVIAILIPFYFAWVDKRDKEKGVLNDEVEIPPIIDPKCPTFYILFPWLPVVFLFIAYFFTIKLDVVTANFLSISLVFLVEFARHRNARKLGEDMMVILKAMAEIFISVVSIIIAAGVFAEGIKALGGVNILANAVSNLGTGNFAWFGILLSIAILSFLVYFATVIMGSGIAAFNAFGKLAPDIATKLGVAPITFVLPIEIASCLGRAASPIAGGIIALAGFAKVAPMDIIKRTTPLLLIAMLVNVLVAFYLAQTNPLPKEQNTTKIAVSLNNKYLLFYKNYKFSKLFSAFLVKIS

SEQ ID NO: 36872 - DNA, 1455 bp, Campylobacter upsaliensis RM3195
  CDS (1)..(1455): transl_table=11
atggctatcgtttcgaccctctttgccgtggtagttgtggcgtattgtatcctcaaaaagtataatcccattttcacctttttattttcaggtatgattattttaatctttgcattttattattttggtgtgcctatcccaaatgctcaaattagagaaaattcaaattttttagacataatgcttgatggatttacctttattacaacaacttttcaaagcaaactcgcaggagttggatttatcattatgagtgtggcagggtttgcagcctatatgaaacacattaacgcttctgtaaaacttgcctttttggctaataagccgcttggaaagattaaaaataaatatctcattttaagcggaacttttattgtaggtatggctttaaagcttgtgattacaagtggcgtgggtctttttcttttgcttttagcttgtatttatcctgttttaatcactcttaaaattcgtcctattacggctgtttgtgtgctttctttgattgctcttgattatggtcctcaagatgcaaattttatcaatatggcggatatggtaggcgaaaaagacaatgtcgtggggctttttttaaattatcaactttgggttgcccttgtttatattgtgctaattgctgtgttaatccccttttattttgcttggattgataagaaagataaagccaaaggcgtgctttgtgatgaggtgcaaacgcctaaaattataaatccaaaatgccccactttttatatgttttttcctttacttcccgtgatatttttgttcgcggcttattttttggatataaaacttgatgtgataacggcaaatttcattagcatagcccttgtgtttattgctgaatttattcgccataaagatgctaaaaagcttggcgaggatataatggtgattttgcgtgcaatggctgaaatttttgtcagcgttgtaagcattattgttgcagctagtgtttttgctgagggcataaaggcacttggaggcataggcattttaactgatgctgtgagcgttttaggtaaagatggtgaatttgctaatcttgctgtgttagtaagcattgcagttttgagctttttggtttatggctttgctgttattatgggaagtggaattgccgtttttaacgcttttggtcgtttagcacctgagattgctacaaggctagggattgctcctattgcgttggttttgcccattgaagttgcttcttgtttggggcgtgcggcttcgcctattgcgcctggtattatcgttttggctggttttgctaaggtttcgcccatagacattgttaagcgcactgcaccgcttttactcatcgctatgcttgtaaatatcctcgtgtcattttatttggctaaggctgaaccgcaaatcaagcctgaaatttccgcaaaaatagagaggcaaatagcccctctatcttaa

SEQ ID NO: 36873 - protein, 484 aa, Campylobacter upsaliensis RM3195
MAIVSTLFAVVVVAYCILKKYNPIFTFLFSGMIILIFAFYYFGVPIPNAQIRENSNFLDIMLDGFTFITTTFQSKLAGVGFIIMSVAGFAAYMKHINASVKLAFLANKPLGKIKNKYLILSGTFIVGMALKLVITSGVGLFLLLLACIYPVLITLKIRPITAVCVLSLIALDYGPQDANFINMADMVGEKDNVVGLFLNYQLWVALVYIVLIAVLIPFYFAWIDKKDKAKGVLCDEVQTPKIINPKCPTFYMFFPLLPVIFLFAAYFLDIKLDVITANFISIALVFIAEFIRHKDAKKLGEDIMVILRAMAEIFVSVVSIIVAASVFAEGIKALGGIGILTDAVSVLGKDGEFANLAVLVSIAVLSFLVYGFAVIMGSGIAVFNAFGRLAPEIATRLGIAPIALVLPIEVASCLGRAASPIAPGIIVLAGFAKVSPIDIVKRTAPLLLIAMLVNILVSFYLAKAEPQIKPEISAKIERQIAPLS

SEQ ID NO: 36874 - DNA, 1293 bp, Chromohalobacter salexigens DSM 3043
  CDS (1)..(1293): transl_table=11
atggaagtattcaccatcatgttcattgggttgatcgtcctgctaatgctgggcgtccccgttgcgtttgccatgatcgcgtcttctgccctcgtattgggctatacgcgaggcttcgatgccatccccatagaaatgatctctcagcgcactctctacggagtcaacagttttaccttgttggctattcctgcttttctcttcattggccgcttgatgaactcggcaggcatatcggaccgcgttttcgacgtggcacgtaccatggttggccatttcaaagggggattgggccacgtcaatgtggtagccagcatgctgtttgcaggtatgtcggggtcggcagtcgctgatgccggtggccttggagcgttggaaataaaagccatggaagatgatggatatccaacggggttcagtgctgctgtcaccgccagttcagccactatcggtccgatcattccacccagtattcccgccgttatttacggggctttggcgaatgcttcaatcgcttccatcttcctcgcgtcgatcattcccggtttgttcatggggctgggactgatgctcatggtggctatcatttcacatcgccgtggattccctacacgaactcgggcacgcctcaacgatgtcttgcgggcgctttcgcgtgggctgttacctatgttgaccccgttgatcatcatcgtggggattctctcaggcgtgtttacgcctacagaagcctcggtgattgccctgttgtattgcatgatcatctcgttcctggtttatcgctcgatcacctttagggagtttctggggattctccgagccactgccatcgatactgccgcactgcttttcatcattgctggaagcgctctttatagctgggtgctggcgcgttaccaagtcacggcgttagtagcggattttttgttggctactgtgaccgatccgctcggcctgatgttgttgttggtcgtgttcatcctgctgatcgggttgtttatcgattcggtaccggctttgtttctcttgacccccctgttggtgccggtagtgactcaatatggcatcgaccccgttcactttggtgtggtcatgatctttaccttgatgatcggtttgatcacgccaccggtgggtacggtcctattcaccatacaaaaaataaccgggatgtcattcgtagggttggtacgggagaccatacctttctatatccctttgttcgtggtgcttctgatcattacgtgttttccatctatcgtcatgtttttgcccagtttgattcttggttga

SEQ ID NO: 36875 - protein, 430 aa, Chromohalobacter salexigens DSM 3043
MEVFTIMFIGLIVLLMLGVPVAFAMIASSALVLGYTRGFDAIPIEMISQRTLYGVNSFTLLAIPAFLFIGRLMNSAGISDRVFDVARTMVGHFKGGLGHVNVVASMLFAGMSGSAVADAGGLGALEIKAMEDDGYPTGFSAAVTASSATIGPIIPPSIPAVIYGALANASIASIFLASIIPGLFMGLGLMLMVAIISHRRGFPTRTRARLNDVLRALSRGLLPMLTPLIIIVGILSGVFTPTEASVIALLYCMIISFLVYRSITFREFLGILRATAIDTAALLFIIAGSALYSWVLARYQVTALVADFLLATVTDPLGLMLLLVVFILLIGLFIDSVPALFLLTPLLVPVVTQYGIDPVHFGVVMIFTLMIGLITPPVGTVLFTIQKITGMSFVGLVRETIPFYIPLFVVLLIITCFPSIVMFLPSLILG

SEQ ID NO: 36876 - DNA, 1281 bp, Chromohalobacter salexigens DSM 3043
  CDS (1)..(1281): transl_table=11
atgatggtcgtcgtcttcctcgccgtgctgttctcgttgatgttgatcggcatgccgatcgccttcgccatgctcagctccgccgtggtgatgatgtggacccaggacatgttcaatgtcaccacactggccgagcacttcatcaccggggccaacagctttgccttgatggccattccctttttcatcctgaccggcgagatcatgaatgccgggggcgtttccaagcgcatcgtcgactttgcctcgtcactggtgggccatgtgaaaggcggcctgggctatgtcgccatcgtggccggggtgatctttgccgggttatccggctccgccgttgccgataccgcggcactgggctcgatcctcatccccatgatggtggcgcaaggctacgagaagaagcgctcgaccgcgctggtggcatccgtcggcatcgtgggcaccgtgattcccccgagcattcccttgattctttacggggtcgtgggcggcgtctcgattaccgggttgttcatgggcggcatcgtgcccggggtcatcatggcgatcggcatgacgttcacctggtggctggtcgcgcgcaaagccgataccaagcggctcgagcgtgccaactggcaggcgcggcttcacagcttcaagcgtgccttctgggccttgctgctgccgctgatcatcatcgtcgggctgcgtggcggcgtgttcacgccgacagaagcgggcgtcgtcgctgcggtatacgcgctgttgatcagcctctgctatcgagaaattcgtctgacgcagctgttcgatgtgctcaccaacaccgccaagaccacggccatcgtgatgctgatcgcctcggcggccattgtcacggcgtatgcgatcacggtagcgcaggttcccgcccagatcgcggcagggctcacgagcattaccgacagcccgaccctgatgctcttgatcatcatggtcatactgctgctgttcggctgcgtgatggacatgacacccgcggtgctgattttcgcgcccgtgctgatcccggtggtcgagcagctcggtatcgatcccatctacttcggtgtggtgatgatcatcaacctctccatcggcttgatcacaccgccggtgggcacggtgctctatgtagggtgcagcatcagccgaatcagcatcatcgacatttcgcgcggcatatggccgatgctgttgatgtacgtggcgatcctgtttgcactgattctcttccccgagatcgtgacctatcccttaagtattctgcacaacggttga

SEQ ID NO: 36877 - protein, 426 aa, Chromohalobacter salexigens DSM 3043
MMVVVFLAVLFSLMLIGMPIAFAMLSSAVVMMWTQDMFNVTTLAEHFITGANSFALMAIPFFILTGEIMNAGGVSKRIVDFASSLVGHVKGGLGYVAIVAGVIFAGLSGSAVADTAALGSILIPMMVAQGYEKKRSTALVASVGIVGTVIPPSIPLILYGVVGGVSITGLFMGGIVPGVIMAIGMTFTWWLVARKADTKRLERANWQARLHSFKRAFWALLLPLIIIVGLRGGVFTPTEAGVVAAVYALLISLCYREIRLTQLFDVLTNTAKTTAIVMLIASAAIVTAYAITVAQVPAQIAAGLTSITDSPTLMLLIIMVILLLFGCVMDMTPAVLIFAPVLIPVVEQLGIDPIYFGVVMIINLSIGLITPPVGTVLYVGCSISRISIIDISRGIWPMLLMYVAILFALILFPEIVTYPLSILHNG

SEQ ID NO: 36878 - DNA, 1278 bp, Polaromonas sp. JS666
  CDS (1)..(1278): transl_table=11
atgaccattgcaatctttttgacatccctgatgggagccatgacgctgggcgttcccattgccttttccctgctggtgtgcggcgtcgccctgatggtgcacctgaacagttttgacacacaaatcctggcgcaaaacctgctcgaaggcgccaacaactacccgttgatggctgtgccgttcttcatgctcgccggcgagctgatgaacgctggtggcctgtcccggcgaatcgttgatgtagccaacgcgctggtcggccatgttcggggcgggctgggttacaccgccatcattgcggcggtcgtgatggccagtatctctggctctgcggtcgctgatacggccgctttggccgcgctgctgatacccatgatgcgcaaggcgggctacaacgtgccgcgtgctgcaggcctcattgcctctggcggcatcattgcgcccatcattccgccctcgattggctttgtggtctttggagtagccgcgcaggtgtccatcaccaaacttttcatggcgggcattgttccaggtgtgatgatgggcgtggccctcgggatcacgtggtggtttttggccaagaaggagccgctggtcaacggcggcgagttcagcctggccaaagtggccagcgccatcgtaagtggcacctgggcgctggcattgcccatcgtcatcatcggcggcatgaaatttggtgtgttcacgccaaccgaagcggccgtggttgcggtggtgtattccctcggggttggcctgtttgtctatggcgagctcaaactggcagagctgcccgaactaatgctagccgccgccaagacctccagcaccatcatgtttttggtggctaccgcactggtctctgcctggctcatcaccatcgccgacattccagcacaggccgttgcgttgctgcagccgttcatggacagccccaggctgctcatgctggtgatgatgctgctggtcattgtggtgggcaccgcgctggacttcatgcccaccgtcttgatcttgacgcccattttgatgccggtggtcaggcaagcgggtattgaccctgtctatttcggcgtgatgttcatcatcaacaacgcgattggtttgctgacaccccccgtgggaacggtactcaatgtggtggcaggcgtcgccagggtcaacctcgacaaagtcatcaagagcgtctggcccttcctgctggcgcaaacggttttgctgtttctgttcgtgttgttcccgcaactcatcacggggccggcggcctggttccgctga

SEQ ID NO: 36879 - protein, 425 aa, Polaromonas sp. JS666
MTIAIFLTSLMGAMTLGVPIAFSLLVCGVALMVHLNSFDTQILAQNLLEGANNYPLMAVPFFMLAGELMNAGGLSRRIVDVANALVGHVRGGLGYTAIIAAVVMASISGSAVADTAALAALLIPMMRKAGYNVPRAAGLIASGGIIAPIIPPSIGFVVFGVAAQVSITKLFMAGIVPGVMMGVALGITWWFLAKKEPLVNGGEFSLAKVASAIVSGTWALALPIVIIGGMKFGVFTPTEAAVVAVVYSLGVGLFVYGELKLAELPELMLAAAKTSSTIMFLVATALVSAWLITIADIPAQAVALLQPFMDSPRLLMLVMMLLVIVVGTALDFMPTVLILTPILMPVVRQAGIDPVYFGVMFIINNAIGLLTPPVGTVLNVVAGVARVNLDKVIKSVWPFLLAQTVLLFLFVLFPQLITGPAAWFR

SEQ ID NO: 36880 - DNA, 1365 bp, Polaromonas sp. JS666
  CDS (1)..(1365): transl_table=11
atgagctggtcggcgttcaggagtccgaggatctcccgcaccaggcgcacaaacctccccgttaaaccctccggaccgactatcatgaccatcgcagttttcctgggctccctgctcgccgccatggcgctgggcattcccatttcattttccctgttgctgtgcggtgccgcattgatgtggcacctggatatgttcgatgcgcaaattctggcgcagaacgtgatcaacggtgctgacagcttcccgctgctggcggtaccgtttttcatgctggctggggaaatcatgaacgccggcggcctgtcgcgccgtatcgtcaactttgccatgacgctggtggggcacatcaagggcgggctgggctatgtggccattgtggcggccgtgctgatggccgccctgtccggctccgccgtggcagatgccgccgccctgtcggccctgttgctgcccatgatggtggccgccggccacgacaaggcgcgctccgccggcctgctggcatcggccagcatcatcgctcccgttattccgcccagcatcggcttcgtgatcttcggcgtggcggccaatgtctcgatttccaagctattcatggccggcattgcgcccggcgtcatgctcggggtcgccttgtggttcacgtggtggtatgtcgcacgcaaggaaaccgtcgcggtgcccccccgcaagtcacgtgcggacgtgatcgccgccttcaaggacaccacctttgcgatggtcttgccggtgatcgtggtggtgggtctgaagtttggcgtgttcacgcccaccgaggcggcggtggtggctgcggtttacgcgctgttgatctcgacgctggtctacagggagctcaagctcaaccagttgtacggcctgtttctggcggcggccaagacgacggcggtgatcatgttcctcgttgccgcggcgatggtctcggcctggctaatcacggtggcgcaattgccggcgcaggtggtcacgctgctgcaaccgctgctggacagcccgaagctgctgatgctggccatcatggtgctggtgatggtggtgggtgcggcgatggacatgacccccactatcctgattctcaccccggtgctgatgccgatcgtgaaagcggcagggattgacccggtgtactttggcgtgctgttcatcatcaacaacgcgatcggcctgatcacgccaccggtcggaaccgtgctcaacaccgtcgcaggcgtgggcaaggttagcatggacgaggtgaccaagggcgtctggccgttcatgatcgcgcagttcgccatcatgttcctgatggtgctgttcccgcagctggtcatggtgcccgcacgctggttctatggctag

SEQ ID NO: 36881 - protein, 454 aa, Polaromonas sp. JS666
MSWSAFRSPRISRTRRTNLPVKPSGPTIMTIAVFLGSLLAAMALGIPISFSLLLCGAALMWHLDMFDAQILAQNVINGADSFPLLAVPFFMLAGEIMNAGGLSRRIVNFAMTLVGHIKGGLGYVAIVAAVLMAALSGSAVADAAALSALLLPMMVAAGHDKARSAGLLASASIIAPVIPPSIGFVIFGVAANVSISKLFMAGIAPGVMLGVALWFTWWYVARKETVAVPPRKSRADVIAAFKDTTFAMVLPVIVVVGLKFGVFTPTEAAVVAAVYALLISTLVYRELKLNQLYGLFLAAAKTTAVIMFLVAAAMVSAWLITVAQLPAQVVTLLQPLLDSPKLLMLAIMVLVMVVGAAMDMTPTILILTPVLMPIVKAAGIDPVYFGVLFIINNAIGLITPPVGTVLNTVAGVGKVSMDEVTKGVWPFMIAQFAIMFLMVLFPQLVMVPARWFYG

SEQ ID NO: 36882 - DNA, 1875 bp, Desulfitobacterium hafniense DCB-2
  CDS (1)..(1875): transl_table=11
atgatcaaagaagaagcacaacaaagaaaaaccttttcgggacttttaagggtacttgatcaaaggtttgaagaagttgcaatagtggccggttttctattctttacaattttaataaccttacaggtcatcaaccgttatgtattgacatttgccgatattgccaacattaatgtatggtcggaagagttagctagatatgtttttatttgggtttcatatattggggcggctctggttataaaaaaacgagccaatatcaatgtggacgccgttaccaggattttacctgtttcttttagtaaagtcttgaatttggtcagttcattattaaccttcgttttgttttacattctgattaaaggcggaatagccactataactatgcaggttaccaatcatcaggttactccggcaatgggaatccctatgtacataccatatttagccgttcctttgggaatcagtctgatgttcttcagaacactgcaaaacattattgcagacatcaaagaaatgagctttcaatcgattgtgctgggcatagcaattaccattatactgtttttacccattttgctggttgataatattaacgctactcttttgttatttgcttattttatattattgataataatgggcgtacccattgcctttagtttgggaattgctactttggttacaacaataaactctcaagctatacctttggattatttttctcaggcagcgtttaacggcattgatagctttcccattatggccataccattttttgtagctgcgggagtcatcatgggaagcggaggcttattaagaaggctgttaaatctgggcaatgaattagtaggcttcttcccgggcggattagctttagtgacggttattacctgcatgttctttgccgcaataagcggttccgggccggcgacggttgctgcagtgggaactatgatgatacctgaaatgaaaaggcagggatatagcgttgctttcagtgcggcaatagtagcagctgccggctcaattggtgtcattattccacctagtaatccttttgttatttatggagttgttggccaagaatcggttggaaaactgtttattgcaggtattattcctggagtcctaattggtataattttaatgattctggcttatagtacctcaaagaaaaatggttggaaaggcaataaagatcgaatagatataattgcagtacttcgagccgcatgggatgccaaattggctttagtcgtacctgttattattttgggcggtatttatggcggatatatgactcctacggaagcagcagccatttctgtaacttacggtttgctcattggactgtttgtttaccgtgatttaaaattcaaggatatgtacaattgtctggtcgagtcaggttccaccaccgcggtgatcattattcttatggctatggcgacaatctttggcagattcattactatagagcgagtcgctgagacagtggcagcttttgtattgggtatcagtacgaataaagttattgtattgttgttgatcaatatatttcttctttttgtaggaatggttatggaggcacttgcggcaatcatcattttaacccctattttactgccaatggtctcacagctgggtgtggatcctatacaatttggcgttatcatggtcgtcaatttagcgattggtttcataacaccaccagtcggagttaatttgttcgttgcttccggaatatcaaaagtaagaatagaagaaatcacccgcccagctatcccgcttatcctgggtatgatatttatccttttactggttacctatataccagagatttccttatggcttccttcattaatgcgttaa

SEQ ID NO: 36883 - protein, 624 aa, Desulfitobacterium hafniense DCB-2
MIKEEAQQRKTFSGLLRVLDQRFEEVAIVAGFLFFTILITLQVINRYVLTFADIANINVWSEELARYVFIWVSYIGAALVIKKRANINVDAVTRILPVSFSKVLNLVSSLLTFVLFYILIKGGIATITMQVTNHQVTPAMGIPMYIPYLAVPLGISLMFFRTLQNIIADIKEMSFQSIVLGIAITIILFLPILLVDNINATLLLFAYFILLIIMGVPIAFSLGIATLVTTINSQAIPLDYFSQAAFNGIDSFPIMAIPFFVAAGVIMGSGGLLRRLLNLGNELVGFFPGGLALVTVITCMFFAAISGSGPATVAAVGTMMIPEMKRQGYSVAFSAAIVAAAGSIGVIIPPSNPFVIYGVVGQESVGKLFIAGIIPGVLIGIILMILAYSTSKKNGWKGNKDRIDIIAVLRAAWDAKLALVVPVIILGGIYGGYMTPTEAAAISVTYGLLIGLFVYRDLKFKDMYNCLVESGSTTAVIIILMAMATIFGRFITIERVAETVAAFVLGISTNKVIVLLLINIFLLFVGMVMEALAAIIILTPILLPMVSQLGVDPIQFGVIMVVNLAIGFITPPVGVNLFVASGISKVRIEEITRPAIPLILGMIFILLLVTYIPEISLWLPSLMR

SEQ ID NO: 36884 - DNA, 1875 bp, Desulfitobacterium hafniense DCB-2
  CDS (1)..(1875): transl_table=11
atgctggacattgcaaagaatccagaaaattcctggaaaaaatggctgagatggatcgatgggaattttgaaaaaccatttcttgtaatcggcatgctggcgattattatgctgattacctatcaaactctttatcgttatatcgtttccaatatcaccggcggtacggccattgtgggcttagaagaattagcgcgctttattttcatatggatcacctatttggcgatcccgctggccattaaagggcgcaataatatcagggtcgatattctctatgaccggatttccgaccggtggcagaaaatcagctggatcatggtcgacagctgcatcctcgtcttaacgggtgtgatattctttatggggatcgatcatctgcagatgatgctaaactatcctcagacttccccggcgctcaatatccccttcttttttccctacttaatcctacccattggttttggcttaatgtccatccggtgtatccaggacttggtcaagcaggcgttggaaattggccttaaggataccttgatcggggttttggttacggcggcaattttttctcccctcttcttaaagcccgatgttccggccatggcttggctttttggctattttgtgctttttatctttattggggtgcccattgccatggccttaggcctttccgctttagggacgattctctgtgccaatacgatgcccatcgagtatatatcacaaatttcctttacctccattgatagttttccgattatggccattcccttttttgtggcggcaggtgtcttcatgggggaagggggattatccaagcggctcttaggcctggctgatgaactcctggggtcctttaccgggggcctggccttggctacggttgtcacctgtatgttttttgcggcgatcagcggctcggggccggctacggtagctgccatcggctccctgaccattccggccatggtggaaagagggtattcccgggcctttgcggcggcacttgtggcagcggccggctccatcggggtgatgattcctcccagcaacccctttgtcgtttatggtgtttccgctcaggtctccattggcaaactctttatgggcgggattgttcccggcttgatcattggtttggttttaatgggcatcagttactactattccaaaaagaacggctggaaaggcgaagcccgcaaacgtacctttcgtacagtgggcaaggctttttgggaggccaagtgggccttgatggttccggtgataattttaggcgggatttattccgggtacatgacccctaccgaatcggcggctgtggcagccttttatggactgatcgtcggtgttttcatccacaaagggattaaccgcaagaatattgtctattgcttcacggaatcctgcagtacctccgccgtcattattgccttgatggccatggccacgatcttcggtaatattttgacgattgaacagattcccaccaaaatcgccacctggatgctggcgataaccgacagcaaatacgttattctcctgatcattaccctattgctgctcttcgtgggaaccttcatggaagctttggcggcgattgttattcttaccccgattttactgccgattgtccttcaggtgggtatcgatccgattcacttcggaatcattatggtggtcaacctggcgatcggcttcattacaccaccggttggtgtgaacctgtttgtggcaagcggtttggcgaagctgaagatcgaagagatatccaaagcggtggtccccttcctcttaggcatgatcgccgtactgttgctgatttcttatgtgccttccatttccatgttcctgactcaatttgtgaagtaa

SEQ ID NO: 36885 - protein, 624 aa, Desulfitobacterium hafniense DCB-2
MLDIAKNPENSWKKWLRWIDGNFEKPFLVIGMLAIIMLITYQTLYRYIVSNITGGTAIVGLEELARFIFIWITYLAIPLAIKGRNNIRVDILYDRISDRWQKISWIMVDSCILVLTGVIFFMGIDHLQMMLNYPQTSPALNIPFFFPYLILPIGFGLMSIRCIQDLVKQALEIGLKDTLIGVLVTAAIFSPLFLKPDVPAMAWLFGYFVLFIFIGVPIAMALGLSALGTILCANTMPIEYISQISFTSIDSFPIMAIPFFVAAGVFMGEGGLSKRLLGLADELLGSFTGGLALATVVTCMFFAAISGSGPATVAAIGSLTIPAMVERGYSRAFAAALVAAAGSIGVMIPPSNPFVVYGVSAQVSIGKLFMGGIVPGLIIGLVLMGISYYYSKKNGWKGEARKRTFRTVGKAFWEAKWALMVPVIILGGIYSGYMTPTESAAVAAFYGLIVGVFIHKGINRKNIVYCFTESCSTSAVIIALMAMATIFGNILTIEQIPTKIATWMLAITDSKYVILLIITLLLLFVGTFMEALAAIVILTPILLPIVLQVGIDPIHFGIIMVVNLAIGFITPPVGVNLFVASGLAKLKIEEISKAVVPFLLGMIAVLLLISYVPSISMFLTQFVK

SEQ ID NO: 36886 - DNA, 1305 bp, Ralstonia metallidurans CH34
  CDS (1)..(1305): transl_table=11
atgacgctgatcgccatcattctgttcgtggttttcattggcctgatgctgctgggcgcgccaattggcgtgtcgctggggctgggcggtctggtcgccatcggcctgtcgaacctcgatacgcaaatgttcggcctgctggccgtgccccagaacttctatgccggtcttgccaagtacccgctgctggccattcccatgttcgtgctggtcggttcgatcttcgatcgttccggcgtagcgcaacgactggtcacgttcgccatcgcgatcgtgggccgtggtccgggcatgttgccgctggtggccatcctcgtggcgatgttcctgggcggcatctccggctctggtcccgcgaacgcggccgcggtagggggcgtgatgatcgcggcgatgtcgcgtgcgggctatccgggctcctacagcgccgcggtggttggcgcggcggcggctacggacattctgatcccgccgtcggtggcgttcattatctacagcgtgctggtgccaggcgcatcggtgcccgcgctgttcgccgccggcatgatcccgggcatcctggccggtgtggcgttgatcgttccggccgtctggctggcgcgcaagcacaacatggggcatatcgaagccggcttgccgcgcccgccgttctggaagagcctgcgcgaggccgcatggggcctggtggcgccgttcctgattctgggtggcatgcgcgcgggctggttcacgccgaccgaggccgccgtcgtggccgtggtctacgggttgttcgtcggcatggtgatctatcgcagcattggcgtgcgcgacctgttcacgattttccaggaggcggccgagacatcggcggtgatcctgctggtggtggcgctggccggcatcttcgcctatgcgctgtccacgctcggcgtaatcgacccgctggccaatgccattgcgcattcggggctgggcgagtacggcgtgctggcgctgatcgtgctgttgctgatgaccgtcggcatgttcctggacggcatctcgatcttcctgatcttcgtgccgctgctgctcccgatcgccaccgcgttccactggaatccggtatggtttggcgtggtgctcacgctcaaggtggcgctgggtcagttcaccccgccactggccgtgaacctgatggtgtcgtgccgcatcgcgcgcgtgcgcatggaagagaccgtgccatgggtgatctggatgctgctggcgatgttcgtcgccatgctgatggtgctggcctatccgccgctggccacctggctgcccgactacctgggctattga

SEQ ID NO: 36887 - protein, 434 aa, Ralstonia metallidurans CH34
MTLIAIILFVVFIGLMLLGAPIGVSLGLGGLVAIGLSNLDTQMFGLLAVPQNFYAGLAKYPLLAIPMFVLVGSIFDRSGVAQRLVTFAIAIVGRGPGMLPLVAILVAMFLGGISGSGPANAAAVGGVMIAAMSRAGYPGSYSAAVVGAAAATDILIPPSVAFIIYSVLVPGASVPALFAAGMIPGILAGVALIVPAVWLARKHNMGHIEAGLPRPPFWKSLREAAWGLVAPFLILGGMRAGWFTPTEAAVVAVVYGLFVGMVIYRSIGVRDLFTIFQEAAETSAVILLVVALAGIFAYALSTLGVIDPLANAIAHSGLGEYGVLALIVLLLMTVGMFLDGISIFLIFVPLLLPIATAFHWNPVWFGVVLTLKVALGQFTPPLAVNLMVSCRIARVRMEETVPWVIWMLLAMFVAMLMVLAYPPLATWLPDYLGY

SEQ ID NO: 36888 - DNA, 1278 bp, Paracoccus denitrificans PD1222
  CDS (1)..(1278): transl_table=11
atgatcctcctcgtcttcatcctgtcgcttcttgcagcgatcctgatcggtatcccgatcgccttcggcctgatcctgtccggcatcgtcatgatgtggtggcttggtgcgctggactggcagctgatcgcgctgcagatgaccaatggcgccgacagcttccccctgctggcgatccccttcttcatgctggccggtgaggcgatgaatgccggcggcatttccaagcgccttgtcaacttcggcatgacgcttgtcggccacaagcgcggaggtctgggctatgtgaccatcgtcgcggcgctgctgctggccagcctttccggatccgccgtggctgataccgcagttctggcaggcatgctgctgccgatcatgcggcaggcgggctacgacatcaatcattccggcggtctgatcgcttcgggcggcatcatcgcgccgatcctgcctccttcgatcggctacatcgtcttcggtgtggcgggtggcgtgtcgatcaccaagctgttcatggcgggcattgcccccggcatcatgatggcgctgacccttgccgtcacctggtggttcctttcccggaactccgaggtcagcgtgccgcagcgtgcgccgctgcgcgaggtgctgaaagcagccggtcaggcaagccttgccttcatccttccggtgatcatcatcgtcggtctgaaagccggaatattcaccccgaccgaggccggtgtcgtggcctgtgtctatgcgatcttcatcggtatgttcgtctaccgcgaactgcacccgaagatgctgtatcacgtcatgatcgccgcggttcgcaccacggcctcggtgatgcttctggtcgcggcggcctcgatcaccgcctatctggtggccatcgccaacattcccggcgtgattggcgacatgctcagcggtgtgcgcgaacatccggtgctgctgatgctggtcatcatgacgatcattctggtcgtcggaactgcgctggacttcatcccgaccatcctgatcctgacgcctgtgctgctgccgatcgccaaaagcgcggggatcgatccggtctatttcggtgtcatgttcatcatggcaggcgccatcggcctgctgacgccaccagtgggcgcggtgctgaacgtggtctgcgccgtgggcaacatgcgctacacggatgccgtgcggggtgtcgtgcccttcctgatcgtgcaggccttcctgatcttgctgctggccctgttcccacagctggtgatcgtgcccgcgaactggttctactga

SEQ ID NO: 36889 - protein, 425 aa, Paracoccus denitrificans PD1222
MILLVFILSLLAAILIGIPIAFGLILSGIVMMWWLGALDWQLIALQMTNGADSFPLLAIPFFMLAGEAMNAGGISKRLVNFGMTLVGHKRGGLGYVTIVAALLLASLSGSAVADTAVLAGMLLPIMRQAGYDINHSGGLIASGGIIAPILPPSIGYIVFGVAGGVSITKLFMAGIAPGIMMALTLAVTWWFLSRNSEVSVPQRAPLREVLKAAGQASLAFILPVIIIVGLKAGIFTPTEAGVVACVYAIFIGMFVYRELHPKMLYHVMIAAVRTTASVMLLVAAASITAYLVAIANIPGVIGDMLSGVREHPVLLMLVIMTIILVVGTALDFIPTILILTPVLLPIAKSAGIDPVYFGVMFIMAGAIGLLTPPVGAVLNVVCAVGNMRYTDAVRGVVPFLIVQAFLILLLALFPQLVIVPANWFY

SEQ ID NO: 36890 - DNA, 1281 bp, Actinobacillus succinogenes 130Z
  CDS (1)..(1281)
atgaccattcttatttttttagccagccttgtaggcggtattgtaatcggtgtaccgattgcattctcgctgctgttttcaggcatgatgctgatgttttatctgggcggcttcaattcacagattctttcgcaaaatctgtttaacggtgcggacagcttttctatgatggccattccgttctttgtggttgccggcgatttgatgaaccggggcggattaaccaacaaaatcgttgatgcggcgaccgcacttgtggggcatatccggggcggtttagggtatgtggcgattatcgctattctattgttcgccagtttggtgggaagcgcggtggcgtctactgccgctttaggggcaattttaattccgatgatggcgactatcggttacaaccgtgatcgcgctaccgcgttgattgcggcgggtaatattttatcgccgattatgccgccgtccgtgccgatgattattttcggcgttaccgcgggcgtatccgtaacggatttatttatgggcggtattgcaccggccgtttatattacactgactctttgtgtgatttgggctatcgtttcccgtcgcgattccgccgtaccgttgccgaaaagatcattccgcgaagtggtacgcgctacgcgtgaagcgctttgggcgattttgatgccggtcggtcttttattaggcttgcgtagcggtatgtttacgccgacggaagccggggtggttgcggttgtttatgcgttaatcatcggtttgtttgtgtaccgagaattaactttccaagccattaaagaatgtttcatttcttccgcgaaagccagtgcggcaattatgtttctggccgccgccgcgatggtgtcttcctggctgatgaccatcggtaatattccacgtattgtcacggatttacttcatccgtttatcggttcgccgattctgttaatgcttgtgattgccggtttagtgttgctggtgggaacttcgatggacgtggtaccgactattttgattttaacaccggtattaatgccggcagtgaaacaggcgggaattaatccggtctatttcggggtggtatttattattacctgcgtcttcggtttgttaacgccgccggtaggtacggtattaaacgttgccgccagtacgggtaaaatcaacatggaacgtatcgtgcgcaaagtatggcctttcctgcttgcgattgttgtggtgctgctcgtgttaatcgtattcccgagtacgttcatgataccacttgaattttttactaaataa

SEQ ID NO: 36891 - protein, 426 aa, Actinobacillus succinogenes 130Z
MTILIFLASLVGGIVIGVPIAFSLLFSGMMLMFYLGGFNSQILSQNLFNGADSFSMMAIPFFVVAGDLMNRGGLTNKIVDAATALVGHIRGGLGYVAIIAILLFASLVGSAVASTAALGAILIPMMATIGYNRDRATALIAAGNILSPIMPPSVPMIIFGVTAGVSVTDLFMGGIAPAVYITLTLCVIWAIVSRRDSAVPLPKRSFREVVRATREALWAILMPVGLLLGLRSGMFTPTEAGVVAVVYALIIGLFVYRELTFQAIKECFISSAKASAAIMFLAAAAMVSSWLMTIGNIPRIVTDLLHPFIGSPILLMLVIAGLVLLVGTSMDVVPTILILTPVLMPAVKQAGINPVYFGVVFIITCVFGLLTPPVGTVLNVAASTGKINMERIVRKVWPFLLAIVVVLLVLIVFPSTFMIPLEFFTK

SEQ ID NO: 36892 - DNA, 1293 bp, Actinobacillus succinogenes 130Z
  CDS (1)..(1293)
atggacgttattattcctatttctattctattgtttctctttgttattggaacaccggtcgctttctgtattttttgttcaacattaatctattttttaatgagtaatttacctatggtaatgttgattcaacgactagctggcggtttggaaagcgttactttacttgcgattcctttcttcattatggctggagtatttatgaatcacacagggattagtgaacgattactcaagttttgtgaagtattaacggggcatatgagtggcggtttggctcaggttaatgtcgcattgagcacattaatgggcggtttatccggttcgaatattgcggatgccgcaatgaactcgaaattacttgtacctcaaatggttgcgcgtggttatagtgcttcattttctgcagccgtaacagctgccggatcgctcattacccctattattccgcccggtatagcgatgattatttatggttatgtcaataatgtttctattgggcgtttatttttagcgggtattgtccccggaaccctgctttgtatcatgatgatggttttggtttccattatttctaaaaagcgaggttatttgcctattcgagaaaagcgtgcaagctgtaaagaaatcattgtttcggctaaagatgcggtattggctcttttactgccaattatcattattggcggtattcgaatggggatttttacacctactgaggctggggctgttgcggtgatttatgcattaatactaggcatgtttatttatcgcaatatggatttgaaaaaactttggctggcaacccgagaatcggcattaggcgcggcgaacgtattgttaataatctgtgtcgccgtagcattctcaaaattcttgacttgggagcgtgtgccgcaaactcttgcgagctggatgacaacagtggttgatagtccgattacgttcttaatgctggttaatgttgctttattgattttaggtatgtttttagaaggtaatgcgatcatgatcgtattggcgccgttacttgcgccaattgcacattcatttggcattgatcctattcatttcggtattgtttttattttcaacggggcaattgggacgattacgcctccattaggaaccgtaatgtttacaacgtgttctattaccgaagttcctattgagaaatttatcaaagatgtcttaccgttttggggactccttatattggaactcattctattaacttatattccgacaatcaccacttggctgcctaatttagtttatggcgtagcacaataa

SEQ ID NO: 36893 - protein, 430 aa, Actinobacillus succinogenes 130Z
MDVIIPISILLFLFVIGTPVAFCIFCSTLIYFLMSNLPMVMLIQRLAGGLESVTLLAIPFFIMAGVFMNHTGISERLLKFCEVLTGHMSGGLAQVNVALSTLMGGLSGSNIADAAMNSKLLVPQMVARGYSASFSAAVTAAGSLITPIIPPGIAMIIYGYVNNVSIGRLFLAGIVPGTLLCIMMMVLVSIISKKRGYLPIREKRASCKEIIVSAKDAVLALLLPIIIIGGIRMGIFTPTEAGAVAVIYALILGMFIYRNMDLKKLWLATRESALGAANVLLIICVAVAFSKFLTWERVPQTLASWMTTVVDSPITFLMLVNVALLILGMFLEGNAIMIVLAPLLAPIAHSFGIDPIHFGIVFIFNGAIGTITPPLGTVMFTTCSITEVPIEKFIKDVLPFWGLLILELILLTYIPTITTWLPNLVYGVAQ

SEQ ID NO: 36894 - DNA, 1362 bp, Enterobacter sakazakii
  CDS (1)..(1362): transl_table=11
atgggaacaattctggaactcctcacgggagccgtggttattgtgggggtcgcacgttatatcattaaaggttattccgccacgggcgtactctttgttggcggtattaccctgttaataattagcgcgctaatgggtcacgccatattgcccgccaaagaaacgagtaccggttacgctatcagcgatatttttgaatatattaaaattctgctgatgagccgcggcggcgatctcggcatgatgattatgatgctgtgtggtttcgcggcgtatatgacgcataccggtgccaacgatatggtggtcaagctcgcctcccgcccgctgcgttatatcaattcaccttatttactgatgattgccgcctatttcgtcgcctgcctgatgtcgcttgccgtctcgtccgcgaccggccttggcgtgttgctgatggcgacgctgttcccggtcatggtcaatgtcggtatcagccgcggcgcggcggcggctatctgcgcctctccggcggcgattattctctccccaacctctggtgatgtggtgctggccgcacaggcctctgaaatgccgcttatcgattttgcgtttaaaaccacactgccgatttccatcgcggccattatctgcatggctgtcgcccacttcttctggcagcgctttctggataaaaaagagcacatctatcacgaaacgctggaggtaaaagaaatcaccaccagcgcgcccgctttttacgcgattctgccgttcagcccgatcattggcgtgctgattttcgacggcaaatgggggccgcaactgcatatcatcaccattctggtgatctgcatggtgctgaccgccgtgattgaatttatccgcagctttaacagtaaaacggtgtttgccgggctggaagtggcgtaccgcggcatggcggacgcgtttgcaggcgtggtgatcctgctggtcgccgccggcgttttcgcccaggggctcagcgcgataggctttatccagagccttatctctatcgccacctcgtttggctcggccagcattatcctgatgctggtgctggtcacgctcaccatgcttgcggcgatgacgaccggctccggcaacgcgccgttttacgccttcgttgagatgatcccaaaactcgcgcacagcgccggggtgaatccggcctatctgacgatcccgatgctgcaggcgtccaacctgggacgcaccatttcaccggtttccggtgtggtggtggcggtcgcggggatggcgaaaatctcaccgtttgaagtcgttaaacgcacctcggtgcctgtgctggttggattaatcgtcgtgatcctggcgacgcaactgctggttgcggcataa

SEQ ID NO: 36895 - protein, 453 aa, Enterobacter sakazakii
MGTILELLTGAVVIVGVARYIIKGYSATGVLFVGGITLLIISALMGHAILPAKETSTGYAISDIFEYIKILLMSRGGDLGMMIMMLCGFAAYMTHTGANDMVVKLASRPLRYINSPYLLMIAAYFVACLMSLAVSSATGLGVLLMATLFPVMVNVGISRGAAAAICASPAAIILSPTSGDVVLAAQASEMPLIDFAFKTTLPISIAAIICMAVAHFFWQRFLDKKEHIYHETLEVKEITTSAPAFYAILPFSPIIGVLIFDGKWGPQLHIITILVICMVLTAVIEFIRSFNSKTVFAGLEVAYRGMADAFAGVVILLVAAGVFAQGLSAIGFIQSLISIATSFGSASIILMLVLVTLTMLAAMTTGSGNAPFYAFVEMIPKLAHSAGVNPAYLTIPMLQASNLGRTISPVSGVVVAVAGMAKISPFEVVKRTSVPVLVGLIVVILATQLLVAA

SEQ ID NO: 36896 - DNA, 1203 bp, Shigella flexneri
  CDS (1)..(1203): transl_table=11
atggatatcgttgaatacgttaaaatattactaatgagccgcggcggcgacctcggcatgatgattatgatgctgtgtggctttgccgcttacatgacccatatcggcgcgaatgatatggtggtcaagctggcgtcaaaaccattgcagtatattaactccccttacctgctgatgattgccgcctattttgttgcttgtctgatgtcactggccgtctcttccgcaaccggtctgggggttttgctgatggcaaccctgtttccggtgatggtaaacgttggtatcagtcgtggcgcagcagctgccatttgtgcctccccggcggcgattattctcgcaccgacttcaggggatgtggtgctggcggcgcaggcttccgaaatgtcgctgattgacttcgccttcaaaacgacgctgcctatctcaattgctgcaattatcggcatggcgatcgcccacttcttctggcaacgttatctggataaaaaagagcacatctctcatgaaatgttagatgtcagtgaaatcaccaccactgcccccgcgttttatgccattttgccgttcacgccgatcatcggtgtactgatttttgacggtaaatggggtccgcaattacacatcatcactattctggtgatttgtatgctgattgcctccattctggagttcctccgcagctttaatacccagaaagttttctctggtctggaagtggcttatcgcgggatggcagatgcgtttgctaacgtggtgatgctgctggttgccgctggggtattcgctcaggggcttagcaccatcggctttattcaaagtctgatttctatcgctacctcgtttggttcggcgagtatcatcctgatgctggtattggtgattctgaccatgctggcggcagtcacgaccggttcaggcaatgcgccgttttatgcgtttgttgagatgatcccgaaactggcgcactcttccggcattaacccggcgtatttgactatcccgatgctgcaggcgtcaaacctgggtcgtaccctatcacccgtttctggcgtagtcgttgcggttgccgggatggcgaaaatctcaccatttgaagtcgtaaaacgcacctcggtgccggtgcttgttgggctagtgattgttatcgttgctacagagctgatggtgccaggaacggcagcagcggtcacaggcaagtaa

SEQ ID NO: 36897 - protein, 400 aa, Shigella flexneri
MDIVEYVKILLMSRGGDLGMMIMMLCGFAAYMTHIGANDMVVKLASKPLQYINSPYLLMIAAYFVACLMSLAVSSATGLGVLLMATLFPVMVNVGISRGAAAAICASPAAIILAPTSGDVVLAAQASEMSLIDFAFKTTLPISIAAIIGMAIAHFFWQRYLDKKEHISHEMLDVSEITTTAPAFYAILPFTPIIGVLIFDGKWGPQLHIITILVICMLIASILEFLRSFNTQKVFSGLEVAYRGMADAFANVVMLLVAAGVFAQGLSTIGFIQSLISIATSFGSASIILMLVLVILTMLAAVTTGSGNAPFYAFVEMIPKLAHSSGINPAYLTIPMLQASNLGRTLSPVSGVVVAVAGMAKISPFEVVKRTSVPVLVGLVIVIVATELMVPGTAAAVTGK

SEQ ID NO: 36898 - DNA, 1206 bp, Edwardsiella ictaluri
  CDS (1)..(1206): transl_table=11
atgtcgaccggctggcgcgcgaccgatatcgttgagtatgtaaaagttctgctgatgagtcgcggcggcgacctcggcatgatgatcatgatgctgtgcggttttgccgcctatatgacccatatcggtgccaacgatatggtggtcaagctggcctcccgcccgctgcgctatattaactcgccctatattttaatgattgcggcctactttgtcgcctgcctgatgtcgctggccgtttcgtcggccaccgggctgggagtattgctgatggcaaccctgttcccggtgatggtcaacgtggggatcagccggggggcggcggcggcgatctgtgcctcgcctgcggcgatcatcctggctccgacctccggcgatgtggtgctggcagccaaggcgtccgaaatgccgctgatcgactttgcctttaaaacaaccctgcccatctccatcatcgctatcgtctgtatggcgattgcccactacttctggcagcgctacctggacaacaaggagcaggcgcagcacgagatactggacgtcaacgagatcaccaccacggcaccctcgttttatgccattctgccctttacgccgatcatcggcgtgctggtgttcgacggtaagtgggggccacatctgcacatcatcagcgtcctggttatctgtatgctgctggcctcggtgactgagtttttgcgcagcttcgacgctaaaaaggtctatagcgggctggaggtggcctaccgcgggatggcggacgcctttgccagcgtggtgatgctgttggtggccgccggggtctttgcccaggggctgagcaccgtcggctttatcagcagcctgatcgagctggcccagtcctttggcaccggtggcatcatcatgatgctggtgctggtggtgatcaccatgctggcggcgatgaccaccggctccggcaacgcgccgttctacgcctttgtcgagttgatccccaagctgtccggccagatgggcatcaacccggcctacctgaccattccgatgctgcaggcctccaatctgggccgcaccctatcgccggtttccggtgtggtggtggctgtctccgggatggccaagatctccccctttgaggtggttaaacgcacctcggtgccggtgctggtcggcctggtggtggtgatcgtcgccaccgagtttatggtaccgctgcaccgctga

SEQ ID NO: 36899 - protein, 401 aa, Edwardsiella ictaluri
MSTGWRATDIVEYVKVLLMSRGGDLGMMIMMLCGFAAYMTHIGANDMVVKLASRPLRYINSPYILMIAAYFVACLMSLAVSSATGLGVLLMATLFPVMVNVGISRGAAAAICASPAAIILAPTSGDVVLAAKASEMPLIDFAFKTTLPISIIAIVCMAIAHYFWQRYLDNKEQAQHEILDVNEITTTAPSFYAILPFTPIIGVLVFDGKWGPHLHIISVLVICMLLASVTEFLRSFDAKKVYSGLEVAYRGMADAFASVVMLLVAAGVFAQGLSTVGFISSLIELAQSFGTGGIIMMLVLVVITMLAAMTTGSGNAPFYAFVELIPKLSGQMGINPAYLTIPMLQASNLGRTLSPVSGVVVAVSGMAKISPFEVVKRTSVPVLVGLVVVIVATEFMVPLHR

SEQ ID NO: 36900 - DNA, 1380 bp, Vibrio cholerae
  CDS (1)..(1380): transl_table=11
ttggagattgctatgcttgagcttctgattggcttagtcgtgacctttgcggtcggctatttcatcgttaaaggctataagcctgcgggtatcctactcaccgcagggattttgctactcattttaaccggtatcttgggacacaaagtcctacctggacagatggaatcaaccggtaacctactcaccgatgcaatggagtatgtgaaatacatgctgcaaaaccgtggcggcggcttaggtatgcaaattatgttgctgtgtggttttgcgtcatacatgacgcacatcggtgccaacaacgtagtggtaaaacagttttctaaaccactctcttttattaaatcaccctacatcttgttggtcgcggcctatcttgttgcctgtttgatgtctctggccgtgagttcagccaccggccttggcgtgttattaatggcgaccttattcccaatgatgaccgcgatgggcatttctcgccctgcggcagtagcggtgtgtgcctctccggctgcgatcattctctctcctacctctggtgacgtggtcattgcggcagaaaaatccggtttgccattgcacgtattcgccgtagaaaccgtattgcctgtttcgatctgcgcgatcattgtgatggcggccgccgcgtatttctggaaccaataccttgataaaaaagataatacaccaatggagaaagtggatttgtcggaaatggaggttaaatcaccagcctattatgcagtcctgccattcttacccatcatcggtgtgtttgtgttcaatggtgaaacgctgcctggcattacgctggatatctataccatcgttgtactgtcaattttcattggcgtgctggtcgactacatcactaaacgtttcaacggtaagcaaacattggaagatcttgaagcctgttacgaaggcatggcggatgcctttaaaggcgtagtcatgttgttggttgcagcaggcgtatttgcacaaggtttgatgtcgattggtgcgattgacaacctactgcacttagcagaagtagcgggggctggcggtattgctctgatgttgattctgactggtttaaccgtcgccgctgcgattgccaccggctcaggcaacgcgcctttctatgcgtttgtggaattggctccgtcactggctgcgaaaatgggactcaaccccgcattcctgattattcctatgctgcaagcctccaaccttggccgtaccatttctccggtttctggtgtggtagtagctaccgcgggtatgggtaaaatcagcccattcgaagtggtaaagcgtacttctgtgcctgtgttactgggccttgttacggtgatcatcggtactatggtgctggtacctatgcacgcttaa

SEQ ID NO: 36901 - protein, 459 aa, Vibrio cholerae
MEIAMLELLIGLVVTFAVGYFIVKGYKPAGILLTAGILLLILTGILGHKVLPGQMESTGNLLTDAMEYVKYMLQNRGGGLGMQIMLLCGFASYMTHIGANNVVVKQFSKPLSFIKSPYILLVAAYLVACLMSLAVSSATGLGVLLMATLFPMMTAMGISRPAAVAVCASPAAIILSPTSGDVVIAAEKSGLPLHVFAVETVLPVSICAIIVMAAAAYFWNQYLDKKDNTPMEKVDLSEMEVKSPAYYAVLPFLPIIGVFVFNGETLPGITLDIYTIVVLSIFIGVLVDYITKRFNGKQTLEDLEACYEGMADAFKGVVMLLVAAGVFAQGLMSIGAIDNLLHLAEVAGAGGIALMLILTGLTVAAAIATGSGNAPFYAFVELAPSLAAKMGLNPAFLIIPMLQASNLGRTISPVSGVVVATAGMGKISPFEVVKRTSVPVLLGLVTVIIGTMVLVPMHA

SEQ ID NO: 36902 - DNA, 1368 bp, Escherichia coli
  CDS (1)..(1368): transl_table=11
atgttcggcataattatatctgtcatcgtattaattacgatgggctatttgatcctgaaaaactacaaacctcaggtggtgctggctgccgcaggtatcttcctgatgatgtgcggtgtctggttagggttcggtggtgtactcgatcccaccaaaagcagcggctacttgatcgtcgatatttataatgaaatcctgcgcatgctgtccaaccgcattgccggattggggctgtcgattatggcggtgggcggttatgcccgctacatggagcgcataggggccagtcgcgcgatggtgagcttgttaagccgcccgttaaaactcattcgctcgccgtatattattctgtcggcaacttacgtcatcggccaaatcatggcgcagtttattaccagcgcctccggtctgggtatgttgctgatggtcaccttatttccgacgctggtgagtctgggagtaagtcgtctctctgcggtggcagttatcgcaaccacgatgtccattgagtgggggattctggaaacgaactccatttttgctgcccaggtagcgggaatgaaaattgccacatacttcttccactaccagcttccggtcgcctcttgcgtcattatctcggtggcgatctcccactttttcgtgcaacgcgcttttgacaaaaaagataaaaatatcaatcacgaacaggcagagcaaaaagctctcgataatgtcccgccgctctattacgccattttacctgtgatgccgttaatcctgatgctcggctcgctgttcctcgcccacgtcgggctgatgcagtcagaactgcatctggtggtggtgatgttactgagtttgactgtgacgatgtttgttgagttcttccgcaagcataacttgcgcgaaacaatggacgatgtgcaggcgttttttgacggcatgggtacgcagtttgccaacgtggtaacgctggtggtcgcgggtgaaatatttgcgaaaggcttaacgacgattggcactgtcgatgcggttatcaggggggcggagcattctggtctgggcggtattggcgtgatgattattatggcgctggtcattgccatttgtgccattgtgatgggctctggcaatgcgccgtttatgtcatttgccagtcttattccgaatatcgcagccggactacatgtaccagcggttgtaatgattatgccgatgcattttgccacgacgctagcgcgcgcggtttcgccgattactgcggtggtggtcgttacgtcaggaattgcaggcgtttcgccttttgcggtggtgaagcggacagcgatccccatggcagtcggtttcgtggtgaatatgattgccacaatcacgctattttattaa

SEQ ID NO: 36903 - protein, 455 aa, Escherichia coli
MFGIIISVIVLITMGYLILKNYKPQVVLAAAGIFLMMCGVWLGFGGVLDPTKSSGYLIVDIYNEILRMLSNRIAGLGLSIMAVGGYARYMERIGASRAMVSLLSRPLKLIRSPYIILSATYVIGQIMAQFITSASGLGMLLMVTLFPTLVSLGVSRLSAVAVIATTMSIEWGILETNSIFAAQVAGMKIATYFFHYQLPVASCVIISVAISHFFVQRAFDKKDKNINHEQAEQKALDNVPPLYYAILPVMPLILMLGSLFLAHVGLMQSELHLVVVMLLSLTVTMFVEFFRKHNLRETMDDVQAFFDGMGTQFANVVTLVVAGEIFAKGLTTIGTVDAVIRGAEHSGLGGIGVMIIMALVIAICAIVMGSGNAPFMSFASLIPNIAAGLHVPAVVMIMPMHFATTLARAVSPITAVVVVTSGIAGVSPFAVVKRTAIPMAVGFVVNMIATITLFY

SEQ ID NO: 36904 - DNA, 24 bp, Artificial sequence
  Primer sequence
atgctgacattcattgagctcctt

SEQ ID NO: 36905 - DNA, 22 bp, Artificial sequence
  Primer sequence
ttacttgcctgtgaccgctgct

SEQ ID NO: 36906 - protein, 498 aa, Artificial sequence
  Consensus
  Variant (2)..(10): Xaa in position 2 to 10 is any amino acid
  Variant (13)..(24): Xaa in position 13 to 24 is any amino acid
  Variant (25)..(25): Xaa in position 25 is any or no amino acid
  Variant (27)..(27): Xaa in position 27 is any amino acid
  Variant (29)..(44): Xaa in position 29 to 44 is any amino acid
  Variant (45)..(74): Xaa in position 45 to 74 is any or no amino acid
  Variant (76)..(76): Xaa in position 76 is any amino acid
  Variant (78)..(83): Xaa in position 78 to 83 is any amino acid
  Variant (85)..(86): Xaa in position 85 to 86 is any amino acid
  Variant (88)..(90): Xaa in position 88 to 90 is any amino acid
  Variant (92)..(95): Xaa in position 92 to 95 is any amino acid
  Variant (98)..(103): Xaa in position 98 to 103 is any amino acid
  Variant (105)..(109): Xaa in position 105 to 109 is any amino acid
  Variant (110)..(112): Xaa in position 110 to 112 is any or no amino acid
  Variant (114)..(129): Xaa in position 114 to 129 is any amino acid
  Variant (132)..(132): Xaa in position 132 is any or no amino acid
  Variant (134)..(136): Xaa in position 134 to 136 is any amino acid
  Variant (137)..(139): Xaa in position 137 to 139 is any or no amino acid
  Variant (141)..(143): Xaa in position 141 to 143 is any amino acid
  Variant (145)..(145): Xaa in position 145 is any amino acid
  Variant (147)..(147): Xaa in position 147 is any amino acid
  Variant (149)..(151): Xaa in position 149 to 151 is any amino acid
  Variant (153)..(157): Xaa in position 153 to 157 is any amino acid
  Variant (159)..(162): Xaa in position 159 to 162 is any amino acid
  Variant (163)..(164): Xaa in position 163 to 164 is any or no amino acid
  Variant (166)..(172): Xaa in position 166 to 172 is any amino acid
  Variant (173)..(173): Xaa in position 173 is any or no amino acid
  Variant (175)..(179): Xaa in position 175 to 179 is any amino acid
  Variant (181)..(187): Xaa in position 181 to 187 is any amino acid
  Variant (188)..(196): Xaa in position 188 to 196 is any or no amino acid
  Variant (198)..(211): Xaa in position 198 to 211 is any amino acid
  Variant (212)..(212): Xaa in position 212 is any or no amino acid
  Variant (214)..(238): Xaa in position 214 to 238 is any amino acid
  Variant (239)..(267): Xaa in position 239 to 267 is any or no amino acid
  Variant (269)..(269): Xaa in position 269 is any amino acid
  Variant (271)..(271): Xaa in position 271 is any amino acid
  Variant (273)..(273): Xaa in position 273 is any amino acid
  Variant (275)..(276): Xaa in position 275 to 276 is any amino acid
  Variant (278)..(281): Xaa in position 278 to 281 is any amino acid
  Variant (282)..(308): Xaa in position 282 to 308 is any or no amino acid
  Variant (310)..(314): Xaa in position 310 to 314 is any or no amino acid
  Variant (318)..(318): Xaa in position 318 is any amino acid
  Variant (319)..(320): Xaa in position 319 to 320 is any or no amino acid
  Variant (322)..(324): Xaa in position 322 to 324 is any amino acid
  Variant (326)..(343): Xaa in position 326 to 343 is any amino acid
  Variant (344)..(354): Xaa in position 344 to 354 is any or no amino acid
  Variant (357)..(357): Xaa in position 357 is any amino acid
  Variant (360)..(361): Xaa in position 360 to 361 is any amino acid
  Variant (363)..(363): Xaa in position 363 is any amino acid
  Variant (365)..(368): Xaa in position 365 to 368 is any amino acid
  Variant (370)..(377): Xaa in position 370 to 377 is any amino acid
  Variant (379)..(398): Xaa in position 379 to 398 is any amino acid
  Variant (399)..(408): Xaa in position 399 to 408 is any or no amino acid
  Variant (410)..(426): Xaa in position 410 to 426 is any amino acid
  Variant (428)..(435): Xaa in position 428 to 435 is any amino acid
  Variant (437)..(443): Xaa in position 437 to 443 is any amino acid
  Variant (445)..(451): Xaa in position 445 to 451 is any amino acid
  Variant (454)..(457): Xaa in position 454 to 457 is any amino acid
  Variant (458)..(459): Xaa in position 458 to 459 is any or no amino acid
  Variant (462)..(462): Xaa in position 462 is any amino acid
  Variant (463)..(472): Xaa in position 463 to 472 is any or no amino acid
  Variant (474)..(475): Xaa in position 474 to 475 is any or no amino acid
  Variant (477)..(477): Xaa in position 477 is any amino acid
  Variant (478)..(480): Xaa in position 478 to 480 is any or no amino acid
  Variant (482)..(482): Xaa in position 482 is any amino acid
  Variant (484)..(488): Xaa in position 484 to 488 is any amino acid
  Variant (490)..(497): Xaa in position 490 to 497 is any amino acid
LXXXXXXXXXIIXXXXXXXXXXXXXLXLXXXXXXXXXXXXXXXXXXXXXXXXXXXXXXXXXXXXXXXXXXXXXXMXIXXXXXXAXXMXXXGXXXXLVXXXXXXLXXXXXXXXLXXXXXXXXXXXXXXXXSAXGXXXXXXLXXXLXPXMXXXGXXXXXAXXXXXXAXXXXXXXXPXXXXXIXXXXXXXXXXXXXXXXIXXXXXXXXXXXXXXXIXXXXXXXXXXXXXXXXXXXXXXXXXXXXXXXXXXXXXXXXXXXXXXXXXXXXXXLXPXLXIXXLXXXXXXXXXXXXXXXXXXXXXXXXXXXXXXXLXXXXXLLIXXXIXXXLXXXXXXXXXXXXXXXXXXXXXXXXXXXXXVVXLIXXAXVXXXXLXXXXXXXXLXXXXXXXXXXXXXXXXXXXXXXXXXXXXXXLXXXXXXXXXXXXXXXXXLXXXXXXXXGXXXXXXXIXXXXXXXIGXXXXXXPVXXXXXXXXXXXIXXVXXXXVXKXXXXXMXXXXXXXXL

SEQ ID NO: 36907 - protein, 22 aa, Artificial sequence
  Consensus
  Variant (2)..(17): Xaa in position 2 to 17 is any amino acid
  Variant (18)..(18): Xaa in position 18 is any or no amino acid
  Variant (20)..(21): Xaa in position 20 to 21 is any or no amino acid
LXXXXXXXXXXXXXXXXXSXXA

SEQ ID NO: 36908 - protein, 6 aa, Artificial sequence
  Consensus
  Variant (2)..(3): Xaa in position 2 to 3 is any amino acid
  Variant (4)..(5): Xaa in position 4 to 5 is any or no amino acid
PXXXXI

SEQ ID NO: 36909 - protein, 32 aa, Artificial sequence
  Consensus
  Variant (2)..(23): Xaa in position 2 to 23 is any amino acid
  Variant (24)..(26): Xaa in position 24 to 26 is any or no amino acid
  Variant (28)..(28): Xaa in position 28 is any amino acid
  Variant (29)..(29): Xaa in position 29 is any or no amino acid
  Variant (31)..(31): Xaa in position 31 is Phe, Ile, Leu, Met or Val
  Variant (32)..(32): Xaa in position 32 is Ala, Gly, Ile, Leu or Val
PXXXXXXXXXXXXXXXXXXXXXXXXXTXXPXX

SEQ ID NO: 36910 - DNA, 1284 bp, Escherichia coli K12
  CDS (1)..(1284): transl_table=11
atggctgatacaaaagcaaaactcaccctcaacggggatacagctgttgaactggatgtgctgaaaggcacgctgggtcaagatgttattgatatccgtactctcggttcaaaaggtgtgttcacctttgacccaggcttcacttcaaccgcatcctgcgaatctaaaattacttttattgatggtgatgaaggtattttgctgcaccgcggtttcccgatcgatcagctggcgaccgattctaactacctggaagtttgttacatcctgctgaatggtgaaaaaccgactcaggaacagtatgacgaatttaaaactacggtgacccgtcataccatgatccacgagcagattacccgtctgttccatgctttccgtcgcgactcgcatccaatggcagtcatgtgtggtattaccggcgcgctggcggcgttctatcacgactcgctggatgttaacaatcctcgtcaccgtgaaattgccgcgttccgcctgctgtcgaaaatgccgaccatggccgcgatgtgttacaagtattccattggtcagccatttgtttacccgcgcaacgatctctcctacgccggtaacttcctgaatatgatgttctccacgccgtgcgaaccgtatgaagttaatccgattctggaacgtgctatggaccgtattctgatcctgcacgctgaccatgaacagaacgcctctacctccaccgtgcgtaccgctggctcttcgggtgcgaacccgtttgcctgtatcgcagcaggtattgcttcactgtggggacctgcgcacggcggtgctaacgaagcggcgctgaaaatgctggaagaaatcagctccgttaaacacattccggaatttgttcgtcgtgcgaaagacaaaaatgattctttccgcctgatgggcttcggtcaccgcgtgtacaaaaattacgacccgcgcgccaccgtaatgcgtgaaacctgccatgaagtgctgaaagagctgggcacgaaggatgacctgctggaagtggctatggagctggaaaacatcgcgctgaacgacccgtactttatcgagaagaaactgtacccgaacgtcgatttctactctggtatcatcctgaaagcgatgggtattccgtcttccatgttcaccgtcattttcgcaatggcacgtaccgttggctggatcgcccactggagcgaaatgcacagtgacggtatgaagattgcccgtccgcgtcagctgtatacaggatatgaaaaacgcgactttaaaagcgatatcaagcgttaa

SEQ ID NO: 36911 - protein, 427 aa, Escherichia coli K12
MADTKAKLTLNGDTAVELDVLKGTLGQDVIDIRTLGSKGVFTFDPGFTSTASCESKITFIDGDEGILLHRGFPIDQLATDSNYLEVCYILLNGEKPTQEQYDEFKTTVTRHTMIHEQITRLFHAFRRDSHPMAVMCGITGALAAFYHDSLDVNNPRHREIAAFRLLSKMPTMAAMCYKYSIGQPFVYPRNDLSYAGNFLNMMFSTPCEPYEVNPILERAMDRILILHADHEQNASTSTVRTAGSSGANPFACIAAGIASLWGPAHGGANEAALKMLEEISSVKHIPEFVRRAKDKNDSFRLMGFGHRVYKNYDPRATVMRETCHEVLKELGTKDDLLEVAMELENIALNDPYFIEKKLYPNVDFYSGIILKAMGIPSSMFTVIFAMARTVGWIAHWSEMHSDGMKIARPRQLYTGYEKRDFKSDIKR

SEQ ID NO: 36912 - DNA, 1302 bp, Mesorhizobium loti MAFF303099
  CDS (1)..(1302): transl_table=11
gtgggcggcgcgaaccaagaggctacggcaacgcttcaattcgctggcaagacccatgaattcaaggtgcgaagcggctccgtcggacccgacgtcatcgacatcgcctcgctctacagcacgaccggcgccttcacctacgaccccggcttcacttcgacggcaagctgcgagtccgaaatcaccttcatcgacggcgacgccggtattctcctccaccgcggctatccgatcgaccagttggccgaacacggcgacttcctcgaagtctgctacctcctgctctacggcgaattgccgaccaaggcgcagaaggacgatttcgattaccgcgtgacgcgccacaccatggtgcacgagcagatgtcgcgcttcttcaccggtttccgccgcgacgcgcacccgatggcggtgatgtgcggcgtggtgggcgcgctgtcggccttctatcacgactccaccgacatctcggacccctaccagcgcatggtcgcctcgatgcgtctgatcgccaagatgccgacgatcgcggccatggcctacaagtaccacatcggccagcccttcatttacccaaagaacgatctcggcttcgcggcaaacttcctgcatatgtgctttgccgtgccgtgcgaagagtacaagatcaacccggtgctggcgcgcgccatggagcgcatcttcatcctgcacgcagatcacgagcagaacgcctcgacctcgacggttcgcctcgccggctcgtcgggcgccaacccgttcgcctgcatcgccgccggcatcgcttgcttgtggggcccggcccatggcggtgccaatgaagcggcgctcaacatgctgggcgagatcggccatgtcgatcacatcccggagttcatcgcccgcgccaaggacaagaacgacccgttccggctgatgggctttggccaccgcgtctacaagaactacgatcctcgtgcgaaaatcatgcagaagacggcgcacgaggttctgggcgaactcggcatcaaggacgatccgctgctcgacatcgccatggaactggaaaagatcgcgctgaccgatccctatttcatcgagaagaagctgtatccgaatgtcgacttctattccggcatcacgctgaaggcgctgggcttccccaccaccatgttcaccgttctgttcgcggtcgcccgcaccgtcggctggatcgcgcagtggaaagagatgatcgaggacccgcgccagaagattggccgcccgcgccagctctacacgggtgcgccggagcgcgactacgtgccgatcgccaagcgctga

SEQ ID NO: 36913 - protein, 433 aa, Mesorhizobium loti MAFF303099
MGGANQEATATLQFAGKTHEFKVRSGSVGPDVIDIASLYSTTGAFTYDPGFTSTASCESEITFIDGDAGILLHRGYPIDQLAEHGDFLEVCYLLLYGELPTKAQKDDFDYRVTRHTMVHEQMSRFFTGFRRDAHPMAVMCGVVGALSAFYHDSTDISDPYQRMVASMRLIAKMPTIAAMAYKYHIGQPFIYPKNDLGFAANFLHMCFAVPCEEYKINPVLARAMERIFILHADHEQNASTSTVRLAGSSGANPFACIAAGIACLWGPAHGGANEAALNMLGEIGHVDHIPEFIARAKDKNDPFRLMGFGHRVYKNYDPRAKIMQKTAHEVLGELGIKDDPLLDIAMELEKIALTDPYFIEKKLYPNVDFYSGITLKALGFPTTMFTVLFAVARTVGWIAQWKEMIEDPRQKIGRPRQLYTGAPERDYVPIAKR

SEQ ID NO: 36914 - DNA, 1104 bp, Thermotoga maritima MSB8
  CDS (1)..(1104): transl_table=11
ttgatacaaaagggactggaaggcgtcaaaatatgtgaaagttcgatatgctatctggatggcatcaacggaaggctctactaccgaggaataccggttgaggaactcgcggaaaaatcgaccttcgaagaaacggcctactttctctggtacggaaagcttcccacaaagagtgagcttgaagaattcaaaaggaaaatggcagattacagagagcttcctgcagaagcccttggaattctttaccatcttccgaaaaaccttcattacattgatgttttgaagatattcctttctattcacggttccatggatgggaacgatgaggatctcagagaaaaagccatcagggttgccagcgtctttcccacaatactggcgtattactacagatactctaaaggaaaagaactgataaggccaagaaaagacttatcacacgttgagaacttctactacatgatgttcggagagagaaacgaaaagatccgtcttctggaatctgcgttcattcttctcatggagcaggatataaacgcttccacctttgccgcgctcgtgatagcctccacactctccgatctttattcctgtattgtaggggctctcggtgcactcaagggtcctctccacggtggtgcaagtgaaaaggttccacccatgctggaagagatcggaagcgaagacagggtggaagagttcgttcaaaagtgtctgaaagagaaaagaaagatcatgggattcgggcatcgagtttacaaaacttacgatccgagagcggtgtttttgaagagagtccttcaggaacactttccagatagcaaactgttcagaatcgccagcaagctggaagaatacatcgtttccaacaagatcaaaaacatatacccgaatgtggatctgtattcgagcgttctcttcgaagaactcggttttccaaggaacatgttcactgccctgtttgcaactgcgcgtgttgtcggatggaccgctcatgtgatcgaatacgtgagtgacaacaagctgatcagaccaaccagtgagtacgtgggtcctatggatgtcgaatacattcctatcgagcggagggatgagaatgggtaa

SEQ ID NO: 36915 - protein, 367 aa, Thermotoga maritima MSB8
MIQKGLEGVKICESSICYLDGINGRLYYRGIPVEELAEKSTFEETAYFLWYGKLPTKSELEEFKRKMADYRELPAEALGILYHLPKNLHYIDVLKIFLSIHGSMDGNDEDLREKAIRVASVFPTILAYYYRYSKGKELIRPRKDLSHVENFYYMMFGERNEKIRLLESAFILLMEQDINASTFAALVIASTLSDLYSCIVGALGALKGPLHGGASEKVPPMLEEIGSEDRVEEFVQKCLKEKRKIMGFGHRVYKTYDPRAVFLKRVLQEHFPDSKLFRIASKLEEYIVSNKIKNIYPNVDLYSSVLFEELGFPRNMFTALFATARVVGWTAHVIEYVSDNKLIRPTSEYVGPMDVEYIPIERRDENG

SEQ ID NO: 36916 - DNA, 1296 bp, Vibrio cholerae O1 biovar eltor str. N16961
  CDS (1)..(1296): transl_table=11
atggttatggcggataagaaagcgacccttcacatcgaaggtaaagcgccaatcgaattgccaattatggatggatcgcttggtccacaagtgattgacgttcgtactttaggctcaaacggttactttacttttgacccgggttttcttgccactgcatcctgtgaatctcaaattacttatatcgatggcgctaagggcattctgttgcaccgcggctaccctatcgatcagttagccaataacgctgattacttggaagtgtgttacatccttctttacggtgaagcccctaatcgtaagcaatatgaagagttcaagaaaatcgttactcgtcacactatggttcatgaacagatcgcgagctttttccacggtttccgccgtgatgctcacccgatggctgtgatgtgtggtgtggtgggtgcgttagctgctttctatcatgattcactcgatatcaataacgacacccaccgagaaattgcggcttatcgtctgctttccaaaatgccgaccttggctgcgatgtgttacaaatactcagttggtcaaccgtttatctacccacgtaacgatttgagctatgcagaaaacttcctgcacatgatgtttgccacaccttgtgaggagtatgaagtgaatcctatcgtggctcgtgccatggacaagattttcactctacatgcggatcatgaacaaaacgcatcgacatcgactgtacgtctggcaggttcatcgggtgctaacccatttgcgtgtatcgcagcaggtatcgcttctctttggggccctgcacatggtggcgcaaacgaagcttgtctacgtatgcttgaagagatcggctctgttgataagattcctgaatacgtaagacgtgcaaaagacaaagatgacccattccgtctaatgggctttggtcaccgagtgtacaaaaactacgatccacgtgccactgtaatgcgtgaagcgtgtcatgaagtgctgaaagagctaagcattcaagatccactgctcgacgtcgcgatggaacttgagcgtattgcgctgtctgatgagtactttattgagaagaaactctatcctaacgtcgatttctactcaggcatcattctcaaagccattggtattcctgtgtctatgttcacggtgatctttgcgatgtctcgtactatcggttggattgctcactggaatgaaatgcacagcgatccggacaaccgtatcggtcgtccacgtcagttgtacacaggtcaaaaactgcgcgatttcacacccttgcatgaacgcagttaa

SEQ ID NO: 36917 - protein, 431 aa, Vibrio cholerae O1 biovar eltor str. N16961
MVMADKKATLHIEGKAPIELPIMDGSLGPQVIDVRTLGSNGYFTFDPGFLATASCESQITYIDGAKGILLHRGYPIDQLANNADYLEVCYILLYGEAPNRKQYEEFKKIVTRHTMVHEQIASFFHGFRRDAHPMAVMCGVVGALAAFYHDSLDINNDTHREIAAYRLLSKMPTLAAMCYKYSVGQPFIYPRNDLSYAENFLHMMFATPCEEYEVNPIVARAMDKIFTLHADHEQNASTSTVRLAGSSGANPFACIAAGIASLWGPAHGGANEACLRMLEEIGSVDKIPEYVRRAKDKDDPFRLMGFGHRVYKNYDPRATVMREACHEVLKELSIQDPLLDVAMELERIALSDEYFIEKKLYPNVDFYSGIILKAIGIPVSMFTVIFAMSRTIGWIAHWNEMHSDPDNRIGRPRQLYTGQKLRDFTPLHERS

SEQ ID NO: 36918 - DNA, 1119 bp, Bacillus halodurans C-125
  CDS (1)..(1119): transl_table=11
atgagtgtcactcgtggtcttgaaggcgtcgttgcgacgacatctagcgtaagttcgattattgaaagtgtattaacgtatcaaggatacgatattgatgaacttgctgaacatgcaagttttgaagaagtaatataccttctttggaatggaaagctcccaaataaagtagagcttaaagaacttgcagatgaacttgcaaataacgctgaaatcccgcaagaagtcattgagcaaatgaaagcttatccgttagatcgcgtacacccaatgggcgctcttcgcacagcgatttcaagcttaggcttgtatgatgaggaagcggatcttatggatgaagcagcaaacaagcgaaaggcattgaagcttcaagcgcaagtttcaacggttgtgacagcgttttctcgcattcgcgaaggaaaagagcctgttgcgcctcgtacagatttaagttttgcggcgaatttcttgtacatgctaacaggagaagagcctgatgaaatagcggttgatgcatttaataaagcacttgttctgcatgctgatcacgagctaaacgcctctacattcacagcacgagtctgtgttgcgactctttctgacgtttactctggtattacagcagcgattggggcattaaagggacctcttcacggtggtgccaacgaacaggtaatggccatgctcacggaaatcggcgatgttgaaaacgttgaaccttacatccgcaaagctttggacaacaaacaaaaaattatgggcttcggtcaccgagtgtataaaaatggcgatccacgtgctaaacacctacgggaaatgtctaagaaattaacgagcattacgggggaaagcaagtggtacgagatgtctgtgaaaattgaagaaatcgtaacaaatgaaaaaggactattgccaaacgttgatttctattccgctagcgtttaccatagtcttggaatcaaacacgacttatttacaccgatttttgctgttagccgtatgagcggatggttggctcatattttagagcaatacagcaacaaccgcttgattcgccctcgggcagaatatgttggaccgaacaagcgacaatatgtacgtttggaagagcgcaactaa

SEQ ID NO: 36919 - protein, 372 aa, Bacillus halodurans C-125
MSVTRGLEGVVATTSSVSSIIESVLTYQGYDIDELAEHASFEEVIYLLWNGKLPNKVELKELADELANNAEIPQEVIEQMKAYPLDRVHPMGALRTAISSLGLYDEEADLMDEAANKRKALKLQAQVSTVVTAFSRIREGKEPVAPRTDLSFAANFLYMLTGEEPDEIAVDAFNKALVLHADHELNASTFTARVCVATLSDVYSGITAAIGALKGPLHGGANEQVMAMLTEIGDVENVEPYIRKALDNKQKIMGFGHRVYKNGDPRAKHLREMSKKLTSITGESKWYEMSVKIEEIVTNEKGLLPNVDFYSASVYHSLGIKHDLFTPIFAVSRMSGWLAHILEQYSNNRLIRPRAEYVGPNKRQYVRLEERN

SEQ ID NO: 36920 - DNA, 1284 bp, Neisseria meningitidis MC58
  CDS (1)..(1284): transl_table=11
atgtccaaatcaatcaaactcaacgtaccgggtcaggcaggtttggagctgccggtattggaagccagcatcgggcacgatgtggttgacattcgggggctgacaaaaaatacaggtttgttttccttcgaccccggatttgtttcaaccgcaagctgtgagtctaaaattacttacatcgacggcgatcaaggcttgctttattatcgcggataccccatcgagcagctggccgaaaagtccgattatttggaagtctgctacctgttgatttacggcgaactgccgactcccgagcaaaaggcagaatttgacaataccgtccgccgccacacgatggtgcatgaacagctgacttggttcttccgggggttccgccgcgacgcgcatccgatggcgatgatggtcggcgtggtcggcgcactgtctgcgttctaccaagacagcttggacattagcaatcccgaacaccgcaaaatcgcgatttaccgcctgatttctaaaatcccgaccattgcggcaatgtgctaccgctattcaaacggtctgccgttcaattatccgaagaataatctttcttattccgaaaacttccttcatatgatgttcgccacgccgtgtgaagactacaaacccaatcccgttttggcacgcgcgctcgaccgcatctttattttgcatgccgaccacgagcaaaacgcctcaacttcaaccgtccgtctggcagggtcttcgggtgcgaacccgtttgcctgtattgctgccggtatcgcctgcctgtggggtgcttcgcacggcggtgcgaacgaagccgtgttgaaaatgttggacgaaatcggcgatgtgtctaatgttgccgcatacatggaaggtgtgaaacaacgcaaataccgtctgatgggcttcggtcaccgcgtgtaccgcaatatggatccgcgtgccagcattatgcgcgaaacctgctatgaagttttgaaggaattgggcttggaagacagtccgaaattcaaactggcgatggaattggaacagattgcgctgaaagacccgttctttatcgaacgcaaactgtatccaaacgtcgatttctattccggcatcgtcctgtccgcgctgggcatcccgaccgaaatgtttaccgtcatcttcgccctgtcgcgcagcgtgggctggatttcgcactggcacgagatgattagcgatccttcgctgaaaatcggccgcccgcgccagctttataccggttcggaacgccgcgattatgtgccgccaggcgagaggtaa

SEQ ID NO: 36921 - protein, 427 aa, Neisseria meningitidis MC58
MSKSIKLNVPGQAGLELPVLEASIGHDVVDIRGLTKNTGLFSFDPGFVSTASCESKITYIDGDQGLLYYRGYPIEQLAEKSDYLEVCYLLIYGELPTPEQKAEFDNTVRRHTMVHEQLTWFFRGFRRDAHPMAMMVGVVGALSAFYQDSLDISNPEHRKIAIYRLISKIPTIAAMCYRYSNGLPFNYPKNNLSYSENFLHMMFATPCEDYKPNPVLARALDRIFILHADHEQNASTSTVRLAGSSGANPFACIAAGIACLWGASHGGANEAVLKMLDEIGDVSNVAAYMEGVKQRKYRLMGFGHRVYRNMDPRASIMRETCYEVLKELGLEDSPKFKLAMELEQIALKDPFFIERKLYPNVDFYSGIVLSALGIPTEMFTVIFALSRSVGWISHWHEMISDPSLKIGRPRQLYTGSERRDYVPPGER

SEQ ID NO: 36922 - DNA, 1269 bp, Campylobacter jejuni subsp. jejuni NCTC 11168
  CDS (1)..(1269): transl_table=11
atgtcaaattccgttactataaccgataatagaaatggaaaaagctatgaatttcctatatatgacggtacaactgggccaagcgttgtagatatgtcaagtttttataaacaaacaggaatgttttcttatgatgagggcttgacttctacagctacttgtaaatcaaaaatcacttatattgatggagaaaatggaattttaatgcaccgtggctatcctatagagtggcttgctgaaaacaaactttatttagatgtggttcatcttttactttataaagaattacctgatgctacgcgtcttgaagcgtttcgttatgaaatgaaaaaacgttcttttatccatgaaggtatgcaccgtctttttgattctttccctgataatgctcatcctatggcagttttacaaggtgctgtttcatcgcttagtgctttttatcctgatcatttaaacatgaatgtaaaagaagaatatatggaaatggcagctagaatagtagctaaaatccctactatagtggccaccgcttatagatataaacacggctttcctatggcttatccaaatttagatcgtggttttacagaaaatttcttatatatgttaagaacctatccttacgatcatgtagagcttaaacctatagaagtaaaagcacttgatacagtttttatgcttcatgcagatcatgagcaaaatgcttcaacttcaacagttcgtgctgtgggttcaactcatgctcatccttatgcctgtatagcagcaggtattggtgcgctttggggtcatgcacatggtggagctaatgaaggtgttattagaatgcttgagcaaataggtagtgttgatagggtagatgaattcatcaaaagagctaaggataaaaacgatcctttccgcttgatgggctttgggcatagggtttataaaaattttgatcctagagcaaaagtactgaaaaagcttcgtgatcaacttattgatgagttgggtattgataccaatcttattaaagtagcaacgcgtatagaagagattgctttaagcgatgattattttgttcaaagagggttatatccgaatgttgattttcatagtggacttattttaaaagccttaggtattccaaatgaaatgtttgctactttatttgttatagggcgcaccccaggatggatagctcagtggatagaacaaaaagagcaagaaagtcttaaaatagtccgtccaagacaactttatttgggtgaaactagtaaaatttaa

SEQ ID NO: 36923 - protein, 422 aa, Campylobacter jejuni subsp. jejuni NCTC 11168
MSNSVTITDNRNGKSYEFPIYDGTTGPSVVDMSSFYKQTGMFSYDEGLTSTATCKSKITYIDGENGILMHRGYPIEWLAENKLYLDVVHLLLYKELPDATRLEAFRYEMKKRSFIHEGMHRLFDSFPDNAHPMAVLQGAVSSLSAFYPDHLNMNVKEEYMEMAARIVAKIPTIVATAYRYKHGFPMAYPNLDRGFTENFLYMLRTYPYDHVELKPIEVKALDTVFMLHADHEQNASTSTVRAVGSTHAHPYACIAAGIGALWGHAHGGANEGVIRMLEQIGSVDRVDEFIKRAKDKNDPFRLMGFGHRVYKNFDPRAKVLKKLRDQLIDELGIDTNLIKVATRIEEIALSDDYFVQRGLYPNVDFHSGLILKALGIPNEMFATLFVIGRTPGWIAQWIEQKEQESLKIVRPRQLYLGETSKI

SEQ ID NO: 36924 - DNA, 1236 bp, Deinococcus radiodurans R1
  CDS (1)..(1236): transl_table=11
gtgtgccctgcccgctctcatctctttgtcaccccggcagggacgtttgaccgcccctttttcgccccctggaagaagggcaggtgttatcctctgctcactatgtcgaacattgccaaagggcttgaaggtgttctctttaccgagagcaagctgacgtttatcaacggctcggagggcattctgacccacctgggcattccgattcaggaatgggccgaaaagagcaccttcgaggaactcagcctcgcgctgctcgacgccaaactgcccaccgccgaggaactcgccaagttcgacgccgaactcaaggccaaccgcgccatccccgatcagctcgtgggcatcatccgcgacatgcccaagggcgtacaccccatgcaggcgctgcgcacggcggtcagctacctgggcctgctcgaccctcaggccgaggacatcacccctgaggcccggcgcgccatcagcacccgcatgatcgcgcagttctcgaccatcatcgcggcgatcaaccgcgcccaagaaggccaggacatcgtggccccccgcgccgacctgacccacgcgggcaacttcctgtacatgctgaccggcaacgagcccacccccgagcaggcccgtctgttcgacatcgcgctcgtgctgcacgccgaccacggcatgaacgcctcgaccttcacggcgattgcgaccagctcgaccctcagcgacatgtactcctgcatggtgagcgccatcggcgcgctcaaaggcccgctgcacggcggcgccaacgaagccgtgatgaccatgctcgacgaaatcggcaccgtggacaaggccgaggcgtacatcacggggaagctcgacaacaaagagaagatcatgggcgtgggccaccgcgtctacaagtacttcgacccccgctcgcgcgtgctgcgcgactacgccgagcacgtcgccaacaaagaaggcaagagcaactactaccagatcctcgaagccatcgagaagatcatcgtggaccgcatgggcgccaagggcatctaccccaacgtggacttctactccggcaccgtgtacagcgacctgggcatcaagaaggaatacttcacccccatctttgccctggcccgcatcagcggctggtgcgccagcgtcatcgagtacagccaggacaaccgcctgctgcgccccgacgccgagtacaccggcgcccgcgaccagcactacgtggacatcaaagaccgccagtaa

SEQ ID NO: 36925 - protein, 411 aa, Deinococcus radiodurans R1
MCPARSHLFVTPAGTFDRPFFAPWKKGRCYPLLTMSNIAKGLEGVLFTESKLTFINGSEGILTHLGIPIQEWAEKSTFEELSLALLDAKLPTAEELAKFDAELKANRAIPDQLVGIIRDMPKGVHPMQALRTAVSYLGLLDPQAEDITPEARRAISTRMIAQFSTIIAAINRAQEGQDIVAPRADLTHAGNFLYMLTGNEPTPEQARLFDIALVLHADHGMNASTFTAIATSSTLSDMYSCMVSAIGALKGPLHGGANEAVMTMLDEIGTVDKAEAYITGKLDNKEKIMGVGHRVYKYFDPRSRVLRDYAEHVANKEGKSNYYQILEAIEKIIVDRMGAKGIYPNVDFYSGTVYSDLGIKKEYFTPIFALARISGWCASVIEYSQDNRLLRPDAEYTGARDQHYVDIKDRQ

SEQ ID NO: 36926 - DNA, 1296 bp, Mycobacterium leprae TN
  CDS (1)..(1296): transl_table=11
gtggccgacaccgacgacaccgtcactctgaagtatccgggaggcgagatcgatctacagattgtccgtgccaccgaaggtaatgacggcattgcgatcgtcccggtattggccaagaccggttacactacgtttgatgtcggctacggtaacaccgcatccaccaagagttccatcacctacattgatggtgacgccgggattctgcgttaccgcggctatccgattgagcagctcgccgagaagtcgaccttcatagaggtttgctatctgctgatctatggggagttaccagccaccgatcagctggccgaattcacccatcggatccagcgccacaccatgttgcacgaggaccttaagcgattctatgatggcttcccgcgcaacgcgcacccgatgccggtgttgtccagcgtggtcaacgcattgagtgcttactatcaggatgcactggacccgatggacaacggccaagtagagctgtcgacgatccgactcttggccaagctgcccactatcgctgcctatgcatacaagaagtcggtaggccagccgttcctttacccggacaacgcgttttctctagtagagaacttccttcgaatgacttttggtttgccggctgagccctatgagcccgaccctgaggtggtccgggctctggacatgctgtttatcctgcatgctgaccacgagcaaaactgttcgacgtcaaccgtgcgtttggtgggctcgtcgcgagccaacctgttcacctcgatttcgggcggcattaacgcgctgtggggaccgctgcacggcggtgccaaccaggcggtgcttgagatgctcgaaggtatccgcgagagtggcgacgacgttggtggatttgtccaaaaagtaaagaattgccaggccggtgtgaaattgatgggctttggtcaccgcgtctacaagaactacgatccgcgggcccgcatcgtcaaggaacaggctgacaagatcctggtcaaacttggtggcgatgacgatttgctgaacattgccaagggactcgaggaggcggcgctaaccgatgactatttcatcgagcgcaagctttacccgaacgtcgacttctacaccggtctgatctaccgggccctcggttttccgacccggatgttcaccgtgttgtttgctttgggtcggctgccaggctggattgcgcactggcgtgagatgcacgacgagggtgacagtaagattggccgtccgcgccaaatatacaccggctacacagagcgtgactacaccgcaattgaaacacgatag

SEQ ID NO: 36927 - protein, 431 aa, Mycobacterium leprae TN
MADTDDTVTLKYPGGEIDLQIVRATEGNDGIAIVPVLAKTGYTTFDVGYGNTASTKSSITYIDGDAGILRYRGYPIEQLAEKSTFIEVCYLLIYGELPATDQLAEFTHRIQRHTMLHEDLKRFYDGFPRNAHPMPVLSSVVNALSAYYQDALDPMDNGQVELSTIRLLAKLPTIAAYAYKKSVGQPFLYPDNAFSLVENFLRMTFGLPAEPYEPDPEVVRALDMLFILHADHEQNCSTSTVRLVGSSRANLFTSISGGINALWGPLHGGANQAVLEMLEGIRESGDDVGGFVQKVKNCQAGVKLMGFGHRVYKNYDPRARIVKEQADKILVKLGGDDDLLNIAKGLEEAALTDDYFIERKLYPNVDFYTGLIYRALGFPTRMFTVLFALGRLPGWIAHWREMHDEGDSKIGRPRQIYTGYTERDYTAIETR

SEQ ID NO: 36928 - DNA, 1122 bp, Sulfolobus tokodaii str. 7
  CDS (1)..(1122): transl_table=11
atggagataaagaaaggtcttgaagacgtttatgttaaagaaacagagataacatatattgacggggaactaggtaggttatattatagaggttactccatatatgacttggctgaattctctaattttgaagaagtaagttacctaatattatatggtaaattaccaaatagagaagaattaaactggttccaggaaaagctaagggaagaaagatacttaccagattttataataaaatttctaagagaagtgagaaaagatgcccaaccaatggatatactaagaactgctgtgagcttacttggtattgaagattcaaaaaatgatgaacgaactgatataaagggcataaaattaatttcaaaattccctactattgtagctaattatgcaagattaagaaaagggctagatataattgagccagatcctaaactttcacactcggagaatttcttgtacatgctatatggagatagaccaaatgaaataaaatcaaaggctatggatgtcacattaatcttacatattgatcatgaaatgaacgcatcaacctttgcctcattagttgtagcctctactttttcagatttatattcttctatagtagctgggatatcagcattgaaagggcctttgcacggaggggcaaactatgaggcactaaaaatgtttaaggaaattggatctcccgaaaaagttaacgattatattctaaataggctttctaacaaacaaagaataatgggatttggacatcgtgtttataaaacttatgatccaagggcaagaatattaaaacagtatgctaaactattagctgaaaaagaaggaggagaaatatatactttatatcaaatagctgagaaagttgaagagattggaataaagtatttaggtcctaaaggtatatatcctaatgttgatttcttctccagtattgttttctactctttaggtttcgagccagacttctttccggcagtttttgcttcagccagagtagttggctgggttgctcatatcatggagtatataaaagataataagataattaggcctaaagcatactataaaggggaaataggaaagaaatatattccaattgatagtaggtaa

SEQ ID NO: 36929 - protein, 373 aa, Sulfolobus tokodaii str. 7
MEIKKGLEDVYVKETEITYIDGELGRLYYRGYSIYDLAEFSNFEEVSYLILYGKLPNREELNWFQEKLREERYLPDFIIKFLREVRKDAQPMDILRTAVSLLGIEDSKNDERTDIKGIKLISKFPTIVANYARLRKGLDIIEPDPKLSHSENFLYMLYGDRPNEIKSKAMDVTLILHIDHEMNASTFASLVVASTFSDLYSSIVAGISALKGPLHGGANYEALKMFKEIGSPEKVNDYILNRLSNKQRIMGFGHRVYKTYDPRARILKQYAKLLAEKEGGEIYTLYQIAEKVEEIGIKYLGPKGIYPNVDFFSSIVFYSLGFEPDFFPAVFASARVVGWVAHIMEYIKDNKIIRPKAYYKGEIGKKYIPIDSR

SEQ ID NO: 36930 - DNA, 1137 bp, Sulfolobus tokodaii str. 7
  CDS (1)..(1137): transl_table=11
atgagcgtagaagtaagtagaggattggaaaatgtaattataaaaactactggattaacttacattgatggcattaacggtatattaagatatagagggtacgatattaacgatttagttaattatgcttcatatgaggagctaatccatttaatgctttacggtgaattacctaacagacaacaattaaatcagattaaaggtataataaatgaaagttttgaagttccagaacaagttatatcaacgatattttcgatgcctagaaactgtgatgcaataggaatgatggaaacagcatttggcatattagcttcaatatatgatccaaaatggaacagagctactaataaagaattagctgttcaaattattgcaaaaactgcaacaattaccgcaaatatttatagggctaaagaagggttaaaaccaaagatcccagaaccatcagagagctatgctgaaagcttcttggctgcaacgtttggtaaaaagcctactcaagaagagataaaggctatggatgcttcactaattttatatacagatcacgaagttccagcctcaacaactgcagccttagtagcctcctcaaccctctcggatatgtactcatgtattgttgcagcattagctgcactaaagggtcctttgcatggtggtgcagctgaggaagctttcaaacagtttgtagaaataggttctgtcgaaaatgcagataaatggtttgaggaaaaaataataaaaggcaaaagtaggctcatgggattcgggcatcgtgtatataagacttatgatcctagggcaaaaatatttaagacattggctaaatcctttgctgaaaaaaatgaaaatgttaaaaagtattatgaaattgcagaaagaatagagaaattgggagttgacacattcggtagtaagcatatttatcctaatactgacttttacagtggtatagtattttatgctttaggcttcccaatatatatgttcacttcactgttcgctctatcaagagtattagggtggttagctcacataattgaatatgtagaggaacagcatagactcattagacctagagcactatacattggaccagaaaaaagagagtttaaacctatagagttaagataa

SEQ ID NO: 36931 - protein, 378 aa, Sulfolobus tokodaii str. 7
MSVEVSRGLENVIIKTTGLTYIDGINGILRYRGYDINDLVNYASYEELIHLMLYGELPNRQQLNQIKGIINESFEVPEQVISTIFSMPRNCDAIGMMETAFGILASIYDPKWNRATNKELAVQIIAKTATITANIYRAKEGLKPKIPEPSESYAESFLAATFGKKPTQEEIKAMDASLILYTDHEVPASTTAALVASSTLSDMYSCIVAALAALKGPLHGGAAEEAFKQFVEIGSVENADKWFEEKIIKGKSRLMGFGHRVYKTYDPRAKIFKTLAKSFAEKNENVKKYYEIAERIEKLGVDTFGSKHIYPNTDFYSGIVFYALGFPIYMFTSLFALSRVLGWLAHIIEYVEEQHRLIRPRALYIGPEKREFKPIELR

SEQ ID NO: 36932 - DNA, 1281 bp, Caulobacter crescentus CB15
  CDS (1)..(1281): transl_table=11
atgaccgataaagccacgctgacgatcggcgacaagagctatgagctgccgatcctcaagggcagcacgggtccggacgtcatcgacgttcggaagatctacggtgaaagcgatcacttcacgttcgatccaggcttcacctccaccgcctcgtgcgagagcaagatcacctatatcgacggcgacgcgggcatcctgctgcaccgcggctatccgatcgaccagctggccgagaagtcctcgttcctcgaggtctgctacctgctgctgaacggcgaactgcccaaggccgacgagttcgccaagttcgagcacaacatcacctaccacacgatgttgcacgctcagttcgaccgcttcttcgagggcttccgccgcgacgctcacccgatggcggtcatgaccggcgccgtcggcgctctgtcggccttctattcggacagcatcaatgtcgacgacgcccgtgagcgcgagatcagcgcccatcgcctgatcgcgaagatgccgacgatcgccgcccgcgcctacaagtacacggtcggccagccgttcgtgtcgccgcgcaacgacctgtcgtattcggaaaacttcctgcgcatgtgcttcgccgtgccggccgaggactggaagccgaacccggtgctgacccgcgccatggaccggatcttcatcctgcacgccgatcacgagcagaacgcctcgacctcgaccgtccgtctggccggttcgtcgggcgcgcacccgttcgcctgtatcgccgccggcatcgcctgcctgtggggcccgtcgcacggcggcgccaaccaggaagcgcttgagatgctggagaccatcggttcggtcgacaacatcaaggactacgtccagggcgtgaaggaccggaagtacaagctgatgggcttcggccaccgcgtgtacaagaacttcgacccgcgcgcgaaggtcatgcaaaagaccgcgcacgaggttctggccgagctgggccataacaacgatccgctgctgcaggtcgcccaggagctggaaaaggtcgccctgaacgacccgtacttcgtcgatcgcaagctgtacccgaacatcgatttctattcgggcatcaccctgcgcgcgatgggcttcccgaccaacatgttcaccgtgctgttcgccctggcccgcaccgtgggctggatcagccagtggaaggaaatgttcgaggaccccacccgcaagatcggtcgtccccgtcagctctacacgggcgccacgcatcgcgactacgtcacgctcgacaagcgctaa

SEQ ID NO: 36933 - protein, 426 aa, Caulobacter crescentus CB15
MTDKATLTIGDKSYELPILKGSTGPDVIDVRKIYGESDHFTFDPGFTSTASCESKITYIDGDAGILLHRGYPIDQLAEKSSFLEVCYLLLNGELPKADEFAKFEHNITYHTMLHAQFDRFFEGFRRDAHPMAVMTGAVGALSAFYSDSINVDDAREREISAHRLIAKMPTIAARAYKYTVGQPFVSPRNDLSYSENFLRMCFAVPAEDWKPNPVLTRAMDRIFILHADHEQNASTSTVRLAGSSGAHPFACIAAGIACLWGPSHGGANQEALEMLETIGSVDNIKDYVQGVKDRKYKLMGFGHRVYKNFDPRAKVMQKTAHEVLAELGHNNDPLLQVAQELEKVALNDPYFVDRKLYPNIDFYSGITLRAMGFPTNMFTVLFALARTVGWISQWKEMFEDPTRKIGRPRQLYTGATHRDYVTLDKR

SEQ ID NO: 36934 - DNA, 1137 bp, Nostoc sp. PCC 7120
  CDS (1)..(1137): transl_table=11
atgatggtgtgcgaatacaagcctggtttagaaggcattcccgccgcccaatcgagtatcagttatgtagatgggcaaaagggaatactagaatatcgtggcatccggattgaggatttagcccagcaaagtacttttctggagactgcttatcttttaatctggggtgagttgccaacaaaagaagaattgcaagtatttgaggaggaagtccgtcttcatcggcggattaaataccggattcgggatatgatgaagtgctttcccgaatctggtcatccaatggatgcactccaagcctctgcggcggctttaggcttgttttactcccgtcgagatttgcacaatcctgcctatattcgggatgctgtagtgcggctaatagctactattccgacgatggtagctgcattccagttgatgcggaaaggtaatgaccccgttaagccccgtgatgatttagattattccgccaattttctctacatgctcaacgagaaagaaccggatgctttggcggcaaaaatctttgatatctgcttgattctccatgtcgagcatacgatgaatgcttccacctttagtgctagggtaacagcttccaccttgactgacccgtatgcggtggttgctagcgctgtggggactttaggagggcctttacacggtggagccaatgaagaagtaatccagatgttggaagagattggttccgtggagaatgtgcgttcttatgtcgaggagaggttgcaacgtaaagacaagctcatgggctttggacatcgtgtctacaaagttaaagacccacgggcgacaattttgcaaggcctcgcagaacagttgtttgccaagttcggcgcagataagtattacgacatcgcccaagaaatggaacgggtagtcgaagagaaacttggtcataaagggatttatcccaatgttgacttctactctggtttagtgtatcggaagatgggtattcctacagacttgtttacaccaatctttgcgatcgctcgtgttgctggttggttagcccactggaaagaacaactcgaagagaaccgcattttccgtcctacccaggtttacaacggcaaacacagtgttacctacacccccattgaccaacgttaa

SEQ ID NO: 36935 - protein, 378 aa, Nostoc sp. PCC 7120
MMVCEYKPGLEGIPAAQSSISYVDGQKGILEYRGIRIEDLAQQSTFLETAYLLIWGELPTKEELQVFEEEVRLHRRIKYRIRDMMKCFPESGHPMDALQASAAALGLFYSRRDLHNPAYIRDAVVRLIATIPTMVAAFQLMRKGNDPVKPRDDLDYSANFLYMLNEKEPDALAAKIFDICLILHVEHTMNASTFSARVTASTLTDPYAVVASAVGTLGGPLHGGANEEVIQMLEEIGSVENVRSYVEERLQRKDKLMGFGHRVYKVKDPRATILQGLAEQLFAKFGADKYYDIAQEMERVVEEKLGHKGIYPNVDFYSGLVYRKMGIPTDLFTPIFAIARVAGWLAHWKEQLEENRIFRPTQVYNGKHSVTYTPIDQR

SEQ ID NO: 36936 - DNA, 1302 bp, Ralstonia solanacearum GMI1000
  CDS (1)..(1302): transl_table=11
atgacgccgtccgatgtgaaagccaccctatcgttttccgatggctcgcccagcgtcgagttgccgatctacacgggcacggttggcccggacgtgatcgacatccgcaagctgtacggccagacgggcaagttcacctacgaccccggcttcatgtcgaccgcgtcgtgcaactccaagatcacctatatcgatggcgacaagggcgagctgctctatcgcggctacgccatcgacgatctggcgggcaagtgcgacttcctggaaatctgctacctgctgctcaagggcgagctgcccaacgccaagcagaaggatgagttcaacagcaccgtcatgaaccacaccatggtgcatgagcagatgcagttcttcctgcgcggcttccgtcgcgatgcgcatccgatggccgtgctgaccggcctggtgggcgccatgagcgcgttctatccggatgccgccaacatcaacgattcgcgcgagcgcgagatctcgcagatccgcctgatcgccaagctgccgacactggtggcgatggcctacaagtacaacatcggccagccgctgatctacccgcagaacaacctgtcctacaccggcaacttcatgcgcatgatgttcgccacgccgtgcgaggactacaaggtcaacccggtgcttgagcgcgcgctcgaccgcatcttcatcctgcacgccgaccacgagcagaacgcctcgacctcgacggtgcgcctggctggctcctcgggcaccaacccgatcgccgccattgcagccggcatcgcctgcctgtggggcccggcgcacggcggcgcgaacgaagcggcgctgaacatgctggaagagatcggcagcgtcgacaagatcgatgagttcatcaagcaggtcaaggacaagaacagcggcgtgcgcctgatgggcttcggccaccgcgtgtacaagaactacgatccgcgcgccaagctgatgcgtgagacctgccatgaagtgctgcaggaactcggcctggagaacgatcgcctgttcaagctggccatggcgctcgagaagatcgcgctggaagacgaatacttcgtcagccgcaagctgtatccgaacgtcgatttctactcgggcatcgtgcagcgcgcgctgggcatcccgacctcgatgttcacctgcatcttcgcgctggcccgctcggtgggctggatcgcgcagtgggaagagatgatcaccgatccggaatacaagatcggccgtccgcgccagctgttcaacggcgccgccacccgcgcggtgcccgagctgggcaagcgctga

SEQ ID NO: 36937 - protein, 433 aa, Ralstonia solanacearum GMI1000
MTPSDVKATLSFSDGSPSVELPIYTGTVGPDVIDIRKLYGQTGKFTYDPGFMSTASCNSKITYIDGDKGELLYRGYAIDDLAGKCDFLEICYLLLKGELPNAKQKDEFNSTVMNHTMVHEQMQFFLRGFRRDAHPMAVLTGLVGAMSAFYPDAANINDSREREISQIRLIAKLPTLVAMAYKYNIGQPLIYPQNNLSYTGNFMRMMFATPCEDYKVNPVLERALDRIFILHADHEQNASTSTVRLAGSSGTNPIAAIAAGIACLWGPAHGGANEAALNMLEEIGSVDKIDEFIKQVKDKNSGVRLMGFGHRVYKNYDPRAKLMRETCHEVLQELGLENDRLFKLAMALEKIALEDEYFVSRKLYPNVDFYSGIVQRALGIPTSMFTCIFALARSVGWIAQWEEMITDPEYKIGRPRQLFNGAATRAVPELGKR

SEQ ID NO: 36938 - DNA, 1290 bp, Agrobacterium tumefaciens str. C58
  CDS (1)..(1290): transl_table=11
atgacggaaaaaagcgctacagtgacacttggcgaaaagcaggtggaactcccggtcagggaaggcacgattggaccaagcgtcgtcgatatcgccacgctctacaagcacacgggctccttcacctacgacccgggtttcacgtcgacggcctcctgcgaatccaagatcacctatatcgacggtgacgagggcgttctcctgcatcgtggtttccccatcgagcaactggctgaacagggcgacttcctcgaaacctgctatctgctgctctacggcgaactgccgacggctgcgcagaagaaggatttcgacacccgcgtcacgcgccacaccatggtgcatgagcagatgagccgcttcttcaccggctatcgtcgcgacgcacacccgatggccgtcatgtgcggcacggtcggcgctctctcggccttctatcacgactcgacggacatcaccgatccgcaccagcgcatggtcgcttcgctgcgcatgatcgcgaagatgccgacgatcgccgccatggcctacaagtaccatatcggccagcccttcgtttacccgaagaacgatctggattacgcctccaacttcctgcacatgtgctttgccgtgccgtgcgaggactacaaggtggacccggttctggcccgcgccatggatcgcatcttcatcctgcatgccgatcacgagcagaacgcctccacctccacggtgcgtcttgccggttcgtcgggtgcaaatccgttcgcctgtatcgcggctggcatcgcctgcctctggggtccggctcacggcggcgccaacgaagcggcgctcaacatgctgaacgagatcggctctgtcgaccgcatcccggaatatatcgcccgcgccaaggacaagaacgatccgttccgcctgatgggctttggccaccgcgtctacaaaaactacgacccgcgcgccaagatcatgcagaagacgatgtacgaagtgctggaagccaccggcaattccgacgatccgatcatgcaggtcgcgctcgaactggaaaagatcgccctttccgacccatacttcgtcgaaaagaagctctacccgaatgtcgacttctattcgggcatcacgctgaaggcgctcggcttccccaccaccatgttcaccgttctcttcgctctcgcccgcaccgtcggctggatcgcacagtggaacgaaatgatcgaagatccgcagcagcgcatcggccgtccgcgccagctctatacgggcgccggcaagcgcgattacgttccggtttccaagcgttaa

SEQ ID NO: 36939 - protein, 429 aa, Agrobacterium tumefaciens str. C58
MTEKSATVTLGEKQVELPVREGTIGPSVVDIATLYKHTGSFTYDPGFTSTASCESKITYIDGDEGVLLHRGFPIEQLAEQGDFLETCYLLLYGELPTAAQKKDFDTRVTRHTMVHEQMSRFFTGYRRDAHPMAVMCGTVGALSAFYHDSTDITDPHQRMVASLRMIAKMPTIAAMAYKYHIGQPFVYPKNDLDYASNFLHMCFAVPCEDYKVDPVLARAMDRIFILHADHEQNASTSTVRLAGSSGANPFACIAAGIACLWGPAHGGANEAALNMLNEIGSVDRIPEYIARAKDKNDPFRLMGFGHRVYKNYDPRAKIMQKTMYEVLEATGNSDDPIMQVALELEKIALSDPYFVEKKLYPNVDFYSGITLKALGFPTTMFTVLFALARTVGWIAQWNEMIEDPQQRIGRPRQLYTGAGKRDYVPVSKR

SEQ ID NO: 36940 - DNA, 1314 bp, Brucella melitensis 16M
  CDS (1)..(1314): transl_table=11
gtggacatgaaaggaaaaacgatgtcagataagacagccagctttaccctcgacggcaaaacgttcgatctgcctgtgcgaaaaggcactgtcgggccggatgtcgttgatattggtccactttacaagaattcccacgcattcacctacgaccctggcttcacttccaccgcttcgtgcgaatccaaaatcacctatatcgatggtgacgaaggcgtcctgctttatcgcggctacccgatcgaccagcttgccgagcatggcgacttcctcgaaacctgctatctgcttctttacggcgaactgccgaccgcaacccagaaggccgatttcgactatcgtgtaacccgccacaccatgctgcacgagcagatgacgaagttcttcaccggcttccgtcgtgatgcccacccgatggctgtcatggtgggttgcctgggcgccatgtccgccttctaccacgactcgaccgatatcaccgatccgcatcagcgcatggtcgcttcgatccgcctgatcgccaaggtgccgacgcttgcagccatggcctacaagtaccatatcggccagccgttcgtatatccgaagaacgacctcgatttcgcgtcgaacttcctgcacatgtgcttcaccgtgccttgcgaagagtacaaggtgaacccggttctggcgcgcgccatggaccgcattttcatcctgcatgctgatcacgaacagaatgcctccacctcgaccgtccgcctcgccggctcgtcgggtgcaaacccgtttgcctgcattgccgctggcgtggcctgcctctggggcccggctcatggcggcgccaatgaagctgcgctcaacatgctttcggaaatcggctcggttgaccgtatcccggaatatatcgccagggctaaagacaagaacgatccgttccgtttgatgggcttcggccatcgcgtttacaagaactacgatccgcgcgccaagatcatgcagaagacctgccatgaagtcctcggcgagctgggcatcaaggatgatccgctgcttgacgttgcaatggaactggaaaggattgccctgaccgacgaatatttcatcgaaaagaagctctacccgaacatcgacttctattcgggcatcacgctgaaggcgctgggcttcccgaccgaaatgttcaccgtcctgttcgcccttgcccgcaccgttggctgggtcgcccagtggaaggaaatgatcgaagatccgcagcagaaaatcggccgtccgcgccagctctacaccggcgcaaccgaacgcgattacgtgccgcttgcaaagcgcaagtaa

SEQ ID NO: 36941 - protein, 437 aa, Brucella melitensis 16M
MDMKGKTMSDKTASFTLDGKTFDLPVRKGTVGPDVVDIGPLYKNSHAFTYDPGFTSTASCESKITYIDGDEGVLLYRGYPIDQLAEHGDFLETCYLLLYGELPTATQKADFDYRVTRHTMLHEQMTKFFTGFRRDAHPMAVMVGCLGAMSAFYHDSTDITDPHQRMVASIRLIAKVPTLAAMAYKYHIGQPFVYPKNDLDFASNFLHMCFTVPCEEYKVNPVLARAMDRIFILHADHEQNASTSTVRLAGSSGANPFACIAAGVACLWGPAHGGANEAALNMLSEIGSVDRIPEYIARAKDKNDPFRLMGFGHRVYKNYDPRAKIMQKTCHEVLGELGIKDDPLLDVAMELERIALTDEYFIEKKLYPNIDFYSGITLKALGFPTEMFTVLFALARTVGWVAQWKEMIEDPQQKIGRPRQLYTGATERDYVPLAKRK

SEQ ID NO: 36942 - DNA, 1230 bp, Pyrobaculum aerophilum str. IM2
  CDS (1)..(1230): transl_table=11
atgagtgaacaaactgttcaggtaaaaactacgggtaaaattcttcagtctccctgtggtcccattattcacggtttagaagacgttttgataaaaagcacatcaataagcgatatagacggcgagaagggcattctttggtacagagggtataggatagaagagttggccaggctctctacttatgaagaggtctcgtacctcattctatatgggaggttgccgacgaagagggagcttgaagattacattaatagaatgaaaaaatacagagagctccacccggcgacagttgaggtaattagaaacctcgccaaggcccatcccatgtttgcgctagaggcggctgtggcggcggagggcgcgtacgatgaagacaaccagaaattaatagaggcgttatcagtaggcaggtataaagccgaggagaaggagcttgcgtatagaatagccgagaagcttgtggccaaaatgccgacaatagtggcgtatcactacagattctcgcgtggactagaggtagtaaggcctagagacgatttgggacacgcggcgaactttctctacatgatgttcggcagagagccagatccccttgcctcgagggggatagatctctacttaatactccacgcagatcacgaggtccccgccagcactttcgctgcccacgtcgttgcgtctacgctgagcgacctctactcctcagtagccgctgcaatagccgcacttaaaggcccgttgcacggcggggctaatgaaatggccgttaggaactacctcgaaataggcactccggctaaggccaaggagatagtagaggcggcgactaagccaggcgggccaaagttaatgggcgtcggccaccgcgtatataaggcatatgatccaagggccaagatatttaaagagttttcaagagattatgtagccaaattcggcgatccccaaaacttgtttgcaatcgccagcgccatagagcaagaagtactgagccacccctatttccaacagcggaagctatacccaaacgtcgacttctggtccggaatagcgttttattacatggggataccgtatgagtacttcaccccaatattcgccatgtctagagtagtgggctgggttgcgcacgtcttggagtactgggagaacaacaggatattcaggcctagggcttgctatattggcccccacgatttacaatacatcccgcttgaacagagataa

SEQ ID NO: 36943 - protein, 409 aa, Pyrobaculum aerophilum str. IM2
MSEQTVQVKTTGKILQSPCGPIIHGLEDVLIKSTSISDIDGEKGILWYRGYRIEELARLSTYEEVSYLILYGRLPTKRELEDYINRMKKYRELHPATVEVIRNLAKAHPMFALEAAVAAEGAYDEDNQKLIEALSVGRYKAEEKELAYRIAEKLVAKMPTIVAYHYRFSRGLEVVRPRDDLGHAANFLYMMFGREPDPLASRGIDLYLILHADHEVPASTFAAHVVASTLSDLYSSVAAAIAALKGPLHGGANEMAVRNYLEIGTPAKAKEIVEAATKPGGPKLMGVGHRVYKAYDPRAKIFKEFSRDYVAKFGDPQNLFAIASAIEQEVLSHPYFQQRKLYPNVDFWSGIAFYYMGIPYEYFTPIFAMSRVVGWVAHVLEYWENNRIFRPRACYIGPHDLQYIPLEQR

SEQ ID NO: 36944 - DNA, 1134 bp, Pyrococcus furiosus DSM 3638
  CDS (1)..(1134): transl_table=11
atgaatacggaaaaataccttgctaaaggtctagaagatgtctacatagatcaaacaaatatatgctatatcgatggaaaagagggaaagctatactacagaggatacagtgtagaagagctagcagagttaagcacgtttgaggaagtggtgtatctcctctggtggggaaaattaccatccctaagtgaactagagaatttcaaaaaagagctagcaaaaagtagaggccttccaaaagaagttatagaaataatggaagcactacctaaaaatactcacccaatgggcgctttaagaaccataatctcatatctaggaaacattgacgatagtggagacattccagtaacccctgaagaagtttacaggataggaattagtgtaactgcaaagataccaacaatagtagctaattggtatagaattaagaatggtctcgaatatgttcctccaaaagaaaaacttagtcatgcagcaaatttcctatacatgctccacggtgaagaaccccccaaagaatgggagaaagccatggatgtggccctaattctatatgctgaacatgaaattaacgcatcgactttagcagtaatgaccgttggctctactcttagcgactactattcagccatcctcgcgggaataggagctttaaagggcccaatccatggaggtgcagtagaggaggccataaaacagtttatggaaataggatctcccgagaaagtagaagaatggttctttaaggctcttcagcagaagagaaaaataatgggtgctggtcatagggtgtataaaacctatgatccaagggctagaatatttaaaaaatatgcctccaaattaggagataaaaagctcttcgagatagctgaaagattagagaggttagtagaagaatacctaagcaaaaaaggaattagtataaatgttgactactggtcaggattagttttctatggaatgaagattccaatagagctttacacaacaatatttgcaatgggtagaattgcgggatggactgctcatttagctgagtatgtttctcacaatagaattattagacccaggttgcagtatgtaggagaaataggaaagaagtacctacccatagaattaaggaggtag

SEQ ID NO: 36945 - protein, 377 aa, Pyrococcus furiosus DSM 3638
MNTEKYLAKGLEDVYIDQTNICYIDGKEGKLYYRGYSVEELAELSTFEEVVYLLWWGKLPSLSELENFKKELAKSRGLPKEVIEIMEALPKNTHPMGALRTIISYLGNIDDSGDIPVTPEEVYRIGISVTAKIPTIVANWYRIKNGLEYVPPKEKLSHAANFLYMLHGEEPPKEWEKAMDVALILYAEHEINASTLAVMTVGSTLSDYYSAILAGIGALKGPIHGGAVEEAIKQFMEIGSPEKVEEWFFKALQQKRKIMGAGHRVYKTYDPRARIFKKYASKLGDKKLFEIAERLERLVEEYLSKKGISINVDYWSGLVFYGMKIPIELYTTIFAMGRIAGWTAHLAEYVSHNRIIRPRLQYVGEIGKKYLPIELRR

SEQ ID NO: 36946 - DNA, 1290 bp, Streptomyces coelicolor A3(2)
  CDS (1)..(1290): transl_table=11
gtgagcgacaactctgtagtactgcggtacggcgacggcgagtacacctacccggtgatcgacagcaccgtcggtgacaagggcttcgacatcgggaagctccgcgcccagaccggtctggtgacgctggacagcggttacggcaacaccgccgcctacaaatccgccattacctatctggacggcgaagccggcatcctccggtaccgcggctacccgatcgagcagctggccgagcgctcctccttcgtggaggtggcctacctgctgatcaacggcgagctgccgacggtcgacgagctgtccgcgttcaagggcgagatcacgcagcacaccctgctgcacgaggacgtcaagaacttctacaagggcttcccgcgcgacgcccacccgatggccatgctgtcgtcggtggtctcggcgctgtccaccttctaccaggacagccacaacccgttcgacgagcggcagcgcaacctctccacgatccggctgctcgcgaagcttccgacgatcgcggcgtacgcgtacaagaagtcgatcggccacccgttcgtctacccggccaacaacctcggctacgtcgagaacttcctgcgcatgaccttctcggttccggcgcaggagtacgagctggacccgacggtcgtcgcggccctcgacaagctgctgatcctgcacgcggaccacgagcagaactgctcgacctccacggtgcgcctggtcggctcctcgcaggcgaacatgttcgcctcgatctccgccggcatcaacgccctgtggggcccgctgcacggcggcgccaaccagtcggtgctggagatgctggaaggcatccgcgacgcgggcggcgacgtcgactccttcatccgcaaggtgaagaacaaggaggacggcgtccgcctgatgggcttcggccaccgggtctacaagaacttcgacccgcgcgccaagatcatcaaggccgccgcgcacgacgtgctctccgcgctcggcaagtccgacgagctgctggacatcgcgctgaagctggaggagcacgcgctctccgacgactacttcgtctcgcgcagcctctacccgaacgtcgacttctacaccggtctgatctaccgggccatgggcttcccgaccgagatgttcacggtcctgttcgccctcggccggctgccgggctggatcgcccagtggcacgagatgatcaaggagccgggttcccgcatcggccgcccgcgccagatctacacgggcgtcgtcgagcgcgacttcgtccccgtcgaggagcgctga

SEQ ID NO: 36947 - protein, 429 aa, Streptomyces coelicolor A3(2)
MSDNSVVLRYGDGEYTYPVIDSTVGDKGFDIGKLRAQTGLVTLDSGYGNTAAYKSAITYLDGEAGILRYRGYPIEQLAERSSFVEVAYLLINGELPTVDELSAFKGEITQHTLLHEDVKNFYKGFPRDAHPMAMLSSVVSALSTFYQDSHNPFDERQRNLSTIRLLAKLPTIAAYAYKKSIGHPFVYPANNLGYVENFLRMTFSVPAQEYELDPTVVAALDKLLILHADHEQNCSTSTVRLVGSSQANMFASISAGINALWGPLHGGANQSVLEMLEGIRDAGGDVDSFIRKVKNKEDGVRLMGFGHRVYKNFDPRAKIIKAAAHDVLSALGKSDELLDIALKLEEHALSDDYFVSRSLYPNVDFYTGLIYRAMGFPTEMFTVLFALGRLPGWIAQWHEMIKEPGSRIGRPRQIYTGVVERDFVPVEER

SEQ ID NO: 36948 - DNA, 1290 bp, Xanthomonas axonopodis pv. citri str. 306
  CDS (1)..(1290): transl_table=11
gtgtccgatcttgatcaggtcacgctcaacgccggcgacaagtcggtcgttctgccggttctcaagcccacgcttggcaatgattgcgtcgatatctccaagctgaccaaagaaaccggtctgttcacctacgattcgggcttcaccgccaccgccagctgcaagtcggccatcacctacatcgatggcgacaatggcgtgttgctgtatcgcggctacccgatcgaacagctggccgaaaagtccagcttcctcgaggtctcgtacctgctgatgaacggcgaactgccgacggcggacgaattcaagaagttcgaccacgaagtgacgcatcacaccatgatgcacgagtcgctgaagaacttcctcggtggtttccgtcatgacgcacacccgatggccatgctggccggctcggtcgcctcgctgtctgcgttctaccatgacaccctggacctcaacgatccggagcagcgtcgtcaggccgccatccgtctgatcgccaaggtgccgaccctggcggctgccgcgtaccgttattcgatcggctggccgatccgctacccgcgcaacaacctgaactacgtcgatcgcttcctgcacatgatgttcgaagtgccgagcgagccgctggagatcaatccggtcgttgccaaggccctggatctgctgttcatcctgcacgccgaccacgagcagaacgcctcgacctcgaccgtgcgtctggtcggttcgaccggtgccaacccgtacgcctcggtcgcagcgggcatcaccgcgctgtggggcccggcacatggtggcgccaacgaagccgtgctgaagatgttggaagagatcggcaccgccgacaacgtcgaatccgccgtggccaaggccaaggacaagaattcctcgttccgtctgatgggcttcggtcaccgcgtctacaagaacttcgacccgcgcgccaagatcatccgtgagatgacccacaaggtgctgggcgagctgggcgtcaacgacccgctgctggaagtggcgctgaagctggaagaggccgcgctgaaggacgactacttcgtgcagcgcaagctgtacccgaacgtcgacttctactcgggcatcatctacaaggcgctcaatatcccggtggaaatgttcaccgtgatgttcgccatcgcacgcaccgcaggctgggtgtcgcattggctggaacagcaggtcgacccggaaatgaagatcggccgtccgcgccagatctacaccggctacgacaagcgcgattacaccgacagcgccaagcgctga

SEQ ID NO: 36949 - protein, 429 aa, Xanthomonas axonopodis pv. citri str. 306
MSDLDQVTLNAGDKSVVLPVLKPTLGNDCVDISKLTKETGLFTYDSGFTATASCKSAITYIDGDNGVLLYRGYPIEQLAEKSSFLEVSYLLMNGELPTADEFKKFDHEVTHHTMMHESLKNFLGGFRHDAHPMAMLAGSVASLSAFYHDTLDLNDPEQRRQAAIRLIAKVPTLAAAAYRYSIGWPIRYPRNNLNYVDRFLHMMFEVPSEPLEINPVVAKALDLLFILHADHEQNASTSTVRLVGSTGANPYASVAAGITALWGPAHGGANEAVLKMLEEIGTADNVESAVAKAKDKNSSFRLMGFGHRVYKNFDPRAKIIREMTHKVLGELGVNDPLLEVALKLEEAALKDDYFVQRKLYPNVDFYSGIIYKALNIPVEMFTVMFAIARTAGWVSHWLEQQVDPEMKIGRPRQIYTGYDKRDYTDSAKR

SEQ ID NO: 36950 - DNA, 1149 bp, Thermosynechococcus elongatus BP-1
  CDS (1)..(1149): transl_table=11
atggttgcttgcgaatttagccccggtcttgacggtattcccgttgctcaatcggccattagctatgtggatggccaagcaggcattctggagtatcgcggtgtcccgattcaggaactagcggagaaaagcacgtttttggaaactgccttcctcttgatttggggctactggccaaacagggaggagttagcagcctttgagcacgatattacctaccatcgccgcgttaaatatcgcattcgcgatatgatgaaatgctttcccgaaagtggccaccccatggatgccctgcaggcctcggcgggagccttgggattgttctattcacggcgggcactcgaggatccagagtacattcgggcagcggtgattcgcctcttggcaaaaattccaacgatggtggcggcctttcaactgatccgcaagggaaatgacccagtcatgccctgtgatgaactggactatgcggccaattttctctatatgctcaatgagcggcggccggatccatttgcagcgcgagtatttgatatttgcttgattctccacgcggagcacacgatgaatgcctcaaccttctcggcgcgggtgacggcctcgacgttgacagacccctacgccgtggttgcttcagcggtgggtacgctggcagggccactccacgggggcgccaatgaagatgtgatcaatatgcttgaagaaatcggcagtgtcgagaatgtccgtccctatgtggaaaagtgtatccagaacaagatcaaaattgctgggtttggccatcgtgtgtataaggtcaaggatccgcgcgccacgattttacagaagttggcggagcagttgtttgataagtttggcggcgatcgctactacgacattgccctgaaactggaggaagtggtgggcgaatacctcagttacaaggggatttaccccaatgtagacttttactctggtcttgtctaccggcggttgggaattcccagtgatttgtttacgccggtgtttgcgatcgcccgcgtggccggttggctagcccactggaaggaacaactggaggccaatcgcatttatcgtcccacccaagtctatacgggtgcccacaatcagccctatgtgcccatggaggaacgcaatcatcgcccctaa

SEQ ID NO: 36951 - protein, 382 aa, Thermosynechococcus elongatus BP-1
MVACEFSPGLDGIPVAQSAISYVDGQAGILEYRGVPIQELAEKSTFLETAFLLIWGYWPNREELAAFEHDITYHRRVKYRIRDMMKCFPESGHPMDALQASAGALGLFYSRRALEDPEYIRAAVIRLLAKIPTMVAAFQLIRKGNDPVMPCDELDYAANFLYMLNERRPDPFAARVFDICLILHAEHTMNASTFSARVTASTLTDPYAVVASAVGTLAGPLHGGANEDVINMLEEIGSVENVRPYVEKCIQNKIKIAGFGHRVYKVKDPRATILQKLAEQLFDKFGGDRYYDIALKLEEVVGEYLSYKGIYPNVDFYSGLVYRRLGIPSDLFTPVFAIARVAGWLAHWKEQLEANRIYRPTQVYTGAHNQPYVPMEERNHRP

SEQ ID NO: 36952 - DNA, 1293 bp, Bifidobacterium longum NCC2705
  CDS (1)..(1293): transl_table=11
atggcaacggcacaacttgatgtcgattcgaacaagttcaacctgcccgtggttaaggctagtgcagggccggatggcatcgtcgtttccaaactgcgcaacgatggctgggtaacgcttgatcccggattcctcaccaccgcgcagtgcgaatcgaaaatcacctacatcgacggcaagcattcgattttgcgctactgcggttaccccatcgagcaactgtgcgagaactccgattttctggaggtggcgtggctgctgcgccacggcgagctgccgagcagggctgagtatgagcagttctgtgcggacatcaatcacaagacgatggttggcgaagacttccgtaccttcatgggttcgttcccgcgctccgctcacccgatgagcgtgcttgcctccgccatcaatgcgctggccacgttctacccggacaccaccgatatttctgacaacgaccagcttgatgaggccgccaagatcatcatggccaaggcccgtacgattgtgtcgtacatcttccgccgtcgtcgcgatgagccgatgctgtaccccgattacgcgcgcggctatgtggacgacttcctgcgcatgtgcttcgctgtgccgtacgagccgtttgaatccgacccgctgtatgtgcatgctttgggtcgtttgttgattattcatgccgaccatgagcagaactgctcgacctcggtggtgcgtatcgccggttccgcccacgccaacctgtattcggcggtggccgctggcgtcaatgcgctgtccggtccgttgcatggtggtgcgaatgaggccgtactgcgccaattgaaggcgattcgtgattccggcaagtctgtggccgagttcgtgcgtgatgccaaggagaatggccagaagatttccggccttggccaccgtgtatacaagtcgtatgatccgcgcgcggcgattgccaggaagtatctggaaaagatcatggagcgcgaagatacgcagaagctgccgtctgacgagcgcgcgctgttcgccgtggccaccgagcttgaagatattgcgctgaatgacgaatatttcgtatcgcgcaacctgtatccgaacgtcgacttctacacgggcttgatttatcgggcgatcggcttcgatccggccatgttcaccacgctgttcgcgctgggccgcattcccggttggattgcgcagtaccgtgagatgttggccgacccgaataccaagatcggccgcccacgccaggtctacaccggtccggtcgagcgcgatttcgtgccgatggacgagcggtga

SEQ ID NO: 36953 - protein, 430 aa, Bifidobacterium longum NCC2705
MATAQLDVDSNKFNLPVVKASAGPDGIVVSKLRNDGWVTLDPGFLTTAQCESKITYIDGKHSILRYCGYPIEQLCENSDFLEVAWLLRHGELPSRAEYEQFCADINHKTMVGEDFRTFMGSFPRSAHPMSVLASAINALATFYPDTTDISDNDQLDEAAKIIMAKARTIVSYIFRRRRDEPMLYPDYARGYVDDFLRMCFAVPYEPFESDPLYVHALGRLLIIHADHEQNCSTSVVRIAGSAHANLYSAVAAGVNALSGPLHGGANEAVLRQLKAIRDSGKSVAEFVRDAKENGQKISGLGHRVYKSYDPRAAIARKYLEKIMEREDTQKLPSDERALFAVATELEDIALNDEYFVSRNLYPNVDFYTGLIYRAIGFDPAMFTTLFALGRIPGWIAQYREMLADPNTKIGRPRQVYTGPVERDFVPMDER

SEQ ID NO: 36954 - DNA, 1293 bp, Brucella suis 1330
  CDS (1)..(1293): transl_table=11
atgtcagataagacagccagctttaccctcgacggcaaaacgttcgatctgcctgtgcgaaaaggcactgtcgggccggatgtcgttgatattggtccactttacaagaattcccacgcattcacctacgaccctggcttcacttccaccgcttcgtgcgaatccaaaatcacctatatcgatggtgacgaaggcgtcctgctttatcgcggctacccgatcgaccagcttgccgagcatggcgacttcctcgaaacctgctatctgcttctttacggcgaactgccgaccgcaacccagaaggccgatttcgactatcgtgtaacccgccacaccatgctgcacgagcagatgacgaagttcttcaccggcttccgtcgtgatgcccacccgatggctgtcatggtgggttgcctgggcgccatgtccgccttctaccacgactcgaccgatatcaccgatccgcatcagcgcatggtcgcttcgatccgcctgatcgccaaggtgccgacgcttgcagccatggcctacaagtaccatatcggccagccgttcgtatatccgaagaacgacctcgatttcgcgtcgaacttcctgcacatgtgcttcaccgtgccttgcgaagagtacaaggtgaacccggttctggcgcgcgccatggaccgcattttcatcctgcatgctgatcacgaacagaatgcctccacctcgaccgtccgcctcgccggctcgtcgggtgcaaacccgtttgcctgcattgccgctggcgtggcctgcctctggggcccggctcatggcggcgccaatgaagctgcgctcaacatgctttcggaaatcggctcggttgaccgtatcccggaatatatcgccagggctaaagacaagaacgatccgttccgtttgatgggcttcggccatcgcgtttacaagaactacgatccgcgcgccaagatcatgcagaagacctgccatgaagtcctcggcgagctgggcatcaaggatgatccgctgcttgacgttgcaatggaactggaaaggattgccctgaccgacgaatatttcatcgaaaagaagctctacccgaacatcgacttctattcgggcatcacgctgaaggcgctgggcttcccgaccgaaatgttcaccgtcctgttcgcccttgcccgcaccgttggctgggtcgcccagtggaaggaaatgatcgaagatccgcagcagaaaatcggccgtccgcgccagctctacaccggcgcaaccgaacgcgattacgtgccgcttgcaaagcgcaagtaa

SEQ ID NO: 36955 - protein, 430 aa, Brucella suis 1330
MSDKTASFTLDGKTFDLPVRKGTVGPDVVDIGPLYKNSHAFTYDPGFTSTASCESKITYIDGDEGVLLYRGYPIDQLAEHGDFLETCYLLLYGELPTATQKADFDYRVTRHTMLHEQMTKFFTGFRRDAHPMAVMVGCLGAMSAFYHDSTDITDPHQRMVASIRLIAKVPTLAAMAYKYHIGQPFVYPKNDLDFASNFLHMCFTVPCEEYKVNPVLARAMDRIFILHADHEQNASTSTVRLAGSSGANPFACIAAGVACLWGPAHGGANEAALNMLSEIGSVDRIPEYIARAKDKNDPFRLMGFGHRVYKNYDPRAKIMQKTCHEVLGELGIKDDPLLDVAMELERIALTDEYFIEKKLYPNIDFYSGITLKALGFPTEMFTVLFALARTVGWVAQWKEMIEDPQQKIGRPRQLYTGATERDYVPLAKRK

SEQ ID NO: 36956 - DNA, 1413 bp, Corynebacterium efficiens YS-314
  CDS (1)..(1413): transl_table=11
ttggagacttttgtgtcgcgcaacaacattctggctgcacgtgatgcgtccgacctggttattgaatctggtgacctcccgcaacccgggggaaccgacaaaaagtttgaaagggaaatcgtggcttctgataacaacaaggctgtactgcactaccctggcggcgaattcgagatgggcatcaagcaggccaccgagggtaactccggtgtcatcctgggtaagatgctgtcggaaaccggtctggtcaccttcgaccccggttatgtcagcaccggttccaccgaatccaagatcacctacatcgatggtgatgcaggcatcctgcgctaccgcggctacgacattgcggatctggccgaaaatgccaccttcaatgaggtctcctacctcctgatcaagggtgagctcccgaccccggaagagctccacaagttcaacgacgagattcgtcaccacaccctgctggacgaggacttcaagtcccagttcaatgtcttccctcgcgatgcccacccgatggccaccctggcctcctcggttaacatcctctccacctactaccaggatcagctggatcccctggatgaggctcagctggacaaggcaaccgtccgcctgatggcgaaggttccgatgctggctgcatacgcacaccgtgcccgcaagggtgcgccgtacatgtacccggacaactccctcaatgcccgtgagaacttcctgcgcatgatgttcggttacccgaccgagccgtacgaggttgatccgatcatggtcaaggccctcgacaagctgctcatcctgcacgcagaccacgagcagaactgctccacctccactgtccgcatgatcggctccgcgcaggcgaacatgttcgtctccatcgccggcggcatcaacgcactctccggcccgctgcacggtggcgccaaccaggctgtcctcgagatgctcgaggagatcgcagccaacggcggcgacgcaaccgacttcatgaaccgcgtgaagaacaaggagaagggtgtccgcctcatgggcttcggacaccgcgtctacaagaactacgatccgcgtgcagccatcgtcaaggacaccgcccacgagatcctcgagcacctcggtggcgacccactgctggatctggctctcaagctggaggagatcgccctcaacgacgattacttcatctcccgcaagctgtacccgaacgtggacttctacaccggcctgatctaccgcgccatgggcttcccgacggacttcttcaccgtcctgttcgccatcggccgcctcccgggctggatcgcccactaccgcgagcagctcgccgatccgggcgccaagatcaaccgtcctcgccagatctacaccggtgagaccgcacgcaagatcatcccccgcgaagagcgctag

SEQ ID NO: 36957 - protein, 470 aa, Corynebacterium efficiens YS-314
METFVSRNNILAARDASDLVIESGDLPQPGGTDKKFEREIVASDNNKAVLHYPGGEFEMGIKQATEGNSGVILGKMLSETGLVTFDPGYVSTGSTESKITYIDGDAGILRYRGYDIADLAENATFNEVSYLLIKGELPTPEELHKFNDEIRHHTLLDEDFKSQFNVFPRDAHPMATLASSVNILSTYYQDQLDPLDEAQLDKATVRLMAKVPMLAAYAHRARKGAPYMYPDNSLNARENFLRMMFGYPTEPYEVDPIMVKALDKLLILHADHEQNCSTSTVRMIGSAQANMFVSIAGGINALSGPLHGGANQAVLEMLEEIAANGGDATDFMNRVKNKEKGVRLMGFGHRVYKNYDPRAAIVKDTAHEILEHLGGDPLLDLALKLEEIALNDDYFISRKLYPNVDFYTGLIYRAMGFPTDFFTVLFAIGRLPGWIAHYREQLADPGAKINRPRQIYTGETARKIIPREER

SEQ ID NO: 36958 - DNA, 1290 bp, Xylella fastidiosa Temecula1
  CDS (1)..(1290): transl_table=11
atgtccgatcttgataaggtcacgctcaatgctggtgagacttctctcgttttaccggttttgaaacccacgttaggtaatggttgcgttgatattgccaagttgacaaaggaaaccgggctgtttacttacgactctggttttacggcaactgcaagctgtaagtctgccatcacttacattgatggtgaaaagggtgtgttgttgtaccgcggctatccgattgagcagttagccgagcactccagttttttggaggtcgcttatttgttgatgaacggtgagttaccgagaaaagacgagtttgccaagtttgatgatgaaattacgcatcacacgatgatgcatgagtcgttgaagaactttcttggcggttttcattatgatgcacatccaatggctatgttggctgcttcggtggcttcgctgtcggcgttctaccacgatacccttgatttgaacgatcttgagcaacgtcgcttagctgcaattcgtttgatcgctaaggtgccgacgcttgcagcggcagcgcatcgctactcgattggctggccgatccgttatccacgaaacaatcttggttatgtcgagcgctttttgcatatgatgtttgaagtgcctagtgaaccgctgcagttgaatccagtcgtgatcaaagctctggatttactgtttattttgcatgctgatcatgagcagaacgcttcgacatcaacagtccgtttggtgggttcgactggcgctaatccttatgcatcggttgccgcgggtatcaccgcgttgtggggaccggcacacggcggcgctaatgaggccgtgttaaagatgttggaggagattggtgatgctaagaatgttgacttggttattgcaaaagcgaaaaccaaggacaaaaactctccattccgtttgatgggtttcggccatcgtgtctataaacattttgatccacgtgcgaaaatcatccgtgagatggcacacacagttcttggtgagttaggtgtgaacgatccgctactggaagtagcattaaagttggaagaggcagcgctgaaggatgattactttgtgcagcgtaagttgtaccctaacgttgatttttattcgggcatcatctacaaagccatcaacattcctttggaaatgtttacagtgatgtttgccatcgcgcgtaccgcagggtgggtttctcattggcttgagcagcaagtcgacccggagatgaaaatcagcaggccgcgccaaatttacacaggtcatcgcgagcgtgactacaaagatgctaggtaa

SEQ ID NO: 36959 - protein, 429 aa, Xylella fastidiosa Temecula1
MSDLDKVTLNAGETSLVLPVLKPTLGNGCVDIAKLTKETGLFTYDSGFTATASCKSAITYIDGEKGVLLYRGYPIEQLAEHSSFLEVAYLLMNGELPRKDEFAKFDDEITHHTMMHESLKNFLGGFHYDAHPMAMLAASVASLSAFYHDTLDLNDLEQRRLAAIRLIAKVPTLAAAAHRYSIGWPIRYPRNNLGYVERFLHMMFEVPSEPLQLNPVVIKALDLLFILHADHEQNASTSTVRLVGSTGANPYASVAAGITALWGPAHGGANEAVLKMLEEIGDAKNVDLVIAKAKTKDKNSPFRLMGFGHRVYKHFDPRAKIIREMAHTVLGELGVNDPLLEVALKLEEAALKDDYFVQRKLYPNVDFYSGIIYKAINIPLEMFTVMFAIARTAGWVSHWLEQQVDPEMKISRPRQIYTGHRERDYKDAR

SEQ ID NO: 36960 - DNA, 1290 bp, Pseudomonas syringae pv. tomato str. DC3000
  CDS (1)..(1290): transl_table=11
atggctgacaaaaaagcgcagttgatcatcgagggcgctgcccccgtcgagctgccaatactgaccggtacagtgggtccggacgtgatcgacgtacgcggtctgaccgccaccggccgcttcacatttgaccctggcttcatgtccacggcctcttgcgagtcgaagatcacctacattgatggtgacaacggaattctgctgcaccgcggctacccgatcgaacaactggccgagcagtccgattacctcgagacctgctacctgttgctcaacggcgagctgccaaccgccgaacagaaagcccagttcgtggccgtggtcaagaaccacacgatggttcacgaacaactcaagaccttcttcaacggctttcgccgtgacgcccacccgatggccgtcatgtgcggtgtagtcggcgccctgtcggcgttctaccacgattcgctggacatcaataacccgcagcaccgcgaaatttcggctgtacgcctggtcgccaagatgccgaccctggcagcgatggtctacaagtactccatgggccaacccatgatgtacccgcgcaacgacctcagctacgccgaaaacttcctgcacatgatgttcaacacgccgtgcgagatcaaaccgatcagcccggtgctggccaaggcgatggacaagatcttcatccttcacgccgatcacgagcagaacgcgtcgacctctaccgtgcgcatggcgggctcctcgggtgccaacccgttcgcctgtatcgcagccggtatcgcggcactctggggcccggctcacggcggcgccaacgaagccgtgctgaccatgctcgatgaaatcggcgacgtgtcgaacatcgacacattcatagccaaagccaaggacaagaacgatccgttcaagctcatgggcttcggtcaccgggtctacaagaaccgtgaccctcgcgcgaccgtgatgaagcagacctgcgacgaagtactcaaggaactgggcatcaaaaacgatcctcagctcgagctggccatgcgtcttgaagagatcgccctgaccgacccgtacttcatcgagcgctcgctgtacccgaacgttgacttctactcgggcatcatcctcaaggctatcggcatcccgaccagcatgttcaccgtgatcttcgccctggcgcggaccgttggctggatctcgcactggaaagaaatgctctccagcccttacaagatcggtcgcccgcgccagctctacaccggcaacgtgcaacgcgacattattgcactgaaagaccgcaagtaa

SEQ ID NO: 36961 - protein, 429 aa, Pseudomonas syringae pv. tomato str. DC3000
MADKKAQLIIEGAAPVELPILTGTVGPDVIDVRGLTATGRFTFDPGFMSTASCESKITYIDGDNGILLHRGYPIEQLAEQSDYLETCYLLLNGELPTAEQKAQFVAVVKNHTMVHEQLKTFFNGFRRDAHPMAVMCGVVGALSAFYHDSLDINNPQHREISAVRLVAKMPTLAAMVYKYSMGQPMMYPRNDLSYAENFLHMMFNTPCEIKPISPVLAKAMDKIFILHADHEQNASTSTVRMAGSSGANPFACIAAGIAALWGPAHGGANEAVLTMLDEIGDVSNIDTFIAKAKDKNDPFKLMGFGHRVYKNRDPRATVMKQTCDEVLKELGIKNDPQLELAMRLEEIALTDPYFIERSLYPNVDFYSGIILKAIGIPTSMFTVIFALARTVGWISHWKEMLSSPYKIGRPRQLYTGNVQRDIIALKDRK

SEQ ID NO: 36962 - DNA, 1290 bp, Vibrio parahaemolyticus RIMD 2210633
  CDS (1)..(1290): transl_table=11
atggcggataagaaagcgacccttcatgttgaaggtcaagcgccaatcgaactgccaattatggacggtacgctaggtacacctgtaattgacgttcgtaaactgggagccaatggttactttacttttgacccaggttttcttgccactgcatcttgtgaatcatcaatcacttacatcgatggcggcaaaggtattcttttgcaccgcggttacccgattgatcaattagccaataacgcagattacctagaagtatgttacatccttctttacggtgaagcccctacccgagaacaatacgagcaattcaaaacgacagttactcgtcacacaatggtacacgagcaaatcgcaagcttcttccatggcttccgtcgtgatgctcacccaatggcagtaatgtgtggtgtggttggtgctcttgcagccttctaccacgattcacttgatatcaataacgacgagcaccgcgaaattgcggcttatcgtctgctatctaaaatgccaactctggctgcaatgtgtttcaaatactctgttggtcagccatttatctacccacgcaacgatttgagctacgcggaaaacttcctacacatgatgtttgctaacccatgtgaagagtatgaagtgaaccctgttgttgctcgtgcgatggataaaatcttcacacttcacgcagatcacgagcaaaacgcgtcgacatcaacagtccgtttagcaggttcttctggtgcaaacccattcgcatgtattgccgctggtatcgcatcactttggggcccagctcacggtggcgcaaacgaagcatgtctgaagatgctagaagaaatcggcagcgtggataacattccagaatacgtggaacgtgcgaaagacaaagatgacccattccgtttgatgggcttcggtcaccgtgtttacaagaactacgatcctcgtgcgaccgtaatgcgcgaaacatgtcacgaagttctaaaagagctcaacattaaagatcctctgctggacgtagcaatggaacttgagcgtatcgctctttctgacgagtactttgtttctaagaagctatacccgaacgtagatttctattcaggtatcattctgaaagcgatcggtattcctgtatcaatgtttacggttatcttcgcgatttctcgtactattggttggattgcccactggaacgagatgcacagcgacccactaaaccgtatcggtcgtccacgtcagctttacaaaggcgaaacgcaacgtgaattttcgccgcttcatgagcgcgaataa

SEQ ID NO: 36963 - protein, 429 aa, Vibrio parahaemolyticus RIMD 2210633
MADKKATLHVEGQAPIELPIMDGTLGTPVIDVRKLGANGYFTFDPGFLATASCESSITYIDGGKGILLHRGYPIDQLANNADYLEVCYILLYGEAPTREQYEQFKTTVTRHTMVHEQIASFFHGFRRDAHPMAVMCGVVGALAAFYHDSLDINNDEHREIAAYRLLSKMPTLAAMCFKYSVGQPFIYPRNDLSYAENFLHMMFANPCEEYEVNPVVARAMDKIFTLHADHEQNASTSTVRLAGSSGANPFACIAAGIASLWGPAHGGANEACLKMLEEIGSVDNIPEYVERAKDKDDPFRLMGFGHRVYKNYDPRATVMRETCHEVLKELNIKDPLLDVAMELERIALSDEYFVSKKLYPNVDFYSGIILKAIGIPVSMFTVIFAISRTIGWIAHWNEMHSDPLNRIGRPRQLYKGETQREFSPLHERE

SEQ ID NO: 36964 - DNA, 1290 bp, Streptomyces avermitilis MA-4680
  CDS (1)..(1290): transl_table=11
gtgagcgacaactctgtagtactgcggtacggcgatggcgagtacacctacccggtgatcgacagcaccgtcggcgacaagggcttcgacatcgggaagctccgcgctcagaccggtctggtgactctggacagtgggtacggcaacactgccgcctataaatccgcgatcacctatctcgacggtgagcagggcatcctccggtaccgcggctacccgatcgagcagctggccgagcgctccaccttcctggaggtggcgtacctgctgatcaacggcgagctgccgaccgtcgacgagctctccacgttcaagggcgagatcacgcagcacaccctgctgcacgaggacgtcaagaacttctaccgcggcttcccgcgtgacgcccacccgatggcgatgctgtcctcggtggtctccgcgctgtcgacgttctaccaggacagccacaacccgttcgacgagaagcagcgcaatctctccacgatccgccttctcgccaagcttccgacgatcgcggcgtacgcctacaagaagtcgatcggtcaccccttcgtctacccgcgcaacgacctcgggtacgtcgagaacttcctgcgcatgaccttctcggtcccggcgcaggactacgacctggacccggtcgtcgtctccgcgctcgacaagctgctgattctgcacgcggaccacgagcagaactgttcgacctccaccgtgcgtctggtcggctcgtcgcaggcgaacatgttcgcgtcgatctccgccggcatctccgccctctggggcccgctgcacggtggcgccaaccagtccgtcctggagatgctcgagggcatccagacgagcggtggcgacgtcgacaccttcatccgcaaggtgaagaacaaggaagacggcgtgaagctcatgggcttcgggcaccgcgtctacaagaacttcgacccccgcgcgaagatcatcaaggcggcggcgcacgacgtcctctcggcgctcggcaagtccgacgagctgctggacatcgcgctgaagctggaggagcacgcgctggccgacgactacttcgtcgagcgcaagctctacccgaacgtggacttctacaccggtctgatctaccgcgccatgggcttcccgaccgagatgttcacggtcctgttcgccctcggccgccttccgggctggatcgcccagtggcacgagatgatcaaggagccgggctcccgcatcggccgcccgcgccagatctacacgggcgaggtcctgcgcgacttcgtcccggtcgagggccggtaa

SEQ ID NO: 36965 - protein, 429 aa, Streptomyces avermitilis MA-4680
MSDNSVVLRYGDGEYTYPVIDSTVGDKGFDIGKLRAQTGLVTLDSGYGNTAAYKSAITYLDGEQGILRYRGYPIEQLAERSTFLEVAYLLINGELPTVDELSTFKGEITQHTLLHEDVKNFYRGFPRDAHPMAMLSSVVSALSTFYQDSHNPFDEKQRNLSTIRLLAKLPTIAAYAYKKSIGHPFVYPRNDLGYVENFLRMTFSVPAQDYDLDPVVVSALDKLLILHADHEQNCSTSTVRLVGSSQANMFASISAGISALWGPLHGGANQSVLEMLEGIQTSGGDVDTFIRKVKNKEDGVKLMGFGHRVYKNFDPRAKIIKAAAHDVLSALGKSDELLDIALKLEEHALADDYFVERKLYPNVDFYTGLIYRAMGFPTEMFTVLFALGRLPGWIAQWHEMIKEPGSRIGRPRQIYTGEVLRDFVPVEGR

SEQ ID NO: 36966 - DNA, 1284 bp, Nitrosomonas europaea ATCC 19718
  CDS (1)..(1284): transl_table=11
atgcccccacaaaacgtagccactttgtcaccgggtaaaggcaaacaagagattgaactgcccattgtgtccggtaatgaaggcccggatgtcgtcgatattcgttcgctgtatgcccagagcggcatgtttacctacgaccccggttttgtgtcgacggccagctgcaaatcggccattacgttcatcgacggtgacaaaggtgttctgttgtaccgtggctatccgatcgagcaactggccacccgctgtgatttcatggaagtcagttatcttctgctgaatggcgagctgccgacacccgaccagaaagcgaaatttgtcgacaacatcaaaaaccacacgatgctgcacgagcagctgatcaagtttctcagcggattccgccgtgatgcgcaccccatggcagtcatggtcggcgtagtcggcgcattgtctgccttttatcatgacgccatggatgtctctgacgcacaacatcgcgaacagtctgcattccgcctgattgccaagctgccgacgatcacggccattgcctataaatacaatattggccagccgttcatctatccgcacaacgatctgggattcacggaaaatttcctgcacatgatgtttgccacaccggccgagcaatatactcccaatccggtcatcgtcagggcactggatcgcatcctgattctgcatgcagaccatgaacagaatgcctccacttcgactgtccgcctggccggttcgagcggagccaacccgtttgcctgtatctcagccggaattacctgcttatggggtccggcacatgggggcgcgaatgaagcctgcctcaacatgcttgaacaaatcggagatgtttcacgtatcaacgaatacattgcgcgagccaaagacaagaacgatcctttccggctgatgggctttggccaccgggtctacaaaaattttgatccgcgcgccacattgatgcgtgaaacctgccatgaggtcctggatgaactggggttacataacgaccggttgttcaagctggcgctagagctggaaaaaatcgcgttggaggatgactacttcattaccaagaagctttaccccaatgtcgatttctattcgggcatcgtacaacgcgcactgggtattccgacgtcgatgttcaccgccatttttgccacagcccgcaccgttggctgggttgctcagtggaacgaaatgatttccgatccggaacaaaaaataggccggccacgtcaactgtacgtgggcgcacctcgcagagatgtgccatga

SEQ ID NO: 36967 - protein, 427 aa, Nitrosomonas europaea ATCC 19718
MPPQNVATLSPGKGKQEIELPIVSGNEGPDVVDIRSLYAQSGMFTYDPGFVSTASCKSAITFIDGDKGVLLYRGYPIEQLATRCDFMEVSYLLLNGELPTPDQKAKFVDNIKNHTMLHEQLIKFLSGFRRDAHPMAVMVGVVGALSAFYHDAMDVSDAQHREQSAFRLIAKLPTITAIAYKYNIGQPFIYPHNDLGFTENFLHMMFATPAEQYTPNPVIVRALDRILILHADHEQNASTSTVRLAGSSGANPFACISAGITCLWGPAHGGANEACLNMLEQIGDVSRINEYIARAKDKNDPFRLMGFGHRVYKNFDPRATLMRETCHEVLDELGLHNDRLFKLALELEKIALEDDYFITKKLYPNVDFYSGIVQRALGIPTSMFTAIFATARTVGWVAQWNEMISDPEQKIGRPRQLYVGAPRRDVP

SEQ ID NO: 36968 - DNA, 1296 bp, Mycobacterium bovis AF2122/97
  CDS (1)..(1296): transl_table=11
gtggccgacaccgacgacaccgcaaccctccgttacccgggaggcgagatcgacctgcagatcgtgcacgccaccgaaggcgccgacggcattgcgctcgggccgctgctggcaaaaaccgggcacaccacgttcgacgtcggcttcgccaacacggccgccgctaaaagctccatcacctacatcgacggagatgccggcattctgcgttatcgcggctacccgatcgaccaactggcggagaagtcaaccttcatcgaggtctgctacctgttgatttacggcgagctgcccgataccgaccagcttgcccagttcaccggccggatccagcgccacaccatgctgcacgaggatctcaagcggttcttcgacggctttccgcgcaatgcccacccgatgccggtgttgtccagcgtggtcaatgcgctgtcggcgtactaccaggatgctctggaccccatggacaacggtcaagtcgagctgtcgaccattcggctgctggccaagctgcccaccatcgccgcgtacgcctacaagaaatcggtcggccagcccttcctctacccagataactcactgacgctggtggagaacttcctacggttgacgttcggatttcccgccgagccctaccaggccgaccccgaggtggtgcgggcgctggacatgttgttcatcttgcacgccgaccacgagcagaactgctcgacgtcgacggttcggctggttggctcgtcgcgagccaacctgttcacctcgatctcgggtggcatcaacgcactatggggtccgcttcatggcggcgccaatcaggctgtcctggagatgctcgagggcattcgcgacagcggcgacgacgtcagcgagtttgtacgcaaggtcaagaaccgcgaggccggggtcaaattgatgggtttcggtcatcgtgtctacaagaactacgatccgcgggcccgcatcgtcaaggaacaggccgacaagatcctggccaagctcggcggcgatgactccttgctgggcatcgccaaggagctcgaagaggcggcgctgaccgacgactacttcatcgaacgcaagctttaccccaacgtcgacttctacaccggcctgatctaccgggccctcggcttcccgaccaggatgttcaccgtgttgtttgccctgggcaggcttcccggctggatcgcgcactggcgtgagatgcacgacgagggcgacagcaagatcggccggccccgccagatctacaccggctacgcggagcgcgactacgtcaccatagacgcgcggtag

SEQ ID NO: 36969 - protein, 431 aa, Mycobacterium bovis AF2122/97
MADTDDTATLRYPGGEIDLQIVHATEGADGIALGPLLAKTGHTTFDVGFANTAAAKSSITYIDGDAGILRYRGYPIDQLAEKSTFIEVCYLLIYGELPDTDQLAQFTGRIQRHTMLHEDLKRFFDGFPRNAHPMPVLSSVVNALSAYYQDALDPMDNGQVELSTIRLLAKLPTIAAYAYKKSVGQPFLYPDNSLTLVENFLRLTFGFPAEPYQADPEVVRALDMLFILHADHEQNCSTSTVRLVGSSRANLFTSISGGINALWGPLHGGANQAVLEMLEGIRDSGDDVSEFVRKVKNREAGVKLMGFGHRVYKNYDPRARIVKEQADKILAKLGGDDSLLGIAKELEEAALTDDYFIERKLYPNVDFYTGLIYRALGFPTRMFTVLFALGRLPGWIAHWREMHDEGDSKIGRPRQIYTGYAERDYVTIDAR

SEQ ID NO: 36970 - DNA, 1284 bp, Helicobacter hepaticus ATCC 51449
  CDS (1)..(1284): transl_table=11
atggctagcattactttaacaaacaatgagacaaaagagagttttgagtttgagcttattgaatgcacaagaggaccaaaggctgtagatttttctaagctttttgaacgcaccaatattttttcttatgacccaggttatggttcaaccgcaggatgtaaatcaaccattagctatattaatggcaaaaatggagaattactttataaagggcttccaatagaaaaaattgtagaaaaataccaatttactgatgtgtgcaagctactcattacaggtgaagttcctaaaaatgagacagaaaccaaggaatttgaaattgagcttgtgcatcgtagttttttgaatgagggactcattaatatttttaacgcatttcctgatagcgcacaccctatggcaaatctctctgcttcgctttctgcactttctactttccatttccgccatttggatatgggtaatgaggaagagcgtcaagtaatggcacggcgagcaattgctaaaatccctacacttgcagcattttcttatagacattctttagggattccatatatttatcctgatgttgcgcgtggatatgttgaaaatttcctttatatgttgcgtgcatatcctggtggtaaaatgaaacatacaattaagggtgaagttgaaatcactcctttagaaatagaggctcttgataagatttttacgcttcacgctgatcacggacaaaatgcttctactactactgtgcgcaatgttgcttctacgggagcacacccttatgcagcattaagtgctggtgttaatgcattgtggggtgcagcacacggaggagctaatgaaaaagtgttagatatgctcaatgagattggcgatgctaaaaatgttgataagtttatcaataaggcaaaagataaaaatgatccatttaggcttatgggctttggacatcgtgtgtataaaaactatgacccgcgtgcaaagattctgaaaaaactcaaagatgaccttgatgctaaaggtattaaaatgaatacacgattaagtgatttggcacataaggttgaagaagtagcattaagtgatagctactttgtagagcgaaatctttatccaaatgttgatttttactccggtatcattctttctgcacttaaaattcctgtttctcttttcacgccaatttttgttattgggcgtatgccgggttggtgtgcgcagcttttagagcacgttaaagatccaactacaagaatcacacgaccacgacaagtgtatataggtgagtaa

SEQ ID NO: 36971 - protein, 427 aa, Helicobacter hepaticus ATCC 51449
MASITLTNNETKESFEFELIECTRGPKAVDFSKLFERTNIFSYDPGYGSTAGCKSTISYINGKNGELLYKGLPIEKIVEKYQFTDVCKLLITGEVPKNETETKEFEIELVHRSFLNEGLINIFNAFPDSAHPMANLSASLSALSTFHFRHLDMGNEEERQVMARRAIAKIPTLAAFSYRHSLGIPYIYPDVARGYVENFLYMLRAYPGGKMKHTIKGEVEITPLEIEALDKIFTLHADHGQNASTTTVRNVASTGAHPYAALSAGVNALWGAAHGGANEKVLDMLNEIGDAKNVDKFINKAKDKNDPFRLMGFGHRVYKNYDPRAKILKKLKDDLDAKGIKMNTRLSDLAHKVEEVALSDSYFVERNLYPNVDFYSGIILSALKIPVSLFTPIFVIGRMPGWCAQLLEHVKDPTTRITRPRQVYIGE

SEQ ID NO: 36972 - DNA, 1488 bp, Rhodopirellula baltica SH 1
  CDS (1)..(1488): transl_table=11
atgttaggaatgggtgaacccggacgggtgagagcgtcaaagtccaaaatcgtcctctctgaccgtcggatgtgggtcccgctgattgtcgcttgcatgacgcagggctacactacgtctgtcacccccaagacgtcccgccaactcgtacattgcatctacagatcgcccatgagctcctcctccagtttggaaattcaacgagccgacaccgtccgagtccaattcggggataccaaccttgagttgcctttggtcgaaggttccgaaggtgaaaaagcgatcgatatcagtcgtttacgtgctgacactggcgtgatcaccttggacgatggcttcgtcaacacgggcagcactcgcagtgcgatcacgttcttggatggcgaaaaagggattctgcgttatcgcgggtacccgatcgaggaactggccaaaagctgtgacttcgtcgaggtcgcctaccttttgatctttggcgatctgccaaatgctgaagagattgaaacgtttcgttcagggatccgcgatcacacgatgatccacgaggacatgcggtcgttctacaacggcttccctcgtgacgctcacccgatggcgatcctcagcagcgttgtcggtgcactgtcaacgttctatcaagattccatggatctgaatgatccgcgacaggtcgagatttctctgtatcgcttgattgcgaaattgcccacgatcgcggcatacagctacaagaaatcgatgggccaaccgttcatgtatccgaagaacgagttggactactgcgagaacttcttgcacatgatgttcgcgacgccgacctccgattacttggtcgaccccgatttcgcggaagcactgaacttgctgtttatcgtgcacgcggaccacgagcaaaactgcagcacgtcgaccgttcggatggttggcagcagcaacgccaacttgttcgcgtcgatctcggccggcatcggtgcattgtggggaccgcttcacggcggtgccaacgaagcttgcgtgaacatgctcgaacaaatcgcggccgacggcggcgacgtgaagaagtacgtcgacatggcgaaggacaaatccaacgacttccgcatcatgggctttggtcaccgcgtttacaaaaactcggatccacgagcgacaatcatccgagcgagctgcgataagttgctggccaaattgaacctggatgatccattgttcgaagttgctcaaaagctagaagaagtcgcgctcaaggacgaatacttcatcgagcggaagttgtatcccaacgtcgatttctattccggcgtgatctaccgagcgctcggcattccggtccagatgttcacggttctattcgccattggtcgtttgcccggttggttggctcactggcgtgagatgcatgccaacccagcctcgcgaatcaatcgtccgcgtcagatctacaccggcgcgacgcagcgtgatgtggttccagtcgatcaacgctag

SEQ ID NO: 36973 - protein, 495 aa, Rhodopirellula baltica SH 1
MLGMGEPGRVRASKSKIVLSDRRMWVPLIVACMTQGYTTSVTPKTSRQLVHCIYRSPMSSSSSLEIQRADTVRVQFGDTNLELPLVEGSEGEKAIDISRLRADTGVITLDDGFVNTGSTRSAITFLDGEKGILRYRGYPIEELAKSCDFVEVAYLLIFGDLPNAEEIETFRSGIRDHTMIHEDMRSFYNGFPRDAHPMAILSSVVGALSTFYQDSMDLNDPRQVEISLYRLIAKLPTIAAYSYKKSMGQPFMYPKNELDYCENFLHMMFATPTSDYLVDPDFAEALNLLFIVHADHEQNCSTSTVRMVGSSNANLFASISAGIGALWGPLHGGANEACVNMLEQIAADGGDVKKYVDMAKDKSNDFRIMGFGHRVYKNSDPRATIIRASCDKLLAKLNLDDPLFEVAQKLEEVALKDEYFIERKLYPNVDFYSGVIYRALGIPVQMFTVLFAIGRLPGWLAHWREMHANPASRINRPRQIYTGATQRDVVPVDQR

SEQ ID NO: 36974 - DNA, 1179 bp, Prochlorococcus marinus subsp. marinus str. CCMP1375
  CDS (1)..(1179): transl_table=11
ttggagcaaaaggctatagacaatcaaaatgatccctgcaacatggttttaaagcctggtctcgaaggtgtacccgttacacaatcagctatctgtgacattaatggccttaaaggagagctgaaatataggggttattcaattgcggagttagcggctaaaagcagctttttagaaaccacttatcttctcatctggggagatctcccaagctcaaagcaactaagggaattcgaagatgcaatacaaatgcatcgcagactgagcttcagagttcgagacatgatgaagtgcttccctgcgactggccatcctatggatgccctgcaatcaagcgctgcatcgctaggcctattttattcaagaagagccattgacaaccctcaatatatttacgatgcagtagtaaggctaattgcaaaaatcccaacaatggttgcagcttttcagctgatcagaaaaggacaagatcccatacaacctcgagacgatttaccttattcagcgaactttctttatatgttgactgaaagggaacctgaccccctcgcagccagagtattcgatagatgcttaatacttcatgcagaacacagtttaaatgcaagtacatttagtgcccgagttacagcaagcactttgactgacccctatgcagttgttgcttcagctgttggcacccttgctgggcctttgcatggtggtgcaaatgaggatgtaattgcaatgcttgaagagattggcgcacctgaaaatgctaggaattatttaaaacaagcaattgatcagaaaagcaaaataatgggttttgggcatagggaatataaagtcaaagatcctagagcgacacttttgcaaggatttgcagaagacctatttgcaagatttgggaaagatgaaatgtatgacgtagctagatcagtggaagaagaagcctctccattactagggccaagaggtatatatccaaatgttgacttttactcaggtctggtatatcgaaagttaggaatcccaagagatttatttactccaatttttgccatttcgcgcgtggctggctggctagcccattggcgtgaacaactaagtgctaatcgtattttcagaccaacacaaatttacactggcaagaaaaccagagcttggtgcgcattagaagaacggaataaaaactaa

SEQ ID NO: 36975 - protein, 392 aa, Prochlorococcus marinus subsp. marinus str. CCMP1375
MEQKAIDNQNDPCNMVLKPGLEGVPVTQSAICDINGLKGELKYRGYSIAELAAKSSFLETTYLLIWGDLPSSKQLREFEDAIQMHRRLSFRVRDMMKCFPATGHPMDALQSSAASLGLFYSRRAIDNPQYIYDAVVRLIAKIPTMVAAFQLIRKGQDPIQPRDDLPYSANFLYMLTEREPDPLAARVFDRCLILHAEHSLNASTFSARVTASTLTDPYAVVASAVGTLAGPLHGGANEDVIAMLEEIGAPENARNYLKQAIDQKSKIMGFGHREYKVKDPRATLLQGFAEDLFARFGKDEMYDVARSVEEEASPLLGPRGIYPNVDFYSGLVYRKLGIPRDLFTPIFAISRVAGWLAHWREQLSANRIFRPTQIYTGKKTRAWCALEERNKN

SEQ ID NO: 36976 - DNA, 1311 bp, Bordetella pertussis Tohama I
  CDS (1)..(1311): transl_table=11
atgaacctgtctgacaaaaaagccacgctatccttttcggacggcagcgctcctatcgaattcccagtctacaagggtacggtcggcccggacgtgatcgacatccgcaagctgtatggccagacgggtatgttcacgttcgaccccggcttcatgtccaccgccgcctgcgcctcgggcattacctacatcgacggcgacaagggcgaactgctgtaccgcggctatcccatcgagcagctggccgtcaattgcgacttcctcgacatctgctacctgatcctcaacggcgagctgcccaacggcggccagaagcaggatttcgactcgcaggtgacccatcacacgatggtcaacgagcagctgcatttcttcctgcgcggcttccgccgcgacgcgcacccgatggcggtgctgacgggcctggtgggcgcgctgtcggccttctaccacgactcgaccgacatcaccaacccgcaccatcgccacgtctcggccatccgcctgatcgccaagatgccgacgctggtcgccatggcgtacaagtattcgcaaggccagccgttcatctatccgcagaatgacctgtcgtacaccggcaacttcctgcgcatgatgtgcgcgaccccgtgtgaagagtacaaggtcaatgacgtcgtcgagcgcgcgctcgatcgcatcttcatcctgcatgcggaccacgagcagaacgcttcgacctcgacggtgcgcctgtgcggttcgtcgggcaccaatccgttcgccgccatcgccgccggcgtggcgtgcctgtggggcccggctcacggcggcgccaacgaagcctgcctgcagatgctcgaagaactgcaggccaacggcggtgtggccaaggtcggcgagttcatggaaaaggtcaaggacaagaactcgggcgtgcgcctgatgggctttggccaccgcgtctacaagaactacgatccgcgcgccaagctgatgcaggaaacgtgcaaggaagtcctggtggcgctgggcctggagaacgacccgctgttcaagctggccatggaactggagcgcatcgccctggaagacgactacttcgtgcagcgcaagctgtacccgaacgtcgacttctactcgggtatcgtgcaacgcgccatcggcatcccgacctcgctgttcacggccatcttcgcgctggcccgcacggtgggctggatcgcccagtggaacgaaatgctgtccgaccccgactacaagatcggccgtccgcgccagctgttcaccggttcggtcacgcgcgacgtgcccggcatggacaagcgctga

SEQ ID NO: 36977 - protein, 436 aa, Bordetella pertussis Tohama I
MNLSDKKATLSFSDGSAPIEFPVYKGTVGPDVIDIRKLYGQTGMFTFDPGFMSTAACASGITYIDGDKGELLYRGYPIEQLAVNCDFLDICYLILNGELPNGGQKQDFDSQVTHHTMVNEQLHFFLRGFRRDAHPMAVLTGLVGALSAFYHDSTDITNPHHRHVSAIRLIAKMPTLVAMAYKYSQGQPFIYPQNDLSYTGNFLRMMCATPCEEYKVNDVVERALDRIFILHADHEQNASTSTVRLCGSSGTNPFAAIAAGVACLWGPAHGGANEACLQMLEELQANGGVAKVGEFMEKVKDKNSGVRLMGFGHRVYKNYDPRAKLMQETCKEVLVALGLENDPLFKLAMELERIALEDDYFVQRKLYPNVDFYSGIVQRAIGIPTSLFTAIFALARTVGWIAQWNEMLSDPDYKIGRPRQLFTGSVTRDVPGMDKR

SEQ ID NO: 36978 - DNA, 1311 bp, Bordetella bronchiseptica RB50
  CDS (1)..(1311): transl_table=11
atgaacctgtctgacaaaaaagccacgctatccttttcggacggcagcgctcctatcgaattcccagtctacaagggtacggtcggcccggacgtgatcgacatccgcaagctgtatggccagacgggtatgttcacgttcgaccccggcttcatgtccaccgccgcctgcgcctcgggcattacctacatcgacggcgacaagggcgaactgctgtaccgcggctatcccatcgagcagctggccgtcaattgcgacttcctcgacatctgctacctgatcctcaacggcgagctgcccaacggcggccagaagcaggatttcgactcgcaggtgacccatcacacgatggtcaacgagcagctgcatttcttcctgcgcggcttccgccgcgacgcgcacccgatggcggtgctgacgggcctggtgggcgcgctgtcggccttctaccacgactcgaccgacatcaccaacccgcaccatcgccacgtctcggccatccgcctgatcgccaagatgccgacgctggtcgccatggcgtacaagtattcgcaaggccagccgttcatctatccgcagaatgacctgtcgtacaccggcaacttcctgcgcatgatgttcgcgaccccgtgtgaagagtacaaggtcaatgacgtcgtcgagcgcgcgctcgatcgcatcttcatcctgcatgcggaccacgagcagaacgcttcgacctcgacggtgcgcctgtgcggttcgtcgggcaccaatccgttcgccgccatcgccgccggcgtggcgtgcctgtggggcccggctcacggcggcgccaacgaagcctgcctgcagatgctcgaagaactgcaggccaacggcggtgtggccaaggtcggcgagttcatggaaaaggtcaaggacaagaactcgggcgtgcgcctgatgggctttggccaccgcgtctacaagaactacgatccgcgcgccaagctgatgcaggaaacgtgcaaggaagtcctggtggcgctgggcctggagaacgacccgctgttcaagctggccatggaactggagcgcatcgccctggaagacgactacttcgtgcagcgcaagctgtacccgaacgtcgacttctactcgggtatcgtgcaacgcgccatcggcatcccgacctcgctgttcacggccatcttcgcgctggcccgcacggtgggctggatcgcccagtggaacgaaatgctgtccgatcccgactacaagatcggccgtccgcgccagctgttcaccggttcggtcacgcgcgacgtgcccggcatggacaagcgctga

SEQ ID NO: 36979 - protein, 436 aa, Bordetella bronchiseptica RB50
MNLSDKKATLSFSDGSAPIEFPVYKGTVGPDVIDIRKLYGQTGMFTFDPGFMSTAACASGITYIDGDKGELLYRGYPIEQLAVNCDFLDICYLILNGELPNGGQKQDFDSQVTHHTMVNEQLHFFLRGFRRDAHPMAVLTGLVGALSAFYHDSTDITNPHHRHVSAIRLIAKMPTLVAMAYKYSQGQPFIYPQNDLSYTGNFLRMMFATPCEEYKVNDVVERALDRIFILHADHEQNASTSTVRLCGSSGTNPFAAIAAGVACLWGPAHGGANEACLQMLEELQANGGVAKVGEFMEKVKDKNSGVRLMGFGHRVYKNYDPRAKLMQETCKEVLVALGLENDPLFKLAMELERIALEDDYFVQRKLYPNVDFYSGIVQRAIGIPTSLFTAIFALARTVGWIAQWNEMLSDPDYKIGRPRQLFTGSVTRDVPGMDKR

SEQ ID NO: 36980 - DNA, 1146 bp, Prochlorococcus marinus subsp. pastoris str. CCMP1986
  CDS (1)..(1146): transl_table=11
ttggatactcataaactaattttaaaaccaggattagagggagttccagtaactaattcatcaatatgtgatattgacggtcaaaaagggaaattattatatagaggctattcaattgaagaattagcacagaaaagtagtttcttagagactgcttttttattaatttggggagaattaccttcagcaacagaactaagagattttgaacaagaagtacagatgcatcggagattaagcttcagagtaagagatatgatgaaatgctttcctgccacagggcatcccatggatgctctgcagtccagtgccgcctctcttggtcttttctactcaagaagagcgatagatgatcccaagtatatctacaacgcagtgataagactaattgcaaaaattccaacaatgattgctgcatttcaacttataagaaaaggacaagatcccattcaacctagggatgatttatcctactcatcgaattttctttacatgttgactgaaaaagaacaagatcccatagctgcaaaagtttttgatagatgcctaattcttcatgcagaacatagtttaaatgcgagtacatttagcgcacgagttacggctagcactcttacagacccatacgcagtaattgcctctgcagtaggaacattagctggtcctcttcatggtggagctaatgaagatgtaattgccatgttagaagatattaaaactccagaaaaagctgcttcatttttagaagatgctattcaaaacaaaagtaaaataatgggtttcggacatcgagagtacaaagttaaagatcctcgagcaattattcttcagaaattagcagaggagctttttgttaggtttggaaaagatgaaatgtatgaagttgctaaaaaattagagttagaggctatcccaaggctaggaggaaaaggtattttcccaaacgttgatttttattctggccttgtttacagaaaacttggtattccccgtgacttatttactcctatttttgcaatatcaagagtcgcaggttggttagctcattggagggaacaattaggcgcaaacagaatttttagaccgtctcaaatttataccggttcggctccaagagattggattactttagaaaatcgaaaataa

SEQ ID NO: 36981 - protein, 381 aa, Prochlorococcus marinus subsp. pastoris str. CCMP1986
MDTHKLILKPGLEGVPVTNSSICDIDGQKGKLLYRGYSIEELAQKSSFLETAFLLIWGELPSATELRDFEQEVQMHRRLSFRVRDMMKCFPATGHPMDALQSSAASLGLFYSRRAIDDPKYIYNAVIRLIAKIPTMIAAFQLIRKGQDPIQPRDDLSYSSNFLYMLTEKEQDPIAAKVFDRCLILHAEHSLNASTFSARVTASTLTDPYAVIASAVGTLAGPLHGGANEDVIAMLEDIKTPEKAASFLEDAIQNKSKIMGFGHREYKVKDPRAIILQKLAEELFVRFGKDEMYEVAKKLELEAIPRLGGKGIFPNVDFYSGLVYRKLGIPRDLFTPIFAISRVAGWLAHWREQLGANRIFRPSQIYTGSAPRDWITLENRK

SEQ ID NO: 36982 - DNA, 1215 bp, Prochlorococcus marinus str. MIT 9313
  CDS (1)..(1215): transl_table=11
ttgccaaggagttgtcgagatgcggtggggcaggagcaggttggggagattcgccacgatcgcagtggcatcagctttcgtccggggctggagggagtgccagtaacccaatccgccatctgtgatatcgatggactgcaggggcggcttgcttatcggggttatccaattgcggagctctcagcgcatagcagctttttggaaaccacctatctgttgatctggggcgatctgccaagcccacagcaacttcgtgatttcgaagctgaggttcagatgcaccgtcgcgtgagtttccgggtacgcgacatgatgaagtgcttcccagcttcggggcacccgatggatgcacttcagtcgagtgcggcatccctggggctgttctattcccgtcgagccatcgatgacccgaagtacgtctataacgccgtggtgaggctgatcgccaagattcccacgatggtggcggccttcaagttgattcgcaaagggcaagatcccattcagcctcgtgacgacctggcctactcagccaatttcctctacatgctcaccgagcgtgaaccggaccctttggcggcaagggttcttgatcgctgcttgatcctgcatgcggaacacagtcttaatgccagtacttttagtgctcgagtgaccgccagtacgctcacagatccttatgcagtggtggcttccgcagtgggcacccttgcaggacccctacatggtggtgccaatgaggatgttttggcgatgcttgaagagatcggcagcccagagcatgctggtgattacttggatgaagcgattgcttctaagcgcaaggtgatgggctttggtcatagggaatatcgggtcaaggatcctcgcgctgtgatccttcagggtcttgcagaggagttgtttgcccgattcggtaccgatgagatgtacgacgtggccaaggcgttggagcaggcggctgccacccgtttaggccctaaagggatctatccgaatgtggacttctattccggtcttgtgtatcgcaagcttggaattccacgtgatctttttactcctgtgtttgctatctcaagggtggctggttggctagctcattggcgagagcaacttggcgcgaatcggattttcagaccttcgcagatttacaccggtccccagaacagaacttggatccctagtgatgagcgtttctcttctacgggcgcttaa

SEQ ID NO: 36983 - protein, 404 aa, Prochlorococcus marinus str. MIT 9313
MPRSCRDAVGQEQVGEIRHDRSGISFRPGLEGVPVTQSAICDIDGLQGRLAYRGYPIAELSAHSSFLETTYLLIWGDLPSPQQLRDFEAEVQMHRRVSFRVRDMMKCFPASGHPMDALQSSAASLGLFYSRRAIDDPKYVYNAVVRLIAKIPTMVAAFKLIRKGQDPIQPRDDLAYSANFLYMLTEREPDPLAARVLDRCLILHAEHSLNASTFSARVTASTLTDPYAVVASAVGTLAGPLHGGANEDVLAMLEEIGSPEHAGDYLDEAIASKRKVMGFGHREYRVKDPRAVILQGLAEELFARFGTDEMYDVAKALEQAAATRLGPKGIYPNVDFYSGLVYRKLGIPRDLFTPVFAISRVAGWLAHWREQLGANRIFRPSQIYTGPQNRTWIPSDERFSSTGA

SEQ ID NO: 36984 - DNA, 1191 bp, Synechococcus sp. WH 8102
  CDS (1)..(1191): transl_table=11
gtggctcagaagcagtcaggggacctgcgccatgcgcggacaggcatcgaacttcgacccggtctggatggtgtaccggccacccagtccgccatctgtgacatcgatggcgagcaggggctgttgacctaccgcggctatccaatgcaggacctggcggccaacagcagcttcctggagacagcctttttgctgatctggggggagctacccagccgcgatcagctggcggagttcgagcacgccgtacagatgcaccggcgggtgagcttccgggtgcgagacatgatgaagtgtttccccgcaagtgggcatccgatggatgcgctgcaatccagcgcagcatccctggggctgttctattcccgtcgggccatcgacgatccgcagtacgtgtatgacgcggtggtgcggctgatcgccaagatccccacgatggttgcggccttccagctgattcggaagggccaggatccgattcagccccgcgacgacctggcctactccgccaatttcctctacatgctcaccgagcgtgagccggatcctctggcggcacgcatcttcgaccgttgcctgatgcttcacgccgagcacagcctcaacgccagcaccttcagcgcccgcgtcaccgccagcacactcaccgatccctacgccgtggtggcctcggcggtgggcacccttgccggacctctgcatgggggagctaatgaagatgtgctggcgatgctggaagaggtgggaacagccgagaacgccggcgcctatctcgatgaagccatggccgccaagcgcaagatcatgggtttcggccaccgtgaatacaaggtgaaggatccccgtgcggtgattcttcaggccttggtggaggagatgttcgcccgctttggccacgatgagctctacgacgtagcggtggccatcgagcgggaggcggagtcccgcctcgggcccaaaggcatctaccccaacgtcgatttctattcaggcctggtgtaccggaagctcggcatcccgagggatttgttcacgccggtgttcgccatcgcacgcgtggctggctggctggcccattggcgggagcagctcggggccaatcgcattttccggccctctcagatttattcgggctcccagctacgcgcgtggatgcccatagatgagcgtgtcaccgctccggccgcttaa

SEQ ID NO: 36985 - protein, 396 aa, Synechococcus sp. WH 8102
MAQKQSGDLRHARTGIELRPGLDGVPATQSAICDIDGEQGLLTYRGYPMQDLAANSSFLETAFLLIWGELPSRDQLAEFEHAVQMHRRVSFRVRDMMKCFPASGHPMDALQSSAASLGLFYSRRAIDDPQYVYDAVVRLIAKIPTMVAAFQLIRKGQDPIQPRDDLAYSANFLYMLTEREPDPLAARIFDRCLMLHAEHSLNASTFSARVTASTLTDPYAVVASAVGTLAGPLHGGANEDVLAMLEEVGTAENAGAYLDEAMAAKRKIMGFGHREYKVKDPRAVILQALVEEMFARFGHDELYDVAVAIEREAESRLGPKGIYPNVDFYSGLVYRKLGIPRDLFTPVFAIARVAGWLAHWREQLGANRIFRPSQIYSGSQLRAWMPIDERVTAPAA

SEQ ID NO: 36986 - DNA, 1308 bp, Chromobacterium violaceum ATCC 12472
  CDS (1)..(1308): transl_table=11
atgactgggagtattgctgtggaaactaatcgcaaagtcacgctcagctacaacgagggcaaggaaaccctggacctgccggtcctggggggcacgctgggtccggatgtcgtcgacatccgcggcttcggcaaaacaggcatgttcaccttcgacccgggcttcctggccaccgccagctgcgagtccaagatcaccttcatcgacggcgacctgggccatctgtactaccgcggctacccgatcgagcagctggccgagaagagcgactacctggaagtctgctacctgctgctgaacggcgagctgccgaccgcggcgcagcgcaaggaattcgaacgcggcgtgatgcgccacaacatgctgcacgaccagctgatgagcctgttcaagggcttccgccgcgacgcgcacccgatggcggtgatggtgggcgtggtgggcgcgctgtccgccttctaccatgactcgctggacatctccaatccggagcaccgccgcatctcggcccaccgcctgatcgccaagctgccgaccatcgccgcccaggcttaccgctacaacaagggcctgccgttctcctatccgaagaacggcctgacctatgcggaaaacttcctgcacatgatgttctccaccccgtgcgaggagtacaaggtgaacccggtgctggcgcgcgcgctggaccgcatcttcaccctgcacgccgaccacgagcagaacgcctccacctccaccgtccgtctggccggctcctccggcgccaacccgttcgcgtgcatcgccgcctgcatcgcctgcctgtggggcccgtcccacggcggcgccaacgaggccgtgctgaagatgctggacgagatcggttccgtggacaatgtggccgacttcatgcagggcgtgaaggacaagcgctacaagctgatgggcttcggccaccgcgtgtacaagaacatggacccgcgcgccgccatcatgaagcagacctgcgacgaagtgctgaacgagctgggcctgcataacgatccgaaattcaagctggccatggagctggaaaagatcgcgctgtccgacccgtacttcatcgagcgcaagctgtacccgaacgtggacttctactccggcatcgtgctgtccgcgatcggcatcccggtttccatgttcaccccgatcttcgcgctggcccgcaccgtgggctggatcgcgcactggaacgagatgatcggcgatccgggcatgaagatcggccgtccgcgccagctgtacaccggcgccgcgcgccgcgacttcgtggaagtcgccaagcgctga

SEQ ID NO: 36987 - protein, 435 aa, Chromobacterium violaceum ATCC 12472
MTGSIAVETNRKVTLSYNEGKETLDLPVLGGTLGPDVVDIRGFGKTGMFTFDPGFLATASCESKITFIDGDLGHLYYRGYPIEQLAEKSDYLEVCYLLLNGELPTAAQRKEFERGVMRHNMLHDQLMSLFKGFRRDAHPMAVMVGVVGALSAFYHDSLDISNPEHRRISAHRLIAKLPTIAAQAYRYNKGLPFSYPKNGLTYAENFLHMMFSTPCEEYKVNPVLARALDRIFTLHADHEQNASTSTVRLAGSSGANPFACIAACIACLWGPSHGGANEAVLKMLDEIGSVDNVADFMQGVKDKRYKLMGFGHRVYKNMDPRAAIMKQTCDEVLNELGLHNDPKFKLAMELEKIALSDPYFIERKLYPNVDFYSGIVLSAIGIPVSMFTPIFALARTVGWIAHWNEMIGDPGMKIGRPRQLYTGAARRDFVEVAKR

SEQ ID NO: 36988 - DNA, 1269 bp, Wolinella succinogenes DSM 1740
  CDS (1)..(1269): transl_table=11
atgggcacagtcactttcacgaataacgaaacgggcgaaaaatttgaatttgaaattctcaaccccacgcgaggtccgcagttggtcgatttttcgaagttttatgagacaacaggaatgttcacctttgaccctggctatggttcgaccgccaactgtaaatcagagatcagttttgtggatggaaaaaagggtgagctggtctactatggacaccctatcgaagagctggtggagaagtataagtttgttgatgtcattaaactgctcattggaaatggctatatctttcccaccaaagaggaatcggatcaatttgagcgtgagctagtgcgccgctcctacatccacgaggggctccgaaagattatcgatgcttttcctgatggcgctcatccgatggcgaatctctcctcatccgtttccgcgctctcgactttctactacgatcatatcgacatggagtatgaggcagagtatcagacgatggcacgaagaatcatcgccaaaacccccacgctagcagcctttgcctatcgaagctctgtgggatcaccttttgtctatcctgatgcagaccgcggctatgtggaaaacttcctttatatgcttagagcctatcctcatggaaagcttaaagaggagatttcacccattgaagtgagtgcgcttgatacgatctttatgcttcatgctgaccatggtcaaaacgcctctacggccacagtgcgcaatgttgctagtacgggagtccacccctatgcggctctatcagcgggcttgagcgcactttggggcaaggctcatggaggggcgaacgaatcggttatggatcagcttgagatgattggcgatgttaaaaatgttgatcgctacattgccaaagccaaagacaaaaacgactcctttagattgatgggctttggccatcgagtctataagagctatgatccaagggctagaattctcagaaaactcaaagacgatctagaccaaaaaggggtcaagatgaatcagcgcctcgtggagattgccgagaagatcgaagaggtggcgacgcaagatgaatattttctctccaggagtctctaccccaatgttgatttctactcaggaatcatcctcacagcgcttaagattccaaagagcatgttcacgcccattttcgccatcggaaggatgcctgggtggtgtgggcaagttttagagctgcttcaagagcccaatgtcaaaatcacgcgtccccgacagatgtatgtcggaaaataa

SEQ ID NO: 36989 - protein, 422 aa, Wolinella succinogenes DSM 1740
MGTVTFTNNETGEKFEFEILNPTRGPQLVDFSKFYETTGMFTFDPGYGSTANCKSEISFVDGKKGELVYYGHPIEELVEKYKFVDVIKLLIGNGYIFPTKEESDQFERELVRRSYIHEGLRKIIDAFPDGAHPMANLSSSVSALSTFYYDHIDMEYEAEYQTMARRIIAKTPTLAAFAYRSSVGSPFVYPDADRGYVENFLYMLRAYPHGKLKEEISPIEVSALDTIFMLHADHGQNASTATVRNVASTGVHPYAALSAGLSALWGKAHGGANESVMDQLEMIGDVKNVDRYIAKAKDKNDSFRLMGFGHRVYKSYDPRARILRKLKDDLDQKGVKMNQRLVEIAEKIEEVATQDEYFLSRSLYPNVDFYSGIILTALKIPKSMFTPIFAIGRMPGWCGQVLELLQEPNVKITRPRQMYVGK

SEQ ID NO: 36990 - DNA, 1143 bp, Gloeobacter violaceus PCC 7421
  CDS (1)..(1143): transl_table=11
atgagcggcgagtatgttcctggtctggaaggcgtccctgcaacccgttcgaatatcagtttcgtggacggcaaagccggcgtcctggagtaccgcggcatcccaatcgaccagcttgccgagtcgagcacgtttttagagaccgcctttttattgatttttgaccacctgcccaccaaggacgaactgctctccttcgaagtcgagatcctgggccaccggcgggtcaaataccgcatccgcgacatgatcaaaagcttccccgagagcggccggccgatggtggccctccagtcgtgcatcgcggcgctggggcttttttatccgctgcaaaacgagagcaaagaaaaatacgcctacgattcgactatccgcctactcgcgaagatgccgacgatggtggcgacgtttcatcagatgcgcctgggcaacgatcccatcccgccgcgcgacgacttgggccacgccgccaattttctctacatgctcacgggcaaggaacccgacccacgggcggcgcgcatcttcgatgtctgtctgatgctgcacgccgagcacaccgtcaacgcctcgactttttcggccctggtcaccgcctccaccctggccgacccctataccgtgatcacctcggcggcgggcaccctctcaggcccgctccacggcggcgccaacgaagaggtgatccgcatgctcaaggaaatcggcaccatcgagcgcgtccgcccctacctcgagaatcgcctcgcccgcaaggaaaaaatcatgggcgtcggccaccgggtctacaaagtcaaagacccgcgcgccacgatcttgcagaatctggcccaggagttgttcgaccgcttcggccacagccgcctctacgacatcgccgtcgaagtcgagcgcgtttgcgacgagttgctcggccaaaagggcatctaccccaacgtcgacttctactcgggtctggtctacgaaaagatgggcattcccgccgacatgttcaccccggtattcgccatctcgcgggtggcggggtggctcgcccactggcacgagcagttggccgacaaccgcatcttccgtcccacccaggtctacaccggctcccacaacgtcgaattcacgcctctgtcgctgcgctcctacgcctag

SEQ ID NO: 36991 - protein, 380 aa, Gloeobacter violaceus PCC 7421
MSGEYVPGLEGVPATRSNISFVDGKAGVLEYRGIPIDQLAESSTFLETAFLLIFDHLPTKDELLSFEVEILGHRRVKYRIRDMIKSFPESGRPMVALQSCIAALGLFYPLQNESKEKYAYDSTIRLLAKMPTMVATFHQMRLGNDPIPPRDDLGHAANFLYMLTGKEPDPRAARIFDVCLMLHAEHTVNASTFSALVTASTLADPYTVITSAAGTLSGPLHGGANEEVIRMLKEIGTIERVRPYLENRLARKEKIMGVGHRVYKVKDPRATILQNLAQELFDRFGHSRLYDIAVEVERVCDELLGQKGIYPNVDFYSGLVYEKMGIPADMFTPVFAISRVAGWLAHWHEQLADNRIFRPTQVYTGSHNVEFTPLSLRSYA

SEQ ID NO: 36992 - DNA, 1284 bp, Photorhabdus luminescens subsp. laumondii TTO1
  CDS (1)..(1284): transl_table=11
atggcagataacaaagcaactctagccccagacggttcagttgctattgaattggacgtgctcacaccgacccttgggtccaaagtcatcgacgttcgtactctcggctcccaaggtttctatacctacgatcctggttttacttccacagcatcttgcgaatccaagatcacttacattgatggtaacgaaggtgtattgctgcaccgtggtttccctatcgaccagctagcgacaaaatccacttatctggaagtctgctatatcctgctgtatggtgaaacaccaacacaagaacagtttgataaattcaaaaaaaccattacccgccacaccatgattcacgaacagatccatcgcctgttcaacggtttccgccgtgattcgcatcctatggccgtactgtgtggtgttactggcgctctggctgctttctatcatgatgctctggacgtgaacaatccacgtcaccgtgacattaccgcctaccgcctgctgtcaaaaatgccgacagtggccgccatgtgctacaaatactctatcggtcagccattcgtttatccacgcaatgatctctcctatgcaggcaacttcctaaacatgatgttcgctacgccgtgtgaagagtataaagtgaacccagtactggaacgcgctatggatcgcatctttatcctacatgcggaccatgaacaaaatgcatctacctcaacagtacgtaccgcaggttcttctggcgctaacccatttgcctgtattgccgcaggtatcgcttctctttggggccccgctcatggcggcgcaaacgaagcttgtctgcgtatgttggaagaaattcagtcagttgaacatattccggaattcattaaacgcgccaaagataaaaatgatgctttccgtctgatgggatttggtcatcgcgtttacaaaaactatgatcctcgtgcaaccgtcatgcgtgaaacctgccatgaagtgctagatgaactcggcctgaatgacagcctgctggaagttgctatggaacttgaacgtatcgctctgcacgatccttattttattgagaaaaaactgtatccgaacgtggatttctactccggcattatcctgaaagcaatgggtattccatccactatgttcactgttattttcgccattgcccgtactatcggctggatcgctcactggaatgaaatgcatgatggtggcgtgaaaatcgctcgcccacgtcaactctataccggctacacaaaacgtgatttcgatagccagcttgaaaaataa

SEQ ID NO: 36993 - protein, 427 aa, Photorhabdus luminescens subsp. laumondii TTO1
MADNKATLAPDGSVAIELDVLTPTLGSKVIDVRTLGSQGFYTYDPGFTSTASCESKITYIDGNEGVLLHRGFPIDQLATKSTYLEVCYILLYGETPTQEQFDKFKKTITRHTMIHEQIHRLFNGFRRDSHPMAVLCGVTGALAAFYHDALDVNNPRHRDITAYRLLSKMPTVAAMCYKYSIGQPFVYPRNDLSYAGNFLNMMFATPCEEYKVNPVLERAMDRIFILHADHEQNASTSTVRTAGSSGANPFACIAAGIASLWGPAHGGANEACLRMLEEIQSVEHIPEFIKRAKDKNDAFRLMGFGHRVYKNYDPRATVMRETCHEVLDELGLNDSLLEVAMELERIALHDPYFIEKKLYPNVDFYSGIILKAMGIPSTMFTVIFAIARTIGWIAHWNEMHDGGVKIARPRQLYTGYTKRDFDSQLEK

SEQ ID NO: 36994 - DNA, 1290 bp, Vibrio vulnificus YJ016
  CDS (1)..(1290): transl_table=11
atggcggataagaaagcgacccttcatgttgaaggtaaagcgccgatcgaattgccaattatggaaggttctttgggaacgcctgtaattgatgttcgtaagctaggagcgaacggctacttcactttcgacccgggttttcttgccactgcatcttgtgaatcgcaaataacatacatcgacggcggaaaaggcatcctgcttcaccgtggataccctattgatcagcttgcaaacaacgctgattacctagaggtttgttatattctactttacggtgaagcccctactcgtgagcaatacgagaaattcaaaacaactgttactcgccacactatggtgcacgaacaaattgccagcttcttccatggcttccgtcgtgatgcacaccctatggcagtaatgtgtggtgttgttggcgcacttgctgcgttctaccacgattctctagacatcaataatgacctgcaccgtgagatcacagcgtatcgtctgttgtctaagatgccgactttggctgcgatgtgttacaagtactctacaggccagccgttcatctaccctcgcaatgatttgagctacgcagaaaacttcctacacatgatgtttgctacaccatgtgaagaatatgaagtaaaccctgtcgttgcacgtgcgatggacaaaatcttcactctgcacgcagaccacgaacaaaatgcgtcaacgtcaacggtacgtttggcgggttcttctggtgcaaacccgtttgcttgtattgcggcaggtattgcatcgctttggggtccagctcatggcggcgcaaatgaagcgtgtttgaagatgttggaagagattggttcagtcgacaacattcctgagtacgtggatcgagcgaaagacaaagatgacccattccgtttgatgggctttggtcaccgtgtttacaagaactacgatccacgcgcaaccgtcatgcgtgaaacctgtcatgaagtgcttaaagagctcaacattcaagatccactgcttgatgttgcaatggaacttgagcgtattgctctttcagacgagtactttgtatcgaagaaactgtacccgaacgttgatttctactcaggcatcattctgaaagcgattggcattccagtttcaatgtttaccgttatcttcgcaatttcacgcaccatcggttggattgcacactggaacgaaatgcacagtgacccactgaaccgtatcggtcgccctcgccagttgtacacaggggaagtccaacgcgatttccaacctatgcacgaacgcgagtaa

SEQ ID NO: 36995 - protein, 429 aa, Vibrio vulnificus YJ016
MADKKATLHVEGKAPIELPIMEGSLGTPVIDVRKLGANGYFTFDPGFLATASCESQITYIDGGKGILLHRGYPIDQLANNADYLEVCYILLYGEAPTREQYEKFKTTVTRHTMVHEQIASFFHGFRRDAHPMAVMCGVVGALAAFYHDSLDINNDLHREITAYRLLSKMPTLAAMCYKYSTGQPFIYPRNDLSYAENFLHMMFATPCEEYEVNPVVARAMDKIFTLHADHEQNASTSTVRLAGSSGANPFACIAAGIASLWGPAHGGANEACLKMLEEIGSVDNIPEYVDRAKDKDDPFRLMGFGHRVYKNYDPRATVMRETCHEVLKELNIQDPLLDVAMELERIALSDEYFVSKKLYPNVDFYSGIILKAIGIPVSMFTVIFAISRTIGWIAHWNEMHSDPLNRIGRPRQLYTGEVQRDFQPMHERE

SEQ ID NO: 36996 - DNA, 1308 bp, Corynebacterium diphtheriae NCTC 13129
  CDS (1)..(1308): transl_table=11
ttgaaagggatgcttgtggctactgaaaacaaggataaggcggttcttcactaccctggtggcgagtatgagatggatatcatccatgcaaccgagggcaacgatggtgttgtactggataaattgctgtcccaaaccggcatggtcacttttgaccccggctatgtaagcaccggttccactgaatcgaagatcacctacattgacggcgacaacggcatcctgcgccaccgcggctatgacatcgcggatctagcggaaaacgcaaccttcaacgaagtctcctaccttctgatcaaaggccacctgccaaccgttgatgaactccacaagttcaacaacgaaatccgtcaccacaccctgctggacgaggactttaagagccagttcaacatcttcccacgtgacgcacacccaatgtccgtgctggcttcctccgtgaacatcttgtccacctactaccaagatcagctcaacccactcgatgaggagcagctagacaaggcaaccgttcgcctgctggctaaggtcccaatgctcgcggcttacgcataccgcgcatccaagggcgcaccatacatgtacccagacaactccttgaatgctcgtgagaacttcctgcgcatgatgttcggttacccaaccgagccatacgaggttgacccagtagtagcaaaggcactggataagctgctcattctgcacgcagaccacgagcaaaactgctcaacctccaccgtccgcatgatcggttccgcgcaggctaacatgtttgttgctgttgctggtggcatcaacgccctttccggcccactgcacggtggcgcaaaccaggccgttttggaaatgctcgaagagatcaaggccaacggcggcgacgctaccgactttatgaaccgcgtgaagaacaaggaaaaaggcgttcgcctgatgggcttcggccaccgcgtgtacaagaactacgacccacgtgcagccatcgtgaaggaaaccgcacacgagatcctcgaacacctcggtggtgacgaacttttggatcttgccatgaagctcgaagagatcgcactgagcgacgactacttcgtatcgcgcaagctatacccgaacgtcgacttctacaccggcttgatctaccgcgcaatgggattccccacggacttcttcaccgtcctctttgccatcggtcgtctgccaggctggatcgctcagtaccgcgagcagttggcaaccaccaccaagatcaaccgcccacgtcagatttacaccggagaaaccttgcgaaaggtcactccacgcgagcagcgctaa

SEQ ID NO: 36997 - protein, 435 aa, Corynebacterium diphtheriae NCTC 13129
MKGMLVATENKDKAVLHYPGGEYEMDIIHATEGNDGVVLDKLLSQTGMVTFDPGYVSTGSTESKITYIDGDNGILRHRGYDIADLAENATFNEVSYLLIKGHLPTVDELHKFNNEIRHHTLLDEDFKSQFNIFPRDAHPMSVLASSVNILSTYYQDQLNPLDEEQLDKATVRLLAKVPMLAAYAYRASKGAPYMYPDNSLNARENFLRMMFGYPTEPYEVDPVVAKALDKLLILHADHEQNCSTSTVRMIGSAQANMFVAVAGGINALSGPLHGGANQAVLEMLEEIKANGGDATDFMNRVKNKEKGVRLMGFGHRVYKNYDPRAAIVKETAHEILEHLGGDELLDLAMKLEEIALSDDYFVSRKLYPNVDFYTGLIYRAMGFPTDFFTVLFAIGRLPGWIAQYREQLATTTKINRPRQIYTGETLRKVTPREQR

SEQ ID NO: 36998 - DNA, 1305 bp, Rhodopseudomonas palustris CGA009
  CDS (1)..(1305): transl_table=11
atggacgcaacgaccaacaacaaaacggcaacgctgacggttggaaacaagaacttcgatcttccggtgctcaccgggacagtcggtcccgacgtcatcgacatcggcaagctctacgcgcagaccggaatgttcacctacgatccgggcttcacgtcgacggcgagctgccagtccaaaatcacttacatcgacggcgacgcaggcgttctcgagtatcgcggttacccgattgaacagctcgccgaaaaaggcgacttcctagaaacttgctatctcttgctgtacggcgaactgccgaccaaggcgcagaaggaagatttcgactaccgcgtcacccgccacaacatggttcacgagcagatggcccggttcttccagggcttccgtcgtgacgcgcatccgatggcggtgatggtggcttcggtcggcgcgctcgccgcattctaccacgactccaccgacattaacgatccgacccagcggatggtcgcttcgatccggatgatcgcgaaggtcccgacgctggccgcgatggcctacaagtactcggtcggccagcccttcatctatccgaagaacacgctcagctacgcagcgaacttcctgcggatgtgcttcgcgactccgtgcgaggaatacgtcgtcaatccggtgctggcgaacgcgctcgacaagatcttcacgctgcacgcggaccacgagcagaacgcctcgacctcgaccgtgcgcatcgccggctcgtcgggtgccaatccgttcgcctgtatcgcggcgggtatcgcctgcctgtggggcccggcgcatggcggtgccaacgaagcggcgctggcgatgctgaaggagatcggcaccgtcgagaacatcccggacttcatcgccaaggtgaaggacaagagctcttcggtgcggctgatgggcttcggccaccgcgtctataagaactacgatccgcgcgccaagatcatgcagcaggtctgccacgaagtgctggccgaaaccggccatcacggcgacccgctgctcaaggtggcgatggagctcgagaagatcgcgctcagcgatcagtacttcattgaccgcaagttgtacccgaacgtcgacttctattcgggcatcacgctgaaggcgatgggcttcccgaccgacatgttcaccgtgctgttcgcggtcgcccgcactgtcggctggatcagccagtggagcgagatgatcgaggacccgcagcagaagatcggccgtccgcgccagctcttcaccggtgcgaccacccgcaactacgtcgagatcggcaagcgcggctga

SEQ ID NO: 36999 - protein, 434 aa, Rhodopseudomonas palustris CGA009
MDATTNNKTATLTVGNKNFDLPVLTGTVGPDVIDIGKLYAQTGMFTYDPGFTSTASCQSKITYIDGDAGVLEYRGYPIEQLAEKGDFLETCYLLLYGELPTKAQKEDFDYRVTRHNMVHEQMARFFQGFRRDAHPMAVMVASVGALAAFYHDSTDINDPTQRMVASIRMIAKVPTLAAMAYKYSVGQPFIYPKNTLSYAANFLRMCFATPCEEYVVNPVLANALDKIFTLHADHEQNASTSTVRIAGSSGANPFACIAAGIACLWGPAHGGANEAALAMLKEIGTVENIPDFIAKVKDKSSSVRLMGFGHRVYKNYDPRAKIMQQVCHEVLAETGHHGDPLLKVAMELEKIALSDQYFIDRKLYPNVDFYSGITLKAMGFPTDMFTVLFAVARTVGWISQWSEMIEDPQQKIGRPRQLFTGATTRNYVEIGKRG

SEQ ID NO: 37000 - DNA, 1296 bp, Mycobacterium avium subsp. paratuberculosis K-10
  CDS (1)..(1296): transl_table=11
gtggccgacaccgacgacatcgccactttgaagtacccgggcggggaaaccgacctggagatcgtcagcgccaccgagggcgccgacggcatcgcgctgggttcgctgttgtccaagaccggctacaccaccttcgacaacggctttgtcaacaccgcctcgtgcaagagcgcgatcacctacatcgacggcgacgccggcatcctgcgttaccgcggctacccgatcgagcaactggccgagaagtcgaccttcctcgaggtgagctacctgttgatctacggcgagctgccggacaaggaccagctggccgagttcaccaagcggatccagctgcacaccatgctgcacgaggacctgaagcggttcttcgacggcttccctcgcaacgcccacccgatgccggtgctgtccagtgccgtcaacgcgctgtccgcctactaccccgattcgctggacccgatggacaccgaggacgtcgagctgtccacgatccggttgctggccaagctgccgaccatcgccgcgtacgcctacaagaagtcggtcggccagcccttcctctacccggacaacaagctgagcctggtggagaacttcctgcgcatgacgttcggcctgcccgccgagccgtaccaggccgaccccgaggtggtccgcgcgctggacatgctgctgatcctgcacgccgaccacgaacagaactgctcgacgtcgacggtccggctggtggggtcctcccaggccaacctgttcacctccatctccggcggcatcaacgcgctgtgggggccgctgcacggtggggccaaccaggcggtgctcgagatgctggagaagatccgccaaagcgacgacgacgtcagcgaattcgtgcgcaaggtgaagaaccgcgaggccggggtgaagctgatgggcttcggtcaccgggtgtacaagaactacgacccgcgggcgcgcatcgtcaaggaacaggccgacaagatcctggccaagctcggcggcgacgacgacctgctcgacatcgccaagcaactcgaagaggccgcgctgaccgacgagtacttcatcgagcgcaagctgtaccccaacgtcgacttctacaccggcctgatctaccgggcgctgggcttcccgacccggatgttcaccgtgctgttcgcgctggggcgcctgcccggctggatcgcgcactggcgcgagatgcacgacgagggcgacagcaagatcggccgcccgcgccagatctacaccggctacaccgagcgcgactacgtcaccatcgacgcccgctag

SEQ ID NO: 37001 - protein, 431 aa, Mycobacterium avium subsp. paratuberculosis K-10
MADTDDIATLKYPGGETDLEIVSATEGADGIALGSLLSKTGYTTFDNGFVNTASCKSAITYIDGDAGILRYRGYPIEQLAEKSTFLEVSYLLIYGELPDKDQLAEFTKRIQLHTMLHEDLKRFFDGFPRNAHPMPVLSSAVNALSAYYPDSLDPMDTEDVELSTIRLLAKLPTIAAYAYKKSVGQPFLYPDNKLSLVENFLRMTFGLPAEPYQADPEVVRALDMLLILHADHEQNCSTSTVRLVGSSQANLFTSISGGINALWGPLHGGANQAVLEMLEKIRQSDDDVSEFVRKVKNREAGVKLMGFGHRVYKNYDPRARIVKEQADKILAKLGGDDDLLDIAKQLEEAALTDEYFIERKLYPNVDFYTGLIYRALGFPTRMFTVLFALGRLPGWIAHWREMHDEGDSKIGRPRQIYTGYTERDYVTIDAR

SEQ ID NO: 37002 - DNA, 1251 bp, Wolbachia endosymbiont of Drosophila melanogaster
  CDS (1)..(1251): transl_table=11
atggataaaaaagtgctattagaactaagtaatggattaaaaatcgagctacctgtattaagcggaacaacaggtcctgatgtgttaaatatcaaggatttatataagatgacaggattattcacttacgatccagggtttgtttctacagcttcatgctcttctacaattacattcattgatggagatgaaggagttcttaaatataggggacataatatagctgatttggcagagaataataattttactgctgtgatttatttattgctctatggtgaattacccagttcagagcaacacaaaaaatttcttctcaaaatacaagaatcatccaaagtatcagagcaagttacaaatgtaattaaagcatttccaaaaactgctcaccctatgtcaatcttagttgcatgttttgcaagtttgtcagcatcttatcatgaaaagcatggcaacaatgtcaatggtgaagacctagattttggaatttctgcaatagcgcaagtttccacaattattgcaatgatttataggcatatcaacaatcaggaattcataaatgctaacaatgaattaagttacagtgaaaatttcttaaagatgatatttggcgatgctgttgataatgataaaagcgccctttttgcaaaagctctggataaaatatttactctccatgctgatcatgaacagaatgcttctacggcggctgtcagattggtgggatcggctggttctaatctgtttgcaagcctctctgcaggagttgctacactttggggaccagcacatggtggagctaatgaggcagttataaatatgctaaaagagatagagcaaagtggagatatagataaattcatcgaaaaagctaaagatgataaagatccatttaaattgatgggatttggacatcgtgtttataaaaattatgatccgcgcgcgcgtatattggaaggcgcttgccatgaggttctaagtaaactagaacaaaataatgaactgcttaaaattgcaaaaaaacttgaagaaatagctttaaaggatgaatattttatcgtgcgtaagttatatccaaatgttgatttttactcaggtataataatgaatgctattgatatcccctcaaatatgttcacgcctatttttgcactcgcaagaaccactggttgggttactcagtggtatgaaatgataaatgataaagaaactaagatctgtagaccaaggcaactctattttggtaaataa

SEQ ID NO: 37003 - protein, 416 aa, Wolbachia endosymbiont of Drosophila melanogaster
MDKKVLLELSNGLKIELPVLSGTTGPDVLNIKDLYKMTGLFTYDPGFVSTASCSSTITFIDGDEGVLKYRGHNIADLAENNNFTAVIYLLLYGELPSSEQHKKFLLKIQESSKVSEQVTNVIKAFPKTAHPMSILVACFASLSASYHEKHGNNVNGEDLDFGISAIAQVSTIIAMIYRHINNQEFINANNELSYSENFLKMIFGDAVDNDKSALFAKALDKIFTLHADHEQNASTAAVRLVGSAGSNLFASLSAGVATLWGPAHGGANEAVINMLKEIEQSGDIDKFIEKAKDDKDPFKLMGFGHRVYKNYDPRARILEGACHEVLSKLEQNNELLKIAKKLEEIALKDEYFIVRKLYPNVDFYSGIIMNAIDIPSNMFTPIFALARTTGWVTQWYEMINDKETKICRPRQLYFGK

SEQ ID NO: 37004 - DNA, 1290 bp, Leptospira interrogans serovar Copenhageni str. Fiocruz L1-130
  CDS (1)..(1290): transl_table=11
atggcagaggtagcaattctgaaaatcgatgggaaagaatacgaactcccgatcgtaataggcaccgaaaaagaaaaagcaatcgatatttctaaactccgtcaacagaccggatatgtaaccttggacaacggatatttaaatactggagcctgcacaagcgcggtgacttttttagacggagaactaggtattttaagatacagaggaattccgatcgaacaactcgccgaaaattccacatttactgaagtcgcctatttactgatatacggaaaaattccttcagactcagaattgaaaaaatggaacgacgaacttacgatgcacacgttgatccacgaggatcttaaacgtctttataatggatttccaaaagacggtcacccaatggcgatcatgtcttctatgatcggatctctttccacttattatcaagattcttacgatccggaaaatgcagaacacagacatatttctatgattcgtcttctcgctaagtttcctacaatcgccgcattcgcttataagaaatccattggacaacctacaattcatcctttgaacagtttggattattgcgcaaactttatgaacatgatgttctccgttccaagcgaggattataaaattgatccagaaatcgtaaaagcgttgaacttattattgattcttcatgcggaccacgaacaaaactgttctacgtctacggtgcgtttggtgggatcttctctcgcaaacttatacggcgcgatctctgctggaatttgtgctctttggggacctagacacggaggagccaatcaagaagtattagaaatgttgcaagagattcaggcaagcggtttgcccgtaaaaaaaatcgtagaaaaagcaaaagataaaaatgactctttccgtctttccggattcggtcacagggtctataaaaattttgatccacgtgcaaagatcatcaaaaaggcgtgcgactccgtattaaaaagattaggcgttcaagattctttattagatattgctaaagaactagaagaaacagctcttcatgatccttactttgtggaaagaaaactctatccaaacgtagacttttattccggaattatctaccgagccctcggaattccagtaaatatgtttacggtaatgtttgctatgggacgtcttccaggttggatcgctcagtggaaagaaatgatagaatctccggatatgaaaattggtcgtccaagacaaatctacaccggttctacagaaacttcctacaaagaagccaagaaaaaagcctga

SEQ ID NO: 37005 - protein, 429 aa, Leptospira interrogans serovar Copenhageni str. Fiocruz L1-130
MAEVAILKIDGKEYELPIVIGTEKEKAIDISKLRQQTGYVTLDNGYLNTGACTSAVTFLDGELGILRYRGIPIEQLAENSTFTEVAYLLIYGKIPSDSELKKWNDELTMHTLIHEDLKRLYNGFPKDGHPMAIMSSMIGSLSTYYQDSYDPENAEHRHISMIRLLAKFPTIAAFAYKKSIGQPTIHPLNSLDYCANFMNMMFSVPSEDYKIDPEIVKALNLLLILHADHEQNCSTSTVRLVGSSLANLYGAISAGICALWGPRHGGANQEVLEMLQEIQASGLPVKKIVEKAKDKNDSFRLSGFGHRVYKNFDPRAKIIKKACDSVLKRLGVQDSLLDIAKELEETALHDPYFVERKLYPNVDFYSGIIYRALGIPVNMFTVMFAMGRLPGWIAQWKEMIESPDMKIGRPRQIYTGSTETSYKEAKKKA

SEQ ID NO: 37006 - DNA, 1281 bp, Leptospira interrogans serovar Copenhageni str. Fiocruz L1-130
  CDS (1)..(1281): transl_table=11
atgagtgaattcattgaaatcaaagttggggaaaaatcctatcagtttccattgatctccggaacggacggtaaaaaaggaatcgatattagagaacttcatcaaaaaaccggactaatttcttacgatccgggtttttttaacaccgcctacgctgttagtcgaatctcccgaagagacccgaattcaggtgaactcaactatcgtggttacgacatcgcagatttagtacaacattctacatttgtggaaactagttacttattgatttatggcaaacttccaacggagcagcagcttaaagatttttctctgaaattatctaaacactcattgattcacgaagatatgatcaatctatttgatggatttccgggtaaaggtcatcctctagcggttctgtccgtgatggtaacttctctttccagttattatccagaagaatacgaagaatccttggacaaaggaatcgatcattccgcaagactgctcgcaaagattagaactatcgccgccttttcttacaaaaaaatcgtaggccaacccttcgtatatcctttggacaaacatccttattgtacaaattttctttatatgttattttcaattccttccaaggattatattcccaccgaagacatagatcgaattttaaatcaattatggatactttacgcggatcatgaacaaaacgtatccaatacaaccgttcaagtaattggctctacacaagccaacttattcgcttctatatcttctgcgatcaatgcgctttggggctctagagaaggtggtcgtcaggtcgcggcggtaggattgatagaagacattctcaaatccagaaaatcggtgccggaatattttgaaaaattcaaaggagactcggaaaagttatttggaaacggttttgggcataaggcatacgaggcaaaaagtagaagagcaatcattgcaagtaaactgtttcacgatttttacaaaaaaaatcctattggacctatcgcagaagtagctcttaaaatcgaagaatatatgcaaaatgatgaatattatatcaatcaaaatttgtatccgaatttagagttctacagcgcggtaatttttaattcacttggaataccaaaagaactttttacggctatgcaggtaatcggaaaacttccaggctggttagcgcactggagagaacaaagagtttccggaaattacagtaaggctcgtccaaaacaaatttattctggagaaatgggtagaaaatacattccactttcggaaagataa

SEQ ID NO: 37007 - protein, 426 aa, Leptospira interrogans serovar Copenhageni str. Fiocruz L1-130
MSEFIEIKVGEKSYQFPLISGTDGKKGIDIRELHQKTGLISYDPGFFNTAYAVSRISRRDPNSGELNYRGYDIADLVQHSTFVETSYLLIYGKLPTEQQLKDFSLKLSKHSLIHEDMINLFDGFPGKGHPLAVLSVMVTSLSSYYPEEYEESLDKGIDHSARLLAKIRTIAAFSYKKIVGQPFVYPLDKHPYCTNFLYMLFSIPSKDYIPTEDIDRILNQLWILYADHEQNVSNTTVQVIGSTQANLFASISSAINALWGSREGGRQVAAVGLIEDILKSRKSVPEYFEKFKGDSEKLFGNGFGHKAYEAKSRRAIIASKLFHDFYKKNPIGPIAEVALKIEEYMQNDEYYINQNLYPNLEFYSAVIFNSLGIPKELFTAMQVIGKLPGWLAHWREQRVSGNYSKARPKQIYSGEMGRKYIPLSER

SEQ ID NO: 37008 - DNA, 1134 bp, Thermus thermophilus HB27
  CDS (1)..(1134): transl_table=11
atggaagtggcacgcggtctggaaggcgttctcttcacggaaagccggatgtgctacattgacggccagcaggggaagctctactactacggcatccccatccaggagctggcggagaagagcagctttgaggaaaccaccttcctcctcctccacgggagactgccgcgaaggcaggagctggaggagttctcggccgccctcgcccggcgccgcgccctgcccgcccaccttctggagtccttcaagcgctaccccgtctccgcccaccccatgagcttcctgcgcacggcggtctccgagctcgggatgctggaccccaccgagggggacatctcccgggaggccctctacgagaaggggcttgacctcatcgccaagttcgccaccatcgtggccgccaacaagcgcctcaaggagggcaaggagcccatccctccccgggaggacctctcccacgccgccaacttcctctacatggcgaacggggtggagccctcccccgagcaggcccgcctcatggacgcggccctcatcctccacgccgagcacggcttcaacgccagcaccttcaccgccatcgccgccttctccacggagaccgacctctactcggccatcaccgccgccgtggcctccctgaaggggccgcgccacggcggggccaacgaggccgtgatgcgcatgatccaggagatcggcacccccgagcgggcccgggagtgggtgcgggagaagctggccaagaaggagcgcatcatgggcatgggccaccgggtctacaaggcctttgaccccagggccggggtcctggaaaagctcgcccggttggtggcggagaagcacggccactccaaggagtaccagatcctgaagatcgtggaggaggaggcggggaaggtcctgaaccccaggggcatctaccccaacgtggacttctactccggggtggtctactccgacctgggcttcagcctggagttcttcacccccatcttcgccgtggcccggatctcgggctgggtggggcacatcctggagtaccaggagctggacaaccgcctcctccgccccggggccaagtacatcggggagctggacgtgccctacgtccccctcgaggcccgggagtag

SEQ ID NO: 37009 - protein, 377 aa, Thermus thermophilus HB27
MEVARGLEGVLFTESRMCYIDGQQGKLYYYGIPIQELAEKSSFEETTFLLLHGRLPRRQELEEFSAALARRRALPAHLLESFKRYPVSAHPMSFLRTAVSELGMLDPTEGDISREALYEKGLDLIAKFATIVAANKRLKEGKEPIPPREDLSHAANFLYMANGVEPSPEQARLMDAALILHAEHGFNASTFTAIAAFSTETDLYSAITAAVASLKGPRHGGANEAVMRMIQEIGTPERAREWVREKLAKKERIMGMGHRVYKAFDPRAGVLEKLARLVAEKHGHSKEYQILKIVEEEAGKVLNPRGIYPNVDFYSGVVYSDLGFSLEFFTPIFAVARISGWVGHILEYQELDNRLLRPGAKYIGELDVPYVPLEARE

SEQ ID NO: 37010 - DNA, 1122 bp, Picrophilus torridus DSM 9790
  CDS (1)..(1122): transl_table=11
atgagtataagtcttggtcttgaggacgttttcataaagtacacatcattaacatcgatagatggtgaaaagggggagctcaggtacaggggttatgatataaaagatctcgttgaacactgctcctttgaggaggttgcctatctaatgttttacggcgagcttccaaaaagagacgagctagaacactttaaaagcaatgtaatgaagaattataaaattcctgaaaatgtaaaaaacatcataaaaaacatgccaagggatggcgatgcccttgcaatcatggaggcagccttcgccgcattgagcaccgaggaatacacatgggaaaaggaaagggatcgtgaaaaggccgcagagattatgggccgcgcccttggaattgtctcggctgtctttaggtacagggacggaagggaaataaaggatcctgagaataagggttatgccgaggcatttcttaatgcatgctttgattcaggcatagatgaggataaaataaaggcaatgaacgcggcattgatactttacatagatcatgaggtaccggcatcaaccacggcagcacttgttgcatcatcaacgttatctgatatgtactcatgtgttacagcagcaatagctgcactgaagggaccgcttcacggaggggcggcagaggctgcctataagcagttccttgcaataaaatctcctgaaaacgttgattcatggttcaatgaaaatatattaaacaataaaaagagattaatgggctttggccacagggtttataaaacatacgatccaaggatgttaatcttcaaggagcttgcaaggaaaaatgcaaaaaccgatgaacagaaaaaaatacttgagcttgcagagaggcttgaggctctgggcgttaagaactttggccagaaaaagatctttccaaacactgattactattcaggcatagtctttaatgagataggctttccattatacatgttcacaacgctcttcgcactttcaagggttgttggctgggttgcacacatatcagagtacgttgagagcgaggagagattaataaggccaagggcaatatatataggacctgagaagagagatgttgtaccaatagataaaagataa

SEQ ID NO: 37011 - protein, 373 aa, Picrophilus torridus DSM 9790
MSISLGLEDVFIKYTSLTSIDGEKGELRYRGYDIKDLVEHCSFEEVAYLMFYGELPKRDELEHFKSNVMKNYKIPENVKNIIKNMPRDGDALAIMEAAFAALSTEEYTWEKERDREKAAEIMGRALGIVSAVFRYRDGREIKDPENKGYAEAFLNACFDSGIDEDKIKAMNAALILYIDHEVPASTTAALVASSTLSDMYSCVTAAIAALKGPLHGGAAEAAYKQFLAIKSPENVDSWFNENILNNKKRLMGFGHRVYKTYDPRMLIFKELARKNAKTDEQKKILELAERLEALGVKNFGQKKIFPNTDYYSGIVFNEIGFPLYMFTTLFALSRVVGWVAHISEYVESEERLIRPRAIYIGPEKRDVVPIDKR

SEQ ID NO: 37012 - DNA, 1275 bp, Acinetobacter sp. ADP1
  CDS (1)..(1275): transl_table=11
atgtctgaagcaactggcaagaaagccgtattaaagcttgatggcaaagaaattgaattaccaatttacagcggcacattgggcccagatgtaattgacgttaaggatgtattggctgcaggtcattttacttttgatcctggtttcatggcgaccgcttcatgtgaatcgaagattacattcattgacggaaacgaaggtgtgttattacaccgcggttacccaattgatcagcttgcaactcaagcagattatttggaaacttgctatttgttattaaatggtgaacttcctacgccagagcaaaaacaagaatttgatgctaaagttcgtaaccacaccatggttcacgatcaagttagccgtttcttcaatggtttccgtcgtgatgcgcaccctatggcaatcatggtgggtgtagtcggtgctttatctgcgttttatcacaaccagttaaacattgaagatgtcaatcatcgtgaaattactgcaattcgtttgattgcaaaaattccaacgcttgctgcttggagttataaatacactgtcggccaaccgttcatttaccctcgtaatgatcttggttatgcagaaaacttcctgcacatgatgtttgcaaccccagcagaccgtgattacaaagttaatccaattcttgctaaggcaatggatcgtattttcacgcttcatgcagatcatgaacaaaatgcttcaacatctacagtccgtttggctggttcaaccggtgcgaatccgtatgcgtgtatcgcagcaggtatttctgcactttggggccctgctcatggtggtgcaaacgaagctgttctgaaaatgcttgatgaaattggcactgttgagaacgttgctggtttcatggaaaaagtgaaaaccaaagaagttaaactcatgggctttggtcaccgtgtgtataaaaacttcgatccacgcgcgaaagtcatgaaagaaacatgtgatgaagttcttgccgcactcggcattaacgatccacaacttgaacttgcgatggaacttgagcgcattgcgttgtctgatgaatacttcatcaagcgtaatttgtatccaaacgtagacttctattcaggtatcattcttaaagcgattggtattccaacagaaatgtttacagtgatctttgcacttgcacgtactgtgggctggatcagccactggttagaaatgcacagtgctccgtacaaaattggtcgtcctcgtcagctttacactggcgaaaccaaacgcgacattaaacgttaa

SEQ ID NO: 37013 - protein, 424 aa, Acinetobacter sp. ADP1
MSEATGKKAVLKLDGKEIELPIYSGTLGPDVIDVKDVLAAGHFTFDPGFMATASCESKITFIDGNEGVLLHRGYPIDQLATQADYLETCYLLLNGELPTPEQKQEFDAKVRNHTMVHDQVSRFFNGFRRDAHPMAIMVGVVGALSAFYHNQLNIEDVNHREITAIRLIAKIPTLAAWSYKYTVGQPFIYPRNDLGYAENFLHMMFATPADRDYKVNPILAKAMDRIFTLHADHEQNASTSTVRLAGSTGANPYACIAAGISALWGPAHGGANEAVLKMLDEIGTVENVAGFMEKVKTKEVKLMGFGHRVYKNFDPRAKVMKETCDEVLAALGINDPQLELAMELERIALSDEYFIKRNLYPNVDFYSGIILKAIGIPTEMFTVIFALARTVGWISHWLEMHSAPYKIGRPRQLYTGETKRDIKR

SEQ ID NO: 37014 - DNA, 1287 bp, Erwinia carotovora subsp. atroseptica SCRI1043
  CDS (1)..(1287): transl_table=11
atggctgataaaaaagcaacacttactctagagggtaaagatccaattgagctaaatgtcctatctggcacattggggtatgatgagattgatattcgtcccctcggttctaaaggttacttcacatttgaccccggctttacctcaaccgcatcttgcgaatccaagattacctatatcgacggcgacgaaggcatcctactgcaccgtggcttcccaattgcccaactggctgaaaaatctaattatcttgaagtttgttacatcctgctgttcggcgagcccccgacggcagaacaatatgaaacctttaagacaaccgttactcgccacacgatgatccatgagcagattacccgtctgttccacggtttccgtcgtgattcacatccaatggccgtcttatgtggcgtcaccggtgcactggcagcgttctaccacgattcattggacattagcattgagcgccaccgcgaaattgcggcctaccgcctgctgtccaaaatgccaaccgttgcggcgatgtgctacaaatattcactgggccagccgtttgtttatccgaaaaacaacctgtcctacgcgggtaatttcctgcatatgatgttctccactccttgtgaagaatatgttgtgaatccggtgctagaacgggcgatggaccgtattctgatcctgcatgccgatcacgaacaaaacgcctcgacttctaccgtgcgtaccgcgggttcgtctggtgcaaacccgtttgcctgtatcgccgcggggatcgcctcgctgtggggaccggcacacggcggcgcgaacgaagcctgtctacgtatgctggaagaaatcagcagcgtggaacacatcccggcgtttatcgagcgtgcaaaagacaagaacgactccttccgcctgatgggcttcggtcaccgtgtgtacaaaaaccacgatccgcgcgccacagtcatgcgtgaaacctgccatgaagtgctgaaagagctgggcagaaaagatgatctgctggaagtggcgatggagctagaacatatcgcgctgaacgacccgtacttcattgagaagaaactgtacccgaacgtggacttctactcaggtatcatcctgaaagcaatggggattccgtcttccatgtttaccgtcatcttcgcgatggcgcgtaccgtgggctggattgcgcactggagcgaaatgcacgccgacggcattaaaattgcccgtccacgtcagctgtacaccggctacgacaaacgtgactttgcgtccaatctgaaacacgattaa

SEQ ID NO: 37015 - protein, 428 aa, Erwinia carotovora subsp. atroseptica SCRI1043
MADKKATLTLEGKDPIELNVLSGTLGYDEIDIRPLGSKGYFTFDPGFTSTASCESKITYIDGDEGILLHRGFPIAQLAEKSNYLEVCYILLFGEPPTAEQYETFKTTVTRHTMIHEQITRLFHGFRRDSHPMAVLCGVTGALAAFYHDSLDISIERHREIAAYRLLSKMPTVAAMCYKYSLGQPFVYPKNNLSYAGNFLHMMFSTPCEEYVVNPVLERAMDRILILHADHEQNASTSTVRTAGSSGANPFACIAAGIASLWGPAHGGANEACLRMLEEISSVEHIPAFIERAKDKNDSFRLMGFGHRVYKNHDPRATVMRETCHEVLKELGRKDDLLEVAMELEHIALNDPYFIEKKLYPNVDFYSGIILKAMGIPSSMFTVIFAMARTVGWIAHWSEMHADGIKIARPRQLYTGYDKRDFASNLKHD

SEQ ID NO: 37016 - DNA, 1284 bp, Erwinia carotovora subsp. atroseptica SCRI1043
  CDS (1)..(1284): transl_table=11
atgacagtcagaacatccacgttgacggcagaagggcaggcgagtattgcgctggaaatgcgttccggcgtactggggaaaacggctgtggatattcgcccactcggcgagcatgggctatgcagctatgaccccggttttgctaacacggcagggtgtgagtcggcgattacctacattgatgcagcgaatagcgtgttgctgcatcggggcttccctgtcgaacagcttgccgagcagtgcgactttactgaggtttgttacattctgctgcacggcgacgccccttcaccggaggcgtatgcgaaatttgctgacaacattacccgacatacgctggttcatgagcagattacccggatgttcagcggttttcgtcgcgattcccacccaatggcgctgatgtgcgcggtggtcggtgcgctggccgcgttctatcacgatgtcttggatatcaataacgcggaacaccgcgagctggcggcggtacggctgctgtcgaaaatgccgacgctggcggcgatgtgctacaaatactccgtcgaacagccgtctgtgtatccccgaaattctctctcctataccggcaacttcctacacatgctgttttcgattccggcagagaagtatgaagttaatccggtgttggaacgggcgatgaaccgcatcctgattctgcatgccgatcatggtcaatgcccatcaaccatggcggtcagagcgtctggttcttccggcgcgaacccgtttgcctgtattgcggctgggctggcgtcgatgtgggggccgttgcacggtggggcgaatgaagcctgcatgcgcatgctggaagagattaaaacggtcgaccgcgttcctgaatttgtacggcgtgcgaaagaccgctgtgattcattccgcctgatggggtttggtaactctgtctaccagcatttcgatccacgtgcggcgattctgcgtaaaacctgttacgaggtgctcaacgaattaggcatggaggacagcctgttgcaggtggcgatggagctggaacatatcgctatgaccgatgcctattttctggagaataaactctaccctagtgtcgatttctatacctccgtcattctgaaagcgatggggctgccgtcatcaatgtttaccgtcatctctaccgtcggcaggacgattggctggattgcgcattgggatgaaatgcacaaacagcaggaaatcagcatctatcgcccacggcaaatttataccgggcagccgcagcgggactatgtttctctgaagggataa

SEQ ID NO: 37017 - protein, 427 aa, Erwinia carotovora subsp. atroseptica SCRI1043
MTVRTSTLTAEGQASIALEMRSGVLGKTAVDIRPLGEHGLCSYDPGFANTAGCESAITYIDAANSVLLHRGFPVEQLAEQCDFTEVCYILLHGDAPSPEAYAKFADNITRHTLVHEQITRMFSGFRRDSHPMALMCAVVGALAAFYHDVLDINNAEHRELAAVRLLSKMPTLAAMCYKYSVEQPSVYPRNSLSYTGNFLHMLFSIPAEKYEVNPVLERAMNRILILHADHGQCPSTMAVRASGSSGANPFACIAAGLASMWGPLHGGANEACMRMLEEIKTVDRVPEFVRRAKDRCDSFRLMGFGNSVYQHFDPRAAILRKTCYEVLNELGMEDSLLQVAMELEHIAMTDAYFLENKLYPSVDFYTSVILKAMGLPSSMFTVISTVGRTIGWIAHWDEMHKQQEISIYRPRQIYTGQPQRDYVSLKG

SEQ ID NO: 37018 - DNA, 1287 bp, Propionibacterium acnes KPA171202
  CDS (1)..(1287): transl_table=11
atgggttcgagtgcaaggttcgtcgacgaagacactcacctcgatttcagcaaggttgtcgctactgacggccaggtgggttacgacgtcgcgggtctgctcaacaagaccggcaacgtcatgatcgacccgggattcgtcaacacggcatcctgcgagtcacagatcacctacattgacggtgagcagggagttttgcgttaccgcggctacccgattgagcagctcgctgaacagtcgaccttccttgagaccgcctaccttgtcctctatggggaactgccaagcaaggcccaattggacggcttcgaggagcgtattcgtcgcactaccctcatcgacgagcggatgcgtgacctcttccgatgcttcccccgtcggtcccacccgatgcctgtgttggctgcgggcatcatggccctgtcgaccttctcacagaaatcctccggcactgatcccgaccaaatcgaggcggccaccactcgcctcatcgccaaggtccccaccctggccgccttcggctacaagaactcgatgggccagccgaccctctaccccgataactccctgagctacgtccagaacttcatccggatgagcttcggcttcccgactgaaccctacgagttcaatgacgaaatcacccgcgctctggaaaccctgctcatcctgcacgttgatcacgagcagaactgttcaacctcgacggtccgtatggtcgcgtcgtcgggtgccaacatgtacgcggcggttgccgcaggcgtcaacgccctgtccggcccgaagcacggtggcgcaaaccaggccgtcctcgaaatgctgcaatttattcgcgactccggcatgaccactaaggagttcgtccgtaaggtcaaggacaaagaatccgacatcaagctgatgggctttggccaccggatctacaagaactacgatccacgcgccgccatcatcaagaaacatgccgaccgcattatggaactccataccggtcgtgaggaccttctcgagatcgccaaggaacttgaagagaccgcgctaaacgatgactacttcaaggagcgcaagctctacccgaacgttgatttctataccggcctcatctacgaggccatgggcttcccgatgaatatgttcaccgtgctgttcgcactgggacgtctgcccgggtggatcgcccagtaccgagagcaagttgccagcggaggcaacaagatttggcgtccgcgtcagatcttcaccgggtctgacaagcgagattacgtaccactcaacaagcgtgcctga

SEQ ID NO: 37019 - protein, 428 aa, Propionibacterium acnes KPA171202
MGSSARFVDEDTHLDFSKVVATDGQVGYDVAGLLNKTGNVMIDPGFVNTASCESQITYIDGEQGVLRYRGYPIEQLAEQSTFLETAYLVLYGELPSKAQLDGFEERIRRTTLIDERMRDLFRCFPRRSHPMPVLAAGIMALSTFSQKSSGTDPDQIEAATTRLIAKVPTLAAFGYKNSMGQPTLYPDNSLSYVQNFIRMSFGFPTEPYEFNDEITRALETLLILHVDHEQNCSTSTVRMVASSGANMYAAVAAGVNALSGPKHGGANQAVLEMLQFIRDSGMTTKEFVRKVKDKESDIKLMGFGHRIYKNYDPRAAIIKKHADRIMELHTGREDLLEIAKELEETALNDDYFKERKLYPNVDFYTGLIYEAMGFPMNMFTVLFALGRLPGWIAQYREQVASGGNKIWRPRQIFTGSDKRDYVPLNKRA

SEQ ID NO: 37020 - DNA, 1278 bp, Leifsonia xyli subsp. xyli str. CTCB07
  CDS (1)..(1278): transl_table=11
atgccgaccgcgtccctgacctacccgggcggtgtggccgagttcccgatgctgccgagcagtcagggacccggcagcatcgacctctccagcttcacccgccagaccgggctgaccagtctggactacggctttgtcaacaccgccgccactcgctcctcgatcacttacatcgacggcgacgccgggattctgcgctaccgcggttacccgatcgagcagctggccgggaactccaccttcctcgaggtggcttggttgctcatccacggtgagctgcccagtgcctcggagctcgcggacttcgacgcgcgcatccgtcgtcacacgctcctccacgaggatctgcgccgcttcttcagcgcgctcccgcacgacgcgcacccgatgtcggtgctctccagcgcggtctccgcgctgtcgaccttctaccaggactcgctgagcgtccacgacccggagcaggtggagctctccaccgtccgcctcctggcgaaattgccggtcatcgcggcctacgcccacaagaagagcattggtcaggcgttcctctacccggacaattcgctgagcttcgtggacaacttcctccgcctcaacttcggtacgctggccgagccgtacgaggtggacccggtgctctcccgtgcgctggagcgtctgctcatcctgcacgaggaccacgagcagaacgcctccacgtcgacggtccgcctcgtcggctcgacccaggccaatctgttcgcctcggtctccgccggcatcaacgccctctacggtccgcttcacggcggcgccaatgaggctgtgctgcagatgctcgccggcatccgcgactcgggcgagggcgttcagaagttcgtcgagcgtgtcaagaacaaggagtccggcgtcaagctcatgggcttcggccaccgcgtctacaagaacttcgacccccgggccaggctcgtcaagcagtccgcggacgaggttctctccgctctgggcgtccacgacccgcttctcgacatcgccaaggagctcgaggaagtcgctctcgccgaccagtatttcatagaccgcaagctctacccgaatgtggacttctacaccggcgtcatctacaaggcgatgggcttcccgactcggatgttcacggtgctcttcgccatcggccgcctccccggctggatcgcccactggcgtgagatgatgctcgacccgggcaccaagatcggccgcccccagcagctttacgtgggttcccccgaacgcagctggccgtcctcccgctga

SEQ ID NO: 37021 - protein, 425 aa, Leifsonia xyli subsp. xyli str. CTCB07
MPTASLTYPGGVAEFPMLPSSQGPGSIDLSSFTRQTGLTSLDYGFVNTAATRSSITYIDGDAGILRYRGYPIEQLAGNSTFLEVAWLLIHGELPSASELADFDARIRRHTLLHEDLRRFFSALPHDAHPMSVLSSAVSALSTFYQDSLSVHDPEQVELSTVRLLAKLPVIAAYAHKKSIGQAFLYPDNSLSFVDNFLRLNFGTLAEPYEVDPVLSRALERLLILHEDHEQNASTSTVRLVGSTQANLFASVSAGINALYGPLHGGANEAVLQMLAGIRDSGEGVQKFVERVKNKESGVKLMGFGHRVYKNFDPRARLVKQSADEVLSALGVHDPLLDIAKELEEVALADQYFIDRKLYPNVDFYTGVIYKAMGFPTRMFTVLFAIGRLPGWIAHWREMMLDPGTKIGRPQQLYVGSPERSWPSSR

SEQ ID NO: 37022 - DNA, 1287 bp, Desulfotalea psychrophila LSv54
  CDS (1)..(1287): transl_table=11
atgagtgaaaaagcaaccctgactgttggcggtgcaagttatgaacttgatgttaccagtggaacggaggatgagaggtgtattgatattcaatcgttacgtgctaaatcgggctatatcaccatggatccaggctttggcagtactggtgcctgcttctctgatatcacatatgttgatggtgagagaggaatcctgcgttatcgtggctaccctattgagcagatagcggagagggcaagttttgtggagacatgctcgctgattatctatggtgaacttcccgatgcagaaaccctgaacaggtttcgcagggccctggcagaacatgcgccactgcacacaagcctctatcactacttttccggatttcccgaatcgtcgcctcccatggcgattctctcggcaatgcttaacctggtctcctgtttccaccccggtgttctggaggtacactcagaggggcatggctttgatcgaactgccgccctcctcctgtccaaggttcgaaccatagcagcctggtcctatcggatgtctgtcggcaaaccctttaatcagccaaacccccatctcacttactgtgcaaattttctgcatatgatgttttccgagccctttcaagaatatatccccagtccagctgtcgaaagggctttggcacttttcctgatactccatgccgatcatgagcagaactgctcgacctcaacggtgagaacagtggccagttccagggcgaacctgtttagttccgtcgcctcaggggtatgtgccctttggggacccctgcatggtggtgccaatgcagccgtgatagagatgctggaagagattatggcctcgggccggaagattgactattatatcaacagggcaaaggataaaagtaacgattacaaactgatgggctttggccatcgggtctataaaaattttgatccccgggccagcatcctcaagaagagggtttatgaggtacttgcagagctgcacaaatccgatcctctgcttgatattgccctggagcttgaggagaaaaccctgaaagatgagtactttatcagtcgtaaactctaccctaatgtcgatttctatagcggcattcttctcagggcaataggaattcctccggagatgtacacggtgatgtttgccattggtagaatgcccggctggatagcaaattggcgggaactgcatgaccagaacctccgtattacccggccacgtcaggtctatacggggaggcaggagagatcctttgtcccccttgaagagaggtaa

SEQ ID NO: 37023 - protein, 428 aa, Desulfotalea psychrophila LSv54
MSEKATLTVGGASYELDVTSGTEDERCIDIQSLRAKSGYITMDPGFGSTGACFSDITYVDGERGILRYRGYPIEQIAERASFVETCSLIIYGELPDAETLNRFRRALAEHAPLHTSLYHYFSGFPESSPPMAILSAMLNLVSCFHPGVLEVHSEGHGFDRTAALLLSKVRTIAAWSYRMSVGKPFNQPNPHLTYCANFLHMMFSEPFQEYIPSPAVERALALFLILHADHEQNCSTSTVRTVASSRANLFSSVASGVCALWGPLHGGANAAVIEMLEEIMASGRKIDYYINRAKDKSNDYKLMGFGHRVYKNFDPRASILKKRVYEVLAELHKSDPLLDIALELEEKTLKDEYFISRKLYPNVDFYSGILLRAIGIPPEMYTVMFAIGRMPGWIANWRELHDQNLRITRPRQVYTGRQERSFVPLEER

SEQ ID NO: 37024 - DNA, 1293 bp, Desulfotalea psychrophila LSv54
  CDS (1)..(1293): transl_table=11
atgtccgaaaaatttgcaacactcagcctcgacggcaaacaatactcactccccatcatcgaatcaaccaccggcgagaaagccattgatatccgatcgctgctcaaggatacggggcatataacccttgataggggctttatgaacaccgcatcctgcttcagcagcattacctaccttgatggagacaagggcattctcaactaccgaggatactccattgaagacctcgccgccaactgcagctttgtcgaggtctcctatctcattctccacggtgagttgccaaattaccaggagcttgaacactttcgccacgacatgaaccgttttgccctgctccacgaagatatgatccacttctttgatcactttccgccaaacgcctcccccatgtccatcctctccaccaccatcaactccctgcataatttttaccctgagatgaccgccaaaactgatccctacgggggcatcagcgtcaccaccgcccgactcctggccaaggttcgaaccatcgccgccttctcctataagaagagtaatggctacccccttgtctaccccagtcacaagttaaattactgtgaaaatttcctcaatatgatgtttgatcgtcccaatataccctacgagatcaaaccagaggtaaccgctgccctcaacaaactactcatcctccatgcggaccatgagcagaactgctcaaccagcaccgttcgactggtgggaagcgctcaggtaaatctctatgcatcaatttcggcaggagtaagtgccctttggggacctcttcatggaggagccaaccaggcagtcattgaaatgctcgaagagattcatgagagtggcgatgactataactactatatagaaaaggcaaaggacaagaacgaccccttccgactagcaggctttggtcaccgcgtctacaagacctttgaccctcgcgcccggataataaaggaggcctgccacgagatgctggcaagcatgaatgtccatgaccctctgttggatatagcctttgaattggaagagagggtgctcagagacgactactttatcagccgcaacctctatcccaatgtcgatttttatagcggcattatctaccgggcaatgggaattcccaccgatatgtttaccgtcatgttcgcactcggacgactaccgggatggattgcccaatggacagagatgcacgcagacccgaataccaagataggtcgacctcgccaaatatacacaggatacaagcaacgtgcttttgtacccatgtacgaaagataa

SEQ ID NO: 37025 - protein, 430 aa, Desulfotalea psychrophila LSv54
MSEKFATLSLDGKQYSLPIIESTTGEKAIDIRSLLKDTGHITLDRGFMNTASCFSSITYLDGDKGILNYRGYSIEDLAANCSFVEVSYLILHGELPNYQELEHFRHDMNRFALLHEDMIHFFDHFPPNASPMSILSTTINSLHNFYPEMTAKTDPYGGISVTTARLLAKVRTIAAFSYKKSNGYPLVYPSHKLNYCENFLNMMFDRPNIPYEIKPEVTAALNKLLILHADHEQNCSTSTVRLVGSAQVNLYASISAGVSALWGPLHGGANQAVIEMLEEIHESGDDYNYYIEKAKDKNDPFRLAGFGHRVYKTFDPRARIIKEACHEMLASMNVHDPLLDIAFELEERVLRDDYFISRNLYPNVDFYSGIIYRAMGIPTDMFTVMFALGRLPGWIAQWTEMHADPNTKIGRPRQIYTGYKQRAFVPMYER

SEQ ID NO: 37026 - DNA, 1281 bp, Yersinia pseudotuberculosis IP 32953
  CDS (1)..(1281): transl_table=11
atggctgacaaaaaagcgacgctgaatttaggcgaagctgcgatcgaactgggtgtcctatccccaaccctcggcactgacgtgatcgacgtccgcaccttaggttctaaaggttattttacctttgaccccggttttacctctaccgcatcctgcgaatcaaaaatcacctatattgatggtgatcagggtattttgctgcaccgtggcttcccgattgcccagttggcaaaagattctacttatctggaagtttgttacattctgctgtacggcgaaacacctacgccagaagagtacaaaacgttcaaaaccacagtgacccgacataccatgatccacgagcagatcacccgtctgttccatggtttccgccgcgattcacatccgatggccgtgctatgtggggttactggtgcgctagccgccttctaccatgatgctctggatgttaataacgagcgccatcgtgaaattaccgccttccgtctgttgtctaaaatgccgactgtcgcagcgatgtgttataaatattcactgggtcaaccgtttgtttatccacgtaacgatctgtcctacgcgggtaacttcctacacatgatgttctctacgccatgtgagaaatatgaagttaacccagtactggaacgcgctatggatcgtattctcatcctgcacgcagatcacgaacagaacgcgtcaacatcgaccgtccgtactgccggctcttctggcgctaacccgtttgcctgtatcgccgcggggatcgcatccctgtggggccctgcgcacggtggtgccaatgaagcctgcctgaagatgttggaagagattaaaactgttgagcatatccctgaatttatccgccgcgcgaaagataagaatgactcattccgtctgatgggttttggtcaccgtgtctataaaaactatgaccctcgtgccaccgtcatgcgtgaaacctgtcatgaagtgttagaagagctgaagctgaataacagcttgttagaagtggcgatggagttggaaaacatcgcactgaacgatccttacttcattgagaaaaaactgtatccaaacgtggacttctattcaggtattatcctgaaagccatggggattccatcgtcaatgtttacggtgatattcgccattgcccgaaccatcggttggattgctcactggaacgaaatgcataatgacggcatcaagattgcccgtccgcgccagctttatactggctatacagaacgtgatttccagagccaattgaaaaaataa

SEQ ID NO: 37027 - protein, 426 aa, Yersinia pseudotuberculosis IP 32953
MADKKATLNLGEAAIELGVLSPTLGTDVIDVRTLGSKGYFTFDPGFTSTASCESKITYIDGDQGILLHRGFPIAQLAKDSTYLEVCYILLYGETPTPEEYKTFKTTVTRHTMIHEQITRLFHGFRRDSHPMAVLCGVTGALAAFYHDALDVNNERHREITAFRLLSKMPTVAAMCYKYSLGQPFVYPRNDLSYAGNFLHMMFSTPCEKYEVNPVLERAMDRILILHADHEQNASTSTVRTAGSSGANPFACIAAGIASLWGPAHGGANEACLKMLEEIKTVEHIPEFIRRAKDKNDSFRLMGFGHRVYKNYDPRATVMRETCHEVLEELKLNNSLLEVAMELENIALNDPYFIEKKLYPNVDFYSGIILKAMGIPSSMFTVIFAIARTIGWIAHWNEMHNDGIKIARPRQLYTGYTERDFQSQLKK

SEQ ID NO: 37028 - DNA, 1284 bp, Mannheimia succiniciproducens MBEL55E
  CDS (1)..(1284): transl_table=11
atggccgacaaaaaagcaacactgacggtggatggaaaaaattatgaatttgatattgttaaaggttcattaggatatgaatccattgatattcacggtttaagccaaaacaaactttttatgtacgacccgggacttgtttcgactgccgtatgtgaatccgctatcacttatgtggacggcgatgaggggatgctgctttatcgtggttatcctatcgatcagctagcctctaacgccgattatcttgaagtcagttatttattactgtttggtgaacgacctaccaagcagcaatatcaggatttttccaaattggttaaacgtcacactctggtgcacgaacaattgaccaaattcttccaaggattccgtcgagattcacatccgatggcggtaatgtgcggggtaagcggcgcattggcggcattctatcacgattctattgatgttaaaaaagaagaacaccgggaattgacggcaattcgtttattggcaaaaattccgaccctggcggcgatgtgttataaatattcaatcggtcagccgtttatgttcccgcaaaataacctgtcttatgcgggaaactttctgtatatgatgtttgccaccccttgcgagccttatgtggtgaatccggtattggaacgcgcattggataaaatctttattttgcacgcggatcacgagcaaaacgcctcaacttcaacggtgcggattgccgcatcttcaggcgctaacccgtttgcctgtatcgccgccggtatcgcttcgctttgggggccgtctcatggcggcgctaacgaagcctgtattaatatgctggaagaaataggtacggtggatagaattccggaatttattgcccgggcaaaagataaaaacgacccgttccgcttaatgggctttggtcaccgcgtatataaaaactacgatccgcgagcgaaagtcatgcgtgaaacctgccatgaagtattgaaagaactgaatattaaaaatccgttgttcgatgttgccagcgagttggaacgcattgctttaagcgatccgtattttatcgatcataaattgtatcctaatgtggatttttattccggtatcgtcttaaaagccatcggtattccgacttccatgtttaccgtgatgttcgccttggcgagaactgtgggttggattgctcactggaaagaaatgtataaacaaggaaactttaaaattgcccgccctcgtcaaatttacacgggttacacggaacgcgattttcctgcgattgataaggattaa

SEQ ID NO: 37029 - protein, 427 aa, Mannheimia succiniciproducens MBEL55E
MADKKATLTVDGKNYEFDIVKGSLGYESIDIHGLSQNKLFMYDPGLVSTAVCESAITYVDGDEGMLLYRGYPIDQLASNADYLEVSYLLLFGERPTKQQYQDFSKLVKRHTLVHEQLTKFFQGFRRDSHPMAVMCGVSGALAAFYHDSIDVKKEEHRELTAIRLLAKIPTLAAMCYKYSIGQPFMFPQNNLSYAGNFLYMMFATPCEPYVVNPVLERALDKIFILHADHEQNASTSTVRIAASSGANPFACIAAGIASLWGPSHGGANEACINMLEEIGTVDRIPEFIARAKDKNDPFRLMGFGHRVYKNYDPRAKVMRETCHEVLKELNIKNPLFDVASELERIALSDPYFIDHKLYPNVDFYSGIVLKAIGIPTSMFTVMFALARTVGWIAHWKEMYKQGNFKIARPRQIYTGYTERDFPAIDKD

SEQ ID NO: 37030 - DNA, 1272 bp, Legionella pneumophila subsp. pneumophila str. Philadelphia 1
  CDS (1)..(1272): transl_table=11
atgactcaaaagacagcgaaactcagcatcgatgggcaagagacgattgatttaccaatctatactcccaccctaggtaatgatgtgattgatattacccagcttggttcacatggcgtctttacctttgatcaaggttttttatcaactgcctcctgtgaatcaaaaatcacctatattgatggggataaaggcattttgttgtataggggttatcctatagaacaattggcagaaaaaaaggacttccttgatgtaagttatttattactcaatggagaactacctaacaaagaagaaaagaaagctttcgttagtctgatcaacaatcatactatggttcatcagcaaatgtaccagtttttgaatgggttcagacgtgacgctcacccaatggctataatggttggaattgtgggggctttgtctgctttttatcatgaatccatggatttgaataacgcacaagaccgttttatttccgcaatcagactggttgctaaaatgcctactttagctgcgatgagctataaatactccattggcatgccttatatgtatcctaaaaataaaatgtcttatgcagagaactttctccatatgatgtttggtgttccatctgaagatactacgccagatcctgtactggtaagggctatggatactatttttattctccatgccgatcatgagcaaaatgcctctacatcgacggtacgtctggccggttctaccggagctaatccctttgcttgcatttcagccggtataggggctttatggggaccagctcatggtggagcgaatgaagcctgcttaaatatgctaaaagaaataggcgatgtgagtcgcatcgatcattacattaaacgagctaaagataaaaatgatccattccgcttgatggggtttgggcacagggtctataaaagctatgatccaagagctaaagtaatgcgtaagacctgttatgatgtactagaagcggtaggagccaaagacgcacctttattcaaattggcaatggagcttgaacgtatagctcttgaagatgaatatttcattgagaaaaaactctaccccaatgtagacttttactcaggactgactttaagtgctattggaataccaaccaatatgttcacagtgatatttgctctggcccgcactgttggatggatgagtcattggatggaaatggtagccaccaagtcacgcattggcagacctcgccaattgtatactggtgaaaaaattcgtgacgtaaaataa

SEQ ID NO: 37031 - protein, 423 aa, Legionella pneumophila subsp. pneumophila str. Philadelphia 1
MTQKTAKLSIDGQETIDLPIYTPTLGNDVIDITQLGSHGVFTFDQGFLSTASCESKITYIDGDKGILLYRGYPIEQLAEKKDFLDVSYLLLNGELPNKEEKKAFVSLINNHTMVHQQMYQFLNGFRRDAHPMAIMVGIVGALSAFYHESMDLNNAQDRFISAIRLVAKMPTLAAMSYKYSIGMPYMYPKNKMSYAENFLHMMFGVPSEDTTPDPVLVRAMDTIFILHADHEQNASTSTVRLAGSTGANPFACISAGIGALWGPAHGGANEACLNMLKEIGDVSRIDHYIKRAKDKNDPFRLMGFGHRVYKSYDPRAKVMRKTCYDVLEAVGAKDAPLFKLAMELERIALEDEYFIEKKLYPNVDFYSGLTLSAIGIPTNMFTVIFALARTVGWMSHWMEMVATKSRIGRPRQLYTGEKIRDVK

SEQ ID NO: 37032 - DNA, 1302 bp, Burkholderia mallei ATCC 23344
  CDS (1)..(1302): transl_table=11
atgaccccgtctgatgttaaagccacgctatcgttcagcgataattcgccgagcgtcgaactgccgatctacaagggtacgatgggccccgacgtgatcgatatccgcaagctgtacggccagaccggcaagttcacgtacgacccgggcttcatgtcgacggcgtcgtgcaactcggcgatcacgtacatcgacggcgacaagggcgaactgctgtaccgcggctacccgatcgacaatctcgcgcaaaacgcggacttcctcgaatcctgctatctgctgctcaagggcgaactgccgaacgcggcgcagaagaaggagttcgtggccaccgtcacgaagcacacgatggtgcacgagcagatgcagttcttcttccggggtttccgccgcgacgcgcacccgatggcgattctcgtcgccgcggtcggcgcgctgtccgcgttctaccacgattcgctcgacatcaatgatccgcgtcaccgcgaagtgtcggcgatccgcatgatcgcgaagctgccgacgctcgtcgcgatggcgtacaagtacagcatcggccagccgttcgtgtatccgcgcaacgatctgtcgtacagcgcgaacttcatgcgcatgatgttcgcgaacccgtgcgaggaatatcaggtcaacgacgtgctcgtccgcgcgctcgaccgtatcctgatcctgcatgccgaccacgagcagaacgcgtcgacgtcgacggtccgcctcgccggctcgtcgggcgcgaacccgttcgcgtgtatcgcggccggcatcgcgtgcttgtggggcccggcgcacggcggcgcgaacgaagccgcgctgaacatgctcgagcagatcggcacgccggagaacattcccgagttcatcaagcaggtgaaggacaagaactcgggcgtgaagctgatgggcttcggccaccgcgtgtacaagaactacgatccgcgcgcgaagctgatgcgcgaaacgtgctacgaagtgctcaacgagctgggcctgcacgacgatccgctgttcaagctcgcgatgcagcttgagaagatcgcgctcgaagacgaatacttcgtgtcgcgcaagctgtacccgaacgtcgacttctactcgggcatcgtccagcgcgcgctcggcatcccgacgtcgatgttcacctgcatcttcgcgatggcgcgcacggtcggctggatcgcgcagtggaacgagatgatcgccgatccggagcagaagatcggccgtccgcggcagctcttcatcggcgaaacgccgcgcacggcgaagccgatcgagcagcgctga

SEQ ID NO: 37033 - protein, 433 aa, Burkholderia mallei ATCC 23344
MTPSDVKATLSFSDNSPSVELPIYKGTMGPDVIDIRKLYGQTGKFTYDPGFMSTASCNSAITYIDGDKGELLYRGYPIDNLAQNADFLESCYLLLKGELPNAAQKKEFVATVTKHTMVHEQMQFFFRGFRRDAHPMAILVAAVGALSAFYHDSLDINDPRHREVSAIRMIAKLPTLVAMAYKYSIGQPFVYPRNDLSYSANFMRMMFANPCEEYQVNDVLVRALDRILILHADHEQNASTSTVRLAGSSGANPFACIAAGIACLWGPAHGGANEAALNMLEQIGTPENIPEFIKQVKDKNSGVKLMGFGHRVYKNYDPRAKLMRETCYEVLNELGLHDDPLFKLAMQLEKIALEDEYFVSRKLYPNVDFYSGIVQRALGIPTSMFTCIFAMARTVGWIAQWNEMIADPEQKIGRPRQLFIGETPRTAKPIEQR

SEQ ID NO: 37034 - DNA, 1302 bp, Nocardia farcinica IFM 10152
  CDS (1)..(1302): transl_table=11
gtgcccgagaaccacatcgacgacgccaagccggtactgagttacccgggcggcgaatacgccatgacgatcaccgaggccaccgagggcaaccacggtatcgatctgggcaaaatgctggccagcaccggatacgtcacctacgacccgggcttcatgaacaccgcccccaccaagtcggcgatcacctacatcgacggcgaggcgggcatcctgcgctaccgcggctacccgatcgagcagctggccgactcctcgaccttcatcgaggtcagctacctgctgatctacggcgagctacccacccaggcccagctcgacgacttcaccgaccggatccgccgccacaccctgctgcacgaggacctcaagcggttcttcgacggcttcccgcgcaacgcgcaccccatgccggtgctctcctcggcggtcaacgcgctgtcggcctactaccaggactcgctggacccgcgcgaccccgagcaggtcgagctgtccaccatccgcctgctggccaagctgcccaccatcgcggcctactcctacaagaagtcggtcggccagccgttcctctacccggacaactcgctgaccctggtggagaacttcctgcggatgaccttcggtttcccggccgagccgtacgaggtcgaccccgaggtcgcggccgcgctggacatgctgctgatcctgcacgccgatcacgagcagaactgttccacctccaccgtgcgcctggtcggctcctcggacgccaacctgttcacctcggtctccggcggcatcaacgcgctgtggggcccgctgcacggcggcgcgaaccaggccgtgctggagatgctcgacgacatcaaggcccagggcggtgacgtcaaggagttcatccgcaaggtcaagaacaaggaagacggcgtgaagctgatgggcttcgggcaccgcgtctaccgcaactacgacccgcgcgccgccatcgccaagaagcacgccgacaacatcctgcgcaagctgggcggcgacgacgagctgttcgagatcgcccaggcgctggaggaggccgcgctgaccgacgactacttcgtcgagcgccgcctgtacccgaacgtcgacttctacaccggcgtcatctacaaggcgatgggcttccccacccggatgttcaccgtgctgttcgcgatgggccggctgccgggctggatcgcgcactggcgcgagatgcacagcgagccgctgaagatcggccgcccgcgacagatctacaccgggtatggtgcgcgcgactacagccggatcaccgaacgctga

SEQ ID NO: 37035 - protein, 433 aa, Nocardia farcinica IFM 10152
MPENHIDDAKPVLSYPGGEYAMTITEATEGNHGIDLGKMLASTGYVTYDPGFMNTAPTKSAITYIDGEAGILRYRGYPIEQLADSSTFIEVSYLLIYGELPTQAQLDDFTDRIRRHTLLHEDLKRFFDGFPRNAHPMPVLSSAVNALSAYYQDSLDPRDPEQVELSTIRLLAKLPTIAAYSYKKSVGQPFLYPDNSLTLVENFLRMTFGFPAEPYEVDPEVAAALDMLLILHADHEQNCSTSTVRLVGSSDANLFTSVSGGINALWGPLHGGANQAVLEMLDDIKAQGGDVKEFIRKVKNKEDGVKLMGFGHRVYRNYDPRAAIAKKHADNILRKLGGDDELFEIAQALEEAALTDDYFVERRLYPNVDFYTGVIYKAMGFPTRMFTVLFAMGRLPGWIAHWREMHSEPLKIGRPRQIYTGYGARDYSRITER

SEQ ID NO: 37036 - DNA, 1371 bp, Photobacterium profundum SS9
  CDS (1)..(1371): transl_table=11
ttgacatttgggctaacgaaaggtacaacaaaaggaggtccgtattggattaggattataataatagcaaaggagattgttatggcggataagaaagcgactcttcatattgaagggaaagccccaatcgaactaccaattcttgggggctctcaggggccagatgtaattgatgtgcgtaaacttggcgctagcggttactttacatttgatcctggttttctagccacagcatcatgtgaatctcaaattacttacattgatggcgacaaaggtatcctgttacaccgtggctaccctatcgaccaattagccaataacgctgactacttagaagtatgttacgtattgttatatggtgaagtgccaacccgagctcagtacgaatttttccgtactacagtgactcgtcacacaatggttcatgaacaaattgctagcttcttccacggtttccgtcgagatgctcaccctatggcagttatgtgtggtgtggttggagcacttgcagcgttttaccatgattcgttagatatcaacaatgatagccaccgtgaaatcacggcattccgtttgctatcaaaaatgccgacacttgcttcaatgtgttacaaatactcaattggacaaccattcatcttccctcgcaacgatctagattatgcagaaaacttcctgcatatgatgtttgcgactccgtgtgaagagtatgatgttagcccagttattgcgcgtgcaatggataagatcttcaccttgcatgccgatcacgaacaaaatgcttcaacatcgactgtacgtttagctggctcttcaggcgctaacccgtttgcatgtattgcagctggtattgcgtcactttggggacctgcacatggcggggcaaatgaagcctgcttgaaaatgctagaagaaattggcagcgttgataaaattgcagaatatatagaacgtgcaaaagacaaagatgacccgttccgtcttatgggctttggtcaccgcgtttacaaaaactatgacccacgtgcgacagtaatgcgtgaagcatgtcatgaagtattagaagagcttaatatccaagacccactgcttgatatagcaatggaactggaacgtatcgcactttctgacccgtactttattgacaagaaactgtacccgaatgtcgatttctactcaggtctaatcttgaaagctattggtattccaatttcaatgtttacggttattttcgccatgtctcggactgttggttggattgcacactggagcgaaatgcacggtgaccctgataatcgcatcggtcgtcctcgtcagctttacactggtaaactacaacgcgaatttaaacctcttcatgaaagagagtaa

SEQ ID NO: 37037 - protein, 456 aa, Photobacterium profundum SS9
MTFGLTKGTTKGGPYWIRIIIIAKEIVMADKKATLHIEGKAPIELPILGGSQGPDVIDVRKLGASGYFTFDPGFLATASCESQITYIDGDKGILLHRGYPIDQLANNADYLEVCYVLLYGEVPTRAQYEFFRTTVTRHTMVHEQIASFFHGFRRDAHPMAVMCGVVGALAAFYHDSLDINNDSHREITAFRLLSKMPTLASMCYKYSIGQPFIFPRNDLDYAENFLHMMFATPCEEYDVSPVIARAMDKIFTLHADHEQNASTSTVRLAGSSGANPFACIAAGIASLWGPAHGGANEACLKMLEEIGSVDKIAEYIERAKDKDDPFRLMGFGHRVYKNYDPRATVMREACHEVLEELNIQDPLLDIAMELERIALSDPYFIDKKLYPNVDFYSGLILKAIGIPISMFTVIFAMSRTVGWIAHWSEMHGDPDNRIGRPRQLYTGKLQREFKPLHERE

SEQ ID NO: 37038 - DNA, 1119 bp, Geobacillus kaustophilus HTA426
  CDS (1)..(1119): transl_table=11
atgacagtaacccgtgggttagagggagttgtggccacaacttcaagcatcagttcgatcatcgatgacacgttgacgtatgtcggttatgacattgacgatttagccgaaaacgcttccttcgaagaagtcgtttatttgctttggcatcgcgaactgccgacgaaagagcagcttgaggaattaaagaaacagttggcggaaaacgctgaaattccaaatgaaatcattgaacacttcaagctgtatccgattgacaaggtgcatccgatggcggctttgcgcaccgcggtatcgcttctcggcttgtatgacgaagaggcggatgtgatgacgaaagaggcgaattatcggaaagccattcgcctgcaggcgaaaatcccgacgattgtcaccgccttcgcccgcgtgcgcaaagggttggaaccggttgcgccgcgcaaagatttgagctttgctgccaatttcttgtacatgctgaccggcaaagaaccagacgacatcgccacggaagcgttcaacaaggcgctcgtgctgcatgccgaccacgagttgaacgcgtcgacgttcacggcgcgcgtctgcgtagccacgctgtccgatatttattccggcatcacggcggcgatcggagccttgaaagggccgcttcacggcggggcgaacgaagcggtgatgaaaatgttgacggaaatcggcacggtcgacaacgtcgagccatacatccgcagaaagctcgccaacaaagaaaaaattatgggctttggccatcgcgtttaccgaaaaggcgacccgcgcgccaaacatttgaaaaaaatgtcggaaaaactaacgaagctcgtcggcgagccgcattggtatgaaatgtcgacgaagattgaagaaatcgtcacatcggaaaaagcgctgccgccgaacgttgacttttattccgcctcggtttaccattgtttaggaatcgatcatgatttgtttacgccgatttttgccgtcagccgcacctcgggatggttggctcacatcttggaacaatacgacaacaaccgtctcatccgtccgcgcgctgagtacaccggcccaggcaagcgggcgtacgtgccgatcgacgagcgcggctaa

SEQ ID NO: 37039 - protein, 372 aa, Geobacillus kaustophilus HTA426
MTVTRGLEGVVATTSSISSIIDDTLTYVGYDIDDLAENASFEEVVYLLWHRELPTKEQLEELKKQLAENAEIPNEIIEHFKLYPIDKVHPMAALRTAVSLLGLYDEEADVMTKEANYRKAIRLQAKIPTIVTAFARVRKGLEPVAPRKDLSFAANFLYMLTGKEPDDIATEAFNKALVLHADHELNASTFTARVCVATLSDIYSGITAAIGALKGPLHGGANEAVMKMLTEIGTVDNVEPYIRRKLANKEKIMGFGHRVYRKGDPRAKHLKKMSEKLTKLVGEPHWYEMSTKIEEIVTSEKALPPNVDFYSASVYHCLGIDHDLFTPIFAVSRTSGWLAHILEQYDNNRLIRPRAEYTGPGKRAYVPIDERG

SEQ ID NO: 37040 - DNA, 1254 bp, Anaplasma marginale str. St. Maries
  CDS (1)..(1254): transl_table=11
atggtagaaaaagcgattttagagtgcggagattgcaaaataagcttgcccgttatgcatggcagcgatggtacactagctgttgacacgactagcctctacaaagattccaaaatccttacttatgatcctggattcatgtccactgctgcgtgtaaatccgaaataacgttcatagacggcgatgaaggcattctgcgttacagggggtatgatatagctgaccttaccatggcagacggcggattttgtagcattgcctacctactgttgtatgggactatgccgcaagggcgcgagctcgctgactttgtcgctactgtaagcagggagtgcaatgtacgcacacaagttttagacgtaattcgagcattgccacgtgatgcccacccaatggccatattaattgcaagctttgcagctcttgctgcccactatcacggtgccaattctttagatccactgcgcagcgcgattgtggctatatcgcaagtgccgggcattgttgcaagcatttacaggcacacttctggcgcgccgcttatagaggcagatccgagcctagggtacgtacaaaacttcgtgcacatgatgtttggtgacttgcatgagacgcgcaaaagcattatctgcaaggcgctggaggcgatcttcataatgcatgcagaccacgaacagaatgcttctactgctacggtaagggcaaccggctctgccggggctaacctgtttgcgtgcctgagcgcaggcgcagcaaccttgtggggcccagctcatggtggtgcgaacgaagcagttgtaaaaatgcttgaggaaattggtcgccctgagcgagttggtgagttcattgagaaggtaaaagagaaagaaagcggagtgaggctcatgggttttggccacagggtctacaagaactacgatccaagagcccgcatcatccgggatatatgcaaagaaacgctgagtggattgggcgcggatgacccactacttgatgtggcgactgcgctggaaaaagcggctctggaagacgaatattttgtcaaacgctcactgtaccccaatgttgacttttactccggtattgtactaaaggcagccggggtgccagtgaacatgtttaccgcgttttttgctctggcgaggactaccggatggtctgcccaatggtatgaaatgttggataaacagcacgagggtagcaagatatgccgcccacgccaactttataccggcaagatgaacgcagagtag

SEQ ID NO: 37041 - protein, 417 aa, Anaplasma marginale str. St. Maries
MVEKAILECGDCKISLPVMHGSDGTLAVDTTSLYKDSKILTYDPGFMSTAACKSEITFIDGDEGILRYRGYDIADLTMADGGFCSIAYLLLYGTMPQGRELADFVATVSRECNVRTQVLDVIRALPRDAHPMAILIASFAALAAHYHGANSLDPLRSAIVAISQVPGIVASIYRHTSGAPLIEADPSLGYVQNFVHMMFGDLHETRKSIICKALEAIFIMHADHEQNASTATVRATGSAGANLFACLSAGAATLWGPAHGGANEAVVKMLEEIGRPERVGEFIEKVKEKESGVRLMGFGHRVYKNYDPRARIIRDICKETLSGLGADDPLLDVATALEKAALEDEYFVKRSLYPNVDFYSGIVLKAAGVPVNMFTAFFALARTTGWSAQWYEMLDKQHEGSKICRPRQLYTGKMNAE

SEQ ID NO: 37042 - DNA, 1281 bp, Idiomarina loihiensis L2TR
  CDS (1)..(1281): transl_table=11
atggctgatcgtaaagccactttacagattgacggccaatccattgaattgccggtactatcaccaacggcaggaaaggatgtagttgacgtccgaactctgggaaaacatggttattttacttttgacccagggtttctggctacaggctcttgcgagtcggctatcacctatatagatggtgaaaacggcgttttactgcaccgcggttaccctattggtgagttagcaactaaagcagattacttagaagtttgctacatgttgttgcacggcgaagctcctaccgaaaagcaataccatgaattcaaaaacaccattactaaacacactatggtgcatcagggaattcacaatttctttaatggtttccgtcgcgatgctcaccctatggcaatgttatgtgccgtaacgggagctttatcatcgttctatcatgatgatctggagattcacgatgaaaaccaacgtttacgtagtgcttaccgtctgattgcaaaaattccaacaattgcagcaatggcttataaattcagcattggtcaacctttcgtttacccacgtaacgacttaggttatgcagaaaacttcctgaacatgatgttctcggttcctgcggaagactacaaaataagccctgcggtagctcgcgctatggatcgcatctttactttgcatgctgaccacgagcaaaacgcatcaacgtcaacagtacgccttgccggttcttctggtgctaacccttacgcatgtatcgctgcgggtgttgcgtctttatggggaccagcccatggtggtgcaaacgaagcttgcttgcgtatgctggctgaaattggctctgttgaaaacattccaaaatatattgagaaagcaaaagacaaagacgatcctttccgtctaatgggctttggtcaccgtgtatacaaaaacaccgaccctcgtgcaacggtaatgcgtgaatcttgccacgaagtactgaaagaattggatcgtgatgatccattacttgacgtcgcaatggaactggagcgtatcgctctggaagacgactacttcattgaaaagaaactcttccctaacgttgacttctactcaggtatcgtactgaaagctattggtattcctaccaatatgttcaccgttatctttgcgctgtcacgtactgtcggctgggtttctcactggcacgaaatgatgggcgaagaaaaccagaaaattggtcgtcctcgtcagttatatactggttatacaaaacgcgagttttcaccaattaaaaaataa

SEQ ID NO: 37043 - protein, 426 aa, Idiomarina loihiensis L2TR
MADRKATLQIDGQSIELPVLSPTAGKDVVDVRTLGKHGYFTFDPGFLATGSCESAITYIDGENGVLLHRGYPIGELATKADYLEVCYMLLHGEAPTEKQYHEFKNTITKHTMVHQGIHNFFNGFRRDAHPMAMLCAVTGALSSFYHDDLEIHDENQRLRSAYRLIAKIPTIAAMAYKFSIGQPFVYPRNDLGYAENFLNMMFSVPAEDYKISPAVARAMDRIFTLHADHEQNASTSTVRLAGSSGANPYACIAAGVASLWGPAHGGANEACLRMLAEIGSVENIPKYIEKAKDKDDPFRLMGFGHRVYKNTDPRATVMRESCHEVLKELDRDDPLLDVAMELERIALEDDYFIEKKLFPNVDFYSGIVLKAIGIPTNMFTVIFALSRTVGWVSHWHEMMGEENQKIGRPRQLYTGYTKREFSPIKK

SEQ ID NO: 37044 - DNA, 1296 bp, Azoarcus sp. EbN1
  CDS (1)..(1296): transl_table=11
atgagcactgaacgcactgcaacgctaaccgtcgatggcaagaccgtcgaattcccggtaatgaccggcacccatggcaatgacgtcatcgatattcgcacgctgggggccaagaccggtttcttcacttacgactcgggcttcctgtcgaccgcgagctgcaagtccacgattacgttcatcgacggtgacaagggtgaactgctctatcgcggttatcccatcgagcaactggccgacaagtgcagcttcctcgaagtcgcctatctgctgaagaacggcgagctcccgaacgggacgcagaaagtggagttcgagaacaccatcaagaaccacacgatgctgcacgaccagatgacgaagttcttcacgggcttccgtcgtgatgcgcatccgatggccgtgatggtcggcgtcgtcggcgcgctgtcggccttctatcatgaagcgatggatttctccgactccgagcaccgcaacatctcgatcaaccgcctgatcgcgaagctgccgacgatcgtcgcgatggcctacaagtacaacatgggccagccgttcatgtatccgcgcaacgagctcgactacacggcgaacttcatgcacatgatgttcggcacgccgtgcgaagagtacaagcccaatccggtgctggtgcgtgcgctcgacacgatcttcacgctgcacgccgatcacgagcagaacgcttcgacgtccaccgtgcggctcgcggggtcgtcgggtgcgaacccgttcgcgtgcatctcggccggcatcgcctgcctgtggggcccggcgcacggcggcgcgaacgaagcatgcctcaacatgctcgaggaaatcggcgacgtgtcgcgcgtcggcgaatacatcgcgcgtgcgaaggacaagaacgacagcttcaagctgatgggcttcggtcaccgcgtctacaagaacttcgacccgcgcgcgaagctgatgcgccaggtctgctacgacgtcctgggcgagctgggcctcgagaacgaccgcctcttcaagctggcgatggaactcgagaagatcgcactggaagaccagtacttcgtcgagaagaagctctatccgaacgtcgacttctactccggcatcgtgcagaaggcgctggggatcccgacgtcgatgttcacctgcatcttcgcgctggcacggaccgtcggctggatcacgcagtgggaagaaatgatcaccgatccggaatacaagatcggtcgtccgcgccagttgtacatcggtgcagcgcggcgcgacgtaccgacgctcgcacaacgtccgtaa

SEQ ID NO: 37045 - protein, 431 aa, Azoarcus sp. EbN1
MSTERTATLTVDGKTVEFPVMTGTHGNDVIDIRTLGAKTGFFTYDSGFLSTASCKSTITFIDGDKGELLYRGYPIEQLADKCSFLEVAYLLKNGELPNGTQKVEFENTIKNHTMLHDQMTKFFTGFRRDAHPMAVMVGVVGALSAFYHEAMDFSDSEHRNISINRLIAKLPTIVAMAYKYNMGQPFMYPRNELDYTANFMHMMFGTPCEEYKPNPVLVRALDTIFTLHADHEQNASTSTVRLAGSSGANPFACISAGIACLWGPAHGGANEACLNMLEEIGDVSRVGEYIARAKDKNDSFKLMGFGHRVYKNFDPRAKLMRQVCYDVLGELGLENDRLFKLAMELEKIALEDQYFVEKKLYPNVDFYSGIVQKALGIPTSMFTCIFALARTVGWITQWEEMITDPEYKIGRPRQLYIGAARRDVPTLAQRP

SEQ ID NO: 37046 - DNA, 1290 bp, Zymomonas mobilis subsp. mobilis ZM4
  CDS (1)..(1290): transl_table=11
atgagctctcctaatgaagcgattattggcctaaataacgaagagtatcgtttccccgtgcgacaaagcacggcaggcacattaggaattgatatccgtcagcttcatagccagagcggcgctctgacctatgatcccggttttctgtcgacggcaagctgccagtcaaagattacttatgtcgatggcgaaaaaggcattttgctttatcgaggatatcctattgagcaattagcagaaaaatcgagctttcccgaagtcgcctatctccttttacatggcgagctccccaaagccgatgatttttctactttttcagatgtaattacccatcatacgatggttaatgagcagctttccgctttttatcggggcttccggcgagatgctcatcctatggctgttctttgtggggttgtgggtgccttatcggccttttatccagaggcaatccatattcatgatcccgcgcaaagaatggcatcttgtcatcgtttactggctaaattgccgactattgcggcaatggcgtataaatattcagtaggccaacccttcgtctatccagataatagcctaagctatgtaggtaatttccttcggatgactttcagtgttcctgcggaaccgtatcatgtcgatccgttaattgaatcagctttgaataaaatctttattctacatgctgatcacgaacaaaatgcttcgacatcgacggttcgcttggctggttcttcaggcgctaacccttatgcttgtattgcggctggcattgcctgtttatgggggccctcgcatggcggcgctaatgaggcaacattggctatgctgaaagaaatcggcacacctgaaaatattcctcatttcattgatcgtgccaaagaccgcaatgatcccttccgtcttatgggctttggccatcgcctctataaaaattatgatcctcgggcgcgtgttctggctaaaacagctgccgcaattttggataaaacaggcgccaataatccaatatttgatacggctcgcgccttggaagaaatcgctcgaaaagattcctattttatcgagaggaaactttatcccaatgttgatttctattcaggcttgatcttgtcagctatcggtttcccgacttctatgtttaccgctttatttgccttggccagaactgcgggatggatggctcaatggaatgaaatgattaccgatcctgaacaaaaaatcggtcgtccgagacaaatctacacaggtgtctctactcgggattacgttaatatcgaaaaccgttga

SEQ ID NO: 37047 - protein, 429 aa, Zymomonas mobilis subsp. mobilis ZM4
MSSPNEAIIGLNNEEYRFPVRQSTAGTLGIDIRQLHSQSGALTYDPGFLSTASCQSKITYVDGEKGILLYRGYPIEQLAEKSSFPEVAYLLLHGELPKADDFSTFSDVITHHTMVNEQLSAFYRGFRRDAHPMAVLCGVVGALSAFYPEAIHIHDPAQRMASCHRLLAKLPTIAAMAYKYSVGQPFVYPDNSLSYVGNFLRMTFSVPAEPYHVDPLIESALNKIFILHADHEQNASTSTVRLAGSSGANPYACIAAGIACLWGPSHGGANEATLAMLKEIGTPENIPHFIDRAKDRNDPFRLMGFGHRLYKNYDPRARVLAKTAAAILDKTGANNPIFDTARALEEIARKDSYFIERKLYPNVDFYSGLILSAIGFPTSMFTALFALARTAGWMAQWNEMITDPEQKIGRPRQIYTGVSTRDYVNIENR

SEQ ID NO: 37048 - DNA, 1296 bp, Silicibacter pomeroyi DSS-3
  CDS (1)..(1296): transl_table=11
atgactgaagaaaagaaaaccgccacgcttagcctgaacggtcaatcctacgatttgccggtgtattcgccctcggcgggcccggacgtgatcgacatccgcaaactctatggtcaggccggcgtgttcacctatgacccgggcttcacctcgacggcgagctgcgacagcaccatcacctatatcgatggcgaactgggcgagctgctgcatcggggctatccgatcgaccagctggcggccaagtcgcattacctcgaggtctgctatctgctgctgtacggtgaactgccgaccgcggccgctctcgagaagttcgagaccacgatcacccgccacaccatgatccacgagcagatgcactatttcttccgcggcttccgccgcgatgcgcatccgatggcgaccatggtgggtgtggtcggcgcgatgtcggccttctatcacgactcgaccgatatcgccgacccgcatcagcgcgagatcgccagccaccgcctgatcgccaagatgccgaccatcgcggcgatggcgtataaatactcgatcggccagccgttcatgtatccgcgcaacgatctggattacgcggccaacttcctgcagatgtgttttgccgtcccggccgagcattatcatgtcgacccgatcctggcccgcgccatggaccggattttcacgctgcatgccgatcacgagcagaacgcctcgacctcgaccgtgcgtctggcgtcgtcctcgggcgcgaacccgtttgcctgtatcgccgccggtatcgcctgtctctggggtcccgcccatggcggcgccaaccaggcctgcctggagatgctgaaagagatcggctcgcccgaccgcatccccgagttcatcgcccgcgccaaggacaagaacgatccgttccgcctgatgggctttggtcaccgcgtctacaagaacttcgatccgcgcgcgacggtgatgaaacagtccgccgacgaggtgctggacctgctgggtgtggaaaacaacccgatcctggccaccgccaaggaactggaacgcgccgccctggccgatgactatttcgccgagaagaagctgttcccgaatgtcgacttctattcgggtatcatcctcgaggcgatgggcttcccgacctcgatgttcacgcccatcttcgcggtatcgcggaccgtgggttgggtcagccagtggaaagagcagctggccgatccgcagcacaagatcggccgcccgcgtcagctgtacctcggctctaccgcgcgcgactatgtggatatcgaagaccgctga

SEQ ID NO: 37049 - protein, 431 aa, Silicibacter pomeroyi DSS-3
MTEEKKTATLSLNGQSYDLPVYSPSAGPDVIDIRKLYGQAGVFTYDPGFTSTASCDSTITYIDGELGELLHRGYPIDQLAAKSHYLEVCYLLLYGELPTAAALEKFETTITRHTMIHEQMHYFFRGFRRDAHPMATMVGVVGAMSAFYHDSTDIADPHQREIASHRLIAKMPTIAAMAYKYSIGQPFMYPRNDLDYAANFLQMCFAVPAEHYHVDPILARAMDRIFTLHADHEQNASTSTVRLASSSGANPFACIAAGIACLWGPAHGGANQACLEMLKEIGSPDRIPEFIARAKDKNDPFRLMGFGHRVYKNFDPRATVMKQSADEVLDLLGVENNPILATAKELERAALADDYFAEKKLFPNVDFYSGIILEAMGFPTSMFTPIFAVSRTVGWVSQWKEQLADPQHKIGRPRQLYLGSTARDYVDIEDR

SEQ ID NO: 37050 - DNA, 1275 bp, Francisella tularensis subsp. tularensis SCHU S4
  CDS (1)..(1275): transl_table=11
ttggaggtcatgttaatgagtaaatacgcaactcttaagtatgcagataaaaatattgaaatagaattaccagtatattctcctagcttgggtaatgactgcatagatgtttcatcattagtaaaacacggaatttttacttatgatcctggattcatgtctacagctgcatgcgaatctaaaattacatatatcgatggtggtaaaggtgtactcttacatagaggctacccaatcgaagaatggactcaaaaatcaaactacagaactctttgctatgcattgatttatggcgaactcccaacagatgaacaggttaaaagctttagacaagaaattatcaataaaatgccagtatgcgagcatgtcaaagctgcaatagctgcaatgcctcaacatacacatcctatgtcaagcttaatagctggtgttaatgtcttagctgctgaacatatccacaatggacaaaaagaatctcaagatgaagtcgcaaaaaatatcgtagcaaaaattgcaactatagcagccatggcttacagacataatcacggcaagaaattcttagaacctaaaatggaatatggctatgctgagaatttcttgtatatgatgtttgctgatgatgagagctacaaaccagatgagctacatatcaaagcaatggatacaatatttatgcttcatgctgatcacgagcaaaatgcttcaacatcaactgtaaggttatcaggatcaactggtaactctccttatgcggcaattatcgcaggtattaccgcattatggggacctgctcatggaggcgctaatgaagctgtgcttaaaatgttatctgaaattggtagcactgagaatatcgataagtatattgctaaagcgaaagataaagatgatccatttagattaatgggctttggacatagagtctacaaaaatactgatccgagagctactgcaatgaaaaagaactgtgaagaaatacttgctaaacttggtcatagtgataaccctcttctcacagtagctaaaaaactagaagaaattgctttacaagatgagttctttatcgagagaaagcttttctctaatgttgatttttactcaggtataatcttaaaagccatgggcattccagaagatatgtttacagccatatttgctctagcaagaacatcagggtggatatctcaatggatagagatggttaatgatcctgctcaaaagattggtcgtccaagacaattatatactggtgcaacaaatagaaatttctaa

SEQ ID NO: 37051 - protein, 424 aa, Francisella tularensis subsp. tularensis SCHU S4
MEVMLMSKYATLKYADKNIEIELPVYSPSLGNDCIDVSSLVKHGIFTYDPGFMSTAACESKITYIDGGKGVLLHRGYPIEEWTQKSNYRTLCYALIYGELPTDEQVKSFRQEIINKMPVCEHVKAAIAAMPQHTHPMSSLIAGVNVLAAEHIHNGQKESQDEVAKNIVAKIATIAAMAYRHNHGKKFLEPKMEYGYAENFLYMMFADDESYKPDELHIKAMDTIFMLHADHEQNASTSTVRLSGSTGNSPYAAIIAGITALWGPAHGGANEAVLKMLSEIGSTENIDKYIAKAKDKDDPFRLMGFGHRVYKNTDPRATAMKKNCEEILAKLGHSDNPLLTVAKKLEEIALQDEFFIERKLFSNVDFYSGIILKAMGIPEDMFTAIFALARTSGWISQWIEMVNDPAQKIGRPRQLYTGATNRNF

SEQ ID NO: 37052 - DNA, 1182 bp, Synechococcus elongatus PCC 6301
  CDS (1)..(1182): transl_table=11
atggggaagcccaggattgctatgactgccgtcagcgagtttcggcctggcctagaaggcgtgcccgccacactctcgagcattagctttgtcgatggccagcgcggcgtcctagagtatcgcggcatcagcatcgagcaactggcgcaacagagcagttttctggaaaccgcctacctgttgatttggggccatctaccaactcagcaggaattgaccgagttcgagcacgaaattcgctaccaccgccgcatcaagttccgcatccgggacatgatgaaatgcttccccgatagcggccatcctatggatgccctgcaggcgagcgccgcagccctcgggttgttctattcgcggcgcgccttggatgatcccgaatacattcgggcggccgttgtgcgtttgctagccaaaattccgacgatggtggctgccttccagctgatccgcaagggtaacgacccaattcagccccgcgatgaactggactacgccgccaactttctctacatgctgacggagcgcgagcccgatccagtcgcagctcggatttttgatatttgcctcaccctgcacgccgaacatacgatcaacgcctcgaccttctcggcgatggtcacagcttcgaccctgaccgatccctacgctgtcgttgcttctgccgttggcaccttggctggccccctccatggcggcgccaatgaagaagtgctggacatgctggaggcgatcggttccgtcgagaatgttgagccctacctcgaccactgcattgccaccaaaacgcgcattatgggctttgggcaccgtgtctacaaagtcaaggatccgcgggcagtcattctgcaaaatctggccgagcaactgttcgatatcttcggccatgatccctactacgaaatcgcggtcgcagtcgaaaaggcagcagccgagcgactcagccacaagggcatttaccccaacgtcgatttctactccggcttggtctatcgcaagctcggtattcctagcgatctattcacaccggtgtttgcgatcgcgcgggttgcgggctggctcgcccactggaaagagcagctgaacgaaaatcggatcttccgccccactcagatctacacgggcagccacaacctcgactacaccccgatcgccgatcgggatttggcgatcgaatctgattga

SEQ ID NO: 37053 - protein, 393 aa, Synechococcus elongatus PCC 6301
MGKPRIAMTAVSEFRPGLEGVPATLSSISFVDGQRGVLEYRGISIEQLAQQSSFLETAYLLIWGHLPTQQELTEFEHEIRYHRRIKFRIRDMMKCFPDSGHPMDALQASAAALGLFYSRRALDDPEYIRAAVVRLLAKIPTMVAAFQLIRKGNDPIQPRDELDYAANFLYMLTEREPDPVAARIFDICLTLHAEHTINASTFSAMVTASTLTDPYAVVASAVGTLAGPLHGGANEEVLDMLEAIGSVENVEPYLDHCIATKTRIMGFGHRVYKVKDPRAVILQNLAEQLFDIFGHDPYYEIAVAVEKAAAERLSHKGIYPNVDFYSGLVYRKLGIPSDLFTPVFAIARVAGWLAHWKEQLNENRIFRPTQIYTGSHNLDYTPIADRDLAIESD

SEQ ID NO: 37054 - DNA, 1116 bp, Bacillus clausii KSM-K16
  CDS (1)..(1116): transl_table=11
gtgactacaactcgtggtttagaaggtattgtggcaacacaatcgagcgttagctccattattgatgatgaattaacgtaccatggttatggcattgacgacctggccgaaaatgctagttttgaagaggtcgtttatttgctgtggaatggtgaattgcctacgaaagaagaattggaatcgttttcaagagcgcttgctgaacaagcgggcgtccccgatgaaattttcgaacaaatgaaagcctatccaatcgatagcgtccatccaatggctgccctgcgcacatctgtttcaatgcttggtttgtttgatgatgaagcagaatcagtcgaggaagaaaaaaattaccgcaaagcgattaaacttcaagcaaaaattcctacaattgttgccggctttgagcggatccgttctggcaaagaaccgattgctccaaacaaggagttatcgtttgcagcaaatttcctatacatgttaacgggcgaaaacccagatgcgatttcagtaaaagcttttaataaagcgcttgtgctccatgcggatcatgaactgaacgcctcaacatttacggcgcgcgtttgtgtagcgacgctgtctgatatgtattcaggcattacagcggcaattggcgcattgaaagggcctcttcatggcggcgcaaatgagggcgtcatgaaaatgcttcttgaaatcgaagaatttgagcgagtggaaccgtatatccagaaagcgcttgataataaagagaaaatcatgggctttggccatcgtgtatacaaaaatggcgatcctcgggctaagcatttgcgggaaatgtccaaacaactaacagacgttattaaagaatcaaaatggtacgacatgtctttgcggattgaagaattggtcaccactcaaaaaggcttgctgccaaacgttgatttttattcagcgactgtataccatagtcttgggattaaacatgatttgttcacgccgatttttgcgatcagccgcacatctggctggattgcccatatcctcgaacagtatgcaaacaaccgcctgattcgtccgcgtgctgagtatgtcggtccgaacaaacgcagctacaaaccagtagaatcacgatag

SEQ ID NO: 37055 - protein, 371 aa, Bacillus clausii KSM-K16
MTTTRGLEGIVATQSSVSSIIDDELTYHGYGIDDLAENASFEEVVYLLWNGELPTKEELESFSRALAEQAGVPDEIFEQMKAYPIDSVHPMAALRTSVSMLGLFDDEAESVEEEKNYRKAIKLQAKIPTIVAGFERIRSGKEPIAPNKELSFAANFLYMLTGENPDAISVKAFNKALVLHADHELNASTFTARVCVATLSDMYSGITAAIGALKGPLHGGANEGVMKMLLEIEEFERVEPYIQKALDNKEKIMGFGHRVYKNGDPRAKHLREMSKQLTDVIKESKWYDMSLRIEELVTTQKGLLPNVDFYSATVYHSLGIKHDLFTPIFAISRTSGWIAHILEQYANNRLIRPRAEYVGPNKRSYKPVESR

SEQ ID NO: 37056 - DNA, 1248 bp, Ehrlichia ruminantium str. Welgevonden
  CDS (1)..(1248): transl_table=11
atgatcaaaaaggcagcagtagagttagatgatcaaaaaataactttgccaattttgtatgatactgaagggaatgaagtattagatattacttctttatataaaaatacaggggtattaacttatgatccaggatttatgtctactgctgcttgtgagtctaaaattacgtttattgatggaaataaaggtatattgcgttatagaggatatgatatagcagatttggtttataataataaaagcttcattgaagtagtgtatttattattttatggggttttccctaatgctgagcaacttcaggaatttatattacatatttctcaagaatatgtattgccacagatggttagagatgtgataacgtcgtttccacaaaattctcaccctatggctatattaattgctagtttttcttcgttagctgcatattattgtgatcagaaaactgatggtgagttagagtgtaaacttgctgttgctaaggtggcaagtatagttgctctaatttataggcatattactaatcaagacttcattcaagctgatgtaggcttatcttatagtaaaaattttatccatatgatgtttgacatttcttcttataaatttactgaaattgtagataaagctttagatgttatttttgtattacatgctgatcatgaacaaaatgcttctactgcaactgtacgaatgacaggttcttctggtcctaatttgtttgcttgtttagcagcgggtgccgcgactttatggggaccagctcatggtggggccaatgaagcagtgatcaatatgctgatgaatattggaaaaccagagaatgtaaaacaatttattcagaaagtaaaggatagtaataaaagcacaaaattaatgggttttggtcatagggtatataagaactatgatccacgagcgcgaataatgtgtacaatttgtaaagaaatattaaaggattttggtctaaatgatccactacttgaagtagctgtggaattagaaaatattgctttacaggatgactattttatagcacgtaatttatatcctaatgttgatttttattctggcattgtgttaaagactatagggattccagttaaaatgtttacgacattatttgcgttagcaagaacatctgggtggtctgctcagtggtatgagatggtatctagtaaaaattataagatatcacgtcctcgtcaattatatactggtaatccagttcaaaaagtttag

SEQ ID NO: 37057 - protein, 415 aa, Ehrlichia ruminantium str. Welgevonden
MIKKAAVELDDQKITLPILYDTEGNEVLDITSLYKNTGVLTYDPGFMSTAACESKITFIDGNKGILRYRGYDIADLVYNNKSFIEVVYLLFYGVFPNAEQLQEFILHISQEYVLPQMVRDVITSFPQNSHPMAILIASFSSLAAYYCDQKTDGELECKLAVAKVASIVALIYRHITNQDFIQADVGLSYSKNFIHMMFDISSYKFTEIVDKALDVIFVLHADHEQNASTATVRMTGSSGPNLFACLAAGAATLWGPAHGGANEAVINMLMNIGKPENVKQFIQKVKDSNKSTKLMGFGHRVYKNYDPRARIMCTICKEILKDFGLNDPLLEVAVELENIALQDDYFIARNLYPNVDFYSGIVLKTIGIPVKMFTTLFALARTSGWSAQWYEMVSSKNYKISRPRQLYTGNPVQKV

SEQ ID NO: 37058 - DNA, 1296 bp, Gluconobacter oxydans 621H
  CDS (1)..(1296): transl_table=11
atgtccgaaaaccgttccgcaacctttggtctcgatggcctcagccgtcagtttccagttctggaagggacgattggtccggacgtcgtggacatgcgcgccctgtcccagaaaacgggtgtcttttcctttgatcccgggctgggcagcacagcaacctgcaccagcgccatcagctatattgacggcgacaagggcgtcctgctgcatcgtggctatccgatcgaagacctggccctcaacgccagcttcaccgagacggcctatctgctgctttatggcgaactgccaaccgccgcgcagtatcaggcgttccgcacggacatgaacactcaccggctgctgaacgagcagatccggaacttcttcaacggcttccgccgcgatgcgcatcccatggcgatcctatgcggaacggttggcgcgctttcggccttctatcatgacgggctggacatttcggagccaaaagcccgcgatctctcggcccgccggctgatcgccaaggtcccgaccatcgcagcctgggcctataaatattccatcggcgagcccttcatctatcccgatgaagagatgtcgttctccgagaacttcctgcacatgctgttcgcccggccgggcaaccattaccgggtcaatcccgtgctggcccgcgcgatggaccgcatcctgctgctgcatgccgatcacgagcagaacgcctccacgacgactgtccgtctcgtggggtcgaccggcgcgaacccctatgcctgcatcgcggctggcattgccgccctgtgggggcctgcgcatggtggcgccaacgaggccgcgctcggcatgctggaaaccatcggtacccgcgatggcattccggccttcctcaatgaggtcaagaaccgtaattccggcgtgcgcctgatgggctttggccatcgcgtctacaagaacttcgatccgcgcgcgaagatccttcaggcgacctgtcacgaagtcatcgaggaactcgggctcaagcgcgacccgctgctggatctggcgatggaactggagcgcgtggcgaccgaggacgattatttcgtcagccgccgcctctatccgaatgtggatttctattccggactgatcctcaaggctctcgggattcccaagagcatgttcacggtgctgttcgcagtcgcgcggacagtcggatgggtcagtcagtggaaggaaatgatcgaggaaccgtccgttcgcatcagccgcccgaggcagctctatatcggtgcggcagaacggaattttgtccccatgagcgagaggcgctga

SEQ ID NO: 37059 - protein, 431 aa, Gluconobacter oxydans 621H
MSENRSATFGLDGLSRQFPVLEGTIGPDVVDMRALSQKTGVFSFDPGLGSTATCTSAISYIDGDKGVLLHRGYPIEDLALNASFTETAYLLLYGELPTAAQYQAFRTDMNTHRLLNEQIRNFFNGFRRDAHPMAILCGTVGALSAFYHDGLDISEPKARDLSARRLIAKVPTIAAWAYKYSIGEPFIYPDEEMSFSENFLHMLFARPGNHYRVNPVLARAMDRILLLHADHEQNASTTTVRLVGSTGANPYACIAAGIAALWGPAHGGANEAALGMLETIGTRDGIPAFLNEVKNRNSGVRLMGFGHRVYKNFDPRAKILQATCHEVIEELGLKRDPLLDLAMELERVATEDDYFVSRRLYPNVDFYSGLILKALGIPKSMFTVLFAVARTVGWVSQWKEMIEEPSVRISRPRQLYIGAAERNFVPMSERR

SEQ ID NO: 37060 - DNA, 1251 bp, Wolbachia endosymbiont strain TRS of Brugia malayi
  CDS (1)..(1251): transl_table=11
atgaataaaaaagcgttattggaactaagcaatggattaaaaattgagttacccgtattaagcggaacaatgggttatgatgtattaaatattaaagatttatataaggtcacagggttactcacctacgacccagggtttgtttccacggcttcatgttcttccgcaattacattcattgatggagatgaaggagttcttagatatagaggacatgatatagctgatttagcacaaagcaatgattttactgctgtaatttatttactactctatggtaaattacctaatctagagcaacacaaaaaatttttcctaaaaatacaagaattatctaaagtaccagagcaggttgtaaatgtaataaaagcatttccaaaaactgctcaccctatgtcaattttgattgcgtgttttgcaactttgtcagcactttaccatgagagatatggtaacaatgtcagtaatgaaaacctagattttggaatctctgcaatagcgcaggttcctgcaattattgcaatggtttatagacataccaatgaccaggaattcatagatactgacaatgaattgaactatagtaaaagcttcttaaggatgatgtttggtaatgctcttgataacgataaaagcaccctttttgcaaaagccttggacaaaatatttactcttcatgctgaccatgagcagaatgcgtcaacagcagctgtcagggtggtaggatcggctggttctaatttatttgcatgcctttctgcaggagttgctacactctggggacctgtgcatggcggagctaacgagtcagttataaatatgttaaaggagatagaacaaagcggaaatgtagacaaatttattgaaaaagctaaagatgataaagacccgtttaaactgatgggatttggacatcgtgtctataaaaattacgatccacgcgcacgcatattaaaagatgcttgtgatgagattttaaacaaactagaacaagatagtaaactgctcaagattgcaaaagaacttgaaaaaatagctttaaaagacgagtattttgttgtgcgtaagttatacccaaatgttgatttctattcaggtataataatgaatgctatcaatattcctccaagtatgtttacacctatttttgcgcttgcaagaactactggttgggttactcagtggtatgaaatgataaatgataaagaaactaagatttgcagaccaaggcagctttatgttggtaaatag

SEQ ID NO: 37061 - protein, 416 aa, Wolbachia endosymbiont strain TRS of Brugia malayi
MNKKALLELSNGLKIELPVLSGTMGYDVLNIKDLYKVTGLLTYDPGFVSTASCSSAITFIDGDEGVLRYRGHDIADLAQSNDFTAVIYLLLYGKLPNLEQHKKFFLKIQELSKVPEQVVNVIKAFPKTAHPMSILIACFATLSALYHERYGNNVSNENLDFGISAIAQVPAIIAMVYRHTNDQEFIDTDNELNYSKSFLRMMFGNALDNDKSTLFAKALDKIFTLHADHEQNASTAAVRVVGSAGSNLFACLSAGVATLWGPVHGGANESVINMLKEIEQSGNVDKFIEKAKDDKDPFKLMGFGHRVYKNYDPRARILKDACDEILNKLEQDSKLLKIAKELEKIALKDEYFVVRKLYPNVDFYSGIIMNAINIPPSMFTPIFALARTTGWVTQWYEMINDKETKICRPRQLYVGK

SEQ ID NO: 37062 - DNA, 1329 bp, Xanthomonas oryzae pv. oryzae KACC10331
  CDS (1)..(1329): transl_table=11
atgtgggatcaggcgccttccactgaaggagcgtacacagtgtccgatcttgatcaggtcacgctcaacgccggcgacacgtcggtcgttctgccggttctcaagcccacgcttggcaatgattgcgtcgatatctcaaagctgaccaaagaaaccggtctgttcacctacgactcgggctttaccgccaccgccagctgcaagtcggccatcacctacatcgatggcgacaatggcgtgttgctgtatcgcggctacccgatcgagcagctggccgaaaagtccaccttcctggaagtgtcgtacctgctgatgaacggcgaactgccgacggcggacgaattcaagaagttcgatcacgaagtgacgcatcacacgatgatgcacgagtcgctgaagaacttcctcggtggtttccgtcatgacgcgcacccgatggccatgctggccggctcggtcgcctcgctgtcggcgttctaccacgacaccctggacctcaacgatccggagcagcgccgtcaggccgccatccgtctgatcgccaaggtgccgaccctggctgctgccgcgtaccgctattcgatcggctggccgattcgctacccgcgcaacaacctgaactacgtcgatcgcttcctgcacatgatgttcgaagtgccgagcgagccgttggcgaccaacccggtcgtggccaaggcgctggatcttctgttcatcctgcacgccgaccacgagcagaacgcctcgacctcgaccgtgcgtctggtcggttcgaccggtgtcaacccgtatgcgtcggtcgctgccggtatcaccgcgctgtggggcccggcacatggcggcgccaacgaagccgtgctgaagatgctggaagagatcggcaccgccgacaacgtcgagtccgccgtggccaaggccaaggacaagaactcgagcttccgcctgatgggcttcggtcaccgtgtctacaagaacttcgacccgcgcgccaagatcatccgcgagatgacccacaaggtgctgggcgaactgggcgtcaacgacccgctgctggaagtggcgctgaagctggaagaggctgcgctgaaggatgactacttcgtgcagcgcaagctgtacccgaacgtcgacttctactcgggcattatctacaaggcgctcaatatcccggtggaaatgttcaccgtgatgttcgccatcgcccgcaccgccggctgggtgtcgcattggctggagcagcaggtcgacccggaaatgaagatcggccgtccgcgccagatctacaccggctacgacaagcgcaattacaaagacgccgaacagcgctaa

SEQ ID NO: 37063 - protein, 442 aa, Xanthomonas oryzae pv. oryzae KACC10331
MWDQAPSTEGAYTVSDLDQVTLNAGDTSVVLPVLKPTLGNDCVDISKLTKETGLFTYDSGFTATASCKSAITYIDGDNGVLLYRGYPIEQLAEKSTFLEVSYLLMNGELPTADEFKKFDHEVTHHTMMHESLKNFLGGFRHDAHPMAMLAGSVASLSAFYHDTLDLNDPEQRRQAAIRLIAKVPTLAAAAYRYSIGWPIRYPRNNLNYVDRFLHMMFEVPSEPLATNPVVAKALDLLFILHADHEQNASTSTVRLVGSTGVNPYASVAAGITALWGPAHGGANEAVLKMLEEIGTADNVESAVAKAKDKNSSFRLMGFGHRVYKNFDPRAKIIREMTHKVLGELGVNDPLLEVALKLEEAALKDDYFVQRKLYPNVDFYSGIIYKALNIPVEMFTVMFAIARTAGWVSHWLEQQVDPEMKIGRPRQIYTGYDKRNYKDAEQR

SEQ ID NO: 37064 - DNA, 1290 bp, Vibrio fischeri ES114
  CDS (1)..(1290): transl_table=11
atggcagataaaaaggcaacacttcatattgaaggtcaatcgcctatagacatgccaatcatggatggaacgattggtccagaagtgatcgatgtgcgtaaattaggagcgaatggttactttactttcgaccctggttttcttgccactgcatcttgtgagtctcaaattacctatatcgatggtgataaaggtgttctattgcaccgtggtttccctattgatcagttagctaacaatgcagattaccttgaagtctgttatatccttctaaatggcgaagcgccaaacagagaagaatatgaaacgttcaaggacatcgtaactcgccacacaatggtacatgagcaaatttcaagcttcttccatggcttccgccgtgatgctcaccctatggccgtaatgtgtggtgttgtaggagcactggctgctttctatcacgattctttagatatcaataacgatgaacaccgcgaaattgctgcatttagattactatcaaaaatgccaactctttcagcaatgtcttacaaatactcaattggacaaccgttcatctatcctcgtaatgatctgacttacgcagaaaacttcttacacatgatgttcgctaatccgtgtgaagaatatgaagtaaaccctgttgttgcacgagcaatggataaaatctttacgctacatgccgatcacgaacaaaatgcatcaacatcaaccgttcgtttagctggttcatcaggtgcgaatccatttgcttgtatcgctgctggtattgcttctctatggggacctgctcatggtggtgctaacgaagcatgtttacgtatgcttgaagaaatcggctctgtagacaacattgatgaatacgttgcaaaagcaaaagataaggatgacccattccgcctaatgggcttcggtcaccgtgtttataagaactatgaccctcgtgcaaccgtaatgcgtgaagcatgtcacgatgttctaaaagaactaaacattaaagatccactacttgatgtcgcaatggaacttgaacgtattgcactttctgatgaatattttgtatctaagaaattgtatccaaacgtagatttctactcaggtattatcttaaaagcaattggtattcctgtatctatgtttacggttatctttgcaatgtctcgtactgttggctggattgcacactggagcgaaatgcacagtgatccaacaaatcgtatcggtcgtcctcgccaactttatacaggtgaagaactacgcgagtttaaaccgcttcatgagcgtgaataa

SEQ ID NO: 37065 - protein, 429 aa, Vibrio fischeri ES114
MADKKATLHIEGQSPIDMPIMDGTIGPEVIDVRKLGANGYFTFDPGFLATASCESQITYIDGDKGVLLHRGFPIDQLANNADYLEVCYILLNGEAPNREEYETFKDIVTRHTMVHEQISSFFHGFRRDAHPMAVMCGVVGALAAFYHDSLDINNDEHREIAAFRLLSKMPTLSAMSYKYSIGQPFIYPRNDLTYAENFLHMMFANPCEEYEVNPVVARAMDKIFTLHADHEQNASTSTVRLAGSSGANPFACIAAGIASLWGPAHGGANEACLRMLEEIGSVDNIDEYVAKAKDKDDPFRLMGFGHRVYKNYDPRATVMREACHDVLKELNIKDPLLDVAMELERIALSDEYFVSKKLYPNVDFYSGIILKAIGIPVSMFTVIFAMSRTVGWIAHWSEMHSDPTNRIGRPRQLYTGEELREFKPLHERE

SEQ ID NO: 37066 - DNA, 1284 bp, Neisseria gonorrhoeae FA 1090
  CDS (1)..(1284): transl_table=11
atgtccaaatcaatcaaactcaacgtaccgggtcgggcaggtttggagctgccggtattggaagccagcatcgggcatgatgtggttgacattcgggggctgacaaaaaatacaggtttgtttgccttcgaccccggatttgtttcaaccgcaagctgtgagtctaaaattacttacatcgacggcgatcaaggcttgctttattatcgcggataccccatcgagcagctggccgaaaagtccgattatttggaagtctgctacctgttgatttacggcgaactgccgactcccgagcaaaaggcagaatttgacaatacagtccgccgccacacgatggtgcatgaacagctgacttggttcttccggggtttccgccgcgacgcgcatccgatggcgatgatggtcggcgtggtcggcgcgctgtctgcgttctaccaagacagcttggacattactaatcccgaacaccgcaaaatcgcgatttaccgccttatttccaaaatcccgaccattgcggcaatgtgttaccgctattcaaacggtctgccgttcaattatccgaagaataatctttcttattcagaaaacttccttcatatgatgtttgccacaccgtgtgaagactacaaacctaatcccgttttggcacgcgcgctcgaccgcatctttattttgcatgccgaccacgagcaaaacgcctcaacttcaaccgtccgtctggcaggctcttcgggtgcgaacccgtttgcctgtattgctgccggtatcgcctgcctgtggggtgcttcgcacggcggtgcgaacgaagccgtgttgaaaatgctggatgaaatcggcgatgtgtccaatgttgccgcatacatggaaggcgtgaaacagcgcaaataccgcctgatgggcttcggacaccgggtataccgcaatatggatccgcgtgccagcattatgcgcgaaacctgctatgaagttttgaaggaattgggcttggaagacagtccgaaattcaaactggcgatggaattggaacagattgcgctgaaagacccgttctttatcgaacgcaaactgtatcccaatgtcgatttctattccggcatcgtcctgtccgcgctgggcatcccgaccgaaatgtttaccgtcatcttcgccctgtcgcgcagcgtgggctggatttcgcactggcacgagatgattagcgatccttcgctgaaaatcggccgcccgcgccagctttataccggttcggaacgccgcgattatgtgccggcaggcgagaggtaa

SEQ ID NO: 37067 - protein, 427 aa, Neisseria gonorrhoeae FA 1090
MSKSIKLNVPGRAGLELPVLEASIGHDVVDIRGLTKNTGLFAFDPGFVSTASCESKITYIDGDQGLLYYRGYPIEQLAEKSDYLEVCYLLIYGELPTPEQKAEFDNTVRRHTMVHEQLTWFFRGFRRDAHPMAMMVGVVGALSAFYQDSLDITNPEHRKIAIYRLISKIPTIAAMCYRYSNGLPFNYPKNNLSYSENFLHMMFATPCEDYKPNPVLARALDRIFILHADHEQNASTSTVRLAGSSGANPFACIAAGIACLWGASHGGANEAVLKMLDEIGDVSNVAAYMEGVKQRKYRLMGFGHRVYRNMDPRASIMRETCYEVLKELGLEDSPKFKLAMELEQIALKDPFFIERKLYPNVDFYSGIVLSALGIPTEMFTVIFALSRSVGWISHWHEMISDPSLKIGRPRQLYTGSERRDYVPAGER

SEQ ID NO: 37068 - DNA, 1290 bp, Pseudomonas syringae pv. syringae B728a
  CDS (1)..(1290): transl_table=11
atggctgacaaaaaagcgcagttgatcatcgagggcgctgcccccgtcgagctgccaattctgaccggtacagtgggtccggacgtgatcgacgtacgcggcctgaccgccaccggccgcttcacatttgaccctggtttcatgtccacggcgtcttgcgattcgaagatcacctacatcgatggtgacaatggcattctgctgcaccgcggctacccgatcgaacaactggccgagcagtccgactacctcgaaacctgctacctgctgctcaacggcgaactgcccaccgccgagcagaaagcccagttcgtggccgtggtcaagaaccacacgatggttcacgagcaactcaagacctttttcaacggtttccgtcgcgacgcccacccgatggccgtcatgtgtggcgtagtcggtgccctgtcagcgttctaccacgactcgctggacatcaataacccgcagcaccgcgagatttccgcggtacgcctggtcgccaagatgccgaccctggcagcgatggtctacaagtactccatgggtcagcccatgatgtacccgcgcaacgacctcagctacgcggaaaacttcctgcacatgatgttcaacaccccgtgcgagatcaaaccgatcagcccggtgctggccaaggcgatggacaagatcttcatcctccacgccgatcacgagcagaacgcttcgacctccaccgtgcgcatggcaggctcttcgggcgccaacccgttcgcctgtatcgcagccggcatcgcagcgctctggggccctgcccacggcggcgccaacgaagcggtactgaccatgctcgatgaaatcggcgatgtgtcgaacatcgacacgttcattgccaaggccaaggacaagaacgatccgttcaagctcatgggcttcggtcaccgcgtctacaagaaccgtgacccgcgcgccactgtaatgaagcagacctgcgacgaagtactgaaagagctgggcatcaccaacgatcctcaactcgaactggccatgcgcctcgaagagatcgccctgaccgatccgtacttcatcgagcgctcgctgtacccgaacgtcgacttctattcgggcatcatcctcaaggccatcggcattccgaccagcatgttcaccgtgatcttcgccctggcgcggactgtcggctggatctcgcactggaaagaaatgctctccagcccttacaagatcggtcgccctcgccagctgtacaccggcaacgtgcaacgcgacatcgtcgccctgcaagaccgcaagtaa

SEQ ID NO: 37069 - protein, 429 aa, Pseudomonas syringae pv. syringae B728a
MADKKAQLIIEGAAPVELPILTGTVGPDVIDVRGLTATGRFTFDPGFMSTASCDSKITYIDGDNGILLHRGYPIEQLAEQSDYLETCYLLLNGELPTAEQKAQFVAVVKNHTMVHEQLKTFFNGFRRDAHPMAVMCGVVGALSAFYHDSLDINNPQHREISAVRLVAKMPTLAAMVYKYSMGQPMMYPRNDLSYAENFLHMMFNTPCEIKPISPVLAKAMDKIFILHADHEQNASTSTVRMAGSSGANPFACIAAGIAALWGPAHGGANEAVLTMLDEIGDVSNIDTFIAKAKDKNDPFKLMGFGHRVYKNRDPRATVMKQTCDEVLKELGITNDPQLELAMRLEEIALTDPYFIERSLYPNVDFYSGIILKAIGIPTSMFTVIFALARTVGWISHWKEMLSSPYKIGRPRQLYTGNVQRDIVALQDRK

SEQ ID NO: 37070 - DNA, 1290 bp, Xanthomonas campestris pv. campestris str. 8004
  CDS (1)..(1290): transl_table=11
gtgtccgatcttgatcaggtcacgctcaacgccggcgacacgtcggtcgttctgccggttctcaagcccacgttgggcaatgattgcgtcgatatttccaagctgaccaaagaaaccggtctgttcacctacgactcgggcttcaccgccaccgccagttgcaagtcggccatcacctacatcgatggcgacaatggcgtgctgctgtaccgcggctacccgatcgaacagttggccgagaagtccagcttcctggaagtttcgtatctgctgatgaacggcgaattgccgacggcggacgaattcaagaagttcgaccacgaagtgacgcatcacacgatgatgcacgagtcgctgaagaacttcctcggcggtttccgccacgatgcgcacccgatggccatgctggccggttcggtggcctcgctgtcggcgttctaccacgacaccctggacctcaacgatccggagcagcgccgtcaggccgccatccgtctgatcgccaaggtgccgaccctggctgctgcggcgtaccgttactcgatcggctggccgatccgctatccgcgcaacaacctgaactacgtcgaccgcttcctgcacatgatgttcgaagtgccgagcgagccgctggagatcaacccggtcgttgccaaggcactggatctgctgttcatcctgcacgccgatcacgagcagaacgcctccacctcgaccgtgcgtctggtcggttcgaccggtgccaacccgtacgcgtccgtggcagccggtatcaccgcgctgtggggcccggcacacggtggcgccaacgaagccgtgctgaagatgctggaagagatcggtaccgctgacaacgtcgagtccgccgtggccaaggccaaggacaagaactcctcgttccgtctgatgggcttcggtcaccgcgtctacaagaacttcgacccgcgcgccaagatcatccgcgagatgacccacaaggtgctgggcgagctgggtgtcaacgacccgctgctggaagttgccctgaagctggaagaagccgcgttgaaggacgactacttcgtgcagcgcaagctgtacccgaacgtggacttctactcgggcctcatctacaaggcgctcaatatcccggtggaaatgttcaccgtgatgttcgccattgcccgcaccgccggctgggtgtcgcattggctggagcagcaggtcgacccggaaatgaagatcggccgtccgcgccagatctacaccggctacgacaagcgcgactacaccgacgccggcaagcgctaa

SEQ ID NO: 37071 - protein, 429 aa, Xanthomonas campestris pv. campestris str. 8004
MSDLDQVTLNAGDTSVVLPVLKPTLGNDCVDISKLTKETGLFTYDSGFTATASCKSAITYIDGDNGVLLYRGYPIEQLAEKSSFLEVSYLLMNGELPTADEFKKFDHEVTHHTMMHESLKNFLGGFRHDAHPMAMLAGSVASLSAFYHDTLDLNDPEQRRQAAIRLIAKVPTLAAAAYRYSIGWPIRYPRNNLNYVDRFLHMMFEVPSEPLEINPVVAKALDLLFILHADHEQNASTSTVRLVGSTGANPYASVAAGITALWGPAHGGANEAVLKMLEEIGTADNVESAVAKAKDKNSSFRLMGFGHRVYKNFDPRAKIIREMTHKVLGELGVNDPLLEVALKLEEAALKDDYFVQRKLYPNVDFYSGLIYKALNIPVEMFTVMFAIARTAGWVSHWLEQQVDPEMKIGRPRQIYTGYDKRDYTDAGKR

SEQ ID NO: 37072 - DNA, 1278 bp, Corynebacterium jeikeium K411
  CDS (1)..(1278): transl_table=11
atggctactgataatcaggacaaggccgttctccactacccaggtggagagtacgaaatggacattgtccgcgccaccgaaggaaacgacggtgtcgcactgggcaagatgctggcagaaaccggcttgaccaccctggatcccggctacgtgaacaccggttccaccaagtccgccatcacctacatcgacggtgcaaacggcatcctgcgttaccgtggctacgacattgccgacctggccaacaacgcaaccttcaacgaggtttcctacctgctgatcaacggcgagctgccgaacaaggagcaggctgaggagttcaacaccaacatccgcaaccacaccctgctggatgaagacttcaaggcacagttccgcgtgttcccgcgcgacgctcacccgatgagcgttctggcttcctccctgaacattctgtccacctactaccaggactccctggatccgctgaacccggatcaccagaagctgaacacctaccgcctgatggcgaaggtgccgatgctggctgcttacgcttaccgcgcttccaagggtaagccgtacatgtacccggataactccatgaacgcgcgccagaacttcctgcgccagatgttcggctacccgaccgagcctttcgaggatgacccggtggttaccaaggctctggacaagctgctgatcctgcacgctgaccacgagcagaactgctccacctccaccgtccgcatggttggttcttcccaggccaacatgttcgtctccatcgccgcaggcatcaacgccctgtccggcccgctgcacggcggtgctaaccaggctgttctggagatgctggaggagatccacgctaacggtggcgacgctaccgagttcatgaaccgcgtgaagaacaaggagccgggcgtgaagctgatgggcttcggtcaccgcgtgtacaagaactacgatccgcgtgcggccatcgtcaaggagtccgctcacgagattctggatcacctgggtggcgaccacctgctggatctggctatgaagctggaagagattgcgctggctgatgattacttcatctcccgcaagctctacccgaacgtggacttctacaccggcctgatctaccgcgctatgggcttcccgacggacttcttcaccgtcctgttcgccatgggtcgcctgccgggctggatcgctcactacctggagcaggtcaacgatccgaccgcgaagatcaaccgtccgcgccagatctacaccggcgagggtgcgcgcaagctctaa

SEQ ID NO: 37073 - protein, 425 aa, Corynebacterium jeikeium K411
MATDNQDKAVLHYPGGEYEMDIVRATEGNDGVALGKMLAETGLTTLDPGYVNTGSTKSAITYIDGANGILRYRGYDIADLANNATFNEVSYLLINGELPNKEQAEEFNTNIRNHTLLDEDFKAQFRVFPRDAHPMSVLASSLNILSTYYQDSLDPLNPDHQKLNTYRLMAKVPMLAAYAYRASKGKPYMYPDNSMNARQNFLRQMFGYPTEPFEDDPVVTKALDKLLILHADHEQNCSTSTVRMVGSSQANMFVSIAAGINALSGPLHGGANQAVLEMLEEIHANGGDATEFMNRVKNKEPGVKLMGFGHRVYKNYDPRAAIVKESAHEILDHLGGDHLLDLAMKLEEIALADDYFISRKLYPNVDFYTGLIYRAMGFPTDFFTVLFAMGRLPGWIAHYLEQVNDPTAKINRPRQIYTGEGARKL

SEQ ID NO: 37074 - DNA, 1290 bp, Pseudomonas fluorescens Pf-5
  CDS (1)..(1290): transl_table=11
atggctgacaaaaaagcgcagttgatcatcgagggcgcagcccccgtcgagctgcccattttaaccggcaccgttggtcccgatgtaatcgatgttcggggtctgacggccacgggccgcttcacttttgacccgggtttcatgtcgaccgcctcctgcgagtcgaaaatcacctacatcgacggcgacaacggcattctgctgcatcgcggctacccgatcgaacagctggccgagaaatccgactacctggaaacctgctacctgctgctcaacggtgaattgcccaccgccgaacagaaggcccagttcgtcagcaccgtgaaaaaccacaccatggttcacgagcagttgaagagcttcttcaacggtttccgccgcgacgcccacccaatggcggtgatgtgcggcgtagtgggtgcactctcggcgttctaccacgactccctggacatcaataacccacagcatcgcgaaatctccgctgtgcgcctggtggccaagatgccgaccctggcagcgatggtttacaagtactccatgggtcagccgatgatgtatccgcgcaacgacctgtcgtacgcggaaaacttcctgcacatgatgttcaacaccccgtgcgagatcaaaccgatcagcccggtactggccaaggcaatggaccggatcttcatcctccatgccgaccacgaacagaacgcctcgacgtccaccgtgcgcctggcgggctcttcgggtgccaacccgttcgcctgtatcgctgccggtatcgccgcgctctggggccctgcccacggcggcgccaacgaagcagtgctgaccatgctcgacgaaattggcgatgtctcgaacatcgacaagttcatcgccaaggccaaggacaagaacgatccgttcaaactcatgggcttcggtcaccgcgtgtacaagaaccgcgacccgcgcgccaccgtgatgaaacagacctgcgacgaagtactcaaggaactgggcatcaacaacgatccgcaactcgaactggccatgcgcctggaagagatcgccctgaccgacccatacttcatcgagcgctcgctgtacccgaacgtcgacttctactcgggcatcatcctcaaggcgatcggcattccaaccagcatgttcaccgtgatcttcgccctggcgcggaccgtcggctggatctcgcactggaaggaaatgctctccagcccgtacaagatcggccgtccacgccagctgtacaccggctacgagtcgcgtgacatcaccaaactggaagaccgcaaataa

SEQ ID NO: 37075 - protein, 429 aa, Pseudomonas fluorescens Pf-5
MADKKAQLIIEGAAPVELPILTGTVGPDVIDVRGLTATGRFTFDPGFMSTASCESKITYIDGDNGILLHRGYPIEQLAEKSDYLETCYLLLNGELPTAEQKAQFVSTVKNHTMVHEQLKSFFNGFRRDAHPMAVMCGVVGALSAFYHDSLDINNPQHREISAVRLVAKMPTLAAMVYKYSMGQPMMYPRNDLSYAENFLHMMFNTPCEIKPISPVLAKAMDRIFILHADHEQNASTSTVRLAGSSGANPFACIAAGIAALWGPAHGGANEAVLTMLDEIGDVSNIDKFIAKAKDKNDPFKLMGFGHRVYKNRDPRATVMKQTCDEVLKELGINNDPQLELAMRLEEIALTDPYFIERSLYPNVDFYSGIILKAIGIPTSMFTVIFALARTVGWISHWKEMLSSPYKIGRPRQLYTGYESRDITKLEDRK

SEQ ID NO: 37076 - DNA, 1281 bp, Psychrobacter arcticum 273-4
  CDS (1)..(1281): transl_table=11
atggctgataatcaagccacattgaccgtagatggtaaggattaccaacttcctattactgaaggcactttaggaccgtcagttattgatgttgctgctttccaaaaagctggctactggacctatgatccaggctttatggcaaccgctcctgtcgaatcaaaaatcaccttcattgatggtggtaaaggcgaactattgcatcgcggctaccctatcgaccagttagcaaacaatgcagaatatctagaagtggcttatgcactgattcatggtgacctgcctaacgctgagcagaaagcagatttctatgaaaaaatccgtaagcatatgggtgttcatgatcaattgcgtaagttctttgaaggcttccgccgtgacgcgcatccaatggcgattatggttggtgtcgttggtgctttatcagcgttttatcatgaaaatttagatattagcaacgaagaacatcgtgagattacagcgattcgtcttatcgctaaaatgccaacgcttgccgctatgagttataagtactcaaaaggcgaaccgttcatgtacccacgtaatgatttcaattatgctgaaaacttcttatacatgatgtttgcaacgcctgctgatgttaattataaaaccaatgacgttatcactcgcgccatggacaaaatctttaccctgcatgctgaccatgagcaaaacgcatcaacgtctaccgtacgtctagctggctctactggcgcaaacccttacgcttgtatcgctgctggtatcgcagcattgtggggtccatcacatggtggcgccaacgaagcggtacttgagatgctcgatgaaatcggttctgtagaaaacgtgcctgagttcatggaaaaagtgaagagccgtgaagtgaaactgatgggctttggtcatcgtgtttataaaaactttgacccacgtgcacaagtcatgaaagaaacgtgtgatgaagtattaggcgcattgggtatcaatgatcctaagcttgagcttgcaatggcgcttgagaaaattgctttagaagacccgttcttcgttgagcgtaacctgtatccaaacgttgacttttactctggcattatcttaaaagccatcggaatcccaacgtcaatgtttactgtcatcttctcattggctcgtacctctggttggatcagccattggcttgagatgcacagcacaccgttcaaaatcggtcgtccacgtcagttatatactggtgaaacgcatcgcgattttgttaaagttgaagatcgtaaatag

SEQ ID NO: 37077 - protein, 426 aa, Psychrobacter arcticum 273-4
MADNQATLTVDGKDYQLPITEGTLGPSVIDVAAFQKAGYWTYDPGFMATAPVESKITFIDGGKGELLHRGYPIDQLANNAEYLEVAYALIHGDLPNAEQKADFYEKIRKHMGVHDQLRKFFEGFRRDAHPMAIMVGVVGALSAFYHENLDISNEEHREITAIRLIAKMPTLAAMSYKYSKGEPFMYPRNDFNYAENFLYMMFATPADVNYKTNDVITRAMDKIFTLHADHEQNASTSTVRLAGSTGANPYACIAAGIAALWGPSHGGANEAVLEMLDEIGSVENVPEFMEKVKSREVKLMGFGHRVYKNFDPRAQVMKETCDEVLGALGINDPKLELAMALEKIALEDPFFVERNLYPNVDFYSGIILKAIGIPTSMFTVIFSLARTSGWISHWLEMHSTPFKIGRPRQLYTGETHRDFVKVEDRK

SEQ ID NO: 37078 - DNA, 1290 bp, Pseudomonas syringae pv. phaseolicola 1448A
  CDS (1)..(1290): transl_table=11
atggctgacaaaaaagcgcagttgatcatcgagggcgcagcccccgtcgagctgccaattctgaccggtacagtgggtccggacgtgatcgacgtacgcggcctgaccgccaccggccgcttcacatttgaccctggcttcatgtccacggcctcttgcgattcgaagatcacctacattgatggtgacaatggcattctgctgcaccgcggctacccgatcgaacaactggccgagcagtccgattacctcgaaacctgctacctgctgctcaacggcgaactgccgaccgccgaacagaaagcccagttcgtggccgtggtcaagaaccacacgatggttcacgagcaactcaagaccttcttcaacggctttcgtcgcgacgcccacccgatggccgtcatgtgcggcgtagtcggtgccctgtcagcgttctaccacgactcgctggacatcaataacccgcagcaccgcgagatttccgctgtacgcctggtggccaagatgccgaccctggcagcgatggtctacaagtactccatgggccagcccatgatgtacccgcgcaacgacctcagctacgccgaaaacttcctgcacatgatgttcaacaccccgtgcgagatcaaaccgatcagcccggtgctggccaaggcgatggacaagatcttcatccttcacgccgatcacgagcagaacgcctcgacatccaccgtccgcatggcaggctcttcgggcgccaacccgtttgcctgtatcgctgccggcatcgccgcgctctggggcccggcccacggcggcgccaacgaagcggtactgaccatgctggatgaaatcggtgacgtgtcgaacatcgacaagttcatcgccaaggccaaggacaagaacgacccgttcaagctcatgggcttcggccaccgcgtgtacaagaaccgtgacccgcgcgccaccgtaatgaagcagacctgcgacgaagtgctgaaagaactgggcatcaccaacgatcctcaactcgaactggccatgcgcctcgaagagatcgccctgaccgacccgtacttcatcgagcgctcgctgtacccgaacgtcgacttctactcgggcattatcctcaaggccatcggcattccgaccagcatgttcaccgtgatcttcgccctggcgcggactgtcggctggatctcgcactggaaggaaatgctctccagcccctacaagatcggtcgccctcgccagctgtacaccggcaacgtgcaacgcgacatcgtcgccctgcaagaccgcaagtaa

SEQ ID NO: 37079 - protein, 429 aa, Pseudomonas syringae pv. phaseolicola 1448A
MADKKAQLIIEGAAPVELPILTGTVGPDVIDVRGLTATGRFTFDPGFMSTASCDSKITYIDGDNGILLHRGYPIEQLAEQSDYLETCYLLLNGELPTAEQKAQFVAVVKNHTMVHEQLKTFFNGFRRDAHPMAVMCGVVGALSAFYHDSLDINNPQHREISAVRLVAKMPTLAAMVYKYSMGQPMMYPRNDLSYAENFLHMMFNTPCEIKPISPVLAKAMDKIFILHADHEQNASTSTVRMAGSSGANPFACIAAGIAALWGPAHGGANEAVLTMLDEIGDVSNIDKFIAKAKDKNDPFKLMGFGHRVYKNRDPRATVMKQTCDEVLKELGITNDPQLELAMRLEEIALTDPYFIERSLYPNVDFYSGIILKAIGIPTSMFTVIFALARTVGWISHWKEMLSSPYKIGRPRQLYTGNVQRDIVALQDRK

SEQ ID NO: 37080 - DNA, 1299 bp, Dechloromonas aromatica RCB
  CDS (1)..(1299): transl_table=11
atgacgaccgaacgcaaggcaactttatcaatcgatggacaggctcccgtcgatttttcgatcatgtcaccgacgcatggcaacgattgcatcgatattcgcacactgggtggcaagaccggtctgtttacctacgactccggttttctttccaccgccagttgcaagtccaagattacttttattgatggcgacgtgggccaactgctgtatcgcggttacccgatcgagcaactggctgaaaactgtaacttcctcgaagttacctacttgctgaagaacggcgagttgccgaatgccaagcagaaggctgatttcgaaagcaccatcaagaatcacaccatggtgcatgagcagttgtccaagttcttctctggtttccgccgtgatgcccacccgatggctgtgatgaccggtgtggttggcgcgctgtccgctttctaccacgatgcgatggacttctcggatgcagagcatcgtaatgtcagcttcaatcgtctggtcgccaaaatgccgaccattgtcgcgatggcctataagtacaacactggtgcgccgttcatgtatccggataacagcctggattacaccgccaacttcatgcgcatgatgttcggcaacccgtgtgaaaaatatgtgccgaatccggttctggtccgcgcactcgacaccatcttcacactgcatgccgaccacgagcaaaacgcttctacgtcgaccgtgcgcctggctggctcttcgggtgccaacccgttcgcctgtatcgctgccggtatcgcctgtctgtggggtccggcacacggtggtgccaacgaagcttgcttgcagatgctggaagaaatcggtgatgtttcccgcgtgccggaatacattgctcgcgccaaggacaagaacgattcgttcaagttgatgggctttggtcaccgcgtttacaagaacttcgacccgcgcgccaagctgatgcgccaggtttgcaatgaagtgttggctgagctcggtctggaaaatgaccgcctgttcaagctggccatggaacttgagcgcattgcgctggaagatccgtacttcgtcgagaagaagctttacccgaacgtcgacttctattctggcattgttcagaaagccatcggcattccgactgaaatgttcacctgtatcttcgcattggcccgtaccgtcggctggatgacccagtgggaagaaatgatttccgatccggaatacaagatcggtcgtccgcgtcaactgtacatgggtgcagcaaagcgcgacgtagtgccgctggcccaacgcggctaa

SEQ ID NO: 37081 - protein, 432 aa, Dechloromonas aromatica RCB
MTTERKATLSIDGQAPVDFSIMSPTHGNDCIDIRTLGGKTGLFTYDSGFLSTASCKSKITFIDGDVGQLLYRGYPIEQLAENCNFLEVTYLLKNGELPNAKQKADFESTIKNHTMVHEQLSKFFSGFRRDAHPMAVMTGVVGALSAFYHDAMDFSDAEHRNVSFNRLVAKMPTIVAMAYKYNTGAPFMYPDNSLDYTANFMRMMFGNPCEKYVPNPVLVRALDTIFTLHADHEQNASTSTVRLAGSSGANPFACIAAGIACLWGPAHGGANEACLQMLEEIGDVSRVPEYIARAKDKNDSFKLMGFGHRVYKNFDPRAKLMRQVCNEVLAELGLENDRLFKLAMELERIALEDPYFVEKKLYPNVDFYSGIVQKAIGIPTEMFTCIFALARTVGWMTQWEEMISDPEYKIGRPRQLYMGAAKRDVVPLAQRG

SEQ ID NO: 37082 - DNA, 1128 bp, Prochlorococcus marinus str. NATL2A
  CDS (1)..(1128): transl_table=11
ttggttctaaagccaggcttggaaggggttccagtaaccaactcagggatatgcgaaataaatggaacagaaggaaggcttagctacagaggttatccaatatctgagctagcccaaaaaagtagttttttagaaactgcatttctcttgatctggggagaacttcccactgaaaatgagcttgagaaatttgaaaaggacgttcaaatgcatagacgagtgagctttagaattagagatatgctcaagtgttttccagagtctgggcatcctatggatgctcttcaagcaagtgctgcatctttgggcctcttttattctcgaagagcaattgatgatccaaaatatatctacgacgcagtagtgaggttgattgcaaaaattccaactatggttgctgctttcgagcaaataagaaaaggagacgatccaattcaacctcaagatgatttgccttactcttccaatttcctttatatgctcaccgagagggagccaaatcctcttgcagcaagagttttcgacagatgtttaattcttcatgccgagcacagtctcaatgcaagtacgtttagcgcaagagtaactgcaagcacattgactgatccttatgccgtcgtcgcttctgccgttgggacattagccggtcctcttcatggaggggccaatgaagatgtgatagcaatgctagaagaaattggaagacctgatgaagtctcttcatttctcaatgatgcaattgcaaaaaaaaggaaaatcatgggctttggacacagggagtatcgtgtcaaagaccctagagcaacaattttacaagccttcgcagaggaacttttctcggaatttggtaaagatgaaatgtatgaagtagccaaagcacttgaagaagaggctatttccaagctggggccaaaaggtatattcccaaatgttgacttttattctggactggtttatcgaaagcttggtattcctcgagatttatttacaccagtttttgctatttccagagttgctggttggttggctcactggagagaacaacttggagcaaatagaattttcagaccatcacaaatttatgaaggagcaaaaatgagaaattggaagcctcttgaaagcagataa

SEQ ID NO: 37083 - protein, 375 aa, Prochlorococcus marinus str. NATL2A
MVLKPGLEGVPVTNSGICEINGTEGRLSYRGYPISELAQKSSFLETAFLLIWGELPTENELEKFEKDVQMHRRVSFRIRDMLKCFPESGHPMDALQASAASLGLFYSRRAIDDPKYIYDAVVRLIAKIPTMVAAFEQIRKGDDPIQPQDDLPYSSNFLYMLTEREPNPLAARVFDRCLILHAEHSLNASTFSARVTASTLTDPYAVVASAVGTLAGPLHGGANEDVIAMLEEIGRPDEVSSFLNDAIAKKRKIMGFGHREYRVKDPRATILQAFAEELFSEFGKDEMYEVAKALEEEAISKLGPKGIFPNVDFYSGLVYRKLGIPRDLFTPVFAISRVAGWLAHWREQLGANRIFRPSQIYEGAKMRNWKPLESR

SEQ ID NO: 37084 - DNA, 1302 bp, Ralstonia eutropha JMP134
  CDS (1)..(1302): transl_table=11
atgaccccgtccgaagtgaaagccacgctatcgttctccgatggttcccccagcgtcgacctgccgatctatcagggcaccgtaggcccggacgtgatcgacatccgcaagctgtacggccagaccggcaagttcacctacgaccccggtttcatgtcgacggcttcatgcaattcgaagatcacctacatcgacggcgacaagggtgagttgctgtaccgcggctacccgatcgagcacctggcgcagaagtgcgaccacctcgaaacctgctacttgctgctgaagggcgaactgcctgacgccacacagaaggaagagttcgtgggccgcgtgatgaagcacaccatggtgcatgagcaactgcagttcttcctgcgcggtttccgccgcgacgcccacccgatggccgtgctgaccggtctggtcggtgccatgagcgcgttctaccacgacgcaatggatatcgatgatccgcaccagcgtgaaatctcggccatccgcctgatcgccaagatgccgaccctggtcgccatggcgtacaagtacaacatcggccagccgtacatctatccgcagaacgacctgtcctattcgggtaacttcctgcgcatgatgttcgccacgccgtgtgccccgtacaccgtgaacccggtgctcgagcgcgcgctggaccgtatcttcatcctgcacgccgaccacgagcagaacgcttcgacctcgaccgtgcgcctggccggttcgtcgggtacgaacccgttcgcagcgatcgccgccggcgtggcctgtctgtggggtccggcccacggcggcgccaacgaagccgcgctgaagatgctggaagagatcggcagcgtcgacaacatcggcgagttcatcaagcaggtcaaggacaagaactcgggcgtgcgcctgatgggctttggccaccgcgtgtacaagaactacgatccgcgtgccaagctgatgcgcgaaacttgccatgaagtgctgaacgaactgggcctgcacaacgacccgctgttcaagctcgccatggagctggaaaagatcgcgctggaagacgagtacttcgtcagccgcaagctgtacccgaacgtcgacttctactcgggcatcgtccagcgcgcgctgggcatcccgacgtcgctgttcacctgcatcttcgcgctggcccgcaccccgggctggatctcgcagtgggaagagatgatcaccgatccggagtacaagatcggccgtccgcgccagctgttcaatggcgcggcttcgcgtgaccagtcggaagcggctgcatcctaa

SEQ ID NO: 37085 - protein, 433 aa, Ralstonia eutropha JMP134
MTPSEVKATLSFSDGSPSVDLPIYQGTVGPDVIDIRKLYGQTGKFTYDPGFMSTASCNSKITYIDGDKGELLYRGYPIEHLAQKCDHLETCYLLLKGELPDATQKEEFVGRVMKHTMVHEQLQFFLRGFRRDAHPMAVLTGLVGAMSAFYHDAMDIDDPHQREISAIRLIAKMPTLVAMAYKYNIGQPYIYPQNDLSYSGNFLRMMFATPCAPYTVNPVLERALDRIFILHADHEQNASTSTVRLAGSSGTNPFAAIAAGVACLWGPAHGGANEAALKMLEEIGSVDNIGEFIKQVKDKNSGVRLMGFGHRVYKNYDPRAKLMRETCHEVLNELGLHNDPLFKLAMELEKIALEDEYFVSRKLYPNVDFYSGIVQRALGIPTSLFTCIFALARTPGWISQWEEMITDPEYKIGRPRQLFNGAASRDQSEAAAS

SEQ ID NO: 37086 - DNA, 1302 bp, Ralstonia eutropha JMP134
  CDS (1)..(1302): transl_table=11
atgacgccgtccgatgtgaaagccacgctatcgttctccgatggttcccccagcgttgagctgccgatctacaagggcaccgtaggcccggacgtgatcgacattcgcaagctgtacggccagaccggcaagttcacctacgaccccggtttcatgtcgacggcttcgtgcaattcgaagatcacctacatcgacggcgacaagggcgagctgctgtaccgcggctacccgatcgagcaactggcgcagaagtgcgaccacctcgaaacctgctacctgttgctgaagggcgaactgcccaacgccaagcagaaggaagaattcaccggccacgtcatgaaccacaccatggttcacgagcagctgcagttcttcctgcgcggtttccgccgcgatgcgcacccgatggccgtgctgaccggcctggtcggtgccatgagcgcgttctaccacgacgcgatggacatcgatgatccgcaccagcgcgagatctcggccatccgcctgatcgccaagatgccgaccatggtcgccatggcgtacaagtacaacatcggccagccgtacatctacccgcagaacgacctgtcctactcgggcaacttcctgcgcatgctgttcggcacgccgtgcgccccgtacaccgtgaacccggtgctggagcgtgcgctggaccgaatcttcatcctgcacgccgaccacgagcagaacgcttcgacctcgaccgtgcgtctggccggttcgtcgggtacgaaccccttcgcagcgatcgccgctggcgtggcctgcctgtggggtccggctcacggcggcgccaacgaagccgcgctgaagatgctggaagagatcggcagcgtcgacaacatcggcgagttcatcaagcaggtcaaggacaagaactcgggcgtgcgcctgatgggctttggccaccgcgtgtacaagaactacgatccgcgcgccaagctgatgcgcgaaacctgccatgaagtgctgaacgaactgggcctgcacaacgacccgctgttcaagctcgccatggagctggaaaagatcgcgctggaagacgaatacttcgtcagccgcaagctgtacccgaacgtcgacttctactcgggcatcgtccagcgcgcgctgggtatcccgacgtcgctgttcacctgcatcttcgcgctggctcgtaccccgggctggatctcgcagtgggaagagatgatcaccgatccggaatacaagatcggccgtccgcgccagctgttcaacggcgccgcttcgcgcgacgtgccggacatttccaagcgctaa

SEQ ID NO: 37087 - protein, 433 aa, Ralstonia eutropha JMP134
MTPSDVKATLSFSDGSPSVELPIYKGTVGPDVIDIRKLYGQTGKFTYDPGFMSTASCNSKITYIDGDKGELLYRGYPIEQLAQKCDHLETCYLLLKGELPNAKQKEEFTGHVMNHTMVHEQLQFFLRGFRRDAHPMAVLTGLVGAMSAFYHDAMDIDDPHQREISAIRLIAKMPTMVAMAYKYNIGQPYIYPQNDLSYSGNFLRMLFGTPCAPYTVNPVLERALDRIFILHADHEQNASTSTVRLAGSSGTNPFAAIAAGVACLWGPAHGGANEAALKMLEEIGSVDNIGEFIKQVKDKNSGVRLMGFGHRVYKNYDPRAKLMRETCHEVLNELGLHNDPLFKLAMELEKIALEDEYFVSRKLYPNVDFYSGIVQRALGIPTSLFTCIFALARTPGWISQWEEMITDPEYKIGRPRQLFNGAASRDVPDISKR

SEQ ID NO: 37088 - DNA, 1251 bp, Ehrlichia canis str. Jake
  CDS (1)..(1251): transl_table=11
atggtcaaagaagcagtattggaattagatggtcaaaaagtgaaattaccggttttatgtgatactaatggaaataaagttatagatattacttctttgtataaaggtacaggaatattaacttatgatccaggatttatgtctactgctgcttgtgagtccaagattacatttattgatgggaataaggggatattatgctatagaggatataatatagctgatttagttaataacaataagagttttatagaaatcgtctatttattgttttatgggtcttttcctagtgttgataatttaaaagattttatgttacagatttctcaggagtatatgcctcctgaaatggtttgtgatgttataaagtcattttcacaagattcacatcctatgactatattaatggcatgtttttctgcattggcatcttattatcatgaccaagcagttgataaagatggattaaaacatcctaagttagcagtggctaaggttgcaagcataatagcaatgatttatagatacacgactaatcaggattttattgaacctaatcatggattgtcttatagtgaaaattttatacatatgatgtttgatatttcttcttataaatttactcaagttgttgctaaagctttggatgttatttttacattacatgctgatcatgagcaaaatgcttctactgctactgttaggttggctggttcttctggtgctgacttatttgcttgtttggtagcagggatagcaactttatgggggccagctcatggtggtgctaatgaagctgtgattaatatgttaatggcaattgaaaaaccaagtaacgtaaagcagtttattcaaaaagtaaaagatggtaataaaagtacgaggctaatgggttttggtcatagggtatataaaaattatgatccacgtgctaagataatttgtgaaatttgtaaagaagtcttaaatgatttaggtgtaaatgatccattattagaaatagctttggaattggaaaatatagctttgcaggatagttattttattgaacgtagcttgtatcctaatgtggatttttattctggaattattttaaaagctattggaataccagtgagaatgtttactacattatttgcgttggctagaacatctggttggtctgctcagtggtatgagatggtggcagataagaattataaaatatgtcgtccacgtcagttatatactggtcatattgcaaaaatctag

SEQ ID NO: 37089 - protein, 416 aa, Ehrlichia canis str. Jake
MVKEAVLELDGQKVKLPVLCDTNGNKVIDITSLYKGTGILTYDPGFMSTAACESKITFIDGNKGILCYRGYNIADLVNNNKSFIEIVYLLFYGSFPSVDNLKDFMLQISQEYMPPEMVCDVIKSFSQDSHPMTILMACFSALASYYHDQAVDKDGLKHPKLAVAKVASIIAMIYRYTTNQDFIEPNHGLSYSENFIHMMFDISSYKFTQVVAKALDVIFTLHADHEQNASTATVRLAGSSGADLFACLVAGIATLWGPAHGGANEAVINMLMAIEKPSNVKQFIQKVKDGNKSTRLMGFGHRVYKNYDPRAKIICEICKEVLNDLGVNDPLLEIALELENIALQDSYFIERSLYPNVDFYSGIILKAIGIPVRMFTTLFALARTSGWSAQWYEMVADKNYKICRPRQLYTGHIAKI

SEQ ID NO: 37090 - DNA, 1296 bp, Thiobacillus denitrificans ATCC 25259
  CDS (1)..(1296): transl_table=11
atgaagaaaaccgtcaccctcactttcagcgacggcagtcccgcgattgaattgccgatcgaagagggcacctacggcaagcccgtgatcgacatccgcgccctcggcgcacacggctatttcacgcacgacccgggcttcaccgcgacttcgagctgtacctcgtcgatcacctacatcgacggcgacgaaggcctgctgtactaccggggctacccgatcgaccaactcgcctaccagtcggacttcatggaagtcagctacctgctgctgcacggcgaactgccgacggcggaacagaaggccgggttcgagcagtcgatccgtcaccacacgctgctgcacgaccagatcgaaaacgtgttccgcggctttcgccgcagcgcgcacccgatggcggtgatgatcggcgtgaccggcgcgatgtcggccttctatcacgccggcctcgacaacttcaatcccgagcaccgcgagatcgtcgcccaccgcctgatcgccaagatcccgaccgtcgccgcgtgggcgtacaagttcaacgagggccagcccttcgtctacccgcagaaccgcctgtcctacgccgagaacttcatgtacatgatgttctcgagcccctgcgaggaatacgtgcccaacccggtgctggcgcgcgcgctcgaccgcatcttcatcctgcacgccgaccacgagcagaacgcgtcgacctcgacggtacggctcgccgggtcgagcggcgccaacccctacgcctgcatcgcgagcggcatggcgtcgctgtgggggccgctgcacggcggcgccaacgaagccgtgctccgcatgctcgaggagatcgacgacgcgtccaagattcccgatttcatcaagcgcgcgaaggacaaatccgatcctttccgcctgatgggcttcggtcatcgcgtctacaagaacatggacccgcgcgcggcgatcatccgccgcacctgctacgaggtgctcgacgagcttggcctgcgtgacgatccgcagttcaagatcgcgctcgagctcgagcgcatcgcgcttgaggacgagtacttcatcgagcgcaaactctatccgaacgtcgacttctattcgggcatcatcttccgcgcgatgggtattccgaccagcatgttcacggcattgttcgcgatggcgcgcacggccggctgggtcgcgcagtggcacgagatgttatccgacccggcgcacaagatcggccgcccgcgccagctctacgcgggtccggcgcgacgcgacttcgtgccgctcgaccagcgcagggcctga

SEQ ID NO: 37091 - protein, 431 aa, Thiobacillus denitrificans ATCC 25259
MKKTVTLTFSDGSPAIELPIEEGTYGKPVIDIRALGAHGYFTHDPGFTATSSCTSSITYIDGDEGLLYYRGYPIDQLAYQSDFMEVSYLLLHGELPTAEQKAGFEQSIRHHTLLHDQIENVFRGFRRSAHPMAVMIGVTGAMSAFYHAGLDNFNPEHREIVAHRLIAKIPTVAAWAYKFNEGQPFVYPQNRLSYAENFMYMMFSSPCEEYVPNPVLARALDRIFILHADHEQNASTSTVRLAGSSGANPYACIASGMASLWGPLHGGANEAVLRMLEEIDDASKIPDFIKRAKDKSDPFRLMGFGHRVYKNMDPRAAIIRRTCYEVLDELGLRDDPQFKIALELERIALEDEYFIERKLYPNVDFYSGIIFRAMGIPTSMFTALFAMARTAGWVAQWHEMLSDPAHKIGRPRQLYAGPARRDFVPLDQRRA

SEQ ID NO: 37092 - DNA, 1374 bp, Magnetospirillum magnetotacticum MS-1
  CDS (1)..(1374)
atgggtcactgtgcgggtgaggcggggtacggtcgaccgcgcggcaacggcgcgagcagcagcaggaagggaaccatgaacaccactcagcaggcgaaggtccgactcctcgtcgacgaccaggcgcaggacctgcccgtggtcgcggcgaccgagggcaacgacggcatcgtcgtgtcctccttgctcaagtcgaccggcctcgtgaccgtcgaccccggcttcatgaacaccgcgtcgtgcgagtcgagcatcacgtacatcgacggcgaggccggcatcctccggtaccgcggctacccgatcgagcagctcgccgagcggtcgagcttcctcgaggtggcgtacctcctcatccacggcgagctccccgacgcagcgacgctcgacgccttcgtcgagcgcgtcaaccggcacacgctcgtgcacgaggacttccgcacgttcatgggcacgttcccgcgcaacgcgcaccccatggcggtgctgtcgtccgcgatcaacgcgctgtccacgttctaccccgagtcgctcgacccgttcgacgacgagacggtcgagctcgcgacggtcctgctcctcgcgaagtcgcgcaccatcacgtcgtacctgcaccgccgccgcgtcggcgagccgctgctctacccggactactcgcgcggttacgtcgacgacttcctgcgcatgacgttcgcgacgccgtaccagcagtacgaggccgacccggtcgtcgtcgacgcgctcgacaagctgctcatcctgcacgccgaccacgagcagaactgctcgacgtcgacggtccgcgtcgtcgggtcctcgcacgcgaacctctacgcgtccgtcgcggccggggtcaacgcgctctcgggcccgctgcacggcggcgcgaacgagtcggtgctcaccatgctcgacaagatcgctggcgcggagtacgacgtcgacaccttcatgaagaaggtgaagaacaaggaggacggcgtccgcctcatgggcttcggccaccgggtctacaagaactacgacccgcgcgcggcgatcgtcaagaagtcggccgacgccgtgctctccaccctcggcaagaaggaccagctcctcgacatcgccatgggcctcgaggagatcgcgctcaacgacgactacttcatcgagcgcaagctctaccccaacgtggacttctacacgggcctcatctacaaggccatgggcttctcgcccgccatgttcacgccgctcttcgcgctgggccgcatgcccggctggatcgcgcagtggcgcgagatgatgaaggacccgcagaccaagatcggccgcccgcgccaggtctacgtcggcgagaccgagcgcgactacgtcgccgtctccgaccgctga

SEQ ID NO: 37093 - protein, 457 aa, Magnetospirillum magnetotacticum MS-1
MGHCAGEAGYGRPRGNGASSSRKGTMNTTQQAKVRLLVDDQAQDLPVVAATEGNDGIVVSSLLKSTGLVTVDPGFMNTASCESSITYIDGEAGILRYRGYPIEQLAERSSFLEVAYLLIHGELPDAATLDAFVERVNRHTLVHEDFRTFMGTFPRNAHPMAVLSSAINALSTFYPESLDPFDDETVELATVLLLAKSRTITSYLHRRRVGEPLLYPDYSRGYVDDFLRMTFATPYQQYEADPVVVDALDKLLILHADHEQNCSTSTVRVVGSSHANLYASVAAGVNALSGPLHGGANESVLTMLDKIAGAEYDVDTFMKKVKNKEDGVRLMGFGHRVYKNYDPRAAIVKKSADAVLSTLGKKDQLLDIAMGLEEIALNDDYFIERKLYPNVDFYTGLIYKAMGFSPAMFTPLFALGRMPGWIAQWREMMKDPQTKIGRPRQVYVGETERDYVAVSDR

SEQ ID NO: 37094 - DNA, 1137 bp, Anabaena variabilis ATCC 29413
  CDS (1)..(1137)
atgatggtgtgcgaatataagcctggtttagaaggcattcccgccgcccaatcgagtatcagttatgtagatgggcaaaagggaatactagaatatcgtggcatccggattgaggatttagcccagaagagtacttttctggaaactgcttatcttttaatctggggtgagttgccaacaaaagaagaattgcaagtatttgaggaggaagtccgtcttcatcggcggattaaataccggattcgggatatgatgaagtgctttcccgaatcgggtcatccaatggatgcactccaagcctctgctgcggctttaggcttgttttactcccgtcgagatttgcacaatcctgtctatattcgggatgctgtagtgcgcttaatagctactattccaacgatggtagctgcattccagttgatgcggaaaggcaatgaccccgttaaaccccgcgatgatttagattattccgccaattttctctacatgctcaacgagaaagaaccggatgctttggcggcaaaaatctttgatatctgcttgattctccatgtcgagcatacgatgaatgcttctaccttcagtgctagggtaacagcttcaaccttgacagacccctatgcggtggttgctagcgctgtgggaaccttgggagggcctttacacggtggagccaatgaagaagtaattcagatgttggaagaaatcggttccgtggagaatgtgcgttcttatgtcgaagagaggttgcaacggaaagacaagctcatgggctttggacatcgtgtttacaaggtgaaagacccacgggcaacaattttgcaaggtctcgcagaacagttgtttgccaagttcggcgcggataagtattacgacatcgcccaagaaatggaacgggtagtcgaagagaagcttggtcataaagggatttatcccaatgttgacttttactcaggtctagtgtataggaagatgggtattcctacagacttgtttacaccaatctttgcgatcgctcgtgtggctggttggttagcccactggaaagaacaacttgaagaaaaccgcatcttccgtcctacccaggtttataacggcaaacacagtgttacttacacccccattgaccaacgttaa

SEQ ID NO: 37095 - protein, 378 aa, Anabaena variabilis ATCC 29413
MMVCEYKPGLEGIPAAQSSISYVDGQKGILEYRGIRIEDLAQKSTFLETAYLLIWGELPTKEELQVFEEEVRLHRRIKYRIRDMMKCFPESGHPMDALQASAAALGLFYSRRDLHNPVYIRDAVVRLIATIPTMVAAFQLMRKGNDPVKPRDDLDYSANFLYMLNEKEPDALAAKIFDICLILHVEHTMNASTFSARVTASTLTDPYAVVASAVGTLGGPLHGGANEEVIQMLEEIGSVENVRSYVEERLQRKDKLMGFGHRVYKVKDPRATILQGLAEQLFAKFGADKYYDIAQEMERVVEEKLGHKGIYPNVDFYSGLVYRKMGIPTDLFTPIFAIARVAGWLAHWKEQLEENRIFRPTQVYNGKHSVTYTPIDQR

SEQ ID NO: 37096 - DNA, 1269 bp, Campylobacter coli RM2228
  CDS (1)..(1269): transl_table=11
atgtcaaattctgttactgtaactgacaatagaaatggtaaaagctacgaattccctatatatgatggtactactggtccaagtgttgtggatatggggagtttttataaacaaacaggaatgtttgcttatgatgaaggtttaacttctacagctacttgtaaatcaaaaattacttatattgatggtgaagagggtgttttaatgcaccgtggctatcctatagaatggcttgctgaaaataaactttttttagatgtagtgcatcttttactctataaagaacttccaagcaatgaaagacttgaagcatttagatatgagcttaaaaaacgctcttatatacatgagggtatgcatcgtctttttgattctttccctgataatgctcaccctatggccgttttacaaggcgctgtttcatctcttagtgctttttatcctgatcatttaaatatgaatgttagagaagagtacatggaaatggctgctagagttgtagcaaaaattcctactatagtagccgctgcttatcgttataaaaatggttttcctatggcttatcctaatttagatcgtggatttactgagaactttttatatatgttaagaacctatccttatgatcatgttgagcttaaacctatagaagtaaaagcactcgatactgtatttatgcttcatgcagatcatgaacaaaatgcttctacttctactgttcgtgccgtaggttctactcatgcgcatccttatgcatgtatttcagcaggtattggagcgctttggggtcatgctcatggaggtgcaaatgaaggcgttattagaatgcttgaggaaatagctactgttgatagggtggatgaatttataaaaagagcaaaagataaaaatgacccattccgcttgatgggctttgggcatagggtttataaaaattttgatccgcgtgcaaaagtacttaaaaagcttcgtgatcaattaatcgatgagttaggtattgatacgaatttgattaaggtggcaactcgtatagaagagattgccttgcaagatgattattttgtacaaagaaatctttatccaaatgtagattttcatagcggcttaattttaaaagctctaggaattccaaatgaaatgtttgcaacgcttttcgtgatcggacgtacaccaggctggatagcacaatggatagagcaaaaagagcaagaaacactaaaaattgttcgtccaagacagctttaccttggagaaaccagtaaaatttaa

SEQ ID NO: 37097 - protein, 422 aa, Campylobacter coli RM2228
MSNSVTVTDNRNGKSYEFPIYDGTTGPSVVDMGSFYKQTGMFAYDEGLTSTATCKSKITYIDGEEGVLMHRGYPIEWLAENKLFLDVVHLLLYKELPSNERLEAFRYELKKRSYIHEGMHRLFDSFPDNAHPMAVLQGAVSSLSAFYPDHLNMNVREEYMEMAARVVAKIPTIVAAAYRYKNGFPMAYPNLDRGFTENFLYMLRTYPYDHVELKPIEVKALDTVFMLHADHEQNASTSTVRAVGSTHAHPYACISAGIGALWGHAHGGANEGVIRMLEEIATVDRVDEFIKRAKDKNDPFRLMGFGHRVYKNFDPRAKVLKKLRDQLIDELGIDTNLIKVATRIEEIALQDDYFVQRNLYPNVDFHSGLILKALGIPNEMFATLFVIGRTPGWIAQWIEQKEQETLKIVRPRQLYLGETSKI

SEQ ID NO: 37098 - DNA, 1503 bp, Oryza sativa
  CDS (1)..(1503)
atggatcgcgcccgcctcgccgtgctctccgcccacctcgcctcccccgccgccgcctgcggggaggcggacgcggcggggccgctggagaggtcggcggcgtctgcgggggcgcgaggcggcgcgctggcggtggtggatgggaggacggggaagaggtacgaggtcaaggtgtcggacgaggggaccgtgcgcgccaccgacttcaagaagattaccactggaaaggacgacaagggtcttaagatctatgatcctggttatctcaacacagccccagttcgctcatccatctgctacattgatggggatgagggaattcttcgttacaggggatacccaattgaagagttggctgaaagcagctcatttgttgaggtggcctacctcctgatgtacggaagtttgcctacccagagccaattggctggatgggaatttgcgatttctcagcactctgctgttccccagggactcttggatatcatacaagcaatgcctcatgacgctcatcccatgggtgcccttgccagtgcaatgagcacgctttctgtcttccatccggatgcaaaccctgctcttagaggtcaagatctttacaagtcgaagcaggttagggataagcagattgtgcgagtacttgggaaggcaccaacaattgcagctgcagcgtacttgagattagctggaagacctcctatccttcctacaaatagtctctcttattcagagaacttcttgtatatgctagactctttgggtgacaaagaatacaagccaaatcctagacttgctagggttctagatatcctttttattctccatgctgaacatgaaatgaactgctctacagctgctgctaggcaccttgcttcaagtggtgttgatgtcttcactgctctttctggtgctgttggagctctatatggtccactgcatggtggtgcaaatgaggcggtacttaaaatgttaaatgaaattggaagtgtggagaatattccagatttcatcgagggagtgaaaaacaggaagagaaagatgtcaggttttgggcaccgtgtttacaagaattatgatccccgtgctaaagtcatccgaaagctagcagaggaggtcttctctattgtcggacgggatcctcttatcgaggttgctgttgcgttggagaaggcagcattgtcagatgattattttgtcaagaggaagctgtatccaaatgtggatttttactctggcttaatatatagggcaatgggattccctacagagttcttccctgttctgtttgcaattcctcgcatggctggttggttagcacattggaaagagtcacttgatgatccagacactaagattatgaggcctcagcaggtatacactggtgtttggctgaggcattacacacctgtcagagaacgagtcccagcaagccagggcgaacagcttggtcagattgctacctctaacgcaacaaggcgtcggcgtgcaggttctgccctgtaa

SEQ ID NO: 37099 - protein, 500 aa, Oryza sativa
MDRARLAVLSAHLASPAAACGEADAAGPLERSAASAGARGGALAVVDGRTGKRYEVKVSDEGTVRATDFKKITTGKDDKGLKIYDPGYLNTAPVRSSICYIDGDEGILRYRGYPIEELAESSSFVEVAYLLMYGSLPTQSQLAGWEFAISQHSAVPQGLLDIIQAMPHDAHPMGALASAMSTLSVFHPDANPALRGQDLYKSKQVRDKQIVRVLGKAPTIAAAAYLRLAGRPPILPTNSLSYSENFLYMLDSLGDKEYKPNPRLARVLDILFILHAEHEMNCSTAAARHLASSGVDVFTALSGAVGALYGPLHGGANEAVLKMLNEIGSVENIPDFIEGVKNRKRKMSGFGHRVYKNYDPRAKVIRKLAEEVFSIVGRDPLIEVAVALEKAALSDDYFVKRKLYPNVDFYSGLIYRAMGFPTEFFPVLFAIPRMAGWLAHWKESLDDPDTKIMRPQQVYTGVWLRHYTPVRERVPASQGEQLGQIATSNATRRRRAGSAL

SEQ ID NO: 37100 - DNA, 1233 bp, Thermoproteus tenax
  CDS (1)..(1233): transl_table=11
atgagcgaacagactgtatcaattaggacgaccggcaagatcatacagtcgccttgtggccccatcattcacggccttgaggatgtactggtgaaaataaccaccataagcgatatagatggccacacgggcagactctggtatagaggatatagaattgaggatttggcagagaataccacatatgaggaggtcgtctatcttcttttatacgggaagttgccgagtgcgagagaattggccgatataaagagcaggctcagcgcaaatagggagctgaaccctgccacgatagagattcttcgcgcgctcgccaaggcgcatcccatgttcgctctggaggccgcggtcgcaagcgagggcgcgttcgatgaagataacttaaagttggccgacgcgctgagggccggccgatataagcaagaggagaaggaccttgcgttaagaatagcggagaagctgattgccaaattgcccaccatagttgcatatcattatagattgtcgagggggttagagctagtcagacctaggggcgacttagcccactcggcaaatttcctctatatgttcttcggaaaagagcctgatcctcttgcgactaaagcgatagatctctatctaatcttacatgcagaccacgagatacctgcctcaacttttacggcgttggtcatcggagccactctcagcgatctgtactctgtaatagcgggcgccataggcgccctcaagggcccgctgcacggcggagccaatgaggccgccgtcaagtcctatttggagatcgcagatccctccaaggcgaaggagatagttgaggctgctacgaaacccggcggtccccgcctgatgggcgtaggacaccgcgtttacaaggcctatgatcctcgtgccaagatcttcaaaaagttggtggaggactacacagctaaattcggcgatcctcagagactgtacgccatagcgagcaatattgagcaagcagtgatggcgcatccctacttccaacagagaaagctctatccaaacgtggacttctggtcaggtatagtgttctactatatgggtataccctacgactacttcacgcccctcttcgccatgtccagagttgcgggttggacggcgcatgtattagaatattgggagaacaaccgcctcttcaggccgcgcgcgtgctacgtagggccgcacgaccaacaatttatcccgcttgaaaatagatcttga

SEQ ID NO: 37101 - protein, 410 aa, Thermoproteus tenax
MSEQTVSIRTTGKIIQSPCGPIIHGLEDVLVKITTISDIDGHTGRLWYRGYRIEDLAENTTYEEVVYLLLYGKLPSARELADIKSRLSANRELNPATIEILRALAKAHPMFALEAAVASEGAFDEDNLKLADALRAGRYKQEEKDLALRIAEKLIAKLPTIVAYHYRLSRGLELVRPRGDLAHSANFLYMFFGKEPDPLATKAIDLYLILHADHEIPASTFTALVIGATLSDLYSVIAGAIGALKGPLHGGANEAAVKSYLEIADPSKAKEIVEAATKPGGPRLMGVGHRVYKAYDPRAKIFKKLVEDYTAKFGDPQRLYAIASNIEQAVMAHPYFQQRKLYPNVDFWSGIVFYYMGIPYDYFTPLFAMSRVAGWTAHVLEYWENNRLFRPRACYVGPHDQQFIPLENRS

SEQ ID NO: 37102 - DNA, 1443 bp, Tetrahymena thermophila
  CDS (1)..(1443): transl_table=6
atggaaagaattactgatctcaattaataaattatcactaacgaaactggtgaaaaggaatactacacagtcacagataatagaaatggcaaaacttatgaagttcctatcagaaactctagagaaggaagatatataatggctaaggatattggtaaaattaaagatgctgaaggaaatgtcctccgtgtctacgatcctggttatatgaacactattgttaatacttccagaatttgctatattgatggtgacttgggtgtattagagtatagaggtattccaattgagtagcttgctgagaaatctactttcttggaagtagcttatcttcttatctacggagaattaccaaccaagacccaatttgaagaattcaactaaagaatttcaggtcacacattcttgcatactgatgtcttacaaatgatgaaacacttcagatatgatgctcatcctatgggtatgcttattagcactattgcagcattatctactttccgtcctggttccaaccctgccttagctggttaagatatctataaggacttgaagattcgtaacaaataaatttatcgtattcttggacaagttcctactattgctgctaacgcttatagatctcgtattggtagaaacttcaacaacccatcttctgatcttccttacgttgataacttcctttacatgatggataaattaaatgaaaataaatacagccctcatcctaagttagctaaggctttggatattctctttattctccatgctgaacacgaaatgaattgctcaacagcatttgttagacatttagcttcttctggtgttgatgtatactcttgcatagctggttctgctgctgctctttatggtcctaagcatggtggtgcaaatgaagccgttttaagaatgcttgaataaattggtgatgttaagaatattccctctttcattgataaggtcaagaatagaaaggctttacttttcggttttggtcacagagtctataagaactacgaccctcgtgctaaaatcgtcaagaagactgcttatgaagtttttgaaatctgtggaaaagaacctttaattgaaattgccatcgaattggaaaagatagctcttgaagatgaatttttcattaagagaaagttatatccaaatgttgatttctactctggtgttatttatagagctatgggtttccccactgatatgttcccagtccttttcactattccaagagttgctggttggttagctcattgggttgaatacctcgatgataaggaaaacaacattgttagacccagacaaaactatgttggctatgctaaaagagattatgttcctatggaataaagacaagaagctaaatttaacttagaaagctccaagagttctacttccaagagaagagaagctggtacaagcgttgttttgtga

SEQ ID NO: 37103 - protein, 480 aa, Tetrahymena thermophila
MERITDLNQQIITNETGEKEYYTVTDNRNGKTYEVPIRNSREGRYIMAKDIGKIKDAEGNVLRVYDPGYMNTIVNTSRICYIDGDLGVLEYRGIPIEQLAEKSTFLEVAYLLIYGELPTKTQFEEFNQRISGHTFLHTDVLQMMKHFRYDAHPMGMLISTIAALSTFRPGSNPALAGQDIYKDLKIRNKQIYRILGQVPTIAANAYRSRIGRNFNNPSSDLPYVDNFLYMMDKLNENKYSPHPKLAKALDILFILHAEHEMNCSTAFVRHLASSGVDVYSCIAGSAAALYGPKHGGANEAVLRMLEQIGDVKNIPSFIDKVKNRKALLFGFGHRVYKNYDPRAKIVKKTAYEVFEICGKEPLIEIAIELEKIALEDEFFIKRKLYPNVDFYSGVIYRAMGFPTDMFPVLFTIPRVAGWLAHWVEYLDDKENNIVRPRQNYVGYAKRDYVPMEQRQEAKFNLESSKSSTSKRREAGTSVVL

SEQ ID NO: 37104 - DNA, 1290 bp, Rhizobium fredii
  CDS (1)..(1290): transl_table=11
atgtcaggaacaaacgcgacgatctctatcgatggaaaaacagcggacctcccggtgcgatcgggctccatcggtccggacgtggtggacatctggtcgctctacaagcagaccaagatgttcacctacgatcctggcttcacgtcgacggcatcgtgtgaatccaagatcacctatatcgacggcgacgagggcgtattgctgcaccgcggctacccgatcgagcagcttgccgatcacggtgacttcctcgaagtctgctatcttctgctttacggcgaactgccgaccaaggcgcagaaggacgacttcgactatcgcgtgacgcatcacaccatgattcacgagcagatgtcgcggttcttcaccggcttccgtcgcgacgcccacccgatggccgtcatgtgcggctgcgtcggggcgctgtcggccttctatcatgactcgaccgacatcactgacccgcatcagcgcatggtcgcctcgctgcgcatgatcgccaagatgccgacgattgcggcaatggcctacaagtaccatatcggccagcccttcatttatccgaagaacgacctcgactacgcctcgaacttcctgcgcatgtgctttgccgtgccctgcgaggactatgtcgtcaatccggtcctgtcgcgcgcgatggatcgcatcttcatcctgcacgctgaccatgagcagaacgcctcgacctcgaccgttcgccttgccggctcgtcgggcgccaatccgttcgcctgtatcgctgccggcattgcctgcctatggggtcccgctcacggcggcgccaacgaagcggccctcaacatgctcgccgagatcggcagcgtcgatcgcattccggaatttatcaccagggccaaggacaagaacgacccgttccgcctgatgggcttcggtcaccgcgtctacaagaactatgatccgcgtgcgaagatcatgcagaagacgacgcatgaggtgctggccgaactcggtcacaaggacgacccgctcctcgaagtggcgatggagctcgagcgcatcgcactgacggacgagtacttcatcgagaagaagctctacccgaacatcgacttctattccggtatcacgctgaaggcgctgggcttccccaccacgatgttcaccgttctcttcgcgcttgctcgcacggtcggctggatcgcccagtggaacgagatgatcgaggatccggaacagcgcatcggtcggccgcgccagctgtatgtcggcgcaccgctgcgcgattacgtgccgctctccaagcgctga

SEQ ID NO: 37105 - protein, 429 aa, Rhizobium fredii
MSGTNATISIDGKTADLPVRSGSIGPDVVDIWSLYKQTKMFTYDPGFTSTASCESKITYIDGDEGVLLHRGYPIEQLADHGDFLEVCYLLLYGELPTKAQKDDFDYRVTHHTMIHEQMSRFFTGFRRDAHPMAVMCGCVGALSAFYHDSTDITDPHQRMVASLRMIAKMPTIAAMAYKYHIGQPFIYPKNDLDYASNFLRMCFAVPCEDYVVNPVLSRAMDRIFILHADHEQNASTSTVRLAGSSGANPFACIAAGIACLWGPAHGGANEAALNMLAEIGSVDRIPEFITRAKDKNDPFRLMGFGHRVYKNYDPRAKIMQKTTHEVLAELGHKDDPLLEVAMELERIALTDEYFIEKKLYPNIDFYSGITLKALGFPTTMFTVLFALARTVGWIAQWNEMIEDPEQRIGRPRQLYVGAPLRDYVPLSKR

SEQ ID NO: 37106 - DNA, 1134 bp, Thermus aquaticus
  CDS (1)..(1134): transl_table=11
atggaagtggcacggggtcttgagggcgttctcttcacggaaactcggatgtgctttattgacggggaggcgggccgcctttactactacggcatccccattcaggagctggcggagaagagcacctttgaggagaccacctacttgcttctccacggcagactgcctcagcgaggggagctagaggcctttaaaaaggacctggcggccaggcgggctttgccttctcacctcctggagtccttccggcgctaccccgcctcggcccaccccatgagctttttgcgcaccgccgtctccgagctgggcatgctggaccccaccgagggagatatctcccgggaggccctgtaccagaagggcctggacctgatcgccaagttcgccaccatcgtggccgccaacaagcgcctcaaggagggtaaggagccccttcctccccgggaggacctctcccacgccgccaacttcctttacatggcgaacggcgtggagccttcccctgagcaagagcgcctcatggacgcggccctcatcctccacgccgagcacggcttcaacgccagcaccttcaccgccatcgccgccttctccacggagaccgacctctactcggccatcaccgccgccgtggcctctttgaagggccccaggcacggtggggccaacgaggcggtcatgaagatgatccaggagatcggcgcgcccgaaagggcccgggagtgggtgcgggaaaagctttccaagaaagagcggatcatgggcatgggccaccgggtctacaaggcctttgaccccagggccggggttctggagaagctggcccgccgcgtggcggagaagcacgggcactcccccgagtaccagatcctcaagatcgtggaggaggaggcggggaaggtgctgaacccgcggggcatctaccccaacgtggacttctattccggggtggtctactccgacctgggcttcgggctggagttcttcacccccatcttcgccgtggcccgcatctccggctgggtggggcacatcctggagtacaaggagcaggacaaccgcctcctgcgccccgacgccaagtacatcggggagctggaccggccctacgtgcccctggaggccaggggctga

SEQ ID NO: 37107 - protein, 377 aa, Thermus aquaticus
MEVARGLEGVLFTETRMCFIDGEAGRLYYYGIPIQELAEKSTFEETTYLLLHGRLPQRGELEAFKKDLAARRALPSHLLESFRRYPASAHPMSFLRTAVSELGMLDPTEGDISREALYQKGLDLIAKFATIVAANKRLKEGKEPLPPREDLSHAANFLYMANGVEPSPEQERLMDAALILHAEHGFNASTFTAIAAFSTETDLYSAITAAVASLKGPRHGGANEAVMKMIQEIGAPERAREWVREKLSKKERIMGMGHRVYKAFDPRAGVLEKLARRVAEKHGHSPEYQILKIVEEEAGKVLNPRGIYPNVDFYSGVVYSDLGFGLEFFTPIFAVARISGWVGHILEYKEQDNRLLRPDAKYIGELDRPYVPLEARG

SEQ ID NO: 37108 - DNA, 1212 bp, Neorickettsia helminthoeca
  CDS (1)..(1212): transl_table=11
atggacactgacgaggtcacgataaagatacaggctacggtcaaaagcagtgggggccccaatggaatattgatttcttcggagcccagaagttttatctacgatcctggttatgtctccacggcttcgtgtaaatctgagatcaccttcgtagacggtgaggagggtgtactcttgtacagaggttaccctgtagatgaacttgctactcaatgcgattttcttcgagtcgtatacctacttctgtatggtgaactcccagaccctgtccgcgcaaaagaattccgtactttcattcagaattttccacagcttccagattgcgtcctcgagaatatttgctcctttccaagggatgcacatcccatggtgattctgatttctgcttttgcagccctggcttctgctcaccatgactctgacttcgagacgcacaaagaagtgctaatcgctaatgtgccaagacttgtagcatatatttatagatatattacttctcaggacttcataccgcctgatgcatgcctttcctacgttgggaactttttttatatgatgttcggggagaaaaaacctgattatgaaagcatcttagataagattctgattctacatgcagatcatgagcagaacgcttccacatcgactgctaggatggttgtttcttctggtgcaagcccaattgctgcagtcagcgctgcaacggctacgttatggggtccactgcacggcggtgcaaatgagaaagtcctgcacatgctgggagaaatcgaaaaacaaggtgggagcgtggaggaattcattgagcgcgtcaaaagaaaagaagaaagactaatgggtttcgggcatagggtctacaagaactatgatcccagagcggtaattctgaagagtacggctcaggatattttaaagggaagttcttctattctgagtatcgcaagcaaacttgaaagtattgcttccaatgatgagtatttcataagtcgcaagctctatccgaatgtagatttctactcgggaataatactcaatgcattagggattccaacatatatgtttacacctatctttgctctcgcaaggacgtctggctgggtcgcccagataaaagagttcctaagtgacaaggagcagaaaatcgctagacctagacagatttatataggtaaacccttcaggaaagttgcctcacagagtgaaaaactctag

SEQ ID NO: 37109 - protein, 403 aa, Neorickettsia helminthoeca
MDTDEVTIKIQATVKSSGGPNGILISSEPRSFIYDPGYVSTASCKSEITFVDGEEGVLLYRGYPVDELATQCDFLRVVYLLLYGELPDPVRAKEFRTFIQNFPQLPDCVLENICSFPRDAHPMVILISAFAALASAHHDSDFETHKEVLIANVPRLVAYIYRYITSQDFIPPDACLSYVGNFFYMMFGEKKPDYESILDKILILHADHEQNASTSTARMVVSSGASPIAAVSAATATLWGPLHGGANEKVLHMLGEIEKQGGSVEEFIERVKRKEERLMGFGHRVYKNYDPRAVILKSTAQDILKGSSSILSIASKLESIASNDEYFISRKLYPNVDFYSGIILNALGIPTYMFTPIFALARTSGWVAQIKEFLSDKEQKIARPRQIYIGKPFRKVASQSEKL

SEQ ID NO: 37110 - DNA, 1197 bp, Ehrlichia sennetsu
  CDS (1)..(1197): transl_table=11
atgaattctgaaaaagtaaaagtgaatgtggaggaatttttaaaaagcacagctggacccttcggtgtctctgcctctttggaaccaaagggattcttttatgatccagggtatgcaaaaactgctccatgcaaatctagcattactttcatagatggtgaaaatgggatacttctgcacaggggctacccaatagaggaattggcacaaacttctgactttttgcaggtcggctaccttctcattgacggcaaacttccagattccgctgctacgcgagagtttgaagagaggataaaacacgtaccgcagcttcctgagtgtgtcttgaaaaatatccgttctttcccaacgagtgcgcacccgatggcagttttaatctctgcacttgcttcgctcgcctcagtgtacggagaaatggactttaatcagaagaagttacttttagttgcctatacgccatggctcatagcgcatatataccgacacatcaattctctggagttcgttgaacctgacatcaggcttccttataccgagaatttcctgtacatgatgtttggtgagaaaaagcccaaagatgcggaaatcttggacaaaatctttatcttgcatgcggaccatggtcaaactgcttcgacctctgttgcacggatggttgtatcttcaggagcaagcccgattgcggcatgttctgcggctacagctagtttatggggaccactgcacggtggcgcaaatgagcgagtcctggaaatgttgagaggtatagttgaaagcggtgagaaggtagaaaacttcattgagcgcgttaaaagaaaagaagagagacttatgggttttgggcacagggtgtataaaaactatgatcctcgtgcagccatattaaagcaaaaggctcatgatgtgctaaaagccgattcacctattctaaaaactgctggcgaacttgaaacaatcacagcaagggaagagtactttctgagtcgcaaattatatcctaatgtcgacttctattcgggaatagtgctagacgcactgggaatatcatcttgcatgttcacaccgattttcgcacttgctagaacagtaggttgggttgcacaaatcacagagttcttgagtgacagtgaacaaaaactttgcagacctagacaaatttacgtaggcgaaccaagaagaaacgtacacggttga

SEQ ID NO: 37111 - protein, 398 aa, Ehrlichia sennetsu
MNSEKVKVNVEEFLKSTAGPFGVSASLEPKGFFYDPGYAKTAPCKSSITFIDGENGILLHRGYPIEELAQTSDFLQVGYLLIDGKLPDSAATREFEERIKHVPQLPECVLKNIRSFPTSAHPMAVLISALASLASVYGEMDFNQKKLLLVAYTPWLIAHIYRHINSLEFVEPDIRLPYTENFLYMMFGEKKPKDAEILDKIFILHADHGQTASTSVARMVVSSGASPIAACSAATASLWGPLHGGANERVLEMLRGIVESGEKVENFIERVKRKEERLMGFGHRVYKNYDPRAAILKQKAHDVLKADSPILKTAGELETITAREEYFLSRKLYPNVDFYSGIVLDALGISSCMFTPIFALARTVGWVAQITEFLSDSEQKLCRPRQIYVGEPRRNVHG

SEQ ID NO: 37112 - DNA, 1197 bp, Ehrlichia risticii
  CDS (1)..(1197): transl_table=11
atgaattctgaaaaagtaaaagtaaatgtggaggaatttttaaaaagcacagctggaccctccggtgtctctgcctctttggaaccaaggggattcttttatgatccagggtatgcaaaaactgctccttgcaaatctagcattactttcatagatggtgaaaacgggatacttttgcacaggggctacccaatagaggaattggcacaaacttctgactttttgcaggttggctaccttctcattaacggcaaacttccagattccattgctacgcgagagtttgaagagaagataaagcacgtaccgcagcttcctgaatgcgtcttaaaaaatatccgttctttcccaacaagtgcacacccgatggcagttttaatctctgcacttgcttcgctcgcctcagtgtatggagaaatggactttcatgagaagaagttacttctagttgcctacacgccatggcttgtagcgtatatataccgacacatcaattctcaggagttcattgaacctgacatcaggcttccttacactgagaatttcctgtacatgatgtttggtgagaaaaagcccaaagatgcggaaatcttggacaaaatctttatcttgcatgcagaccatggtcaaactgcttctacctctgttgcacggatggttgtatcctcaggagcaagcccaattgtcgcatgttctgcggctacagctagtttatggggaccactgcacggtggcgcaaatgagcgagtcctagaaatgttgagaggtatcattgaaagcggtgagaacgtagagaactttattgagcgcgttaaaagaaaagaagagagacttatgggtttcgggcacagggtgtataaaaactatgatcctcgtgcagccatattgaagcaaaaagctcatgatgtgctaaaagccgattcacctattctaaaaactgctggcaaacttgaaacgattgcaacaagggaagagtactttctgagtcgcaaattataccctaatgtcgacttctattcgggaatagtgctggacgcactagggataccatcctgcatgttcacaccgattttcgcacttgctagaacagtaggttgggttgcacaaatcgcagaattcttgagtgacagtgaacagaaactttgtagacctagacaaatttacgtaggcgaaccaagaagaagcgtacacggttaa

SEQ ID NO: 37113 - protein, 398 aa, Ehrlichia risticii
MNSEKVKVNVEEFLKSTAGPSGVSASLEPRGFFYDPGYAKTAPCKSSITFIDGENGILLHRGYPIEELAQTSDFLQVGYLLINGKLPDSIATREFEEKIKHVPQLPECVLKNIRSFPTSAHPMAVLISALASLASVYGEMDFHEKKLLLVAYTPWLVAYIYRHINSQEFIEPDIRLPYTENFLYMMFGEKKPKDAEILDKIFILHADHGQTASTSVARMVVSSGASPIVACSAATASLWGPLHGGANERVLEMLRGIIESGENVENFIERVKRKEERLMGFGHRVYKNYDPRAAILKQKAHDVLKADSPILKTAGKLETIATREEYFLSRKLYPNVDFYSGIVLDALGIPSCMFTPIFALARTVGWVAQIAEFLSDSEQKLCRPRQIYVGEPRRSVHG

SEQ ID NO: 37114 - DNA, 1236 bp, Anaplasma phagocytophilum
  CDS (1)..(1236): transl_table=11
atggtagaaaaagctgttttggagtgtggagaccgtaggattagtttgccggttttacgcggcacggacgggaccccagtggttgatatcacaaccctatatagggagaacaatgtgctcacatatgacccgggttttatgtccactgctgcttgcagatcagagataactttcattgatggaaacaagggaactctacgctacaggggtattgatatagaaaatctgatcggtacacccaatagcttcagtagtatagtgtatttgttattgaatggtactctgccttctgaaactgagcatgaagagtttgcgcggattttgggcgctgaatacgatgtgcctgaacaagttatgaacgttattagatcattccctcgagattcgcatcctatggctattctcatagctagcttttctgctttagctgctaattaccacgcaagtcgcattgatccgcttacaggtgctatcatcgcaattgcgaaagtacccggcattgttgcaagtatttataggcacactgcaaatctagattttatacaagctgacgcaaacttagagtacacgcatcactttatcaggatgatgtttggcgacatggatgatgcacatcgtgatattatgcacaaagctctagatgcaatttttataatgcacgcagatcatgagcagaatgcctctacttccactgtgcgtatgacaggatcttctggagcaggtttatttgcatgtttgtgcgcaggagtggccactctgtgggggccagcgcatgggggcgcaaatgaggctgttataaagatgcttgctgagattggttcaccagaaaatgtttcgtcatttatcgacaaggtaaaaaacaacaagggcaaaagtcgtcttatggggttcgggcaccgtgtttataaaagctatgaccctagagcgcgtgttttgcgtacaatctgtaaagatgtattagattctctaggtagagatgagaatttgctagctgttgcagaagagttagaaagtcaggctttgcaggatgagtattttattgagcgcaagttgtacccaaatgtcgacttttactcaggtatagtgctaagagctatgggggttccggtagatatgtatactgcattctttgccttggcacggacgtctggatgggcatctcaatggtatgagatgattcaaagtgatgaagggaaacggatcagccgcccacgccagttatacacaggaaaataa

SEQ ID NO: 37115 - protein, 411 aa, Anaplasma phagocytophilum
MVEKAVLECGDRRISLPVLRGTDGTPVVDITTLYRENNVLTYDPGFMSTAACRSEITFIDGNKGTLRYRGIDIENLIGTPNSFSSIVYLLLNGTLPSETEHEEFARILGAEYDVPEQVMNVIRSFPRDSHPMAILIASFSALAANYHASRIDPLTGAIIAIAKVPGIVASIYRHTANLDFIQADANLEYTHHFIRMMFGDMDDAHRDIMHKALDAIFIMHADHEQNASTSTVRMTGSSGAGLFACLCAGVATLWGPAHGGANEAVIKMLAEIGSPENVSSFIDKVKNNKGKSRLMGFGHRVYKSYDPRARVLRTICKDVLDSLGRDENLLAVAEELESQALQDEYFIERKLYPNVDFYSGIVLRAMGVPVDMYTAFFALARTSGWASQWYEMIQSDEGKRISRPRQLYTGK

SEQ ID NO: 37116 - DNA, 1236 bp, Anaplasma phagocytophilum
  CDS (1)..(1236): transl_table=11
atggtagaaaaagctgttttggagtgtggagaccgtaggattagtttgccggttttacgcggcacggacgggaccccagtggttgatatcacaaccctatatagggagaacaatgtgctcacatatgacccgggttttatgtccactgctgcttgcagatcagagataactttcattgatggaaacaagggaactctacgctacaggggtattgatatagaaaatctgatcggtacacccaatagcttcagtagtatagtgtatttgttattgaagggtactctgccttctgaaactgagcatgaagagtttgtgcggattttgggcgctgaatacgatgtgcctgaacaagttatgaacgttattagatcattccctcgagattcgcatcctatggctattctcatagctagcttttctgctttagctgctaattaccacgcaagtcgcattgatccgcttacaggtgctatcatcgcaattgcgaaagtacccggcattgttgcaagtatttataggcacactgcaaatctagattttatacaagctgacgcaaacttagagtacacgcatcactttatcaggatgatgtttggcgacatggatgatgcacatcgtgatattatgcacaaagctctagatgcaatttttataatgcacgcagatcatgagcagaatgcctctacttccactgtgcgtatgacaggatcttctggagcaggtttatttgcatgtttgtgcgcaggagtggccactctgtgggggccagcgcatgggggcgcaaatgaggctgttataaagatgcttgctgagattggttcaccagaaaatgtttcgtcatttatcgacaaggtaaaaaacaacaagggcaaaagtcgtcttatggggtttgggcaccgtgtttataaaagctatgaccctagagcgcgtgttttgcgtacaatctgtaaagatgtattagattctctaggtagagatgagaatttgctagctgttgcagaagagttagaaagtcaggctttgcaggatgagtattttattgagcgcaagttgtacccaaatgtcgacttttactcaggtatagtgctaagagctatgggggttccggtagatatgtatactgcattctttgccttggcacggacgtctggatgggcatctcaatggtatgagatgattcaaagtgatgaagggaaacggatcagccgcccacgccagttatacacaggaaaataa

SEQ ID NO: 37117 - protein, 411 aa, Anaplasma phagocytophilum
MVEKAVLECGDRRISLPVLRGTDGTPVVDITTLYRENNVLTYDPGFMSTAACRSEITFIDGNKGTLRYRGIDIENLIGTPNSFSSIVYLLLKGTLPSETEHEEFVRILGAEYDVPEQVMNVIRSFPRDSHPMAILIASFSALAANYHASRIDPLTGAIIAIAKVPGIVASIYRHTANLDFIQADANLEYTHHFIRMMFGDMDDAHRDIMHKALDAIFIMHADHEQNASTSTVRMTGSSGAGLFACLCAGVATLWGPAHGGANEAVIKMLAEIGSPENVSSFIDKVKNNKGKSRLMGFGHRVYKSYDPRARVLRTICKDVLDSLGRDENLLAVAEELESQALQDEYFIERKLYPNVDFYSGIVLRAMGVPVDMYTAFFALARTSGWASQWYEMIQSDEGKRISRPRQLYTGK

SEQ ID NO: 37118 - DNA, 1326 bp, Mycobacterium smegmatis
  CDS (1)..(1326): transl_table=11
gtgtgtatgctcaaacagtcccagccgaccaggcgtccgacacggcctcagcgtaccttcacctaccccggtggaaagctggagctcccgatcctgaaggccaccgaggggacagactcggtcgctctcggcaagttcctggccgagacaaacctgaccacgttcgacagtgggttcatgaacaccgcgtcgacgaagtcggccatcacctacatcgacggtgagcagggcatcctccgctaccggggcatcccgatcgagcagctcgcggagaagtcgaccttcatcgaggtgagctacctgctcatctacggcgagctcccgaccccgacccagctcgaggagttcaccaccaagatccagcggcacaccctgctgcacgaggatctcaagcgcttcttcgacggcttcccccgcaacgcgcaccccatgccggtgctgtcgagcgcggtcaacgccctgtcggcctactaccaggactcgctcgatcccaaggacgacgagcaggtcgagctgtcgaccatccgcctcctggcgaagctgccgaccatcgccgcctacgcctacaagaagtcggccggtcagcctttcctgtacccggacaactcgctgagcctcgtcgagaacttcctgcggatgaccttcggcttcccggccgagccctacgaggtcaacccggatgtcgccaaggcgctcgacatgctgttcatcctgcatgccgaccacgagcagaactgctcgacctcgaccgtccgcctcgtcggctcgtcgcaggccaacctcttcacctcgatctcgggcggcatcaacgccctctggggcccgctgcacggcggcgccaaccaggcggtcctcgagatgctcgacgccatcaaggccgacggcggcgacaccaagaagttcatggagcgggtcaagaacaaggaagccggcgtcaagctgatgggcttcggtcaccgcgtctacaagaactacgatccgcgcgccgcgatcgtgaagaagaccgccgaccagatcctggaaaccctcggtgtccaggacgatctgctcgagatcgccaagggtctcgaagaggtcgccctcaacgacgactacttcatcgagcgcaagctgtacccgaacgtggacttctacaccggtgtcatctaccgtgcgatgggcttcccgacgcgcatgttcaccgttctgttcgcgttgggtcgccttccgggctggatcgcccactggcgtgagatgcacgaggatccgaccaccaagatcggccgtccgcgtcagctctacaccggctacaccgagcgcgactacgtgccgatgagcgatcgctga

SEQ ID NO: 37119 - protein, 441 aa, Mycobacterium smegmatis
MCMLKQSQPTRRPTRPQRTFTYPGGKLELPILKATEGTDSVALGKFLAETNLTTFDSGFMNTASTKSAITYIDGEQGILRYRGIPIEQLAEKSTFIEVSYLLIYGELPTPTQLEEFTTKIQRHTLLHEDLKRFFDGFPRNAHPMPVLSSAVNALSAYYQDSLDPKDDEQVELSTIRLLAKLPTIAAYAYKKSAGQPFLYPDNSLSLVENFLRMTFGFPAEPYEVNPDVAKALDMLFILHADHEQNCSTSTVRLVGSSQANLFTSISGGINALWGPLHGGANQAVLEMLDAIKADGGDTKKFMERVKNKEAGVKLMGFGHRVYKNYDPRAAIVKKTADQILETLGVQDDLLEIAKGLEEVALNDDYFIERKLYPNVDFYTGVIYRAMGFPTRMFTVLFALGRLPGWIAHWREMHEDPTTKIGRPRQLYTGYTERDYVPMSDR

SEQ ID NO: 37120 - DNA, 1137 bp, Anabaena sp
  CDS (1)..(1137): transl_table=11
atgatggtgtgcgaatacaagcctggtttagaaggcattcccgccgcccaatcgagtatcagttatgtagatgggcaaaagggaatactagaatatcgtggcatccggattgaggatttagcccagcaaagtacttttctggagactgcttatcttttaatctggggtgagttgccaacaaaagaagaattgcaagtatttgaggaggaagtccgtcttcatcggcggattaaataccggattcgggatatgatgaagtgctttcccgaatctggtcatccaatggatgcactccaagcctctgcggcggctttaggcttgttttactcccgtcgagatttgcacaatcgctgctatattcgggatgctgtagtgcggctaatagctactattccgacgatggtagctgcattccagttgatgcggaaaggtaatgaccccgttaagccccgtgatgatttagattattccgccaattttctctacatgctcaacgagaaagaaccggatgctttggcggcaaaaatctttgatatctgcttgattctccatgtcgagcatacgatgaatgcttccacctttagtgctagggtaacagcttccaccttgactgacccgtatgcggtggttgctagcgctgtggggactttaggagggcctttacacggtggagccaatgaagaagtaatccagatgttggaagagattggttccgtggagaatgtgcgttcttatgtcgaggagaggttgcaacgtaaagacaagctcatgggctttggacatcgtgtctacaaagttaaagacccacgggcgacaattttgcaaggcctcgcagaacagttgtttgccaagttcggcgcagataagtattacgacatcgcccaagaaatggaacgggtagtcgaagagaaacttggtcataaagggatttatcccaatgttgacttctactctggtttagtgtatcggaagatgggtattcctacagacttgtttacaccaatctttgcgatcgctcgtgttgctggttggttagcccactggaaagaacaactcgaagagaaccgcattttccgtcctacccaggtttacaacggcaaacacagtgttacctacacccccattgaccaacgttaa

SEQ ID NO: 37121 - protein, 378 aa, Anabaena sp
MMVCEYKPGLEGIPAAQSSISYVDGQKGILEYRGIRIEDLAQQSTFLETAYLLIWGELPTKEELQVFEEEVRLHRRIKYRIRDMMKCFPESGHPMDALQASAAALGLFYSRRDLHNRCYIRDAVVRLIATIPTMVAAFQLMRKGNDPVKPRDDLDYSANFLYMLNEKEPDALAAKIFDICLILHVEHTMNASTFSARVTASTLTDPYAVVASAVGTLGGPLHGGANEEVIQMLEEIGSVENVRSYVEERLQRKDKLMGFGHRVYKVKDPRATILQGLAEQLFAKFGADKYYDIAQEMERVVEEKLGHKGIYPNVDFYSGLVYRKMGIPTDLFTPIFAIARVAGWLAHWKEQLEENRIFRPTQVYNGKHSVTYTPIDQR

SEQ ID NO: 37122 - DNA, 1443 bp, Arabidopsis thaliana
  CDS (1)..(1443)
atggagatttcggagagagctagagctcgattagccgttctcaatgcgcacttgacagtatctgagccgaatcaggtgttgccagcgatcgaaccatggtgcacatcggctcacataaccgctgcaccgcatggatcgcttaaaggaaatttgaagatcgtcgatgagcgtacggggaatgaatatcaggtcccagtctcagagcatggtaccgttaaaaccgttgatctcaagaagataacgacagggaaggatgacaaggggcttaacttatacgatcctggttacttaaacacggctcctgttcgatcttcgatttcttacatcgatggagatgagggaatcctacgttatcggggatacccagttgaggagttggctgagaaaagtacttatacagaggttacttatctcctaatttatgggaatctgccttctcaaagacagctagctgattgggagtttgcgatttctcagaattcagctgtgccacaaggagtattggatatgatacagtccatgcctaatgatgtacatccagtaggagctcttgtcactgcaatgagtgcactttccatcttttatcctgatgcaaatccgtctcttatgggcctaggtgtttacaagtcaaaacaagttcgtgataaacagattgttcgtgttcttggacaggccccaacaattgcagcagctgcttatttgaggaaggcaggcaagcctcctgttcaacctttgagcaacctttcttattcagagaatttcctctatatggtggaatcaatgggagataggtcttacaagcctaatcctcgtttggctcgagtgctggacatcctcttcatactgcaagctgaacatgaaatgaactgctctactgctgctgctaggcacctttcctctagtggtggtgatgtgtatactgctgtttcgggaggtgttggagccatttatggtccccttcatggtggtgcagttgaggctacgattaacatgttatcagagattgggactgttgaaaatattccagagttcattgaaagcgtgaagaataagaagaggaggttgtcgggttttggacaccgcatttacaaaaactacgatcccagaggaaaagtcgttaagaaactggcggatgaagtgttctccattcttggaagggatcctctggttgaggtaggagatgctctagagaaggcggcactttctgatgaatattttgttaagagaaagctgtacccaaatgttgatttctactctggattaatcaatagggcaatgggaatcccatcatcattcaccgcagtatcacgtatcgctggatacttgtcacactggcgtgagtctttagatgatcctgacacaaagatcatgagaccccaacaggtctatactggagcggggataaggcattacgagacagtgagagaaagaaccaagctgtga

SEQ ID NO: 37123 - protein, 480 aa, Arabidopsis thaliana
MEISERARARLAVLNAHLTVSEPNQVLPAIEPWCTSAHITAAPHGSLKGNLKIVDERTGNEYQVPVSEHGTVKTVDLKKITTGKDDKGLNLYDPGYLNTAPVRSSISYIDGDEGILRYRGYPVEELAEKSTYTEVTYLLIYGNLPSQRQLADWEFAISQNSAVPQGVLDMIQSMPNDVHPVGALVTAMSALSIFYPDANPSLMGLGVYKSKQVRDKQIVRVLGQAPTIAAAAYLRKAGKPPVQPLSNLSYSENFLYMVESMGDRSYKPNPRLARVLDILFILQAEHEMNCSTAAARHLSSSGGDVYTAVSGGVGAIYGPLHGGAVEATINMLSEIGTVENIPEFIESVKNKKRRLSGFGHRIYKNYDPRGKVVKKLADEVFSILGRDPLVEVGDALEKAALSDEYFVKRKLYPNVDFYSGLINRAMGIPSSFTAVSRIAGYLSHWRESLDDPDTKIMRPQQVYTGAGIRHYETVRERTKL

SEQ ID NO: 37124 - DNA, 1296 bp, Mycobacterium tuberculosis
  CDS (1)..(1296): transl_table=11
gtggccgacaccgacgacaccgcaaccctccgttacccgggaggcgagatcgacctgcagatcgtgcacgccaccgaaggcgccgacggcattgcgctcgggccgctgctggcaaaaaccgggcacaccacgttcgacgtcggcttcgccaacacggccgccgctaaaagctccatcacctacatcgacggagatgccggcattctgcgttatcgcggctacccgatcgaccaactggcggagaagtcaaccttcatcgaggtctgctacctgttgatttacggcgagctgcccgataccgaccagcttgcccagttcaccggccggatccagcgccacaccatgctgcacgaggatctcaagcggttcttcgacggctttccgcgcaatgcccacccgatgccggtgttgtccagcgtggtcaatgcgctgtcggcgtactaccaggatgctctggaccccatggacaacggtcaagtcgagctgtcgaccattcggctgctggccaagctgcccaccatcgccgcgtacgcctacaagaaatcggtcggccagcccttcctctacccagataactcactgacgctggtggagaacttcctacggttgacgttcggatttcccgccgagccctaccaggccgaccccgaggtggtgcgggcgctggacatgttgttcatcttgcacgccgaccacgagcagaactgctcgacgtcgacggttcggctggttggctcgtcgcgagccaacctgttcacctcgatctcgggtggcatcaacgcactatggggtccgcttcatggcggcgccaatcaggctgtcctggagatgctcgagggcattcgcgacagcggcgacgacgtcagcgagtttgtacgcaaggtcaagaaccgcgaggccggggtcaaattgatgggtttcggtcatcgtgtctacaagaactacgatccgcgggcccgcatcgtcaaggaacaggccgacaagatcctggccaagctcggcggcgatgactccttgctgggcatcgccaaggagctcgaagaggcggcgctgaccgacgactacttcatcgaacgcaagctttaccccaacgtcgacttctacaccggcctgatctaccgggccctcggcttcccgaccaggatgttcaccgtgttgtttgccctgggcaggcttcccggctggatcgcgcactggcgtgagatgcacgacgagggcgacagcaagatcggccggccccgccagatctacaccggctacacggagcgcgactacgtcaccatagacgcgcggtag

SEQ ID NO: 37125 - protein, 431 aa, Mycobacterium tuberculosis
MADTDDTATLRYPGGEIDLQIVHATEGADGIALGPLLAKTGHTTFDVGFANTAAAKSSITYIDGDAGILRYRGYPIDQLAEKSTFIEVCYLLIYGELPDTDQLAQFTGRIQRHTMLHEDLKRFFDGFPRNAHPMPVLSSVVNALSAYYQDALDPMDNGQVELSTIRLLAKLPTIAAYAYKKSVGQPFLYPDNSLTLVENFLRLTFGFPAEPYQADPEVVRALDMLFILHADHEQNCSTSTVRLVGSSRANLFTSISGGINALWGPLHGGANQAVLEMLEGIRDSGDDVSEFVRKVKNREAGVKLMGFGHRVYKNYDPRARIVKEQADKILAKLGGDDSLLGIAKELEEAALTDDYFIERKLYPNVDFYTGLIYRALGFPTRMFTVLFALGRLPGWIAHWREMHDEGDSKIGRPRQIYTGYTERDYVTIDAR

SEQ ID NO: 37126 - DNA, 1290 bp, Rhizobium tropici
  CDS (1)..(1290): transl_table=11
atgacggaacaaagcgcgaaactaacttggggtgaaaagacggtggatttgccggttaagaccggaaccatcggcccaagtgtcattgatattggtgccctttataagaacacctccactttcacctatgatcctggcttcacttcgactgcgtcgtgcgagtccagcatcacctttattgatggcgacgaaggcgttctgctgcatcgcggttatccgatcgaacagcttgccgagcacggcgacttcctcgaagtctgttacctgctgctctacggcgaattgccgaccgcagcccagaagaaggacttcgactatcgggtcgtgcaccacaccatggtgcatgaacaaatgtcccgcttcttcaccggtttccgccgcgatgcgcatccgatggccgtcatgtgcggctgcgtcggcgctctgtcggccttctatcacgactcgaccgacatcaccgatccgcaccagcgcatggtcgcaagccttcgtatgatcgccaagatgccgacgcttgccgccatggcctacaagtaccatatcggccagcccttcgtttacccgaagaacgatctcgactatgcatcgaacttcctgcgcatgtgctttgccgtgccctgcgaggaatatgtggtcaatccggtgcttgcccgcgccatggaccgcatcttcatcctgcacgcggatcatgagcagaacgcatcgacctcgacggttcgccttgccggctcttccggcgccaatccctttgcttgcatcgccgccggcatcgcatgcctctgggggccggcccatggcggcgccaacgaagctgcgctcaacatgctaacggaaatcggcacggtcgaccgcattccggaatatatcgcccgcgccaaggacaagaacgatccgttccgattgatgggcttcggtcatcgcgtttacaagaactacgatccgcgcgccaagatcatgcagaagacggcgcacgaggtcctcggcgaactcggcatcaaggacgatccgctgctcgacatcgcgatcgaactggagcgtatcgccctgaccgatgactatttcatcgagaagaagctttacccgaatgtcgacttctattccggtatcacgctgaaggcgctcggcttccccacgaccatgttcacggtactgtttgcgcttgcccgaaccgtcggctggattgcccagtggaacgagatgatcgaagatccggatcagcgtatcggccgcccgcgccacgtctataccggcgcaccgctgcgcgaatacgttccggtttccaagcgttaa

SEQ ID NO: 37127 - protein, 429 aa, Rhizobium tropici
MTEQSAKLTWGEKTVDLPVKTGTIGPSVIDIGALYKNTSTFTYDPGFTSTASCESSITFIDGDEGVLLHRGYPIEQLAEHGDFLEVCYLLLYGELPTAAQKKDFDYRVVHHTMVHEQMSRFFTGFRRDAHPMAVMCGCVGALSAFYHDSTDITDPHQRMVASLRMIAKMPTLAAMAYKYHIGQPFVYPKNDLDYASNFLRMCFAVPCEEYVVNPVLARAMDRIFILHADHEQNASTSTVRLAGSSGANPFACIAAGIACLWGPAHGGANEAALNMLTEIGTVDRIPEYIARAKDKNDPFRLMGFGHRVYKNYDPRAKIMQKTAHEVLGELGIKDDPLLDIAIELERIALTDDYFIEKKLYPNVDFYSGITLKALGFPTTMFTVLFALARTVGWIAQWNEMIEDPDQRIGRPRHVYTGAPLREYVPVSKR

SEQ ID NO: 37128 - DNA, 1545 bp, Arabidopsis thaliana
  CDS (1)..(1545)
atggagatttcgcagagagtgaaagctagattagccgttctcaccgcgcatttggcggtgtctgataccgtcggattggaacaggtgttgccggcgatcgcgccatggtgtacatcggctcacattaccgctgcacctcatggatcactcaaaggaaacttgacgatcgtcgatgagcgtacggggaagaaatatcaggtccccgtctcagagcatggtaccgttaaagccgttgatctcaagaagataacgacggggaaggatgataaggggctgaagttgtacgatcctggttacttgaacacggctccggttcgatcttcgatttgttacatcgacggagatgaaggaatcttacgttatcggggatacccaattgaagagttggctgagagcagtacttttattgaggttgcttatctcctcatgtatggaaatctgccttctcaaagtcagctagctgattgggagttcactgtttctcagcattcagctgtgccacaaggagtattggatatcatacagtccatgcctcatgatgcacacccaatgggagttcttgtgagtgccatgagtgcactttctatctttcaccctgatgcaaatcctgctcttagtggccaagacatttacaagtcaaaacaagttcgtgataaacagattgttcgcattctcggaaaggcaccaacaattgcagcagctgcttatttgaggacggcaggcaggcctcctgttcttccttcggccaacctttcttattcagagaatttcctctatatgctggattcaatgggcaataggtcttacaagcctaatcctcgtttggctcgagtgctggacatcctcttcatactgcatgctgaacatgaaatgaactgctctactgctgctgctcggcatcttgcctctagtggtgttgatgtgtacaccgcatgtgctggagctgttggggcgctttatggtccacttcatggtggcgcgaacgaggccgtgcttaagatgttagcagagattgggactgctgaaaatattccagatttcattgaaggcgtgaagaacagaaagaggaagatgtcaggttttggacatcgtgtttacaaaaactatgacccccgagcaaaagttataaaaaaactggcagatgaagtgttctccattgttggtagggatcctctcatcgaggtagcagttgctctagagaaggcggcactgtctgatgaatattttgttaagagaaagctgtacccaaatgttgatttctactctggattaatctatagggcaatgggattcccaccagaattcttcacagtcctgttcgcagtcccgcgtatggctggatacttgtcacactggcgtgagtcgttagatgatcctgacactaggatcatgagaccccaacaggcctatactggagtgtggatgaggcattacgagccagtgagagaacgaacgttatcaagtgattcggataaggataagtttggtcaagtttccatttcgaatgcatcaagaaggcgtttagctggatcatctgccctttag

SEQ ID NO: 37129 - protein, 514 aa, Arabidopsis thaliana
MEISQRVKARLAVLTAHLAVSDTVGLEQVLPAIAPWCTSAHITAAPHGSLKGNLTIVDERTGKKYQVPVSEHGTVKAVDLKKITTGKDDKGLKLYDPGYLNTAPVRSSICYIDGDEGILRYRGYPIEELAESSTFIEVAYLLMYGNLPSQSQLADWEFTVSQHSAVPQGVLDIIQSMPHDAHPMGVLVSAMSALSIFHPDANPALSGQDIYKSKQVRDKQIVRILGKAPTIAAAAYLRTAGRPPVLPSANLSYSENFLYMLDSMGNRSYKPNPRLARVLDILFILHAEHEMNCSTAAARHLASSGVDVYTACAGAVGALYGPLHGGANEAVLKMLAEIGTAENIPDFIEGVKNRKRKMSGFGHRVYKNYDPRAKVIKKLADEVFSIVGRDPLIEVAVALEKAALSDEYFVKRKLYPNVDFYSGLIYRAMGFPPEFFTVLFAVPRMAGYLSHWRESLDDPDTRIMRPQQAYTGVWMRHYEPVRERTLSSDSDKDKFGQVSISNASRRRLAGSSAL

SEQ ID NO: 37130 - DNA, 1290 bp, Rhizobium tropici
  CDS (1)..(1290): transl_table=11
atggataacaacaatgcttgtgtcttagtcgacggccatagtgccgaattgaaacttcgatcaagcacgatcggtccgaacgtcctcggcattggatccctctacgagcagacgaagatgttcacctatgatcctggcttcacttcgactgcgtcgtgcgagtccagcatcacctttattgatggcgacgaaggcgttctgctgcatcgcggttatccgatcgaacagcttgccgagcacggcgacttcctcgaagtctgttacctgctgctctacggcgaattgccgaccgcagcccagaagaaggacttcgactatcgggtcgtgcaccacaccatggtgcatgaacaaatgtcccgcttcttcaccggtttccgccgcgatgcgcatccgatggccgtcatgtgcggctgcgtcggcgctctgtcggccttctatcacgactccaccgacatcaccgatccgcaccagcgcatggtcgcaagccttcgtatgatcgccaagatgccgacgcttgccgccatggcctacaagtaccatatcggccagcccttcgtttacccgaagaacgatctcgactatgcgtcgaatttcctgcgcatgtgctttgccgtgccctgcgaggaatatgtggtcaatccggtgcttgcccgcgccatggaccgcatcttcatcctgcacgcggatcatgaacagaacgcatcgacctcgacggttcgcctcgccggctcttccggcgccaatccctttgcttgcatcgccgccggcatcgcatgcctctggggcccggcccatggcggcgccaacgaacgtgcgctcaacatgctgacggaaatcggcacggtcgaccgcattccggaatatatcgcccgcgccaaggacaagaacgatccgttccgattgatgggcttcggtcatcgcgtttacaagaactacgatccgcgcgccaagatcatgcagaagacggcgcacgaggtcctcggcgaactcggcatcaaggacgatccgctgctcgacatcgcgatcgaactggagcgtatcgcgctgaccgatgactatttcatcgagaagaagctttacccgaatgtcgacttctattccggcatcacgctgaaggcgctcggcttccccacgaccatgttcacggtactatttgcgctcgcccgcaccgtcggctggattgcccagtggaacgagatgatcgaagatccggatcagcgtatcggccgcccgcgccagctctataccggcgcaccgctgcgcgaatacgttccgctttcaaagcgctga

SEQ ID NO: 37131 - protein, 429 aa, Rhizobium tropici
MDNNNACVLVDGHSAELKLRSSTIGPNVLGIGSLYEQTKMFTYDPGFTSTASCESSITFIDGDEGVLLHRGYPIEQLAEHGDFLEVCYLLLYGELPTAAQKKDFDYRVVHHTMVHEQMSRFFTGFRRDAHPMAVMCGCVGALSAFYHDSTDITDPHQRMVASLRMIAKMPTLAAMAYKYHIGQPFVYPKNDLDYASNFLRMCFAVPCEEYVVNPVLARAMDRIFILHADHEQNASTSTVRLAGSSGANPFACIAAGIACLWGPAHGGANERALNMLTEIGTVDRIPEYIARAKDKNDPFRLMGFGHRVYKNYDPRAKIMQKTAHEVLGELGIKDDPLLDIAIELERIALTDDYFIEKKLYPNVDFYSGITLKALGFPTTMFTVLFALARTVGWIAQWNEMIEDPDQRIGRPRQLYTGAPLREYVPLSKR

SEQ ID NO: 37132 - DNA, 1530 bp, Arabidopsis thaliana
  CDS (1)..(1530)
atggagatatcagagagagttcgagctcgattagctgttctctcaggtcatttatcggaaggaaaacaggattctccagcgatcgagcgatggtgcacgtcggcggatacgagtgtcgcaccgcttggatctttgaagggaacactgacgatcgtcgacgaacgcaccggaaaaaattataaagttccggtctcagatgatggtaccgttaaagccgttgatttcaaaaagatagtgacggggaaggaagacaaggggcttaagttatacgatccaggttacttgaacacggctcctgttcgatcttcgatttcttacatcgatggagatgaagggatccttcgttaccgtggctacccaattgaggaaatggctgagaacagtacttttctggaggtggcttatcttctcatgtatgggaatctgccctctgaaagtcagctatctgattgggagtttgcagtttctcagcattcagctgtgccacaaggtgtattagatattatacagtctatgcctcatgatgcacacccaatgggagttcttgtgagtgcaatgagtgcgctttccatctttcatcctgatgctaatcctgctcttaggggccaggatatttacgattcaaaacaagttagagataaacaaattatccgcattattggaaaggcaccaacaattgcagcagctgcttatctgaggatggcaggaaggcctcctgttcttccttcaggaaaccttccttatgcagataatttcctctatatgcttgattccctgggaaatagatcctacaaacctaatcctcggctggctcgggtgttggacatcctcttcatactgcatgcagagcatgaaatgaactgctccaccgctgctgctcggcatcttgcctctagcggtgttgatgtctacactgctgttgctggagctgtgggagcgctttatggtccacttcatggtggtgcaaacgaggctgtgcttaagatgttgtcagagattgggactgttgaaaatattccagagttcattgagggtgtgaagaacaggaagaggaagatgtctggttttggacaccgtgtgtacaaaaactatgaccctcgagctaaagtcatcaagaacctggctgatgaagtattttccattgttggaaaggatcctctaattgaggttgctgttgcacttgagaaggcagctctctctgacgattactttgttaagagaaagctgtatccaaatgttgacttctactctggattaatatacagggcaatgggatttccaccggagttcttcacggtcttattcgcgattcctcgcatggctggatacttgtcacattggaaagagtcactggatgatcctgacaccaagatcatgagaccacaacaggtgtacacaggcgtgtggctgaggcattacacaccagtgagagagagaatagtgacggatgactcgaaagagtcagacaaattgggtcaagtcgcgacttcaaatgcatcaagaagacgtttggctggatcttcagtttag

SEQ ID NO: 37133 - protein, 509 aa, Arabidopsis thaliana
MEISERVRARLAVLSGHLSEGKQDSPAIERWCTSADTSVAPLGSLKGTLTIVDERTGKNYKVPVSDDGTVKAVDFKKIVTGKEDKGLKLYDPGYLNTAPVRSSISYIDGDEGILRYRGYPIEEMAENSTFLEVAYLLMYGNLPSESQLSDWEFAVSQHSAVPQGVLDIIQSMPHDAHPMGVLVSAMSALSIFHPDANPALRGQDIYDSKQVRDKQIIRIIGKAPTIAAAAYLRMAGRPPVLPSGNLPYADNFLYMLDSLGNRSYKPNPRLARVLDILFILHAEHEMNCSTAAARHLASSGVDVYTAVAGAVGALYGPLHGGANEAVLKMLSEIGTVENIPEFIEGVKNRKRKMSGFGHRVYKNYDPRAKVIKNLADEVFSIVGKDPLIEVAVALEKAALSDDYFVKRKLYPNVDFYSGLIYRAMGFPPEFFTVLFAIPRMAGYLSHWKESLDDPDTKIMRPQQVYTGVWLRHYTPVRERIVTDDSKESDKLGQVATSNASRRRLAGSSV

SEQ ID NO: 37134 - DNA, 1311 bp, Acetobacter aceti
  CDS (1)..(1311): transl_table=11
atgagcgcgtcgcagaaagaaggtaagctatctaccgctaccatttcggttgatggaaaatccgccgaaatgcctgtgctttcaggcactctgggaccggatgttatcgacatccgcaaacttccggcgcaactgggcgttttcacgtttgacccaggttacggggaaacagcggcctgcaacagcaaaatcacctttattgatggtgataaaggcgttctgctgcaccgtggttaccctattgcgcagctggacgaaaatgcttcctacgaagaagttatttatctgcttttgaatggcgaactgcccaacaaggtgcagtacgacaccttcaccaacacccttacaaaccatacgctgctgcacgagcagatccgtaacttctttaacggcttccggcgtgatgcccacccaatggccattctgtgtggtacggttggggctttgtctgccttctacccagatgccaacgatattgccattcccgccaatcgggatctggccgccatgcggctgattgccaaaatcccaaccattgcggcatgggcttacaaatacacgcagggtgaagcctttatctacccgcggaatgatctgaactacgcagaaaacttcctgtccatgatgttcgcgcgcatgtccgaaccttacaaggtcaaccctgttctggcccgcgccatgaaccggattctgattctgcatgccgatcatgagcagaatgcctctacctccaccgtacgtctggctggttctacaggggccaatccgtttgcctgtattgctgcgggcattgccgctctgtggggacctgcacatggtggcgcaaacgaagctgtgctgaaaatgctggcccgtattggcaagaaagaaaatattcctgcctttatcgcacaggtgaaggacaagaacagcggcgtaaagctgatgggctttggccaccgcgtttacaagaacttcgacccacgtgcgaagatcatgcagcagacctgccacgaagtgctgacagaacttggcattaaggatgatccgctgctggatctggcggttgagctggaaaagattgctctgagcgatgattacttcgtgcagcgcaaactttacccgaatgtggatttctactctggcatcattctcaaggccatgggcatccccaccagtatgtttactgtgctgtttgccgtagcccgcaccaccggctgggtgagccagtggaaggaaatgattgaagaaccgggccagcgtatcagccgccctcgccagctttatattggcgcaccgcagcgtgactatgtgccgcttgccaaacgctaa

SEQ ID NO: 37135 - protein, 436 aa, Acetobacter aceti
MSASQKEGKLSTATISVDGKSAEMPVLSGTLGPDVIDIRKLPAQLGVFTFDPGYGETAACNSKITFIDGDKGVLLHRGYPIAQLDENASYEEVIYLLLNGELPNKVQYDTFTNTLTNHTLLHEQIRNFFNGFRRDAHPMAILCGTVGALSAFYPDANDIAIPANRDLAAMRLIAKIPTIAAWAYKYTQGEAFIYPRNDLNYAENFLSMMFARMSEPYKVNPVLARAMNRILILHADHEQNASTSTVRLAGSTGANPFACIAAGIAALWGPAHGGANEAVLKMLARIGKKENIPAFIAQVKDKNSGVKLMGFGHRVYKNFDPRAKIMQQTCHEVLTELGIKDDPLLDLAVELEKIALSDDYFVQRKLYPNVDFYSGIILKAMGIPTSMFTVLFAVARTTGWVSQWKEMIEEPGQRISRPRQLYIGAPQRDYVPLAKR

SEQ ID NO: 37136 - DNA, 1296 bp, Bartonella henselae
  CDS (1)..(1296): transl_table=11
atgtctaagaataaagcgcacattactgtgaatgataaaaaaatagaactctccgtgcgtaaaggtacacttggtcctgacgttattgaaattgcttctctctacaaagaaacagatacttttacttatgatcctggctttacctcaactgcttcgtgtgaatcgaaaatcacttatattgatggtaatgaaggaattttgctttatcgtggttatcctattgaccaattggctgaaaaaggagactttctcgaaagctgctatcttttgctttacggtgaactgccaacaaaacaagaaaaaattgattttgatcgctgtattatgcagcatacgatggttcacgaacagtttgcaagatttttccatggtttccgtcgcgactctcatcctatggccgtcatgattgcatgtcttggagctatgtctgcattctatcacgactctattgatattacagatcctcaacagagaatgatcgcttctattcgtctcatttcaaaggtcccaactcttgccgctatggcctataaatatagcattggacaagcatttgtttatccacgtaatgatcttagttacgctgcaaattttctccgtatgtgtttttctgttccttgtgaagaatataaaattaatccggtgctgactcgagctatggatagaatctttactcttcatgcagatcatgaacaaaatgcttcgacatccactgtacgtcttgcaggttcatcaggtgctaatccatttgcatgtattgcagcaggtgttgcatgcctttggggaccagctcatggtggagctaatgaagcatgcctaaaaatgttacaagaaataggttctgttgaaagaattcctgaattcattgcacgtgcaaaagataaaaatgattctttccgccttatgggttttggtcatcgagtctataaaaattatgatccacgcgcaaaaatcatgcaacaaacctgccatgaggttttaaaagaattgaacattcaaaatgatccacttcttgatattgctatcacgcttgaaaatattgctctaaatgatgaatattttattgaaaaaaaactttaccctaatgtcgatttctattctggcattacattaaaagctctaggatttccaacagaaatgtttactgttctttttgcattagcacgcagtgtcggctgggttgcgcaatggaaagaaatgattgaggatcctgcacaaaaaattagccgaccacgccaactctacacaggctacgctgcgcgtgaatatatccctatagacaagcgtgtaaactaa

SEQ ID NO: 37137 - protein, 431 aa, Bartonella henselae
MSKNKAHITVNDKKIELSVRKGTLGPDVIEIASLYKETDTFTYDPGFTSTASCESKITYIDGNEGILLYRGYPIDQLAEKGDFLESCYLLLYGELPTKQEKIDFDRCIMQHTMVHEQFARFFHGFRRDSHPMAVMIACLGAMSAFYHDSIDITDPQQRMIASIRLISKVPTLAAMAYKYSIGQAFVYPRNDLSYAANFLRMCFSVPCEEYKINPVLTRAMDRIFTLHADHEQNASTSTVRLAGSSGANPFACIAAGVACLWGPAHGGANEACLKMLQEIGSVERIPEFIARAKDKNDSFRLMGFGHRVYKNYDPRAKIMQQTCHEVLKELNIQNDPLLDIAITLENIALNDEYFIEKKLYPNVDFYSGITLKALGFPTEMFTVLFALARSVGWVAQWKEMIEDPAQKISRPRQLYTGYAAREYIPIDKRVN

SEQ ID NO: 37138 - DNA, 1317 bp, Bartonella quintana
  CDS (1)..(1317): transl_table=11
atgtctgagaataaagcacacattactgtgaacaataaaaaaatagaactctccgtgcggaaaggcactcttggtcctggcgtcattgaaattgcttctctctacaaagaaacagatacttttacttatgatcctggtttcacttcaaccgcttcttgtgaatcaaaaatcacttatattgatggggataaaggaatcttgctttattgcggttatcctatcgaccaattagctgaaaaaggagactttctcgaaagctgctatcttttactttacggtgaattaccaacaaaacaagaaaaaattgatttcgaccgttgtattatgcagcacatgatggtgcatgagcagtttacaaggttttttcatggctttcgtcgtgattctcaccctatggccgttatggttgcgtgtcttggagctatgtctgcattctatcacgactctattgatattaaagacgctcaacagagaatgatcgctgctattcgcttgatttcaaaggttccaactcttgctgctatggcgtataaatatagcatcggacaggcatttgtttatccacgtaatgatcttagttacgctgcaaatttcctccacatgtgtttttccgttccttgtgaagaatacaaaattaatccagtacttagtcgagctatggatcgaatctttactcttcatgcagatcatgaacaaaatgcttctacatccactgtacgtcttgtaggatcatcgggagctaatccatttgcatgtatcgcagcaggtgttgcatgcctttggggaccagctcatggtggagcgaatgaagcgtgcctaaagatgttacaaaaaataggctctgtcgaaagaattcctgagttcattgcacgagcaaaagataaaaatgatcctttccgtcttatgggttttggtcaccgagtttataaaaattatgatccacgtgcaaaaatcatgcaacaaacctgccatgaggttttaaaagaactgaacattcaagatgatccgcttcttgatatcgctatcgcacttgaaaatactgctctgaatgatgaatattttattgaaaaaaagctttatcctaatgttgatttttattctggcattacattaaaagctctaggttttccgaccgaaatgtttactgttctttttgcattagcacgcagtatcggctgggttgcgcaatggaaagaaatgattgaagatcctgcacaaaaaattggtcgaccacgccaactctacacaggctatgctgcacgtgaatatgtttctatagacaaacgtataagcaaaaataaaatgaccacccaataa

SEQ ID NO: 37139 - protein, 438 aa, Bartonella quintana
MSENKAHITVNNKKIELSVRKGTLGPGVIEIASLYKETDTFTYDPGFTSTASCESKITYIDGDKGILLYCGYPIDQLAEKGDFLESCYLLLYGELPTKQEKIDFDRCIMQHMMVHEQFTRFFHGFRRDSHPMAVMVACLGAMSAFYHDSIDIKDAQQRMIAAIRLISKVPTLAAMAYKYSIGQAFVYPRNDLSYAANFLHMCFSVPCEEYKINPVLSRAMDRIFTLHADHEQNASTSTVRLVGSSGANPFACIAAGVACLWGPAHGGANEACLKMLQKIGSVERIPEFIARAKDKNDPFRLMGFGHRVYKNYDPRAKIMQQTCHEVLKELNIQDDPLLDIAIALENTALNDEYFIEKKLYPNVDFYSGITLKALGFPTEMFTVLFALARSIGWVAQWKEMIEDPAQKIGRPRQLYTGYAAREYVSIDKRISKNKMTTQ

SEQ ID NO: 37140 - DNA, 1305 bp, Bradyrhizobium japonicum
  CDS (1)..(1305): transl_table=11
atggacgcaaaagcaagcaataagaccgccacgctgacggtcggaaacaagaactacgatctcccgatccacagcggcagcgtcgggcctgatgtcatcgatatcggcaagctctacggccagtcgggcctgttcacctatgacccgggcttcacctcgaccgcgagctgccagtccaagatcacctatatcgacggcgacgcgggcgtgctggaataccgcggctatccgatcgagcagctcgccgagaacggcgacttcctggagacctgctacctcctgctctacgggaacctgccgaccgccgcgcagaagaaggatttcgacgaccgcgtgatccatcacacgatggtgcacgagcagatggcccgcttcttccagggcttccgccgcgacgcccatccgatggccgtcatggtggcctccgtcggcgcgctcgccgcgttctaccacgactccaccgacatcaacgacccgaagcagcgcatgatcgcttccatgcgcatgatcgcgaagatcccgacgctggcggcgatggcctacaagtacacgatcggccagcccttcgtgtatccgaagaactcgctgaagttcgccgagaacttcctgcacatgtgcttcgccgtgccgtgcgaggagtacaagatcaatccggtgctggctgacgcgctggacaagatcttcatcctgcacgccgaccacgagcagaacgcctcgacctcgacggtgcgcatcgccggctcctccggcgccaacccgttcgcctgcatcgccgccggcatcgcctgcctctggggcccggcccacggcggcgccaacgaagccgcgctcgcgatgctcgccgagatcggttcggtcgacaagattccggaattcatcgccaaggtgaaggacaagaacagcgaagtccgcctgatgggcttcggtcatcgcgtctacaagaactacgatccgcgcgccaagatcatgcagaagatgtgtcacgccgtgctcaaggagaccggccatggcgacgatccgatgctgaaggtggcgatggagctcgagaagatcgcgctcagcgaccagtacttcatcgaccgcaagctgtacccgaacgtcgacttctattcgggcatcacgctgaaggcgatgggcttcccggtctcgatgttcaccgtgctgttcgcggtcgcccgcaccgtcggctggatcagccagtggagcgagatgatcgaggatccgcagcagaagattggtcgtccgcgccagctctacaccggcgtcacccgccgcgactacgtggcgatcaaggatcgcaagtaa

SEQ ID NO: 37141 - protein, 434 aa, Bradyrhizobium japonicum
MDAKASNKTATLTVGNKNYDLPIHSGSVGPDVIDIGKLYGQSGLFTYDPGFTSTASCQSKITYIDGDAGVLEYRGYPIEQLAENGDFLETCYLLLYGNLPTAAQKKDFDDRVIHHTMVHEQMARFFQGFRRDAHPMAVMVASVGALAAFYHDSTDINDPKQRMIASMRMIAKIPTLAAMAYKYTIGQPFVYPKNSLKFAENFLHMCFAVPCEEYKINPVLADALDKIFILHADHEQNASTSTVRIAGSSGANPFACIAAGIACLWGPAHGGANEAALAMLAEIGSVDKIPEFIAKVKDKNSEVRLMGFGHRVYKNYDPRAKIMQKMCHAVLKETGHGDDPMLKVAMELEKIALSDQYFIDRKLYPNVDFYSGITLKAMGFPVSMFTVLFAVARTVGWISQWSEMIEDPQQKIGRPRQLYTGVTRRDYVAIKDRK

SEQ ID NO: 37142 - DNA, 1314 bp, Corynebacterium glutamicum
  CDS (1)..(1314): transl_table=11
atgtttgaaagggatatcgtggctactgataacaacaaggctgtcctgcactaccccggtggcgagttcgaaatggacatcatcgaggcttctgagggtaacaacggtgttgtcctgggcaagatgctgtctgagactggactgatcacttttgacccaggttatgtgagcactggctccaccgagtcgaagatcacctacatcgatggcgatgcgggaatcctgcgttaccgcggctatgacatcgctgatctggctgagaatgccaccttcaacgaggtttcttacctacttatcaacggtgagctaccaaccccagatgagcttcacaagtttaacgacgagattcgccaccacacccttctggacgaggacttcaagtcccagttcaacgtgttcccacgcgacgctcacccaatggcaaccttggcttcctcggttaacattttgtctacctactaccaggaccagctgaacccactcgatgaggcacagcttgataaggcaaccgttcgcctcatggcaaaggttccaatgctggctgcgtacgcacaccgcgcacgcaagggtgctccttacatgtacccagacaactccctcaatgcgcgtgagaacttcctgcgcatgatgttcggttacccaaccgagccatacgagatcgacccaatcatggtcaaggctctggacaagctgctcatcctgcacgctgaccacgagcagaactgctccacctccaccgttcgtatgatcggttccgcacaggccaacatgtttgtctccatcgctggtggcatcaacgctctgtccggcccactgcacggtggcgcaaaccaggctgttctggagatgctcgaagacatcaagagcaaccacggtggcgacgcaaccgagttcatgaacaaggtcaagaacaaggaagacggcgtccgcctcatgggcttcggacaccgcgtttacaagaactacgatccacgtgcagcaatcgtcaaggagaccgcacacgagatcctcgagcacctcggtggcgacgatcttctggatctggcaatcaagctggaagaaattgcactggctgatgattacttcatctcccgcaagctctacccgaacgtagacttctacaccggcctgatctaccgcgcaatgggcttcccaactgacttcttcaccgtattgttcgcaatcggtcgtctgccaggatggatcgctcactaccgcgagcagctcggtgcagcaggcaacaagatcaaccgcccacgccaggtctacaccggcaacgaatcccgcaagttggttcctcgcgaggagcgctaa

SEQ ID NO: 37143 - protein, 437 aa, Corynebacterium glutamicum [sequence omitted]

SEQ ID NO: 37144 - DNA, 1281 bp, Helicobacter pylori J99
  CDS (1)..(1281): transl_table=11
atgtctgttactttaatcaataatgaaaataatgcacgctatgaatttgaaacgattgaatgcactcgtgggccaaaagcggtggatttttccaagctttttgaaacgaccgggtttttttcctacgatccagggtattcttctaccgctgggtgtcaatctaagatcagctatatcaatggcaaaaaaggcgaattgtattacagagggcataggatagaggatttagtcgccaaatacaaatatgtagatgtgtgcaggctattactcacaggggaattacccaaaaatcaagatgaaagcttggaatttgaactggaattgcgccacagaagctttgtgcatgagagcttactcaacatgttttcagctttccctagcaacgcccaccctatggcgaaactctctagcggggtgtctattttatctactctttattccacgcaccaaaacatgcacactgaagaagattaccagactatggccagaaggattgtcgctaaaatccccacgcttgcggctatttgctatcgtaatgaagtgggagcacccattatttatccggacatcgcgcgctcttatgtggaaaatatccttttcatgctgagaggttatccttatagccgattgaaacacaccactcaaggcgaagtgggaatcacgcccctagaagtggaagcctttgataaaatcctaaccttacacgccgatcatgggcaaaacgcctcttctaccacggtaaggaatgtcgctagcaccggcgtgcatccttatgccgccattagcgcgggtattagcgctttatgggggcatttgcatggcggagcgaatgaaaaagtccttttacaattagaagaaatcggcgatgtgaaaaacgtggataaatacatcgcgcgcgtaaaagacaaaaacgacaatttcaaactcatgggctttgggcatagggtgtataaaagctacgatccgcgcgcaaaaatcttaaaaggtctgaaagatgaactgcatcaaaaaggcgttaaaatggacgaacgcttgagcgaaatcgctgcgaaagtggaagaaatcgcgctaaaagacgagtatttcattgaaaggaatctctaccccaatgtggatttttactccggcaccattttaagggctttaaaaatcccggtgcgttttttcacgccggtgtttgtcattggcagaaccgtaggctggtgcgctcaacttttagagcatgtcaaaagcccgcaagccaggatcacgcgcccaagacaagtctatgtaggggattaa

SEQ ID NO: 37145 - protein, 426 aa, Helicobacter pylori J99
MSVTLINNENNARYEFETIECTRGPKAVDFSKLFETTGFFSYDPGYSSTAGCQSKISYINGKKGELYYRGHRIEDLVAKYKYVDVCRLLLTGELPKNQDESLEFELELRHRSFVHESLLNMFSAFPSNAHPMAKLSSGVSILSTLYSTHQNMHTEEDYQTMARRIVAKIPTLAAICYRNEVGAPIIYPDIARSYVENILFMLRGYPYSRLKHTTQGEVGITPLEVEAFDKILTLHADHGQNASSTTVRNVASTGVHPYAAISAGISALWGHLHGGANEKVLLQLEEIGDVKNVDKYIARVKDKNDNFKLMGFGHRVYKSYDPRAKILKGLKDELHQKGVKMDERLSEIAAKVEEIALKDEYFIERNLYPNVDFYSGTILRALKIPVRFFTPVFVIGRTVGWCAQLLEHVKSPQARITRPRQVYVGD

SEQ ID NO: 37146 - DNA, 1281 bp, Helicobacter pylori
  CDS (1)..(1281): transl_table=11
atgtctgtcactttagtcaataatgaaaataatgaacgctatgaatttgaaacgattgaaagcactcgtgggcctaaagcggtggatttttccaagctttttgaaacgaccgggtttttttcttacgatccagggtattcttctaccgctggatgccaatctaagatcagctatgtcaatggcaaaaaaggcgaattgtattacagagggcataggatagaagatttagtcgccaaatacaaatatgtagatgtgtgcaaattactcctcacaggggaattacccaaaaatcaagatgaaagcttggaatttgaattggaattgcgccacaggagctttgtgcatgagagcttactcaacatgttttcagccttccctagcaacgcccaccctatggcgaaactctctagcggagtgtctatcttatccaccctttattccacgcaccaaaacatgcacactgaagaagattaccaaactatggccagaaggattgtcgctaaaatccccacgcttgcggctatttgctatcgtaatgaagtgggagcgcctatcatttatccggacatcgcacgctcttatgtggaaaatatccttttcatgctgagagggtatccttatagtcgcttaaaacacaccactcaaggcgaagtggaaatcacgcccctagaagtggaagcctttgataaaatcctaaccttgcacgctgatcacagccaaaacgcctcttctaccacggtaaggaatgtcgctagcaccggcgtgcatccttatgccgccattagcgcgggcattagcgctttatgggggcatttgcatggcggagcgaatgaaaaagtccttttacaattagaagaaatcggcgatgtgaaaaatgtggataaatacatcgcgcgagtgaaagacaaaaacgacaatttcaaactcatgggctttgggcatagggtgtataaaagctacgatccgcgcgctaaaatcttaaaaggcttgaaagacgaactgcaccaaaaaggcgttaaaatggacgagaggttgagcgaaatcgccgcgaaagtggaagaaatcgcgctaaaagacgagtatttcattgaaaggaatctctaccctaatgtggatttttactccggcaccattttaagggctttaaaaatcccggtgcgttttttcacgccggtgtttgtcattggccgaaccgtaggctggtgcgctcagcttttagagcatgtcaaaagcccgcaagccaggatcacacgcccaagacaagtctatgtaggggattaa

SEQ ID NO: 37147 - protein, 426 aa, Helicobacter pylori
MSVTLVNNENNERYEFETIESTRGPKAVDFSKLFETTGFFSYDPGYSSTAGCQSKISYVNGKKGELYYRGHRIEDLVAKYKYVDVCKLLLTGELPKNQDESLEFELELRHRSFVHESLLNMFSAFPSNAHPMAKLSSGVSILSTLYSTHQNMHTEEDYQTMARRIVAKIPTLAAICYRNEVGAPIIYPDIARSYVENILFMLRGYPYSRLKHTTQGEVEITPLEVEAFDKILTLHADHSQNASSTTVRNVASTGVHPYAAISAGISALWGHLHGGANEKVLLQLEEIGDVKNVDKYIARVKDKNDNFKLMGFGHRVYKSYDPRAKILKGLKDELHQKGVKMDERLSEIAAKVEEIALKDEYFIERNLYPNVDFYSGTILRALKIPVRFFTPVFVIGRTVGWCAQLLEHVKSPQARITRPRQVYVGD

SEQ ID NO: 37148 - DNA, 1287 bp, Pseudomonas aeruginosa
  CDS (1)..(1287): transl_table=11
atggctgacaaaaaagcgcagttgatcatcgagggctcagcccccgtcgaactgcccgtcctatccggtaccatgggtcccgatgtagtggatgtacggggcctcaccgccacgggccacttcaccttcgatcctggcttcatgtcgaccgcctcctgcgagtcgaagatcacctatatcgacggcgacaaaggcgtcctcctccatcgcggctaccccatcgagcaactggcagagaaatccgactacctggaaacctgctacctgctgctgaacggcgagctgcccaccgccgcgcagaaggaacagttcgtcggcaccatcaagaaccacaccatggttcacgagcagttgaagaccttcttcaacggcttccgccgcgacgcccacccgatggccgtgatgtgcggcgtgatcggcgccctctcggccttctaccacgactccctggacatcaataacccgaagcatcgcgaagtctccgcgcatcgcctgatcgccaagatgccgaccatcgccgccatggtgtacaagtactccaagggcgagccgatgatgtatccgcgtaacgacctgaactacgcggaaaacttcctgcacatgatgttcaacaccccctgcgagaccaagccgatcagccccgtgctggccaaggccatggaccgcatcttcattctccacgccgaccacgagcagaacgcctccacctccacggtgcgtctggccggctcctccggcgccaatccgttcgcctgcatcgcctccggcatcgccgccctgtggggaccggcccatggcggcgcgaacgaagcggtgctgcgcatgctcgacgagatcggcgacgtgtccaacatcgacaagttcgtcgagaaggccaaggacaagaacgatccgttcaagctgatgggcttcggccatcgtgtctacaagaacttcgacccgcgcgccaaggtcatgaagcagacctgcgacgaggtcctccaggagctgggcatcaacgacccgcaactggaactggcgatgaagctagaagaaatcgcccgccacgacccctacttcgtggaacgcaacctgtacccgaacgtcgacttctactcggggatcatcctcaaggcgatcggcattccgaccagcatgttcaccgtgatcttcgccctggcgcgtaccgtcggctggatctcgcactggcaggaaatgctctccggcccctacaagatcggccgcccgcgccagctctataccggccacacccagcgcgacttcaccgccctcaaggatcgcggctga

SEQ ID NO: 37149 - protein, 428 aa, Pseudomonas aeruginosa
MADKKAQLIIEGSAPVELPVLSGTMGPDVVDVRGLTATGHFTFDPGFMSTASCESKITYIDGDKGVLLHRGYPIEQLAEKSDYLETCYLLLNGELPTAAQKEQFVGTIKNHTMVHEQLKTFFNGFRRDAHPMAVMCGVIGALSAFYHDSLDINNPKHREVSAHRLIAKMPTIAAMVYKYSKGEPMMYPRNDLNYAENFLHMMFNTPCETKPISPVLAKAMDRIFILHADHEQNASTSTVRLAGSSGANPFACIASGIAALWGPAHGGANEAVLRMLDEIGDVSNIDKFVEKAKDKNDPFKLMGFGHRVYKNFDPRAKVMKQTCDEVLQELGINDPQLELAMKLEEIARHDPYFVERNLYPNVDFYSGIILKAIGIPTSMFTVIFALARTVGWISHWQEMLSGPYKIGRPRQLYTGHTQRDFTALKDRG

SEQ ID NO: 37150 - DNA, 1308 bp, Rickettsia conorii
  CDS (1)..(1308): transl_table=11
atgaccaatgaaaataataatgattcagaatttgctgaattaaaaatcagaggaaaaatatttaaattacctatacttaaagcaagtatcggtgaggatgtaatcgatataagtagggtatctgcggaagccgattgctttacttacgacccgggttttatgtctactgcttcttgtcagtctactatcacctatatagacggtgataaaggaatcttgcggcatcgaggatatgatattaaagacttagctgagaaaagtgattttttagaagtggcatatttactgatttatggggaactaccaagtggcgagcagtataataatttcactaaacaggttgctcatcattcattagtgaatgaaagattacactatttatttcaaaccttttgtagctcttctcatcctatggctattatgcttgcggctgtcggttctctttcggcattttatcctgatttattgaattttaaggaagcagattacgaacttaccgctattagaatgattgctaagatacctaccatcgctgcaatgtcttataaatattctataggacaaccgtttatttatcctgataattcgttagattttaccgaaaattttctgcatatgatgtttgcaacgccttgtacgaaatatacagtaaatccaataataaaaaatgctcttaataagatatttatcctacatgccgatcatgagcagaatgcttctacttcaacagtccgaattgctggctcatccggagctaacccttttgcttgtattagcacgggtattgcctcactttggggacctgctcacggcggggctaatgaagcggtaataaatatgattaaagaaatcggtagttctgagtatattcctaaatatatagctaaagctaaggataaaaatgatccatttagattaatgggttttggtcatcgtgtatataaaaactatgacccgcgtgccgcagtacttaaagaaacgtgcaaagaagtattaaaggaactcgggcagctagacaacaatccgttcttacaaatagcaatagaacttgaagctatcgctcttaaagatgaatattttattgagagaaaattatatccaaatgttgatttttattcgggtattatctataaagctatgggtataccgtcgcaaatgttcacggtactttttgcaatagcaagaaccgtaggctggatggcacaatggaaagaaatgcacgaagaccctgaacaaaaaatcagcagacctagacagctttacaccggttatgtacatagagagtataagggtattcgggagaggtaa

SEQ ID NO: 37151 - protein, 435 aa, Rickettsia conorii
MTNENNNDSEFAELKIRGKIFKLPILKASIGEDVIDISRVSAEADCFTYDPGFMSTASCQSTITYIDGDKGILRHRGYDIKDLAEKSDFLEVAYLLIYGELPSGEQYNNFTKQVAHHSLVNERLHYLFQTFCSSSHPMAIMLAAVGSLSAFYPDLLNFKEADYELTAIRMIAKIPTIAAMSYKYSIGQPFIYPDNSLDFTENFLHMMFATPCTKYTVNPIIKNALNKIFILHADHEQNASTSTVRIAGSSGANPFACISTGIASLWGPAHGGANEAVINMIKEIGSSEYIPKYIAKAKDKNDPFRLMGFGHRVYKNYDPRAAVLKETCKEVLKELGQLDNNPFLQIAIELEAIALKDEYFIERKLYPNVDFYSGIIYKAMGIPSQMFTVLFAIARTVGWMAQWKEMHEDPEQKISRPRQLYTGYVHREYKGIRER

SEQ ID NO: 37152 - DNA, 1308 bp, Rickettsia felis
  CDS (1)..(1308): transl_table=11
atgaccaatgaaaatagtaatgattcagaatttgccgaattaaaaatcagaggaaaaatatttaaattacctatacttaaagcaagtattggtgaggatgtaatcgatataagcagggtatcttcggaagccgattgttttacttatgacccgggctttatgtctactgcttcttgtcagtctactatcacttatatagacggtgataaaggaatcttgcgacatcgaggatatgacattaaagatttagccgagaaaagtgattttttagaagtggcatatttgctaatctacggagaattgccaagcatcgagcagtataataatttcactaaacaggttgctcatcattcattagtgaatgaaagattacactatttatttcaaacattttgtagctcttctcatcctatggctattatgcttgcggccgttggttctctttcggcattttatcctgatttactgaattttaaagaagcagactacgaacttaccgctattagaatgattgctaagataccaactatcgccgcaatgtcctataaatattctataggacaaccgtttatttatcctgataattcgttagattttactgaaaattttctgcatatgatgtttgcaacgccttgtacaaaatataaagtaaatccaataataaaaaatgctcttaataaaatatttattctgcatgctgaccatgagcagaacgcttctacttcaacagtccgaattgccggctcatccggggctaacccttttgcttgcgtaagtacagggattgcctcactttgggggcctgcccacggcggggctaatgaagcggtaataaatatgcttaaagaaatcggtagttctgagaatattcctaaatatatagctaaagctaaggataaaaatgatccgtttaggttaatgggtttcggtcatcgtgtttataaaaactatgacccacgtgccgcagtacttaaagaaacttgcaaagaagtattaaaggaactcggacagctagaaaacaatccgcttttgcaaatagcaatagaacttgaagctatcgctcttaaagatgaatattttattgagagaaaattatatccaaatgttgatttttattcaggtattatctataaagctatgggtataccgtcgcaaatgtttacggtactttttgcaatagcaagaaccgtaggctggatggcacagtggaaagaaatgcacgaagaccctgaacaaaaaatcagcagacctagacagctttacaccggttatgtacatagagagtataagggtatcggggagaggtag

SEQ ID NO: 37153 - protein, 435 aa, Rickettsia felis
MTNENSNDSEFAELKIRGKIFKLPILKASIGEDVIDISRVSSEADCFTYDPGFMSTASCQSTITYIDGDKGILRHRGYDIKDLAEKSDFLEVAYLLIYGELPSIEQYNNFTKQVAHHSLVNERLHYLFQTFCSSSHPMAIMLAAVGSLSAFYPDLLNFKEADYELTAIRMIAKIPTIAAMSYKYSIGQPFIYPDNSLDFTENFLHMMFATPCTKYKVNPIIKNALNKIFILHADHEQNASTSTVRIAGSSGANPFACVSTGIASLWGPAHGGANEAVINMLKEIGSSENIPKYIAKAKDKNDPFRLMGFGHRVYKNYDPRAAVLKETCKEVLKELGQLENNPLLQIAIELEAIALKDEYFIERKLYPNVDFYSGIIYKAMGIPSQMFTVLFAIARTVGWMAQWKEMHEDPEQKISRPRQLYTGYVHREYKGIGER

SEQ ID NO: 37154 - DNA, 1311 bp, Rickettsia prowazekii
  CDS (1)..(1311): transl_table=11
atgactaatggcaataataataacttagaatttgcagaattaaaaattagaggtaaactatttaagttacctatacttaaagcaagtatcggtaaagatgtaatcgatataagtagggtatctgcggaagccgattactttacttatgatccgggttttatgtctactgcttcttgtcaatctactatcacatatatagacggtgataaaggcatattatggtatcgaggatatgatattaaagacttagctgagaaaagtgattttttagaagtggcatatttgatgatttatggggagctaccaagtagtgatcagtattgtaattttactaaaaaggttgctcatcattcattagtgaatgaaagattacactatttatttcaaaccttttgtagttcttctcatcctatggctattatgcttgcagctgttggttctctttcagcattctatcctgatttattaaattttaatgaaacagactatgaacttaccgctattagaatgattgctaagatacctactatcgctgcaatgtcttataaatattctatagggcaaccgtttatttatcctgataattcattagattttaccgaaaattttctacatatgatgtttgcaactccttgtactaaatataaagtaaatccaataataaaaaatgctcttaataagatatttatcttacatgcagaccatgagcagaatgcttctacttcaacagttcggattgctggctcatcaggagctaatccttttgcatgtattagcactggtattgcatcactttgggggcctgctcacggcggggctaatgaagcagtgataaatatgcttaaagaaattggcagttctgagaatattcctaaatatgtagctaaagctaaagataagaatgatccatttaggttaatgggttttggtcatcgagtatataaaagctatgacccgcgtgccgcagtacttaaagaaacttgtaaagaagtattaaatgaattaggtcagttagacaataatccgctgttacaaatagcaatagaacttgaagctctcgctcttaaagatgaatattttattgaaagaaaattatatccaaatgttgatttttattcaggcattatctataaagctatgggtataccgtcgcaaatgttcactgtactttttgcaatagcaagaaccgtaggttggatggcacaatggaaagaaatgcacgaagatcctgaacaaaaaatcagtagacctagacagctttacactggttatgtacatagagagtataagtgtattgtagaaagaaagtga

SEQ ID NO: 37155 - protein, 436 aa, Rickettsia prowazekii
MTNGNNNNLEFAELKIRGKLFKLPILKASIGKDVIDISRVSAEADYFTYDPGFMSTASCQSTITYIDGDKGILWYRGYDIKDLAEKSDFLEVAYLMIYGELPSSDQYCNFTKKVAHHSLVNERLHYLFQTFCSSSHPMAIMLAAVGSLSAFYPDLLNFNETDYELTAIRMIAKIPTIAAMSYKYSIGQPFIYPDNSLDFTENFLHMMFATPCTKYKVNPIIKNALNKIFILHADHEQNASTSTVRIAGSSGANPFACISTGIASLWGPAHGGANEAVINMLKEIGSSENIPKYVAKAKDKNDPFRLMGFGHRVYKSYDPRAAVLKETCKEVLNELGQLDNNPLLQIAIELEALALKDEYFIERKLYPNVDFYSGIIYKAMGIPSQMFTVLFAIARTVGWMAQWKEMHEDPEQKISRPRQLYTGYVHREYKCIVERK

SEQ ID NO: 37156 - DNA, 1311 bp, Rickettsia typhi
  CDS (1)..(1311): transl_table=11
atgactaatggaaataataataatttagaatttgcggaattaaaaattagaggtaaaatgtttaaattacctatacttaaagcaagtataggtaaagatgtaatagatataagtagggtatctgcggaagccgattgctttacttacgatccaggttttatgtctactgcttcttgtcaatctaccatcacatatatagacggtgataaaggaatcttatggcatcgaggatatgatattaaagacttagctgagaaaagtgattttttagaagtggcatatttgatgatttatggggaactaccaagtagtgagcagtatcataattttactacaaagattgctcatcatgcattagtaaatgaaagattacactatttatttcaaaccttttgtagttcttctcatcctatggctattatgcttgcagctgttggttctctttcagcattttatcctgatttattgaattttaatgaaacagactatgaacttaccgctattagaatgattgctaagatacctactatcgctgcaatgtcttataaatattctatagggcagccatttatttatcctgataattcattagattttaccgaaaattttctacatatgatgtttgcaactccttgtactaaatataaagtaaatccaataataaaaaatgcgcttaataagatatttatcttacatgcagaccatgagcagaatgcttctacttcaacagtacgaattgctggctcatcaggagctaatccttttgcatgtattagcactggtattgcatcactttgggggcctgctcacggtggagctaatgaagcagtgataaatatgcttaaagaaattggtagttctgagaatattcctaaatatgtagctaaagctaaagacaaaaatgatccatttaggttaatgggttttggtcatcgagtatataaaagttatgacccgcgtgctgcagtacttaaagaaacttgtaaagaagtattaaatgaactagggcagttagaaaataatccgttgttacaaatagcaatagaacttgaagctcttgctcttaaagatgaatattttattgagagaaaattatatccaaatgttgatttttattcaggcattatctataaagctatgggtataccgtcgcaaatgttcactgtactttttgcaatagcaagaaccgtaggttggatggcgcaatggaaagaaatgcacgaagatcctgaacaaaaaatcagtagacctagacaactttacactggttatgtacatagagaatataagtgtattgtagaaagaaagtga

SEQ ID NO: 37157 - protein, 436 aa, Rickettsia typhi
MTNGNNNNLEFAELKIRGKMFKLPILKASIGKDVIDISRVSAEADCFTYDPGFMSTASCQSTITYIDGDKGILWHRGYDIKDLAEKSDFLEVAYLMIYGELPSSEQYHNFTTKIAHHALVNERLHYLFQTFCSSSHPMAIMLAAVGSLSAFYPDLLNFNETDYELTAIRMIAKIPTIAAMSYKYSIGQPFIYPDNSLDFTENFLHMMFATPCTKYKVNPIIKNALNKIFILHADHEQNASTSTVRIAGSSGANPFACISTGIASLWGPAHGGANEAVINMLKEIGSSENIPKYVAKAKDKNDPFRLMGFGHRVYKSYDPRAAVLKETCKEVLNELGQLENNPLLQIAIELEALALKDEYFIERKLYPNVDFYSGIIYKAMGIPSQMFTVLFAIARTVGWMAQWKEMHEDPEQKISRPRQLYTGYVHREYKCIVERK

SEQ ID NO: 37158 - DNA, 1134 bp, Sulfolobus solfataricus
  CDS (1)..(1134): transl_table=11
atgagtgtcgtaagtaaaggtttggagaatgttattataaaggttacaaatttaacattcatagatggggagaaaggaatactgaggtatagaggatataatattgaagatctagttaactatggcagttacgaagagactatctacttaatgctttatggaaaattacctacaaagaaagaattaaacgatttaaaggctaaacttaatgaggaatacgaggtacctcaggaagttttagacacaatataccttatgccgaaagaagcagacgcaataggtcttttagaagtaggaacagcagcattagcctctattgataagaactttaaatggaaggaaaacgataaagaaaaagcaattagcattattgctaaaatggctactctagtagcaaatgtatatagaagaaaggagggtaataagccaagaattccagagccctcagatagttttgcaaaaagctttcttttagcgagtttcgctagggaacctactacagatgagataaacgcaatggataaggcgttaatactttatactgatcatgaagtgccagcatcgacaacggcagcacttgttgcagcatccactttgtcggatatgtattcttcccttactgcagccttagctgcgttaaaaggtccattacatggtggagcagctgaagaggcttttaagcaattcattgaaataggtgatccaaatagagtacaaaactggtttaatgataaggtagtgaatcagaagaatagactaatgggatttggtcatagagtttacaagacttatgatcccagggcaaagatatttaagaaactagccttaacgctaattgaaaggaatgctgatgcaaggagatattttgagatagctcaaaaacttgaggagttgggaattaagcaattttctagcaagggaatctatcctaacactgatttctattctggaatagtcttctacgctttaggatttccagtatacatgtttactgccttatttgccttatcgagaactttaggttggttagcacatataatagaatatgtagaggaacagcacagacttattagaccaagagccttatatgttggaccagaatatcaagagtatgtttctatagataaacgataa

SEQ ID NO: 37159 - protein, 377 aa, Sulfolobus solfataricus
MSVVSKGLENVIIKVTNLTFIDGEKGILRYRGYNIEDLVNYGSYEETIYLMLYGKLPTKKELNDLKAKLNEEYEVPQEVLDTIYLMPKEADAIGLLEVGTAALASIDKNFKWKENDKEKAISIIAKMATLVANVYRRKEGNKPRIPEPSDSFAKSFLLASFAREPTTDEINAMDKALILYTDHEVPASTTAALVAASTLSDMYSSLTAALAALKGPLHGGAAEEAFKQFIEIGDPNRVQNWFNDKVVNQKNRLMGFGHRVYKTYDPRAKIFKKLALTLIERNADARRYFEIAQKLEELGIKQFSSKGIYPNTDFYSGIVFYALGFPVYMFTALFALSRTLGWLAHIIEYVEEQHRLIRPRALYVGPEYQEYVSIDKR

SEQ ID NO: 37160 - DNA, 1194 bp, Synechocystis sp
  CDS (1)..(1194): transl_table=11
gtgaattatatgatgactgataacgaagtgtttaaagaaggcctagccggagtccccgccgctaaatcgagggtgagccatgtggatggcaccgacggtattttggagtaccggggcattcgcatcgaagaattagccaaatccagtagttttatcgaagtagcctatctgctcatctggggtaaattgcccacccaggcagagatcgaagagtttgagtacgaaattcgcacccatcgacgcattaagtaccacatccgggacatgatgaaatgttttcccgaaacagggcaccccatggatgccttgcaaacttcagcggcggccttgggattgttctatgctcgacgggccttggatgaccccaaatatatccgggcggcggtggtgcgtctgttagccaaaatccccaccatggtggcagctttccacatgatccgggagggtaacgatcccattcagcccaatgataaattggattacgcttccaacttcctttacatgctgacggagaaggagccagacccctttgccgccaaagtgtttgatgtgtgtttgaccctccatgctgagcacaccatgaatgcgtccaccttttcggcccgggtaacggcttctactctcacggatccctatgcagtggttgcctcggcggtggggactttggcggggccgctccacgggggagccaacgaagaagtgctaaatatgcttgaagaaattggctcagtggaaaatgtccgcccctacgtggaaaaatgcctggccaacaaacagcgcatcatgggctttggccaccgagtttataaagtcaaagacccccgggcaattattttgcaggatttggctgaacagttatttgccaaaatgggccacgacgaatattacgaaatcgcagtggagttggaaaaagtagtggaagaatacgtgggtcaaaagggcatttaccccaatgtggacttctattccggtttggtttaccgcaagctagacatccccgccgatctgtttacgcccctatttgcgatcgccagggtggcgggttggttggcccactggaaggaacaattatcagtcaataaaatttaccgtcctacccaaatttacatcggtgaccataatttatcttatgttcccatgacagaacgggtagtttccgtggcccgcaatgaagaccccaatgcgattatttaa

SEQ ID NO: 37161 - protein, 397 aa, Synechocystis sp
MNYMMTDNEVFKEGLAGVPAAKSRVSHVDGTDGILEYRGIRIEELAKSSSFIEVAYLLIWGKLPTQAEIEEFEYEIRTHRRIKYHIRDMMKCFPETGHPMDALQTSAAALGLFYARRALDDPKYIRAAVVRLLAKIPTMVAAFHMIREGNDPIQPNDKLDYASNFLYMLTEKEPDPFAAKVFDVCLTLHAEHTMNASTFSARVTASTLTDPYAVVASAVGTLAGPLHGGANEEVLNMLEEIGSVENVRPYVEKCLANKQRIMGFGHRVYKVKDPRAIILQDLAEQLFAKMGHDEYYEIAVELEKVVEEYVGQKGIYPNVDFYSGLVYRKLDIPADLFTPLFAIARVAGWLAHWKEQLSVNKIYRPTQIYIGDHNLSYVPMTERVVSVARNEDPNAII

SEQ ID NO: 37162 - DNA, 1161 bp, Thiobacillus ferrooxidans
  CDS (1)..(1161): transl_table=11
atggcggaaccgaactttgcgccaggtctggagggtgtggctgcaacccagtccagcatttccaacatcgatggcgctgccggcctgctgagttaccgtggttttgccattgcggatcttgcggcgcacagcagtttcgaggaggtggcgctcttgctgctggatggtgtcctgcccggcgccgcagatctggaacggttcgaccacggtctgcgtgcgcaccgccaagtcaaatataatgtccgggaaatcatgaagttcatgcccgtgaccggacaccccatggatatgctgcactgtgccgtggccagtctgggcatgttctacccgcagcaggagctttccgatgccgaacgcggaaatacgctccatttggacgccatggcgatgcggattatcgcgcgcatgcccaccattgtcgcgatgtgggagcagatgcgtttcggcaatgatcctatttcacctcgcccggatctcagccatgcggccaactttctctatatgctgtcgggtcgcgaacctgatccggcccataccaaaatcctcgactcctgcctgattctgcatgccgagcacaccatcaatgccagtaccttctcggtactggtgaccggatccaccctgaccaatccttaccatgtcatcgggggggcgatcggaaccctggccggcccgttgcatggtggtgccaatcagaaggtggtggaaatgctggaagaaatcagctccgtccagcaggtgggtgcctatctcgacaggaagatggccaacaaggagaagatctggggtttcgggcatcgcatctacaaaacccgcgatccgcgtgcagtgattctcaaggggatgatggaggatatggccagtcatggaaatctgcggcatagcagcctctttgaaattgccatcgaagtggaacgccaggctacggagcggctcggtgcccaagggattcacgccaatgtggatttctattcgggcgtgctgtatcacgagatgggcatcaaagcggacctttttacgcctatttttgctatggctcgttctgcgggctggctggctcactggcgggagcaactggcggataaccggatcttccggcctacgcaggtgtatacaggggaacaggatcgacgctatgtgcctgtggcccaacgtacttag

SEQ ID NO: 37163 - protein, 386 aa, Thiobacillus ferrooxidans
MAEPNFAPGLEGVAATQSSISNIDGAAGLLSYRGFAIADLAAHSSFEEVALLLLDGVLPGAADLERFDHGLRAHRQVKYNVREIMKFMPVTGHPMDMLHCAVASLGMFYPQQELSDAERGNTLHLDAMAMRIIARMPTIVAMWEQMRFGNDPISPRPDLSHAANFLYMLSGREPDPAHTKILDSCLILHAEHTINASTFSVLVTGSTLTNPYHVIGGAIGTLAGPLHGGANQKVVEMLEEISSVQQVGAYLDRKMANKEKIWGFGHRIYKTRDPRAVILKGMMEDMASHGNLRHSSLFEIAIEVERQATERLGAQGIHANVDFYSGVLYHEMGIKADLFTPIFAMARSAGWLAHWREQLADNRIFRPTQVYTGEQDRRYVPVAQRT

SEQ ID NO: 37164 - DNA, 1551 bp, Cucurbita maxima
  CDS (1)..(1551)
atgcccaccgacatggaattgtcgccttcgaacgttgctcgtcatcgcttggccgttctggcagcgcatctgagcgctgcgtccttggaaccgccggtgatggcttcgtccctcgaggctcattgcgtgtcagctcagaccatggttgcgccgcctgaattggtgaagggtacgttgacgattgtagatgagagaactggaaagaggtaccaggtccaggtatctgaagaaggcacgatcaaggccaccgatttgaagaagataactacaggaccaaatgacaaggggcttaagctgtatgatccaggctatctcaacactgctccagttcggtcgtcgatcagttatattgatggtgacttgggaattcttaggtacagaggctacccgattgaggaattggctgagagtagtacctatgtggaagttgcatacctcttgatgtatgggaatttgccttctcagagtcaattggcagactgggaatttgctatttctcagcattcggctgtaccgcagggacttgtggatattattcaagcaatgcctcatgatgcacatccaatgggtgtgcttgttagtgcaatgagtgctctatctgtctttcatccagatgccaatcctgcccttagaggacaagatctttacaagtctaagcaagtgagagacaaacaaatagctcgtattatagggaaggctcccaccattgcagcagcagcttatcttagacttgctggaagacctccagttctcccttccagcaatctttcttattcggagaatttcctgtacatgcttgattctttgggtaataggtcttacaaacccaatcctcggcttgctagagtcctcgacattctattcatccttcatgcagaacatgaaatgaactgctcaacatctgctgctcgccatctggcttcaagtggtgttgatgtgttcactgctctttctggagctgtcggagcactgtatggccctcttcatggtggggccaatgaggctgtgcttaaaatgctaagtgagattggaactgttaataatattccagaattcatcgagggtgttaaaaacaggaaaaggaagatgtcaggttttggccatagggtttacaagaactacgatccaagagctaaggttataagaaaacttgccgaagaagtgttttccattgttggtcgggatcctctcattgaggtggctgttgctctggagaaggctgctctttcagatgagtattttgtcaagaggaaattatacccaaacgttgacttttactccggattaatatatagggctatgggatttccacctgaatttttcactgtgctgtttgcaatccctcgaatggctggatacttggcacattggcgagaatcgctggatgatcccgacactaagataattcgacctcaacaggtctacactggggaatggctgcgacattatataccacccaacgaacgacttgtaccggccaaggcagacaggcttggtcaggtttccgtttccaacgcctccaaacgccgattgtctggatcggggatctag

SEQ ID NO: 37165 - protein, 516 aa, Cucurbita maxima
MPTDMELSPSNVARHRLAVLAAHLSAASLEPPVMASSLEAHCVSAQTMVAPPELVKGTLTIVDERTGKRYQVQVSEEGTIKATDLKKITTGPNDKGLKLYDPGYLNTAPVRSSISYIDGDLGILRYRGYPIEELAESSTYVEVAYLLMYGNLPSQSQLADWEFAISQHSAVPQGLVDIIQAMPHDAHPMGVLVSAMSALSVFHPDANPALRGQDLYKSKQVRDKQIARIIGKAPTIAAAAYLRLAGRPPVLPSSNLSYSENFLYMLDSLGNRSYKPNPRLARVLDILFILHAEHEMNCSTSAARHLASSGVDVFTALSGAVGALYGPLHGGANEAVLKMLSEIGTVNNIPEFIEGVKNRKRKMSGFGHRVYKNYDPRAKVIRKLAEEVFSIVGRDPLIEVAVALEKAALSDEYFVKRKLYPNVDFYSGLIYRAMGFPPEFFTVLFAIPRMAGYLAHWRESLDDPDTKIIRPQQVYTGEWLRHYIPPNERLVPAKADRLGQVSVSNASKRRLSGSGI

SEQ ID NO: 37166 - DNA, 25 bp, Artificial sequence
  Primer sequence
atggctgatacaaaagcaaaactca

SEQ ID NO: 37167 - DNA, 26 bp, Artificial sequence
  Primer sequence
ttaacgcttgatatcgcttttaaagt

SEQ ID NO: 37168 - protein, 436 aa, Artificial sequence
  Consensus
  Variant (2)..(13): Xaa in position 2 to 13 is any amino acid
  Variant (14)..(25): Xaa in position 14 to 25 is any or no amino acid
  Variant (27)..(34): Xaa in position 27 to 34 is any amino acid
  Variant (36)..(36): Xaa in position 36 is any amino acid
  Variant (43)..(43): Xaa in position 43 is any amino acid
  Variant (44)..(44): Xaa in position 44 is any or no amino acid
  Variant (46)..(46): Xaa in position 46 is any or no amino acid
  Variant (48)..(48): Xaa in position 48 is any amino acid
  Variant (53)..(53): Xaa in position 53 is any amino acid
  Variant (55)..(56): Xaa in position 55 to 56 is any amino acid
  Variant (59)..(62): Xaa in position 59 to 62 is any amino acid
  Variant (63)..(63): Xaa in position 63 is any or no amino acid
  Variant (65)..(65): Xaa in position 65 is any amino acid
  Variant (67)..(68): Xaa in position 67 to 68 is any amino acid
  Variant (73)..(73): Xaa in position 73 is any amino acid
  Variant (75)..(75): Xaa in position 75 is any amino acid
  Variant (78)..(84): Xaa in position 78 to 84 is any amino acid
  Variant (85)..(86): Xaa in position 85 to 86 is any or no amino acid
  Variant (88)..(90): Xaa in position 88 to 90 is any amino acid
  Variant (92)..(96): Xaa in position 92 to 96 is any amino acid
  Variant (98)..(100): Xaa in position 98 to 100 is any amino acid
  Variant (102)..(107): Xaa in position 102 to 107 is any amino acid
  Variant (109)..(110): Xaa in position 109 to 110 is any amino acid
  Variant (111)..(112): Xaa in position 111 to 112 is any or no amino acid
  Variant (117)..(118): Xaa in position 117 to 118 is any amino acid
  Variant (120)..(124): Xaa in position 120 to 124 is any amino acid
  Variant (128)..(128): Xaa in position 128 is any amino acid
  Variant (131)..(140): Xaa in position 131 to 140 is any amino acid
  Variant (141)..(158): Xaa in position 141 to 158 is any or no amino acid
  Variant (168)..(168): Xaa in position 168 is any amino acid
  Variant (170)..(171): Xaa in position 170 to 171 is any amino acid
  Variant (174)..(176): Xaa in position 174 to 176 is any amino acid
  Variant (178)..(180): Xaa in position 178 to 180 is any amino acid
  Variant (182)..(182): Xaa in position 182 is any amino acid
  Variant (184)..(186): Xaa in position 184 to 186 is any amino acid
  Variant (188)..(188): Xaa in position 188 is any amino acid
  Variant (190)..(191): Xaa in position 190 to 191 is any amino acid
  Variant (195)..(195): Xaa in position 195 is any amino acid
  Variant (197)..(205): Xaa in position 197 to 205 is any amino acid
  Variant (206)..(220): Xaa in position 206 to 220 is any or no amino acid
  Variant (222)..(222): Xaa in position 222 is any amino acid
  Variant (225)..(227): Xaa in position 225 to 227 is any amino acid
  Variant (235)..(235): Xaa in position 235 is any amino acid
  Variant (237)..(237): Xaa in position 237 is any amino acid
  Variant (240)..(240): Xaa in position 240 is any amino acid
  Variant (242)..(242): Xaa in position 242 is any amino acid
  Variant (245)..(245): Xaa in position 245 is any amino acid
  Variant (249)..(252): Xaa in position 249 to 252 is any amino acid
  Variant (255)..(255): Xaa in position 255 is any amino acid
  Variant (261)..(262): Xaa in position 261 to 262 is any amino acid
  Variant (264)..(264): Xaa in position 264 is any amino acid
  Variant (267)..(267): Xaa in position 267 is any amino acid
  Variant (274)..(275): Xaa in position 274 to 275 is any amino acid
  Variant (277)..(277): Xaa in position 277 is any amino acid
  Variant (280)..(281): Xaa in position 280 to 281 is any amino acid
  Variant (283)..(287): Xaa in position 283 to 287 is any amino acid
  Variant (288)..(290): Xaa in position 288 to 290 is any or no amino acid
  Variant (292)..(293): Xaa in position 292 to 293 is any amino acid
  Variant (296)..(303): Xaa in position 296 to 303 is any amino acid
  Variant (304)..(307): Xaa in position 304 to 307 is any or no amino acid
  Variant (319)..(320): Xaa in position 319 to 320 is any amino acid
  Variant (325)..(325): Xaa in position 325 is any amino acid
  Variant (328)..(333): Xaa in position 328 to 333 is any amino acid
  Variant (335)..(341): Xaa in position 335 to 341 is any amino acid
  Variant (342)..(352): Xaa in position 342 to 352 is any or no amino acid
  Variant (355)..(356): Xaa in position 355 to 356 is any amino acid
  Variant (359)..(359): Xaa in position 359 is any amino acid
  Variant (360)..(360): Xaa in position 360 is any or no amino acid
  Variant (363)..(363): Xaa in position 363 is any amino acid
  Variant (364)..(365): Xaa in position 364 to 365 is any or no amino acid
  Variant (368)..(368): Xaa in position 368 is any amino acid
  Variant (369)..(369): Xaa in position 369 is any or no amino acid
  Variant (371)..(371): Xaa in position 371 is any amino acid
  Variant (384)..(385): Xaa in position 384 to 385 is any amino acid
  Variant (389)..(389): Xaa in position 389 is any amino acid
  Variant (391)..(392): Xaa in position 391 to 392 is any amino acid
  Variant (396)..(396): Xaa in position 396 is any or no amino acid
  Variant (401)..(401): Xaa in position 401 is any amino acid
  Variant (403)..(404): Xaa in position 403 to 404 is any amino acid
  Variant (409)..(409): Xaa in position 409 is any amino acid
  Variant (411)..(411): Xaa in position 411 is any amino acid
  Variant (413)..(418): Xaa in position 413 to 418 is any amino acid
  Variant (419)..(422): Xaa in position 419 to 422 is any or no amino acid
  Variant (424)..(424): Xaa in position 424 is any amino acid
  Variant (431)..(431): Xaa in position 431 is any amino acid
  Variant (433)..(435): Xaa in position 433 to 435 is any amino acid
GXXXXXXXXXXXXXXXXXXXXXXXXGXXXXXXXXSXITYIDGXXGXLXYRGYXIXXLAXXXXXFXEXXYLLLXGXLPXXXXXXXXXFXXXIXXXXXVXXXLXXXXXXFXXXXAHPMXXLXXXXXALSXFYXXXXXXXXXXXXXXXXXXXXXXXXXXXXRLIAKIPTIXAXXYKXXXGXXXIXPXXXLXYXXNFLXMXXXXXXXXXXXXXXXXXXXXXXXXRXLDXXXILHADHEXNXSTXTXRLXGSSXXXXFAXIAAGIXXLXGPXHGGANEXXLXMLXXIXXXXXXXXVXXFIXXXXXXXXXXXXRLMGFGHRVYKXXDPRAXIMXXXXXXVXXXXXXXXXXXXXXXXXXIAXXLEXXALXXXYFXXRXLYPNVDFYSGIIXXALGXPXXMFTXIFALXRXXGWIAXWXEXXXXXXXXXXIXRPRQLYXGXXXR

SEQ ID NO: 37169 - protein, 52 aa, Artificial sequence
  Consensus
  Variant (2)..(9): Xaa in position 2 to 9 is any amino acid
  Variant (11)..(11): Xaa in position 11 is any amino acid
  Variant (13)..(13): Xaa in position 13 is Cys, Ser or Thr
  Variant (14)..(14): Xaa in position 14 is any amino acid
  Variant (15)..(15): Xaa in position 15 is Ile, Leu or Val
  Variant (18)..(19): Xaa in position 18 to 19 is any amino acid
  Variant (21)..(21): Xaa in position 21 is any amino acid
  Variant (23)..(23): Xaa in position 23 is any amino acid
  Variant (24)..(24): Xaa in position 24 is His or Tyr
  Variant (27)..(43): Xaa in position 27 to 43 is any amino acid
  Variant (44)..(44): Xaa in position 44 is any or no amino acid
  Variant (46)..(50): Xaa in position 46 to 50 is any amino acid
  Variant (51)..(51): Xaa in position 51 is any or no amino acid
GXXXXXXXXSXIXXXDGXXGXLXXRGXXXXXXXXXXXXXXXXXXLXXXXXXP

SEQ ID NO: 37170 - protein, 29 aa, Artificial sequence
  Consensus
  Variant (2)..(2): Xaa in position 2 is any amino acid
  Variant (3)..(3): Xaa in position 3 is any or no amino acid
  Variant (5)..(11): Xaa in position 5 to 11 is any amino acid
  Variant (12)..(12): Xaa in position 12 is any or no amino acid
  Variant (14)..(18): Xaa in position 14 to 18 is any amino acid
  Variant (20)..(23): Xaa in position 20 to 23 is any amino acid
  Variant (24)..(24): Xaa in position 24 is Ala, Asp, Gly, Asn, Pro, Ser or Thr
  Variant (25)..(25): Xaa in position 25 is any amino acid
  Variant (26)..(26): Xaa in position 26 is Ala, Cys, Ser, Thr or Val
  Variant (27)..(27): Xaa in position 27 is Ala, Asp, Glu, Gly, Gln, Ser or Thr
  Variant (28)..(28): Xaa in position 28 is Asn, Arg or Ser
TXXAXXXXXXXXGXXXXXPXXXXXXXXXF

SEQ ID NO: 37171 - protein, 57 aa, Artificial sequence
  Consensus
  Variant (2)..(4): Xaa in position 2 to 4 is any or no amino acid
  Variant (7)..(7): Xaa in position 7 is Asp or Glu
  Variant (9)..(9): Xaa in position 9 is Glu, Gly, Ser or Thr
  Variant (10)..(10): Xaa in position 10 is any amino acid
  Variant (12)..(12): Xaa in position 12 is Ala or Cys
  Variant (15)..(16): Xaa in position 15 to 16 is any amino acid
  Variant (17)..(17): Xaa in position 17 is Ala or Val
  Variant (18)..(21): Xaa in position 18 to 21 is any amino acid
  Variant (22)..(22): Xaa in position 22 is Ala or Ser
  Variant (23)..(23): Xaa in position 23 is Ala, Ser or Thr
  Variant (24)..(29): Xaa in position 24 to 29 is any amino acid
  Variant (30)..(30): Xaa in position 30 is Ala, Cys, Gly, Ser or Val
  Variant (31)..(32): Xaa in position 31 to 32 is any amino acid
  Variant (33)..(33): Xaa in position 33 is Ala, Gly, Ser or Thr
  Variant (34)..(34): Xaa in position 34 is Ala, Cys, Gly or Ser
  Variant (35)..(35): Xaa in position 35 is any amino acid
  Variant (36)..(36): Xaa in position 36 is Ala, Cys, Gly, Asn, Ser or Thr
  Variant (37)..(37): Xaa in position 37 is Ala, Cys, Ser or Thr
  Variant (39)..(39): Xaa in position 39 is any amino acid
  Variant (41)..(42): Xaa in position 41 to 42 is any amino acid
  Variant (48)..(48): Xaa in position 48 is Ala, Glu or Gln
  Variant (49)..(49): Xaa in position 49 is any amino acid
  Variant (50)..(50): Xaa in position 50 is Ala, Cys, Thr or Val
  Variant (51)..(51): Xaa in position 51 is Ile, Leu, Met or Val
  Variant (52)..(52): Xaa in position 52 is any amino acid
  Variant (54)..(54): Xaa in position 54 is Ile or Leu
  Variant (55)..(56): Xaa in position 55 to 56 is any amino acid
  Variant (57)..(57): Xaa in position 57 is Ile, Leu or Val
LXXXHAXHXXNXSTXXXXXXXXXXXXXXXXXXXXXXXLXGXXHGGANXXXXXMXXXX

SEQ ID NO: 37172 - protein, 17 aa, Artificial sequence
  Consensus
  Variant (9)..(9): Xaa in position 9 is Asn, Ser, Thr or Val
  Variant (10)..(10): Xaa in position 10 is any amino acid
  Variant (15)..(16): Xaa in position 15 to 16 is any amino acid
  Variant (17)..(17): Xaa in position 17 is Phe, Ile, Leu, Met or Val
GFGHRVYKXXDPRAXXX

SEQ ID NO: 37173 - protein, 59 aa, Artificial sequence
  Consensus
  Variant (2)..(2): Xaa in position 2 is any amino acid
  Variant (3)..(4): Xaa in position 3 to 4 is any or no amino acid
  Variant (6)..(17): Xaa in position 6 to 17 is any amino acid
  Variant (18)..(19): Xaa in position 18 to 19 is any or no amino acid
  Variant (26)..(26): Xaa in position 26 is His, Trp or Tyr
  Variant (27)..(27): Xaa in position 27 is Ser or Thr
  Variant (29)..(33): Xaa in position 29 to 33 is any amino acid
  Variant (34)..(34): Xaa in position 34 is Ile, Leu or Met
  Variant (35)..(35): Xaa in position 35 is any amino acid
  Variant (36)..(36): Xaa in position 36 is Phe, Ile or Val
  Variant (37)..(40): Xaa in position 37 to 40 is any amino acid
  Variant (41)..(41): Xaa in position 41 is Phe or Tyr
  Variant (42)..(42): Xaa in position 42 is Ala, Pro or Thr
  Variant (43)..(43): Xaa in position 43 is Ala, Cys, Pro, Thr or Val
  Variant (44)..(44): Xaa in position 44 is Phe, Ile, Leu, Met or Val
  Variant (46)..(46): Xaa in position 46 is Ala, Ser, Thr or Val
  Variant (47)..(47): Xaa in position 47 is any amino acid
  Variant (48)..(48): Xaa in position 48 is Ala, Gly, Pro or Ser
  Variant (50)..(51): Xaa in position 50 to 51 is any amino acid
  Variant (53)..(53): Xaa in position 53 is Trp or Tyr
  Variant (54)..(54): Xaa in position 54 is any amino acid
  Variant (55)..(55): Xaa in position 55 is Ala, Gly, Ser or Thr
  Variant (56)..(58): Xaa in position 56 to 58 is any amino acid
AXXXEXXXXXXXXXXXXXXYPNVDFXXGXXXXXXXXXXXXXXXXFXXXRXXGXXXXXXE

SEQ ID NO: 37174 - protein, 12 aa, Artificial sequence
  Consensus
  Variant (2)..(2): Xaa in position 2 is any amino acid
  Variant (3)..(4): Xaa in position 3 to 4 is any or no amino acid
  Variant (6)..(7): Xaa in position 6 to 7 is any or no amino acid
  Variant (9)..(9): Xaa in position 9 is Ile, Leu or Val
  Variant (10)..(10): Xaa in position 10 is Phe or Tyr
  Variant (11)..(11): Xaa in position 11 is any amino acid
IXXXRXXQXXXG

SEQ ID NO: 37175 - DNA, 1203 bp, Escherichia coli; identical to SEQ ID NO: 13945
  CDS (1)..(1203)

SEQ ID NO: 37176 - protein, 400 aa, Escherichia coli; identical to SEQ ID NO: 13946

SEQ ID NO: 37177 - DNA, 1281 bp, Aquifex aeolicus VF5; identical to SEQ ID NO: 13947
  CDS (1)..(1281): transl_table=11

SEQ ID NO: 37178 - protein, 426 aa, Aquifex aeolicus VF5; identical to SEQ ID NO: 13948

SEQ ID NO: 37179 - DNA, 1260 bp, Neisseria meningitidis Z2491; identical to SEQ ID NO: 13949
  CDS (1)..(1260): transl_table=11

SEQ ID NO: 37180 - protein, 419 aa, Neisseria meningitidis Z2491; identical to SEQ ID NO: 13950

SEQ ID NO: 37181 - DNA, 1425 bp, Deinococcus radiodurans R1; identical to SEQ ID NO: 13951
  CDS (1)..(1425): transl_table=11

SEQ ID NO: 37182 - protein, 474 aa, Deinococcus radiodurans R1; identical to SEQ ID NO: 13952

SEQ ID NO: 37183 - DNA, 1392 bp, Mycobacterium tuberculosis CDC1551; identical to SEQ ID NO: 13953
  CDS (1)..(1392): transl_table=11

SEQ ID NO: 37184 - protein, 463 aa, Mycobacterium tuberculosis CDC1551; identical to SEQ ID NO: 13954

SEQ ID NO: 37185 - DNA, 1203 bp, Salmonella typhimurium LT2; identical to SEQ ID NO: 13955
  CDS (1)..(1203): transl_table=11

SEQ ID NO: 37186 - protein, 400 aa, Salmonella typhimurium LT2; identical to SEQ ID NO: 13956

SEQ ID NO: 37187 - DNA, 1320 bp, Agrobacterium tumefaciens str. C58; identical to SEQ ID NO: 13957
  CDS (1)..(1320): transl_table=11

SEQ ID NO: 37188 - protein, 439 aa, Agrobacterium tumefaciens str. C58; identical to SEQ ID NO: 13958

SEQ ID NO: 37189 - DNA, 1251 bp, Yersinia pestis KIM; identical to SEQ ID NO: 13959
  CDS (1)..(1251): transl_table=11

SEQ ID NO: 37190 - protein, 416 aa, Yersinia pestis KIM; identical to SEQ ID NO: 13960

SEQ ID NO: 37191 - DNA, 1314 bp, Thermosynechococcus elongatus BP-1; identical to SEQ ID NO: 13961
  CDS (1)..(1314): transl_table=11

SEQ ID NO: 37192 - protein, 437 aa, Thermosynechococcus elongatus BP-1; identical to SEQ ID NO: 13962

SEQ ID NO: 37193 - DNA, 1464 bp, Oceanobacillus iheyensis HTE831; identical to SEQ ID NO: 13963
  CDS (1)..(1464): transl_table=11

SEQ ID NO: 37194 - protein, 487 aa, Oceanobacillus iheyensis HTE831; identical to SEQ ID NO: 13964

SEQ ID NO: 37195 - DNA, 1209 bp, Pseudomonas putida KT2440; identical to SEQ ID NO: 13965
  CDS (1)..(1209): transl_table=11

SEQ ID NO: 37196 - protein, 402 aa, Pseudomonas putida KT2440; identical to SEQ ID NO: 13966

SEQ ID NO: 37197 - DNA, 1305 bp, Bradyrhizobium japonicum USDA 110; identical to SEQ ID NO: 13967
  CDS (1)..(1305)

SEQ ID NO: 37198 - protein, 434 aa, Bradyrhizobium japonicum USDA 110; identical to SEQ ID NO: 13968

SEQ ID NO: 37199 - DNA, 1434 bp, Lactobacillus plantarum WCFS1; identical to SEQ ID NO: 13969
  CDS (1)..(1434): transl_table=11

SEQ ID NO: 37200 - protein, 477 aa, Lactobacillus plantarum WCFS1; identical to SEQ ID NO: 13970

SEQ ID NO: 37201 - DNA, 1203 bp, Salmonella enterica subsp. enterica serovar Typhi Ty2; identical to SEQ ID NO: 13971
  CDS (1)..(1203): transl_table=11

SEQ ID NO: 37202 - protein, 400 aa, Salmonella enterica subsp. enterica serovar Typhi Ty2; identical to SEQ ID NO: 13972

SEQ ID NO: 37203 - DNA, 1170 bp, Bacteroides thetaiotaomicron VPI-5482; identical to SEQ ID NO: 13973
  CDS (1)..(1170): transl_table=11

SEQ ID NO: 37204 - protein, 389 aa, Bacteroides thetaiotaomicron VPI-5482; identical to SEQ ID NO: 13974

SEQ ID NO: 37205 - DNA, 1407 bp, Coxiella burnetii RSA 493; identical to SEQ ID NO: 13975
  CDS (1)..(1407): transl_table=11

SEQ ID NO: 37206 - protein, 468 aa, Coxiella burnetii RSA 493; identical to SEQ ID NO: 13976

SEQ ID NO: 37207 - DNA, 1185 bp, Porphyromonas gingivalis W83; identical to SEQ ID NO: 13977
  CDS (1)..(1185): transl_table=11

SEQ ID NO: 37208 - protein, 394 aa, Porphyromonas gingivalis W83; identical to SEQ ID NO: 13978

SEQ ID NO: 37209 - DNA, 1608 bp, Oryza sativa (japonica cultivar-group); identical to SEQ ID NO: 13979
  CDS (1)..(1608)

SEQ ID NO: 37210 - protein, 535 aa, Oryza sativa (japonica cultivar-group); identical to SEQ ID NO: 13980

SEQ ID NO: 37211 - DNA, 1446 bp, Geobacter sulfurreducens PCA; identical to SEQ ID NO: 13981
  CDS (1)..(1446): transl_table=11

SEQ ID NO: 37212 - protein, 481 aa, Geobacter sulfurreducens PCA; identical to SEQ ID NO: 13982

SEQ ID NO: 37213 - DNA, 1437 bp, Treponema denticola ATCC 35405; identical to SEQ ID NO: 13983
  CDS (1)..(1437): transl_table=11

SEQ ID NO: 37214 - protein, 478 aa, Treponema denticola ATCC 35405; identical to SEQ ID NO: 13984

SEQ ID NO: 37215 - DNA, 1293 bp, Eremothecium gossypii; identical to SEQ ID NO: 13985
  CDS (1)..(1293)

SEQ ID NO: 37216 - protein, 430 aa, Eremothecium gossypii; identical to SEQ ID NO: 13986

SEQ ID NO: 37217 - DNA, 1434 bp, Neurospora crassa; identical to SEQ ID NO: 13987
  CDS (1)..(1434)

SEQ ID NO: 37218 - protein, 477 aa, Neurospora crassa; identical to SEQ ID NO: 13988

SEQ ID NO: 37219 - DNA, 5916 bp, Magnaporthe grisea 70-15; identical to SEQ ID NO: 13989
  CDS (1)..(5916)

SEQ ID NO: 37220 - protein, 1971 aa, Magnaporthe grisea 70-15; identical to SEQ ID NO: 13990

SEQ ID NO: 37221 - DNA, 1380 bp, Gibberella zeae PH-1; identical to SEQ ID NO: 13991
  CDS (1)..(1380)

SEQ ID NO: 37222 - protein, 459 aa, Gibberella zeae PH-1; identical to SEQ ID NO: 13992

SEQ ID NO: 37223 - DNA, 1839 bp, Ustilago maydis 521; identical to SEQ ID NO: 13993
  CDS (1)..(1839)

SEQ ID NO: 37224 - protein, 612 aa, Ustilago maydis 521; identical to SEQ ID NO: 13994

SEQ ID NO: 37225 - DNA, 1464 bp, Aspergillus nidulans FGSC A4; identical to SEQ ID NO: 13995
  CDS (1)..(1464)

SEQ ID NO: 37226 - protein, 487 aa, Aspergillus nidulans FGSC A4; identical to SEQ ID NO: 13996

SEQ ID NO: 37227 - DNA, 1296 bp, Candida glabrata CBS138; identical to SEQ ID NO: 13997
  CDS (1)..(1296)

SEQ ID NO: 37228 - protein, 431 aa, Candida glabrata CBS138; identical to SEQ ID NO: 13998

SEQ ID NO: 37229 - DNA, 1284 bp, Kluyveromyces lactis NRRL Y-1140; identical to SEQ ID NO: 13999
  CDS (1)..(1284)

SEQ ID NO: 37230 - protein, 427 aa, Kluyveromyces lactis NRRL Y-1140; identical to SEQ ID NO: 14000

SEQ ID NO: 37231 - DNA, 1269 bp, Debaryomyces hansenii CBS767; identical to SEQ ID NO: 14001
  CDS (1)..(1269)

SEQ ID NO: 37232 - protein, 422 aa, Debaryomyces hansenii CBS767; identical to SEQ ID NO: 14002

SEQ ID NO: 37233 - DNA, 1245 bp, Yarrowia lipolytica CLIB99; identical to SEQ ID NO: 14003
  CDS (1)..(1245)

SEQ ID NO: 37234 - protein, 414 aa, Yarrowia lipolytica CLIB99; identical to SEQ ID NO: 14004

SEQ ID NO: 37235 - DNA, 1362 bp, Cryptococcus neoformans var. neoformans JEC21; identical to SEQ ID NO: 14005
  CDS (1)..(1362)

SEQ ID NO: 37236 - protein, 453 aa, Cryptococcus neoformans var. neoformans JEC21; identical to SEQ ID NO: 14006

SEQ ID NO: 37237 - DNA, 1173 bp, Entamoeba histolytica HM-1:IMSS; identical to SEQ ID NO: 14007
  CDS (1)..(1173)

SEQ ID NO: 37238 - protein, 390 aa, Entamoeba histolytica HM-1:IMSS; identical to SEQ ID NO: 14008

SEQ ID NO: 37239 - DNA, 1266 bp, Candida albicans SC5314; identical to SEQ ID NO: 14009
  CDS (1)..(1266): transl_table=12

SEQ ID NO: 37240 - protein, 421 aa, Candida albicans SC5314; identical to SEQ ID NO: 14010

SEQ ID NO: 37241 - DNA, 1305 bp, Bartonella quintana str. Toulouse; identical to SEQ ID NO: 14011
  CDS (1)..(1305): transl_table=11

SEQ ID NO: 37242 - protein, 434 aa, Bartonella quintana str. Toulouse; identical to SEQ ID NO: 14012

SEQ ID NO: 37243 - DNA, 1305 bp, Bartonella henselae str. Houston-1; identical to SEQ ID NO: 14013
  CDS (1)..(1305): transl_table=11

SEQ ID NO: 37244 - protein, 434 aa, Bartonella henselae str. Houston-1; identical to SEQ ID NO: 14014

SEQ ID NO: 37245 - DNA, 1470 bp, Bacillus licheniformis ATCC 14580; identical to SEQ ID NO: 14015
  CDS (1)..(1470): transl_table=11

SEQ ID NO: 37246 - protein, 489 aa, Bacillus licheniformis ATCC 14580; identical to SEQ ID NO: 14016

SEQ ID NO: 37247 - DNA, 1167 bp, Bacteroides fragilis YCH46; identical to SEQ ID NO: 14017
  CDS (1)..(1167): transl_table=11

SEQ ID NO: 37248 - protein, 388 aa, Bacteroides fragilis YCH46; identical to SEQ ID NO: 14018

SEQ ID NO: 37249 - DNA, 1350 bp, Methylococcus capsulatus str. Bath; identical to SEQ ID NO: 14019
  CDS (1)..(1350): transl_table=11

SEQ ID NO: 37250 - protein, 449 aa, Methylococcus capsulatus str. Bath; identical to SEQ ID NO: 14020

SEQ ID NO: 37251 - DNA, 1317 bp, Nocardia farcinica IFM 10152; identical to SEQ ID NO: 14021
  CDS (1)..(1317): transl_table=11

SEQ ID NO: 37252 - protein, 438 aa, Nocardia farcinica IFM 10152; identical to SEQ ID NO: 14022

SEQ ID NO: 37253 - DNA, 1404 bp, Legionella pneumophila str. Paris; identical to SEQ ID NO: 14023
  CDS (1)..(1404): transl_table=11

SEQ ID NO: 37254 - protein, 467 aa, Legionella pneumophila str. Paris; identical to SEQ ID NO: 14024

SEQ ID NO: 37255 - DNA, 1404 bp, Legionella pneumophila str. Lens; identical to SEQ ID NO: 14025
  CDS (1)..(1404): transl_table=11

SEQ ID NO: 37256 - protein, 467 aa, Legionella pneumophila str. Lens; identical to SEQ ID NO: 14026

SEQ ID NO: 37257 - DNA, 1473 bp, Geobacillus kaustophilus HTA426; identical to SEQ ID NO: 14027
  CDS (1)..(1473): transl_table=11

SEQ ID NO: 37258 - protein, 490 aa, Geobacillus kaustophilus HTA426; identical to SEQ ID NO: 14028

SEQ ID NO: 37259 - DNA, 1347 bp, Idiomarina loihiensis L2TR; identical to SEQ ID NO: 14029
  CDS (1)..(1347): transl_table=11

SEQ ID NO: 37260 - protein, 448 aa, Idiomarina loihiensis L2TR; identical to SEQ ID NO: 14030

SEQ ID NO: 37261 - DNA, 1344 bp, Silicibacter pomeroyi DSS-3; identical to SEQ ID NO: 14031
  CDS (1)..(1344): transl_table=11

SEQ ID NO: 37262 - protein, 447 aa, Silicibacter pomeroyi DSS-3; identical to SEQ ID NO: 14032

SEQ ID NO: 37263 - DNA, 1260 bp, Neisseria gonorrhoeae FA 1090; identical to SEQ ID NO: 14033
  CDS (1)..(1260): transl_table=11

SEQ ID NO: 37264 - protein, 419 aa, Neisseria gonorrhoeae FA 1090; identical to SEQ ID NO: 14034

SEQ ID NO: 37265 - DNA, 1167 bp, Bacteroides fragilis NCTC 9343; identical to SEQ ID NO: 14035
  CDS (1)..(1167): transl_table=11

SEQ ID NO: 37266 - protein, 388 aa, Bacteroides fragilis NCTC 9343; identical to SEQ ID NO: 14036

SEQ ID NO: 37267 - DNA, 1251 bp, Salmonella enterica subsp. enterica serovar Choleraesuis str; identical to SEQ ID NO: 14037
  CDS (1)..(1251): transl_table=11

SEQ ID NO: 37268 - protein, 416 aa, Salmonella enterica subsp. enterica serovar Choleraesuis str; identical to SEQ ID NO: 14038

SEQ ID NO: 37269 - DNA, 1224 bp, Pseudomonas syringae pv. syringae B728a; identical to SEQ ID NO: 14039
  CDS (1)..(1224)

SEQ ID NO: 37270 - protein, 407 aa, Pseudomonas syringae pv. syringae B728a; identical to SEQ ID NO: 14040

SEQ ID NO: 37271 - DNA, 1326 bp, Corynebacterium jeikeium K411; identical to SEQ ID NO: 14041
  CDS (1)..(1326): transl_table=11

SEQ ID NO: 37272 - protein, 441 aa, Corynebacterium jeikeium K411; identical to SEQ ID NO: 14042

SEQ ID NO: 37273 - DNA, 1293 bp, Rhodobacter sphaeroides 2.4.1; identical to SEQ ID NO: 14043
  CDS (1)..(1293)

SEQ ID NO: 37274 - protein, 430 aa, Rhodobacter sphaeroides 2.4.1; identical to SEQ ID NO: 14044

SEQ ID NO: 37275 - DNA, 1134 bp, Xylella fastidiosa Ann-1; identical to SEQ ID NO: 14045
  CDS (1)..(1134)

SEQ ID NO: 37276 - protein, 377 aa, Xylella fastidiosa Ann-1; identical to SEQ ID NO: 14046

SEQ ID NO: 37277 - DNA, 1464 bp, Leuconostoc mesenteroides subsp. mesenteroides ATCC 8293; identical to SEQ ID NO: 14047
  CDS (1)..(1464)

SEQ ID NO: 37278 - protein, 487 aa, Leuconostoc mesenteroides subsp. mesenteroides ATCC 8293; identical to SEQ ID NO: 14048

SEQ ID NO: 37279 - DNA, 1242 bp, Psychrobacter sp. 273-4; identical to SEQ ID NO: 14049
  CDS (1)..(1242)

SEQ ID NO: 37280 - protein, 413 aa, Psychrobacter sp. 273-4; identical to SEQ ID NO: 14050

SEQ ID NO: 37281 - DNA, 1179 bp, Ralstonia eutropha JMP134; identical to SEQ ID NO: 14051
  CDS (1)..(1179)

SEQ ID NO: 37282 - protein, 392 aa, Ralstonia eutropha JMP134; identical to SEQ ID NO: 14052

SEQ ID NO: 37283 - DNA, 1200 bp, Burkholderia cepacia R18194; identical to SEQ ID NO: 14053
  CDS (1)..(1200)

SEQ ID NO: 37284 - protein, 399 aa, Burkholderia cepacia R18194; identical to SEQ ID NO: 14054

SEQ ID NO: 37285 - DNA, 1224 bp, Pseudomonas fluorescens PfO-1; identical to SEQ ID NO: 14055
  CDS (1)..(1224)

SEQ ID NO: 37286 - protein, 407 aa, Pseudomonas fluorescens PfO-1; identical to SEQ ID NO: 14056

SEQ ID NO: 37287 - DNA, 1197 bp, Burkholderia fungorum LB400; identical to SEQ ID NO: 14057
  CDS (1)..(1197)

SEQ ID NO: 37288 - protein, 398 aa, Burkholderia fungorum LB400; identical to SEQ ID NO: 14058

SEQ ID NO: 37289 - DNA, 1428 bp, Oenococcus oeni PSU-1; identical to SEQ ID NO: 14059
  CDS (1)..(1428)

SEQ ID NO: 37290 - protein, 475 aa, Oenococcus oeni PSU-1; identical to SEQ ID NO: 14060

SEQ ID NO: 37291 - DNA, 1380 bp, Trichodesmium erythraeum IMS101; identical to SEQ ID NO: 14061
  CDS (1)..(1380)

SEQ ID NO: 37292 - protein, 459 aa, Trichodesmium erythraeum IMS101; identical to SEQ ID NO: 14062

SEQ ID NO: 37293 - DNA, 1434 bp, Campylobacter upsaliensis RM3195; identical to SEQ ID NO: 14063
  CDS (1)..(1434): transl_table=11

SEQ ID NO: 37294 - protein, 477 aa, Campylobacter upsaliensis RM3195; identical to SEQ ID NO: 14064

SEQ ID NO: 37295 - DNA, 1488 bp, Lactococcus lactis subsp. cremoris SK11; identical to SEQ ID NO: 14065
  CDS (1)..(1488)

SEQ ID NO: 37296 - protein, 495 aa, Lactococcus lactis subsp. cremoris SK11; identical to SEQ ID NO: 14066

SEQ ID NO: 37297 - DNA, 1461 bp, Deinococcus geothermalis DSM 11300; identical to SEQ ID NO: 14067
  CDS (1)..(1461): transl_table=11

SEQ ID NO: 37298 - protein, 486 aa, Deinococcus geothermalis DSM 11300; identical to SEQ ID NO: 14068

SEQ ID NO: 37299 - DNA, 1359 bp, Azotobacter vinelandii AvOP; identical to SEQ ID NO: 14069
  CDS (1)..(1359): transl_table=11

SEQ ID NO: 37300 - protein, 452 aa, Azotobacter vinelandii AvOP; identical to SEQ ID NO: 14070

SEQ ID NO: 37301 - DNA, 1356 bp, Burkholderia vietnamiensis G4; identical to SEQ ID NO: 14071
  CDS (1)..(1356): transl_table=11

SEQ ID NO: 37302 - protein, 451 aa, Burkholderia vietnamiensis G4; identical to SEQ ID NO: 14072

SEQ ID NO: 37303 - DNA, 1200 bp, Burkholderia mallei 10229; identical to SEQ ID NO: 14073
  CDS (1)..(1200)

SEQ ID NO: 37304 - protein, 399 aa, Burkholderia mallei 10229; identical to SEQ ID NO: 14074

SEQ ID NO: 37305 - DNA, 1200 bp, Burkholderia cenocepacia AU 1054; identical to SEQ ID NO: 14075
  CDS (1)..(1200): transl_table=11

SEQ ID NO: 37306 - protein, 399 aa, Burkholderia cenocepacia AU 1054; identical to SEQ ID NO: 14076

SEQ ID NO: 37307 - DNA, 1356 bp, Burkholderia pseudomallei 1655; identical to SEQ ID NO: 14077
  CDS (1)..(1356)

SEQ ID NO: 37308 - protein, 451 aa, Burkholderia pseudomallei 1655; identical to SEQ ID NO: 14078

SEQ ID NO: 37309 - DNA, 1173 bp, Chromohalobacter salexigens DSM 3043; identical to SEQ ID NO: 14079
  CDS (1)..(1173): transl_table=11

SEQ ID NO: 37310 - protein, 390 aa, Chromohalobacter salexigens DSM 3043; identical to SEQ ID NO: 14080

SEQ ID NO: 37311 - DNA, 1356 bp, Burkholderia pseudomallei 668; identical to SEQ ID NO: 14081
  CDS (1)..(1356)

SEQ ID NO: 37312 - protein, 451 aa, Burkholderia pseudomallei 668; identical to SEQ ID NO: 14082

SEQ ID NO: 37313 - DNA, 1269 bp, Polaromonas sp. JS666; identical to SEQ ID NO: 14083
  CDS (1)..(1269): transl_table=11

SEQ ID NO: 37314 - protein, 422 aa, Polaromonas sp. JS666; identical to SEQ ID NO: 14084

SEQ ID NO: 37315 - DNA, 1341 bp, Crocosphaera watsonii WH 8501; identical to SEQ ID NO: 14085
  CDS (1)..(1341): transl_table=11

SEQ ID NO: 37316 - protein, 446 aa, Crocosphaera watsonii WH 8501; identical to SEQ ID NO: 14086

SEQ ID NO: 37317 - DNA, 1431 bp, Geobacter metallireducens GS-15; identical to SEQ ID NO: 14087
  CDS (1)..(1431): transl_table=11

SEQ ID NO: 37318 - protein, 476 aa, Geobacter metallireducens GS-15; identical to SEQ ID NO: 14088

SEQ ID NO: 37319 - DNA, 1206 bp, Methanosarcina barkeri str. fusaro; identical to SEQ ID NO: 14089
  CDS (1)..(1206): transl_table=11

SEQ ID NO: 37320 - protein, 401 aa, Methanosarcina barkeri str. fusaro; identical to SEQ ID NO: 14090

SEQ ID NO: 37321 - DNA, 1206 bp, Desulfuromonas acetoxidans DSM 684; identical to SEQ ID NO: 14091
  CDS (1)..(1206): transl_table=11

SEQ ID NO: 37322 - protein, 401 aa, Desulfuromonas acetoxidans DSM 684; identical to SEQ ID NO: 14092

SEQ ID NO: 37323 - DNA, 1293 bp, Jannaschia sp. CCS1; identical to SEQ ID NO: 14093
  CDS (1)..(1293): transl_table=11

SEQ ID NO: 37324 - protein, 430 aa, Jannaschia sp. CCS1; identical to SEQ ID NO: 14094

SEQ ID NO: 37325 - DNA, 1458 bp, Desulfitobacterium hafniense DCB-2; identical to SEQ ID NO: 14095
  CDS (1)..(1458): transl_table=11

SEQ ID NO: 37326 - protein, 485 aa, Desulfitobacterium hafniense DCB-2; identical to SEQ ID NO: 14096

SEQ ID NO: 37327 - DNA, 1218 bp, Methanococcoides burtonii DSM 6242; identical to SEQ ID NO: 14097
  CDS (1)..(1218): transl_table=11

SEQ ID NO: 37328 - protein, 405 aa, Methanococcoides burtonii DSM 6242; identical to SEQ ID NO: 14098

SEQ ID NO: 37329 - DNA, 1575 bp, Frankia sp. EAN1pec; identical to SEQ ID NO: 14099
  CDS (1)..(1575): transl_table=11

SEQ ID NO: 37330 - protein, 524 aa, Frankia sp. EAN1pec; identical to SEQ ID NO: 14100

SEQ ID NO: 37331 - DNA, 1200 bp, Ralstonia metallidurans CH34; identical to SEQ ID NO: 14101
  CDS (1)..(1200): transl_table=11

SEQ ID NO: 37332 - protein, 399 aa, Ralstonia metallidurans CH34; identical to SEQ ID NO: 14102

SEQ ID NO: 37333 - DNA, 1341 bp, Magnetococcus sp. MC-1; identical to SEQ ID NO: 14103
  CDS (1)..(1341): transl_table=11

SEQ ID NO: 37334 - protein, 446 aa, Magnetococcus sp. MC-1; identical to SEQ ID NO: 14104

SEQ ID NO: 37335 - DNA, 1305 bp, Mesorhizobium sp. BNC1; identical to SEQ ID NO: 14105
  CDS (1)..(1305): transl_table=11

SEQ ID NO: 37336 - protein, 434 aa, Mesorhizobium sp. BNC1; identical to SEQ ID NO: 14106

SEQ ID NO: 37337 - DNA, 1290 bp, Silicibacter sp. TM1040; identical to SEQ ID NO: 14107
  CDS (1)..(1290): transl_table=11

SEQ ID NO: 37338 - protein, 429 aa, Silicibacter sp. TM1040; identical to SEQ ID NO: 14108

SEQ ID NO: 37339 - DNA, 1305 bp, Nitrobacter hamburgensis X14; identical to SEQ ID NO: 14109
  CDS (1)..(1305): transl_table=11

SEQ ID NO: 37340 - protein, 434 aa, Nitrobacter hamburgensis X14; identical to SEQ ID NO: 14110

SEQ ID NO: 37341 - DNA, 1308 bp, Paracoccus denitrificans PD1222; identical to SEQ ID NO: 14111
  CDS (1)..(1308): transl_table=11

SEQ ID NO: 37342 - protein, 435 aa, Paracoccus denitrificans PD1222; identical to SEQ ID NO: 14112

SEQ ID NO: 37343 - DNA, 1230 bp, Pseudomonas fluorescens; identical to SEQ ID NO: 14113
  CDS (1)..(1230): transl_table=11

SEQ ID NO: 37344 - protein, 409 aa, Pseudomonas fluorescens; identical to SEQ ID NO: 14114

SEQ ID NO: 37345 - DNA, 1215 bp, Pseudomonas fluorescens; identical to SEQ ID NO: 14115
  CDS (1)..(1215): transl_table=11

SEQ ID NO: 37346 - protein, 404 aa, Pseudomonas fluorescens; identical to SEQ ID NO: 14116

SEQ ID NO: 37347 - DNA, 1443 bp, Staphylococcus haemolyticus; identical to SEQ ID NO: 14117
  CDS (1)..(1443): transl_table=11

SEQ ID NO: 37348 - protein, 480 aa, Staphylococcus haemolyticus; identical to SEQ ID NO: 14118

SEQ ID NO: 37349 - DNA, 1245 bp, Leishmania major; identical to SEQ ID NO: 14119
  CDS (1)..(1245)

SEQ ID NO: 37350 - protein, 414 aa, Leishmania major; identical to SEQ ID NO: 14120

SEQ ID NO: 37351 - DNA, 1380 bp, Gibberella moniliformis; identical to SEQ ID NO: 14121
  CDS (1)..(1380)

SEQ ID NO: 37352 - protein, 459 aa, Gibberella moniliformis; identical to SEQ ID NO: 14122

SEQ ID NO: 37353 - DNA, 1233 bp, Schizosaccharomyces pombe; identical to SEQ ID NO: 14123
  CDS (1)..(1233)

SEQ ID NO: 37354 - protein, 410 aa, Schizosaccharomyces pombe; identical to SEQ ID NO: 14124

SEQ ID NO: 37355 - DNA, 1290 bp, Saccharomyces cerevisiae; identical to SEQ ID NO: 14125
  CDS (1)..(1290)

SEQ ID NO: 37356 - protein, 429 aa, Saccharomyces cerevisiae; identical to SEQ ID NO: 14126

SEQ ID NO: 37357 - DNA, 1200 bp, Pseudomonas aeruginosa; identical to SEQ ID NO: 14127
  CDS (1)..(1200): transl_table=11

SEQ ID NO: 37358 - protein, 399 aa, Pseudomonas aeruginosa; identical to SEQ ID NO: 14128

SEQ ID NO: 37359 - DNA, 1197 bp, Pseudomonas aeruginosa; identical to SEQ ID NO: 14129
  CDS (1)..(1197): transl_table=11

SEQ ID NO: 37360 - protein, 398 aa, Pseudomonas aeruginosa; identical to SEQ ID NO: 14130

SEQ ID NO: 37361 - DNA, 1224 bp, Acinetobacter sp; identical to SEQ ID NO: 14131
  CDS (1)..(1224): transl_table=11

SEQ ID NO: 37362 - protein, 407 aa, Acinetobacter sp; identical to SEQ ID NO: 14132

SEQ ID NO: 37363 - DNA, 1218 bp, Bordetella pertussis; identical to SEQ ID NO: 14133
  CDS (1)..(1218): transl_table=11

SEQ ID NO: 37364 - protein, 405 aa, Bordetella pertussis; identical to SEQ ID NO: 14134

SEQ ID NO: 37365 - DNA, 1305 bp, Brucella melitensis; identical to SEQ ID NO: 14135
  CDS (1)..(1305): transl_table=11

SEQ ID NO: 37366 - protein, 434 aa, Brucella melitensis; identical to SEQ ID NO: 14136

SEQ ID NO: 37367 - DNA, 1305 bp, Brucella suis; identical to SEQ ID NO: 14137
  CDS (1)..(1305)

SEQ ID NO: 37368 - protein, 434 aa, Brucella suis; identical to SEQ ID NO: 14138

SEQ ID NO: 37369 - DNA, 1200 bp, Buchnera aphidicola; identical to SEQ ID NO: 14139
  CDS (1)..(1200): transl_table=11

SEQ ID NO: 37370 - protein, 399 aa, Buchnera aphidicola; identical to SEQ ID NO: 14140

SEQ ID NO: 37371 - DNA, 1197 bp, Buchnera aphidicola; identical to SEQ ID NO: 14141
  CDS (1)..(1197): transl_table=11

SEQ ID NO: 37372 - protein, 398 aa, Buchnera aphidicola; identical to SEQ ID NO: 14142

SEQ ID NO: 37373 - DNA, 1200 bp, Burkholderia mallei; identical to SEQ ID NO: 14143
  CDS (1)..(1200): transl_table=11

SEQ ID NO: 37374 - protein, 399 aa, Burkholderia mallei; identical to SEQ ID NO: 14144

SEQ ID NO: 37375 - DNA, 1209 bp, Chromobacterium violaceum; identical to SEQ ID NO: 14145
  CDS (1)..(1209): transl_table=11

SEQ ID NO: 37376 - protein, 402 aa, Chromobacterium violaceum; identical to SEQ ID NO: 14146

SEQ ID NO: 37377 - DNA, 1206 bp, Erwinia carotovora; identical to SEQ ID NO: 14147
  CDS (1)..(1206): transl_table=11

SEQ ID NO: 37378 - protein, 401 aa, Erwinia carotovora; identical to SEQ ID NO: 14148

SEQ ID NO: 37379 - DNA, 1215 bp, Methanosarcina acetivorans; identical to SEQ ID NO: 14149
  CDS (1)..(1215): transl_table=11

SEQ ID NO: 37380 - protein, 404 aa, Methanosarcina acetivorans; identical to SEQ ID NO: 14150

SEQ ID NO: 37381 - DNA, 1209 bp, Neisseria gonorrhoeae; identical to SEQ ID NO: 14151
  CDS (1)..(1209)

SEQ ID NO: 37382 - protein, 402 aa, Neisseria gonorrhoeae; identical to SEQ ID NO: 14152

SEQ ID NO: 37383 - DNA, 1209 bp, Neisseria meningitidis; identical to SEQ ID NO: 14153
  CDS (1)..(1209)

SEQ ID NO: 37384 - protein, 402 aa, Neisseria meningitidis; identical to SEQ ID NO: 14154

SEQ ID NO: 37385 - DNA, 1209 bp, Neisseria meningitidis; identical to SEQ ID NO: 14155
  CDS (1)..(1209): transl_table=11

SEQ ID NO: 37386 - protein, 402 aa, Neisseria meningitidis; identical to SEQ ID NO: 14156

SEQ ID NO: 37387 - DNA, 1215 bp, Photorhabdus luminescens; identical to SEQ ID NO: 14157
  CDS (1)..(1215): transl_table=11

SEQ ID NO: 37388 - protein, 404 aa, Photorhabdus luminescens; identical to SEQ ID NO: 14158

SEQ ID NO: 37389 - DNA, 1218 bp, Photobacterium profundum; identical to SEQ ID NO: 14159
  CDS (1)..(1218): transl_table=11

SEQ ID NO: 37390 - protein, 405 aa, Photobacterium profundum; identical to SEQ ID NO: 14160

SEQ ID NO: 37391 - DNA, 1170 bp, Ralstonia solanacearum; identical to SEQ ID NO: 14161
  CDS (1)..(1170)

SEQ ID NO: 37392 - protein, 389 aa, Ralstonia solanacearum; identical to SEQ ID NO: 14162

SEQ ID NO: 37393 - DNA, 1305 bp, Rhizobium loti; identical to SEQ ID NO: 14163
  CDS (1)..(1305): transl_table=11

SEQ ID NO: 37394 - protein, 434 aa, Rhizobium loti; identical to SEQ ID NO: 14164

SEQ ID NO: 37395 - DNA, 1305 bp, Rhizobium meliloti; identical to SEQ ID NO: 14165
  CDS (1)..(1305): transl_table=11

SEQ ID NO: 37396 - protein, 434 aa, Rhizobium meliloti; identical to SEQ ID NO: 14166

SEQ ID NO: 37397 - DNA, 1203 bp, Salmonella choleraesuis; identical to SEQ ID NO: 14167
  CDS (1)..(1203)

SEQ ID NO: 37398 - protein, 400 aa, Salmonella choleraesuis; identical to SEQ ID NO: 14168

SEQ ID NO: 37399 - DNA, 1203 bp, Salmonella paratyphi; identical to SEQ ID NO: 14169
  CDS (1)..(1203): transl_table=11

SEQ ID NO: 37400 - protein, 400 aa, Salmonella paratyphi; identical to SEQ ID NO: 14170

SEQ ID NO: 37401 - DNA, 1308 bp, Vibrio cholerae; identical to SEQ ID NO: 14171
  CDS (1)..(1308): transl_table=11

SEQ ID NO: 37402 - protein, 435 aa, Vibrio cholerae; identical to SEQ ID NO: 14172

SEQ ID NO: 37403 - DNA, 1311 bp, Vibrio parahaemolyticus; identical to SEQ ID NO: 14173
  CDS (1)..(1311): transl_table=11

SEQ ID NO: 37404 - protein, 436 aa, Vibrio parahaemolyticus; identical to SEQ ID NO: 14174

SEQ ID NO: 37405 - DNA, 1314 bp, Vibrio vulnificus; identical to SEQ ID NO: 14175
  CDS (1)..(1314): transl_table=11

SEQ ID NO: 37406 - protein, 437 aa, Vibrio vulnificus; identical to SEQ ID NO: 14176

SEQ ID NO: 37407 - DNA, 1314 bp, Vibrio vulnificus; identical to SEQ ID NO: 14177
  CDS (1)..(1314): transl_table=11

SEQ ID NO: 37408 - protein, 437 aa, Vibrio vulnificus; identical to SEQ ID NO: 14178

SEQ ID NO: 37409 - DNA, 1179 bp, Xanthomonas axonopodis; identical to SEQ ID NO: 14179
  CDS (1)..(1179): transl_table=11

SEQ ID NO: 37410 - protein, 392 aa, Xanthomonas axonopodis; identical to SEQ ID NO: 14180

SEQ ID NO: 37411 - DNA, 1197 bp, Xanthomonas campestris; identical to SEQ ID NO: 14181
  CDS (1)..(1197): transl_table=11

SEQ ID NO: 37412 - protein, 398 aa, Xanthomonas campestris; identical to SEQ ID NO: 14182

SEQ ID NO: 37413 - DNA, 1185 bp, Xylella fastidiosa; identical to SEQ ID NO: 14183
  CDS (1)..(1185): transl_table=11

SEQ ID NO: 37414 - protein, 394 aa, Xylella fastidiosa; identical to SEQ ID NO: 14184

SEQ ID NO: 37415 - DNA, 1185 bp, Xylella fastidiosa; identical to SEQ ID NO: 14185
  CDS (1)..(1185): transl_table=11

SEQ ID NO: 37416 - protein, 394 aa, Xylella fastidiosa; identical to SEQ ID NO: 14186

SEQ ID NO: 37417 - DNA, 24 bp, Artificial sequence
  Primer sequence
atgacacaattcgcttctcctgtt

SEQ ID NO: 37418 - DNA, 26 bp, Artificial sequence
  Primer sequence
ttaactggcttttttaatatgcggaa

SEQ ID NO: 37419 - protein, 581 aa, Artificial sequence; identical to SEQ ID NO: 14189
  Consensus
  Variant (3)..(3): Xaa in position 3 is any amino acid
  Variant (20)..(22): Xaa in position 20 to 22 is any amino acid
  Variant (23)..(24): Xaa in position 23 to 24 is any or no amino acid
  Variant (27)..(29): Xaa in position 27 to 29 is any amino acid
  Variant (31)..(31): Xaa in position 31 is any amino acid
  Variant (33)..(33): Xaa in position 33 is any amino acid
  Variant (35)..(36): Xaa in position 35 to 36 is any amino acid
  Variant (38)..(42): Xaa in position 38 to 42 is any amino acid
  Variant (43)..(53): Xaa in position 43 to 53 is any or no amino acid
  Variant (56)..(57): Xaa in position 56 to 57 is any amino acid
  Variant (60)..(60): Xaa in position 60 is any amino acid
  Variant (62)..(63): Xaa in position 62 to 63 is any amino acid
  Variant (68)..(68): Xaa in position 68 is any amino acid
  Variant (72)..(72): Xaa in position 72 is any amino acid
  Variant (75)..(76): Xaa in position 75 to 76 is any amino acid
  Variant (78)..(78): Xaa in position 78 is any amino acid
  Variant (80)..(88): Xaa in position 80 to 88 is any or no amino acid
  Variant (95)..(96): Xaa in position 95 to 96 is any amino acid
  Variant (100)..(103): Xaa in position 100 to 103 is any amino acid
  Variant (105)..(105): Xaa in position 105 is any amino acid
  Variant (107)..(109): Xaa in position 107 to 109 is any amino acid
  Variant (110)..(126): Xaa in position 110 to 126 is any or no amino acid
  Variant (128)..(128): Xaa in position 128 is any or no amino acid
  Variant (130)..(130): Xaa in position 130 is any or no amino acid
  Variant (132)..(132): Xaa in position 132 is any or no amino acid
  Variant (134)..(134): Xaa in position 134 is any or no amino acid
  Variant (136)..(137): Xaa in position 136 to 137 is any amino acid
  Variant (138)..(138): Xaa in position 138 is any or no amino acid
  Variant (153)..(154): Xaa in position 153 to 154 is any amino acid
  Variant (156)..(156): Xaa in position 156 is any amino acid
  Variant (158)..(161): Xaa in position 158 to 161 is any amino acid
  Variant (162)..(162): Xaa in position 162 is any or no amino acid
  Variant (164)..(172): Xaa in position 164 to 172 is any amino acid
  Variant (174)..(176): Xaa in position 174 to 176 is any amino acid
  Variant (178)..(183): Xaa in position 178 to 183 is any amino acid
  Variant (184)..(198): Xaa in position 184 to 198 is any or no amino acid
  Variant (208)..(208): Xaa in position 208 is any amino acid
  Variant (210)..(212): Xaa in position 210 to 212 is any amino acid
  Variant (214)..(215): Xaa in position 214 to 215 is any amino acid
  Variant (218)..(218): Xaa in position 218 is any amino acid
  Variant (221)..(222): Xaa in position 221 to 222 is any amino acid
  Variant (224)..(224): Xaa in position 224 is any amino acid
  Variant (225)..(236): Xaa in position 225 to 236 is any or no amino acid
  Variant (238)..(238): Xaa in position 238 is any or no amino acid
  Variant (244)..(245): Xaa in position 244 to 245 is any amino acid
  Variant (250)..(250): Xaa in position 250 is any amino acid
  Variant (252)..(252): Xaa in position 252 is any amino acid
  Variant (263)..(263): Xaa in position 263 is any amino acid
  Variant (265)..(266): Xaa in position 265 to 266 is any amino acid
  Variant (269)..(270): Xaa in position 269 to 270 is any amino acid
  Variant (271)..(288): Xaa in position 271 to 288 is any or no amino acid
  Variant (290)..(291): Xaa in position 290 to 291 is any amino acid
  Variant (294)..(295): Xaa in position 294 to 295 is any amino acid
  Variant (298)..(299): Xaa in position 298 to 299 is any amino acid
  Variant (302)..(303): Xaa in position 302 to 303 is any amino acid
  Variant (305)..(305): Xaa in position 305 is any amino acid
  Variant (306)..(316): Xaa in position 306 to 316 is any or no amino acid
  Variant (318)..(318): Xaa in position 318 is any amino acid
  Variant (326)..(329): Xaa in position 326 to 329 is any amino acid
  Variant (334)..(334): Xaa in position 334 is any amino acid
  Variant (337)..(337): Xaa in position 337 is any amino acid
  Variant (338)..(391): Xaa in position 338 to 391 is any or no amino acid
  Variant (394)..(394): Xaa in position 394 is any amino acid
  Variant (397)..(397): Xaa in position 397 is any amino acid
  Variant (401)..(401): Xaa in position 401 is any amino acid
  Variant (407)..(408): Xaa in position 407 to 408 is any amino acid
  Variant (416)..(416): Xaa in position 416 is any amino acid
  Variant (418)..(418): Xaa in position 418 is any amino acid
  Variant (419)..(427): Xaa in position 419 to 427 is any or no amino acid
  Variant (430)..(430): Xaa in position 430 is any amino acid
  Variant (433)..(442): Xaa in position 433 to 442 is any or no amino acid
  Variant (453)..(453): Xaa in position 453 is any amino acid
  Variant (455)..(455): Xaa in position 455 is any amino acid
  Variant (457)..(457): Xaa in position 457 is any amino acid
  Variant (459)..(459): Xaa in position 459 is any amino acid
  Variant (461)..(466): Xaa in position 461 to 466 is any amino acid
  Variant (468)..(474): Xaa in position 468 to 474 is any or no amino acid
  Variant (484)..(484): Xaa in position 484 is any amino acid
  Variant (489)..(491): Xaa in position 489 to 491 is any amino acid
  Variant (492)..(531): Xaa in position 492 to 531 is any or no amino acid
  Variant (541)..(542): Xaa in position 541 to 542 is any amino acid
  Variant (545)..(545): Xaa in position 545 is any amino acid
  Variant (553)..(553): Xaa in position 553 is any amino acid
  Variant (557)..(557): Xaa in position 557 is any amino acid
  Variant (559)..(560): Xaa in position 559 to 560 is any amino acid
  Variant (561)..(575): Xaa in position 561 to 575 is any or no amino acid
  Variant (578)..(579): Xaa in position 578 to 579 is any amino acid

SEQ ID NO: 37420 - protein, 10 aa, Artificial sequence
  Consensus
  Variant (2)..(2): Xaa in position 2 is any amino acid
  Variant (3)..(3): Xaa in position 3 is Asn or Thr
  Variant (5)..(5): Xaa in position 5 is any amino acid
  Variant (7)..(7): Xaa in position 7 is any amino acid
  Variant (8)..(8): Xaa in position 8 is Phe, Ile, Leu or Val
  Variant (9)..(9): Xaa in position 9 is any amino acid
LXXDXYXXXM

SEQ ID NO: 37421 - protein, 25 aa, Artificial sequence
  Consensus
  Variant (2)..(4): Xaa in position 2 to 4 is any or no amino acid
  Variant (8)..(10): Xaa in position 8 to 10 is any amino acid
  Variant (11)..(11): Xaa in position 11 is Ala or Gly
  Variant (12)..(14): Xaa in position 12 to 14 is any amino acid
  Variant (15)..(15): Xaa in position 15 is Ala, Asp, Glu, Gly, Asn, Gln or Ser
  Variant (16)..(19): Xaa in position 16 to 19 is any amino acid
  Variant (22)..(22): Xaa in position 22 is any amino acid
  Variant (25)..(25): Xaa in position 25 is Ala, Glu, Gln or Ser
GXXXTSNXXXXXXXXXXXXGTXAHX

SEQ ID NO: 37422 - DNA, 1242 bp, Escherichia coli K12; identical to SEQ ID NO: 19626
  CDS (1)..(1242): transl_table=11

SEQ ID NO: 37423 - protein, 413 aa, Escherichia coli K12; identical to SEQ ID NO: 19627

SEQ ID NO: 37424 - DNA, 1212 bp, Caenorhabditis elegans; identical to SEQ ID NO: 19628
  CDS (1)..(1212)

SEQ ID NO: 37425 - protein, 403 aa, Caenorhabditis elegans; identical to SEQ ID NO: 19629

SEQ ID NO: 37426 - DNA, 1329 bp, Saccharomyces cerevisiae; identical to SEQ ID NO: 19630
  CDS (1)..(1329)

SEQ ID NO: 37427 - protein, 442 aa, Saccharomyces cerevisiae; identical to SEQ ID NO: 19631

SEQ ID NO: 37428 - DNA, 1380 bp, Homo sapiens; identical to SEQ ID NO: 19632
  CDS (1)..(1380)

SEQ ID NO: 37429 - protein, 459 aa, Homo sapiens; identical to SEQ ID NO: 19633

SEQ ID NO: 37430 - DNA, 1380 bp, Mus musculus; identical to SEQ ID NO: 19634
  CDS (1)..(1380)

SEQ ID NO: 37431 - protein, 459 aa, Mus musculus [sequence omitted]

SEQ ID NO: 37432 - DNA, 1302 bp, Mesorhizobium loti MAFF303099; identical to SEQ ID NO: 19636
  CDS (1)..(1302): transl_table=11

SEQ ID NO: 37433 - protein, 433 aa, Mesorhizobium loti MAFF303099; identical to SEQ ID NO: 19637

SEQ ID NO: 37434 - DNA, 1263 bp, Mesorhizobium loti MAFF303099; identical to SEQ ID NO: 19638
  CDS (1)..(1263): transl_table=11

SEQ ID NO: 37435 - protein, 420 aa, Mesorhizobium loti MAFF303099; identical to SEQ ID NO: 19639

SEQ ID NO: 37436 - DNA, 1245 bp, Clostridium acetobutylicum ATCC 824; identical to SEQ ID NO: 19640
  CDS (1)..(1245): transl_table=11

SEQ ID NO: 37437 - protein, 414 aa, Clostridium acetobutylicum ATCC 824; identical to SEQ ID NO: 19641

SEQ ID NO: 37438 - DNA, 1239 bp, Helicobacter pylori 26695; identical to SEQ ID NO: 19642
  CDS (1)..(1239): transl_table=11

SEQ ID NO: 37439 - protein, 412 aa, Helicobacter pylori 26695; identical to SEQ ID NO: 19643

SEQ ID NO: 37440 - DNA, 1248 bp, Aquifex aeolicus VF5; identical to SEQ ID NO: 19644
  CDS (1)..(1248): transl_table=11

SEQ ID NO: 37441 - protein, 415 aa, Aquifex aeolicus VF5; identical to SEQ ID NO: 19645

SEQ ID NO: 37442 - DNA, 1257 bp, Chlamydia trachomatis D/UW-3/CX; identical to SEQ ID NO: 19646
  CDS (1)..(1257): transl_table=11

SEQ ID NO: 37443 - protein, 418 aa, Chlamydia trachomatis D/UW-3/CX; identical to SEQ ID NO: 19647

SEQ ID NO: 37444 - DNA, 1281 bp, Rickettsia prowazekii str. Madrid E; identical to SEQ ID NO: 19648
  CDS (1)..(1281): transl_table=11

SEQ ID NO: 37445 - protein, 426 aa, Rickettsia prowazekii str. Madrid E; identical to SEQ ID NO: 19649

SEQ ID NO: 37446 - DNA, 1239 bp, Helicobacter pylori J99; identical to SEQ ID NO: 19650
  CDS (1)..(1239): transl_table=11

SEQ ID NO: 37447 - protein, 412 aa, Helicobacter pylori J99; identical to SEQ ID NO: 19651

SEQ ID NO: 37448 - DNA, 1239 bp, Thermotoga maritima MSB8; identical to SEQ ID NO: 19652
  CDS (1)..(1239): transl_table=11

SEQ ID NO: 37449 - protein, 412 aa, Thermotoga maritima MSB8; identical to SEQ ID NO: 19653

SEQ ID NO: 37450 - DNA, 1245 bp, Vibrio cholerae O1 biovar eltor str. N16961; identical to SEQ ID NO: 19654
  CDS (1)..(1245): transl_table=11

SEQ ID NO: 37451 - protein, 414 aa, Vibrio cholerae O1 biovar eltor str. N16961; identical to SEQ ID NO: 19655

SEQ ID NO: 37452 - DNA, 1236 bp, Bacillus halodurans C-125; identical to SEQ ID NO: 19656
  CDS (1)..(1236): transl_table=11

SEQ ID NO: 37453 - protein, 411 aa, Bacillus halodurans C-125; identical to SEQ ID NO: 19657

SEQ ID NO: 37454 - DNA, 1221 bp, Pasteurella multocida subsp. multocida str. Pm70; identical to SEQ ID NO: 19658
  CDS (1)..(1221): transl_table=11

SEQ ID NO: 37455 - protein, 406 aa, Pasteurella multocida subsp. multocida str. Pm70; identical to SEQ ID NO: 19659

SEQ ID NO: 37456 - DNA, 1269 bp, Pseudomonas aeruginosa PAO1; identical to SEQ ID NO: 19660
  CDS (1)..(1269): transl_table=11

SEQ ID NO: 37457 - protein, 422 aa, Pseudomonas aeruginosa PAO1; identical to SEQ ID NO: 19661

SEQ ID NO: 37458 - DNA, 1245 bp, Pseudomonas aeruginosa PAO1; identical to SEQ ID NO: 19662
  CDS (1)..(1245): transl_table=11

SEQ ID NO: 37459 - protein, 414 aa, Pseudomonas aeruginosa PAO1; identical to SEQ ID NO: 19663

SEQ ID NO: 37460 - DNA, 1230 bp, Lactococcus lactis subsp. lactis Il1403; identical to SEQ ID NO: 19664
  CDS (1)..(1230): transl_table=11

SEQ ID NO: 37461 - protein, 409 aa, Lactococcus lactis subsp. lactis Il1403; identical to SEQ ID NO: 19665

SEQ ID NO: 37462 - DNA, 1248 bp, Neisseria meningitidis MC58; identical to SEQ ID NO: 19666
  CDS (1)..(1248): transl_table=11

SEQ ID NO: 37463 - protein, 415 aa, Neisseria meningitidis MC58; identical to SEQ ID NO: 19667

SEQ ID NO: 37464 - DNA, 1215 bp, Campylobacter jejuni subsp. jejuni NCTC 11168; identical to SEQ ID NO: 19668
  CDS (1)..(1215): transl_table=11

SEQ ID NO: 37465 - protein, 404 aa, Campylobacter jejuni subsp. jejuni NCTC 11168; identical to SEQ ID NO: 19669

SEQ ID NO: 37466 - DNA, 1248 bp, Neisseria meningitidis Z2491; identical to SEQ ID NO: 19670
  CDS (1)..(1248): transl_table=11

SEQ ID NO: 37467 - protein, 415 aa, Neisseria meningitidis Z2491; identical to SEQ ID NO: 19671

SEQ ID NO: 37468 - DNA, 1287 bp, Deinococcus radiodurans R1; identical to SEQ ID NO: 19672
  CDS (1)..(1287): transl_table=11

SEQ ID NO: 37469 - protein, 428 aa, Deinococcus radiodurans R1; identical to SEQ ID NO: 19673

SEQ ID NO: 37470 - DNA, 1257 bp, Chlamydia muridarum Nigg; identical to SEQ ID NO: 19674
  CDS (1)..(1257): transl_table=11

SEQ ID NO: 37471 - protein, 418 aa, Chlamydia muridarum Nigg; identical to SEQ ID NO: 19675

SEQ ID NO: 37472 - DNA, 1236 bp, Xylella fastidiosa 9a5c; identical to SEQ ID NO: 19676
  CDS (1)..(1236): transl_table=11

SEQ ID NO: 37473 - protein, 411 aa, Xylella fastidiosa 9a5c; identical to SEQ ID NO: 19677

SEQ ID NO: 37474 - DNA, 1236 bp, Streptococcus pneumoniae TIGR4; identical to SEQ ID NO: 19678
  CDS (1)..(1236): transl_table=11

SEQ ID NO: 37475 - protein, 411 aa, Streptococcus pneumoniae TIGR4; identical to SEQ ID NO: 19679

SEQ ID NO: 37476 - DNA, 1236 bp, Clostridium acetobutylicum ATCC 824; identical to SEQ ID NO: 19680
  CDS (1)..(1236): transl_table=11

SEQ ID NO: 37477 - protein, 411 aa, Clostridium acetobutylicum ATCC 824; identical to SEQ ID NO: 19681

SEQ ID NO: 37478 - DNA, 1329 bp, Agrobacterium tumefaciens str. C58; identical to SEQ ID NO: 19682
  CDS (1)..(1329): transl_table=11

SEQ ID NO: 37479 - protein, 442 aa, Agrobacterium tumefaciens str. C58; identical to SEQ ID NO: 19683

SEQ ID NO: 37480 - DNA, 1383 bp, Agrobacterium tumefaciens str. C58; identical to SEQ ID NO: 19684
  CDS (1)..(1383): transl_table=11

SEQ ID NO: 37481 - protein, 460 aa, Agrobacterium tumefaciens str. C58; identical to SEQ ID NO: 19685

SEQ ID NO: 37482 - DNA, 1245 bp, Streptococcus pneumoniae R6; identical to SEQ ID NO: 19686
  CDS (1)..(1245): transl_table=11

SEQ ID NO: 37483 - protein, 414 aa, Streptococcus pneumoniae R6; identical to SEQ ID NO: 19687

SEQ ID NO: 37484 - DNA, 1287 bp, Rickettsia conorii str. Malish 7; identical to SEQ ID NO: 19688
  CDS (1)..(1287): transl_table=11

SEQ ID NO: 37485 - protein, 428 aa, Rickettsia conorii str. Malish 7; identical to SEQ ID NO: 19689

SEQ ID NO: 37486 - DNA, 1245 bp, Staphylococcus aureus subsp. aureus Mu50; identical to SEQ ID NO: 19690
  CDS (1)..(1245): transl_table=11

SEQ ID NO: 37487 - protein, 414 aa, Staphylococcus aureus subsp. aureus Mu50; identical to SEQ ID NO: 19691

SEQ ID NO: 37488 - DNA, 1242 bp, Bacillus subtilis subsp. subtilis str. 168; identical to SEQ ID NO: 19692
  CDS (1)..(1242): transl_table=11

SEQ ID NO: 37489 - protein, 413 aa, Bacillus subtilis subsp. subtilis str. 168; identical to SEQ ID NO: 19693

SEQ ID NO: 37490 - DNA, 1281 bp, Caulobacter crescentus CB15; identical to SEQ ID NO: 19694
  CDS (1)..(1281): transl_table=11

SEQ ID NO: 37491 - protein, 426 aa, Caulobacter crescentus CB15; identical to SEQ ID NO: 19695

SEQ ID NO: 37492 - DNA, 1251 bp, Chlamydophila pneumoniae AR39; identical to SEQ ID NO: 19696
  CDS (1)..(1251): transl_table=11

SEQ ID NO: 37493 - protein, 416 aa, Chlamydophila pneumoniae AR39; identical to SEQ ID NO: 19697

SEQ ID NO: 37494 - DNA, 1242 bp, Listeria monocytogenes EGD-e; identical to SEQ ID NO: 19698
  CDS (1)..(1242): transl_table=11

SEQ ID NO: 37495 - protein, 413 aa, Listeria monocytogenes EGD-e; identical to SEQ ID NO: 19699

SEQ ID NO: 37496 - DNA, 1242 bp, Listeria innocua Clip11262; identical to SEQ ID NO: 19700
  CDS (1)..(1242): transl_table=11

SEQ ID NO: 37497 - protein, 413 aa, Listeria innocua Clip11262; identical to SEQ ID NO: 19701

SEQ ID NO: 37498 - DNA, 1251 bp, Nostoc sp. PCC 7120; identical to SEQ ID NO: 19702
  CDS (1)..(1251): transl_table=11

SEQ ID NO: 37499 - protein, 416 aa, Nostoc sp. PCC 7120; identical to SEQ ID NO: 19703

SEQ ID NO: 37500 - DNA, 1233 bp, Ralstonia solanacearum GMI1000; identical to SEQ ID NO: 19704
  CDS (1)..(1233): transl_table=11

SEQ ID NO: 37501 - protein, 410 aa, Ralstonia solanacearum GMI1000; identical to SEQ ID NO: 19705

SEQ ID NO: 37502 - DNA, 1263 bp, Agrobacterium tumefaciens str. C58; identical to SEQ ID NO: 19706
  CDS (1)..(1263): transl_table=11

SEQ ID NO: 37503 - protein, 420 aa, Agrobacterium tumefaciens str. C58; identical to SEQ ID NO: 19707

SEQ ID NO: 37504 - DNA, 1299 bp, Agrobacterium tumefaciens str. C58; identical to SEQ ID NO: 19708
  CDS (1)..(1299): transl_table=11

SEQ ID NO: 37505 - protein, 432 aa, Agrobacterium tumefaciens str. C58; identical to SEQ ID NO: 19709

SEQ ID NO: 37506 - DNA, 1242 bp, Clostridium perfringens str. 13; identical to SEQ ID NO: 19710
  CDS (1)..(1242): transl_table=11

SEQ ID NO: 37507 - protein, 413 aa, Clostridium perfringens str. 13; identical to SEQ ID NO: 19711

SEQ ID NO: 37508 - DNA, 1281 bp, Schizosaccharomyces pombe 972h-; identical to SEQ ID NO: 19712
  CDS (1)..(1281)

SEQ ID NO: 37509 - protein, 426 aa, Schizosaccharomyces pombe 972h-; identical to SEQ ID NO: 19713

SEQ ID NO: 37510 - DNA, 1242 bp, Fusobacterium nucleatum subsp. nucleatum ATCC 25586; identical to SEQ ID NO: 19714
  CDS (1)..(1242): transl_table=11

SEQ ID NO: 37511 - protein, 413 aa, Fusobacterium nucleatum subsp. nucleatum ATCC 25586; identical to SEQ ID NO: 19715

SEQ ID NO: 37512 - DNA, 1230 bp, Thermoanaerobacter tengcongensis MB4; identical to SEQ ID NO: 19716
  CDS (1)..(1230): transl_table=11

SEQ ID NO: 37513 - protein, 409 aa, Thermoanaerobacter tengcongensis MB4; identical to SEQ ID NO: 19717

SEQ ID NO: 37514 - DNA, 1287 bp, Streptomyces coelicolor A3(2); identical to SEQ ID NO: 19718
  CDS (1)..(1287): transl_table=11

SEQ ID NO: 37515 - protein, 428 aa, Streptomyces coelicolor A3(2); identical to SEQ ID NO: 19719

SEQ ID NO: 37516 - DNA, 1269 bp, Streptomyces coelicolor A3(2); identical to SEQ ID NO: 19720
  CDS (1)..(1269): transl_table=11

SEQ ID NO: 37517 - protein, 422 aa, Streptomyces coelicolor A3(2); identical to SEQ ID NO: 19721

SEQ ID NO: 37518 - DNA, 1290 bp, Streptomyces coelicolor A3(2); identical to SEQ ID NO: 19722
  CDS (1)..(1290): transl_table=11

SEQ ID NO: 37519 - protein, 429 aa, Streptomyces coelicolor A3(2); identical to SEQ ID NO: 19723

SEQ ID NO: 37520 - DNA, 1224 bp, Streptomyces coelicolor A3(2); identical to SEQ ID NO: 19724
  CDS (1)..(1224): transl_table=11

SEQ ID NO: 37521 - protein, 407 aa, Streptomyces coelicolor A3(2); identical to SEQ ID NO: 19725

SEQ ID NO: 37522 - DNA, 1236 bp, Xanthomonas axonopodis pv. citri str. 306; identical to SEQ ID NO: 19726
  CDS (1)..(1236): transl_table=11

SEQ ID NO: 37523 - protein, 411 aa, Xanthomonas axonopodis pv. citri str. 306; identical to SEQ ID NO: 19727

SEQ ID NO: 37524 - DNA, 1317 bp, Drosophila melanogaster; identical to SEQ ID NO: 19728
  CDS (1)..(1317)

SEQ ID NO: 37525 - protein, 438 aa, Drosophila melanogaster; identical to SEQ ID NO: 19729

SEQ ID NO: 37526 - DNA, 1242 bp, Chlorobium tepidum TLS; identical to SEQ ID NO: 19730
  CDS (1)..(1242): transl_table=11

SEQ ID NO: 37527 - protein, 413 aa, Chlorobium tepidum TLS; identical to SEQ ID NO: 19731

SEQ ID NO: 37528 - DNA, 1029 bp, Yersinia pestis KIM; identical to SEQ ID NO: 19732
  CDS (1)..(1029): transl_table=11

SEQ ID NO: 37529 - protein, 342 aa, Yersinia pestis KIM; identical to SEQ ID NO: 19733

SEQ ID NO: 37530 - DNA, 1263 bp, Thermosynechococcus elongatus BP-1; identical to SEQ ID NO: 19734
  CDS (1)..(1263): transl_table=11

SEQ ID NO: 37531 - protein, 420 aa, Thermosynechococcus elongatus BP-1; identical to SEQ ID NO: 19735

SEQ ID NO: 37532 - DNA, 1233 bp, Streptococcus agalactiae 2603V/R; identical to SEQ ID NO: 19736
  CDS (1)..(1233): transl_table=11

SEQ ID NO: 37533 - protein, 410 aa, Streptococcus agalactiae 2603V/R; identical to SEQ ID NO: 19737

SEQ ID NO: 37534 - DNA, 1239 bp, Oceanobacillus iheyensis HTE831; identical to SEQ ID NO: 19738
  CDS (1)..(1239): transl_table=11

SEQ ID NO: 37535 - protein, 412 aa, Oceanobacillus iheyensis HTE831; identical to SEQ ID NO: 19739

SEQ ID NO: 37536 - DNA, 1263 bp, Brucella suis 1330; identical to SEQ ID NO: 19740
  CDS (1)..(1263): transl_table=11

SEQ ID NO: 37537 - protein, 420 aa, Brucella suis 1330; identical to SEQ ID NO: 19741

SEQ ID NO: 37538 - DNA, 1425 bp, Plasmodium falciparum 3D7; identical to SEQ ID NO: 19742
  CDS (1)..(1425)

SEQ ID NO: 37539 - protein, 474 aa, Plasmodium falciparum 3D7; identical to SEQ ID NO: 19743

SEQ ID NO: 37540 - DNA, 1239 bp, Shewanella oneidensis MR-1; identical to SEQ ID NO: 19744
  CDS (1)..(1239): transl_table=11

SEQ ID NO: 37541 - protein, 412 aa, Shewanella oneidensis MR-1; identical to SEQ ID NO: 19745

SEQ ID NO: 37542 - DNA, 1233 bp, Streptococcus mutans UA159; identical to SEQ ID NO: 19746
  CDS (1)..(1233): transl_table=11

SEQ ID NO: 37543 - protein, 410 aa, Streptococcus mutans UA159; identical to SEQ ID NO: 19747

SEQ ID NO: 37544 - DNA, 1245 bp, Pseudomonas putida KT2440; identical to SEQ ID NO: 19748
  CDS (1)..(1245): transl_table=11

SEQ ID NO: 37545 - protein, 414 aa, Pseudomonas putida KT2440; identical to SEQ ID NO: 19749

SEQ ID NO: 37546 - DNA, 1314 bp, Pseudomonas putida KT2440; identical to SEQ ID NO: 19750
  CDS (1)..(1314): transl_table=11

SEQ ID NO: 37547 - protein, 437 aa, Pseudomonas putida KT2440; identical to SEQ ID NO: 19751

SEQ ID NO: 37548 - DNA, 1263 bp, Vibrio vulnificus CMCP6; identical to SEQ ID NO: 19752
  CDS (1)..(1263): transl_table=11

SEQ ID NO: 37549 - protein, 420 aa, Vibrio vulnificus CMCP6; identical to SEQ ID NO: 19753

SEQ ID NO: 37550 - DNA, 1263 bp, Bradyrhizobium japonicum USDA 110; identical to SEQ ID NO: 19754
  CDS (1)..(1263): transl_table=11

SEQ ID NO: 37551 - protein, 420 aa, Bradyrhizobium japonicum USDA 110; identical to SEQ ID NO: 19755

SEQ ID NO: 37552 - DNA, 1266 bp, Bradyrhizobium japonicum USDA 110; identical to SEQ ID NO: 19756
  CDS (1)..(1266): transl_table=11

SEQ ID NO: 37553 - protein, 421 aa, Bradyrhizobium japonicum USDA 110; identical to SEQ ID NO: 19757

SEQ ID NO: 37554 - DNA, 1236 bp, Xylella fastidiosa Temecula1; identical to SEQ ID NO: 19758
  CDS (1)..(1236): transl_table=11

SEQ ID NO: 37555 - protein, 411 aa, Xylella fastidiosa Temecula1; identical to SEQ ID NO: 19759

SEQ ID NO: 37556 - DNA, 1245 bp, Clostridium tetani E88; identical to SEQ ID NO: 19760
  CDS (1)..(1245): transl_table=11

SEQ ID NO: 37557 - protein, 414 aa, Clostridium tetani E88; identical to SEQ ID NO: 19761

SEQ ID NO: 37558 - DNA, 1233 bp, Lactobacillus plantarum WCFS1; identical to SEQ ID NO: 19762
  CDS (1)..(1233): transl_table=11

SEQ ID NO: 37559 - protein, 410 aa, Lactobacillus plantarum WCFS1; identical to SEQ ID NO: 19763

SEQ ID NO: 37560 - DNA, 1245 bp, Pseudomonas syringae pv. tomato str. DC3000; identical to SEQ ID NO: 19764
  CDS (1)..(1245): transl_table=11

SEQ ID NO: 37561 - protein, 414 aa, Pseudomonas syringae pv. tomato str. DC3000; identical to SEQ ID NO: 19765

SEQ ID NO: 37562 - DNA, 1251 bp, Vibrio parahaemolyticus RIMD 2210633; identical to SEQ ID NO: 19766
  CDS (1)..(1251): transl_table=11

SEQ ID NO: 37563 - protein, 416 aa, Vibrio parahaemolyticus RIMD 2210633; identical to SEQ ID NO: 19767

SEQ ID NO: 37564 - DNA, 1212 bp, Vibrio parahaemolyticus RIMD 2210633; identical to SEQ ID NO: 19768
  CDS (1)..(1212): transl_table=11

SEQ ID NO: 37565 - protein, 403 aa, Vibrio parahaemolyticus RIMD 2210633; identical to SEQ ID NO: 19769

SEQ ID NO: 37566 - DNA, 1233 bp, Streptococcus pyogenes SSI-1; identical to SEQ ID NO: 19770
  CDS (1)..(1233): transl_table=11

SEQ ID NO: 37567 - protein, 410 aa, Streptococcus pyogenes SSI-1; identical to SEQ ID NO: 19771

SEQ ID NO: 37568 - DNA, 1242 bp, Salmonella enterica subsp. enterica serovar Typhi Ty2; identical to SEQ ID NO: 19772
  CDS (1)..(1242): transl_table=11

SEQ ID NO: 37569 - protein, 413 aa, Salmonella enterica subsp. enterica serovar Typhi Ty2; identical to SEQ ID NO: 19773

SEQ ID NO: 37570 - DNA, 1263 bp, Bacteroides thetaiotaomicron VPI-5482; identical to SEQ ID NO: 19774
  CDS (1)..(1263): transl_table=11

SEQ ID NO: 37571 - protein, 420 aa, Bacteroides thetaiotaomicron VPI-5482; identical to SEQ ID NO: 19775

SEQ ID NO: 37572 - DNA, 1239 bp, Enterococcus faecalis V583; identical to SEQ ID NO: 19776
  CDS (1)..(1239): transl_table=11

SEQ ID NO: 37573 - protein, 412 aa, Enterococcus faecalis V583; identical to SEQ ID NO: 19777

SEQ ID NO: 37574 - DNA, 1236 bp, Enterococcus faecalis V583; identical to SEQ ID NO: 19778
  CDS (1)..(1236): transl_table=11

SEQ ID NO: 37575 - protein, 411 aa, Enterococcus faecalis V583; identical to SEQ ID NO: 19779

SEQ ID NO: 37576 - DNA, 1245 bp, Coxiella burnetii RSA 493; identical to SEQ ID NO: 19780
  CDS (1)..(1245): transl_table=11

SEQ ID NO: 37577 - protein, 414 aa, Coxiella burnetii RSA 493; identical to SEQ ID NO: 19781

SEQ ID NO: 37578 - DNA, 1221 bp, Streptomyces avermitilis MA-4680; identical to SEQ ID NO: 19782
  CDS (1)..(1221): transl_table=11

SEQ ID NO: 37579 - protein, 406 aa, Streptomyces avermitilis MA-4680; identical to SEQ ID NO: 19783

SEQ ID NO: 37580 - DNA, 1251 bp, Streptomyces avermitilis MA-4680; identical to SEQ ID NO: 19784
  CDS (1)..(1251): transl_table=11

SEQ ID NO: 37581 - protein, 416 aa, Streptomyces avermitilis MA-4680; identical to SEQ ID NO: 19785

SEQ ID NO: 37582 - DNA, 1272 bp, Streptomyces avermitilis MA-4680; identical to SEQ ID NO: 19786
  CDS (1)..(1272): transl_table=11

SEQ ID NO: 37583 - protein, 423 aa, Streptomyces avermitilis MA-4680; identical to SEQ ID NO: 19787

SEQ ID NO: 37584 - DNA, 1251 bp, Chlamydophila caviae GPIC; identical to SEQ ID NO: 19788
  CDS (1)..(1251): transl_table=11

SEQ ID NO: 37585 - protein, 416 aa, Chlamydophila caviae GPIC; identical to SEQ ID NO: 19789

SEQ ID NO: 37586 - DNA, 1239 bp, Bacillus cereus ATCC 14579; identical to SEQ ID NO: 19790
  CDS (1)..(1239): transl_table=11

SEQ ID NO: 37587 - protein, 412 aa, Bacillus cereus ATCC 14579; identical to SEQ ID NO: 19791

SEQ ID NO: 37588 - DNA, 1242 bp, Nitrosomonas europaea ATCC 19718; identical to SEQ ID NO: 19792
  CDS (1)..(1242): transl_table=11

SEQ ID NO: 37589 - protein, 413 aa, Nitrosomonas europaea ATCC 19718; identical to SEQ ID NO: 19793

SEQ ID NO: 37590 - DNA, 1626 bp, Arabidopsis thaliana; identical to SEQ ID NO: 19794
  CDS (1)..(1626)

SEQ ID NO: 37591 - protein, 541 aa, Arabidopsis thaliana; identical to SEQ ID NO: 19795

SEQ ID NO: 37592 - DNA, 1266 bp, Streptomyces rochei; identical to SEQ ID NO: 19796
  CDS (1)..(1266): transl_table=11

SEQ ID NO: 37593 - protein, 421 aa, Streptomyces rochei; identical to SEQ ID NO: 19797

SEQ ID NO: 37594 - DNA, 1236 bp, Helicobacter hepaticus ATCC 51449; identical to SEQ ID NO: 19798
  CDS (1)..(1236): transl_table=11

SEQ ID NO: 37595 - protein, 411 aa, Helicobacter hepaticus ATCC 51449; identical to SEQ ID NO: 19799

SEQ ID NO: 37596 - DNA, 1290 bp, Rhodopirellula baltica SH 1; identical to SEQ ID NO: 19800
  CDS (1)..(1290): transl_table=11

SEQ ID NO: 37597 - protein, 429 aa, Rhodopirellula baltica SH 1; identical to SEQ ID NO: 19801

SEQ ID NO: 37598 - DNA, 1290 bp, Rhodopirellula baltica SH 1; identical to SEQ ID NO: 19802
  CDS (1)..(1290): transl_table=11

SEQ ID NO: 37599 - protein, 429 aa, Rhodopirellula baltica SH 1; identical to SEQ ID NO: 19803

SEQ ID NO: 37600 - DNA, 1248 bp, Prochlorococcus marinus subsp. marinus str. CCMP1375; identical to SEQ ID NO: 19804
  CDS (1)..(1248): transl_table=11

SEQ ID NO: 37601 - protein, 415 aa, Prochlorococcus marinus subsp. marinus str. CCMP1375; identical to SEQ ID NO: 19805

SEQ ID NO: 37602 - DNA, 1230 bp, Bordetella bronchiseptica RB50; identical to SEQ ID NO: 19806
  CDS (1)..(1230): transl_table=11

SEQ ID NO: 37603 - protein, 409 aa, Bordetella bronchiseptica RB50; identical to SEQ ID NO: 19807

SEQ ID NO: 37604 - DNA, 1245 bp, Prochlorococcus marinus subsp. pastoris str. CCMP1986; identical to SEQ ID NO: 19808
  CDS (1)..(1245): transl_table=11

SEQ ID NO: 37605 - protein, 414 aa, Prochlorococcus marinus subsp. pastoris str. CCMP1986; identical to SEQ ID NO: 19809

SEQ ID NO: 37606 - DNA, 1248 bp, Prochlorococcus marinus str. MIT 9313; identical to SEQ ID NO: 19810
  CDS (1)..(1248): transl_table=11

SEQ ID NO: 37607 - protein, 415 aa, Prochlorococcus marinus str. MIT 9313; identical to SEQ ID NO: 19811

SEQ ID NO: 37608 - DNA, 1248 bp, Synechococcus sp. WH 8102; identical to SEQ ID NO: 19812
  CDS (1)..(1248): transl_table=11

SEQ ID NO: 37609 - protein, 415 aa, Synechococcus sp. WH 8102; identical to SEQ ID NO: 19813

SEQ ID NO: 37610 - DNA, 1242 bp, Chromobacterium violaceum ATCC 12472; identical to SEQ ID NO: 19814
  CDS (1)..(1242): transl_table=11

SEQ ID NO: 37611 - protein, 413 aa, Chromobacterium violaceum ATCC 12472; identical to SEQ ID NO: 19815

SEQ ID NO: 37612 - DNA, 1257 bp, Porphyromonas gingivalis W83; identical to SEQ ID NO: 19816
  CDS (1)..(1257): transl_table=11

SEQ ID NO: 37613 - protein, 418 aa, Porphyromonas gingivalis W83; identical to SEQ ID NO: 19817

SEQ ID NO: 37614 - DNA, 1242 bp, Wolinella succinogenes DSM 1740; identical to SEQ ID NO: 19818
  CDS (1)..(1242): transl_table=11

SEQ ID NO: 37615 - protein, 413 aa, Wolinella succinogenes DSM 1740; identical to SEQ ID NO: 19819

SEQ ID NO: 37616 - DNA, 1272 bp, Gloeobacter violaceus PCC 7421; identical to SEQ ID NO: 19820
  CDS (1)..(1272): transl_table=11

SEQ ID NO: 37617 - protein, 423 aa, Gloeobacter violaceus PCC 7421; identical to SEQ ID NO: 19821

SEQ ID NO: 37618 - DNA, 1248 bp, Gloeobacter violaceus PCC 7421; identical to SEQ ID NO: 19822
  CDS (1)..(1248): transl_table=11

SEQ ID NO: 37619 - protein, 415 aa, Gloeobacter violaceus PCC 7421; identical to SEQ ID NO: 19823

SEQ ID NO: 37620 - DNA, 1251 bp, Photorhabdus luminescens subsp. laumondii TTO1; identical to SEQ ID NO: 19824
  CDS (1)..(1251): transl_table=11

SEQ ID NO: 37621 - protein, 416 aa, Photorhabdus luminescens subsp. laumondii TTO1; identical to SEQ ID NO: 19825

SEQ ID NO: 37622 - DNA, 1242 bp, Vibrio vulnificus YJ016; identical to SEQ ID NO: 19826
  CDS (1)..(1242): transl_table=11

SEQ ID NO: 37623 - protein, 413 aa, Vibrio vulnificus YJ016; identical to SEQ ID NO: 19827

SEQ ID NO: 37624 - DNA, 1266 bp, Rhodopseudomonas palustris CGA009; identical to SEQ ID NO: 19828
  CDS (1)..(1266): transl_table=11

SEQ ID NO: 37625 - protein, 421 aa, Rhodopseudomonas palustris CGA009; identical to SEQ ID NO: 19829

SEQ ID NO: 37626 - DNA, 1233 bp, Geobacter sulfurreducens PCA; identical to SEQ ID NO: 19830
  CDS (1)..(1233): transl_table=11

SEQ ID NO: 37627 - protein, 410 aa, Geobacter sulfurreducens PCA; identical to SEQ ID NO: 19831

SEQ ID NO: 37628 - DNA, 1251 bp, Mycobacterium avium subsp. paratuberculosis K-10; identical to SEQ ID NO: 19832
  CDS (1)..(1251): transl_table=11

SEQ ID NO: 37629 - protein, 416 aa, Mycobacterium avium subsp. paratuberculosis K-10; identical to SEQ ID NO: 19833

SEQ ID NO: 37630 - DNA, 1272 bp, Wolbachia endosymbiont of Drosophila melanogaster; identical to SEQ ID NO: 19834
  CDS (1)..(1272): transl_table=11

SEQ ID NO: 37631 - protein, 423 aa, Wolbachia endosymbiont of Drosophila melanogaster; identical to SEQ ID NO: 19835

SEQ ID NO: 37632 - DNA, 1272 bp, Bdellovibrio bacteriovorus HD100; identical to SEQ ID NO: 19836
  CDS (1)..(1272): transl_table=11

SEQ ID NO: 37633 - protein, 423 aa, Bdellovibrio bacteriovorus HD100; identical to SEQ ID NO: 19837

SEQ ID NO: 37634 - DNA, 1236 bp, Treponema denticola ATCC 35405; identical to SEQ ID NO: 19838
  CDS (1)..(1236): transl_table=11

SEQ ID NO: 37635 - protein, 411 aa, Treponema denticola ATCC 35405; identical to SEQ ID NO: 19839

SEQ ID NO: 37636 - DNA, 1239 bp, Bacillus cereus ATCC 10987; identical to SEQ ID NO: 19840
  CDS (1)..(1239): transl_table=11

SEQ ID NO: 37637 - protein, 412 aa, Bacillus cereus ATCC 10987; identical to SEQ ID NO: 19841

SEQ ID NO: 37638 - DNA, 1302 bp, Eremothecium gossypii; identical to SEQ ID NO: 19842
  CDS (1)..(1302)

SEQ ID NO: 37639 - protein, 433 aa, Eremothecium gossypii; identical to SEQ ID NO: 19843

SEQ ID NO: 37640 - DNA, 1335 bp, Anopheles gambiae str. PEST; identical to SEQ ID NO: 19844
  CDS (1)..(1335)

SEQ ID NO: 37641 - protein, 444 aa, Anopheles gambiae str. PEST; identical to SEQ ID NO: 19845

SEQ ID NO: 37642 - DNA, 1524 bp, Oryza sativa (japonica cultivar-group); identical to SEQ ID NO: 19846
  CDS (1)..(1524)

SEQ ID NO: 37643 - protein, 507 aa, Oryza sativa (japonica cultivar-group); identical to SEQ ID NO: 19847

SEQ ID NO: 37644 - DNA, 1245 bp, Anopheles gambiae str. PEST; identical to SEQ ID NO: 19848
  CDS (1)..(1245)

SEQ ID NO: 37645 - protein, 414 aa, Anopheles gambiae str. PEST; identical to SEQ ID NO: 19849

SEQ ID NO: 37646 - DNA, 1227 bp, Thermus thermophilus HB27; identical to SEQ ID NO: 19850
  CDS (1)..(1227): transl_table=11

SEQ ID NO: 37647 - protein, 408 aa, Thermus thermophilus HB27; identical to SEQ ID NO: 19851

SEQ ID NO: 37648 - DNA, 1257 bp, Parachlamydia sp. UWE25; identical to SEQ ID NO: 19852
  CDS (1)..(1257): transl_table=11

SEQ ID NO: 37649 - protein, 418 aa, Parachlamydia sp. UWE25; identical to SEQ ID NO: 19853

SEQ ID NO: 37650 - DNA, 1248 bp, Desulfovibrio vulgaris subsp. vulgaris str. Hildenborough; identical to SEQ ID NO: 19854
  CDS (1)..(1248): transl_table=11

SEQ ID NO: 37651 - protein, 415 aa, Desulfovibrio vulgaris subsp. vulgaris str. Hildenborough; identical to SEQ ID NO: 19855

SEQ ID NO: 37652 - DNA, 1242 bp, Listeria monocytogenes str. 4b F2365; identical to SEQ ID NO: 19856
  CDS (1)..(1242): transl_table=11

SEQ ID NO: 37653 - protein, 413 aa, Listeria monocytogenes str. 4b F2365; identical to SEQ ID NO: 19857

SEQ ID NO: 37654 - DNA, 1239 bp, Bacillus anthracis str. Sterne; identical to SEQ ID NO: 19858
  CDS (1)..(1239): transl_table=11

SEQ ID NO: 37655 - protein, 412 aa, Bacillus anthracis str. Sterne; identical to SEQ ID NO: 19859

SEQ ID NO: 37656 - DNA, 1263 bp, Bartonella quintana str. Toulouse; identical to SEQ ID NO: 19860
  CDS (1)..(1263): transl_table=11

SEQ ID NO: 37657 - protein, 420 aa, Bartonella quintana str. Toulouse; identical to SEQ ID NO: 19861

SEQ ID NO: 37658 - DNA, 1263 bp, Bartonella henselae str. Houston-1; identical to SEQ ID NO: 19862
  CDS (1)..(1263): transl_table=11

SEQ ID NO: 37659 - protein, 420 aa, Bartonella henselae str. Houston-1; identical to SEQ ID NO: 19863

SEQ ID NO: 37660 - DNA, 1245 bp, Staphylococcus aureus subsp. aureus MRSA252; identical to SEQ ID NO: 19864
  CDS (1)..(1245): transl_table=11

SEQ ID NO: 37661 - protein, 414 aa, Staphylococcus aureus subsp. aureus MRSA252; identical to SEQ ID NO: 19865

SEQ ID NO: 37662 - DNA, 1245 bp, Staphylococcus aureus subsp. aureus MSSA476; identical to SEQ ID NO: 19866
  CDS (1)..(1245): transl_table=11

SEQ ID NO: 37663 - protein, 414 aa, Staphylococcus aureus subsp. aureus MSSA476; identical to SEQ ID NO: 19867

SEQ ID NO: 37664 - DNA, 1242 bp, Erwinia carotovora subsp. atroseptica SCRI1043; identical to SEQ ID NO: 19868
  CDS (1)..(1242): transl_table=11

SEQ ID NO: 37665 - protein, 413 aa, Erwinia carotovora subsp. atroseptica SCRI1043; identical to SEQ ID NO: 19869

SEQ ID NO: 37666 - DNA, 1290 bp, Erwinia carotovora subsp. atroseptica SCRI1043; identical to SEQ ID NO: 19870
  CDS (1)..(1290): transl_table=11

SEQ ID NO: 37667 - protein, 429 aa, Erwinia carotovora subsp. atroseptica SCRI1043; identical to SEQ ID NO: 19871

SEQ ID NO: 37668 - DNA, 1272 bp, Propionibacterium acnes KPA171202; identical to SEQ ID NO: 19872
  CDS (1)..(1272): transl_table=11

SEQ ID NO: 37669 - protein, 423 aa, Propionibacterium acnes KPA171202; identical to SEQ ID NO: 19873

SEQ ID NO: 37670 - DNA, 1233 bp, Streptococcus pyogenes MGAS10394; identical to SEQ ID NO: 19874
  CDS (1)..(1233): transl_table=11

SEQ ID NO: 37671 - protein, 410 aa, Streptococcus pyogenes MGAS10394; identical to SEQ ID NO: 19875

SEQ ID NO: 37672 - DNA, 1263 bp, Leifsonia xyli subsp. xyli str. CTCB07; identical to SEQ ID NO: 19876
  CDS (1)..(1263): transl_table=11

SEQ ID NO: 37673 - protein, 420 aa, Leifsonia xyli subsp. xyli str. CTCB07; identical to SEQ ID NO: 19877

SEQ ID NO: 37674 - DNA, 1245 bp, Desulfotalea psychrophila LSv54; identical to SEQ ID NO: 19878
  CDS (1)..(1245): transl_table=11

SEQ ID NO: 37675 - protein, 414 aa, Desulfotalea psychrophila LSv54; identical to SEQ ID NO: 19879

SEQ ID NO: 37676 - DNA, 1281 bp, Rickettsia typhi str. Wilmington; identical to SEQ ID NO: 19880
  CDS (1)..(1281): transl_table=11

SEQ ID NO: 37677 - protein, 426 aa, Rickettsia typhi str. Wilmington; identical to SEQ ID NO: 19881

SEQ ID NO: 37678 - DNA, 1275 bp, Yersinia pseudotuberculosis IP 32953; identical to SEQ ID NO: 19882
  CDS (1)..(1275): transl_table=11

SEQ ID NO: 37679 - protein, 424 aa, Yersinia pseudotuberculosis IP 32953; identical to SEQ ID NO: 19883

SEQ ID NO: 37680 - DNA, 1242 bp, Yersinia pseudotuberculosis IP 32953; identical to SEQ ID NO: 19884
  CDS (1)..(1242): transl_table=11

SEQ ID NO: 37681 - protein, 413 aa, Yersinia pseudotuberculosis IP 32953; identical to SEQ ID NO: 19885

SEQ ID NO: 37682 - DNA, 1242 bp, Symbiobacterium thermophilum IAM 14863; identical to SEQ ID NO: 19886
  CDS (1)..(1242): transl_table=11

SEQ ID NO: 37683 - protein, 413 aa, Symbiobacterium thermophilum IAM 14863; identical to SEQ ID NO: 19887

SEQ ID NO: 37684 - DNA, 1239 bp, Bacillus licheniformis ATCC 14580; identical to SEQ ID NO: 19888
  CDS (1)..(1239): transl_table=11

SEQ ID NO: 37685 - protein, 412 aa, Bacillus licheniformis ATCC 14580; identical to SEQ ID NO: 19889

SEQ ID NO: 37686 - DNA, 1221 bp, Mannheimia succiniciproducens MBEL55E; identical to SEQ ID NO: 19890
  CDS (1)..(1221): transl_table=11

SEQ ID NO: 37687 - protein, 406 aa, Mannheimia succiniciproducens MBEL55E; identical to SEQ ID NO: 19891

SEQ ID NO: 37688 - DNA, 1230 bp, Legionella pneumophila subsp. pneumophila str. Philadelphia 1; identical to SEQ ID NO: 19892
  CDS (1)..(1230): transl_table=11

SEQ ID NO: 37689 - protein, 409 aa, Legionella pneumophila subsp. pneumophila str. Philadelphia 1; identical to SEQ ID NO: 19893

SEQ ID NO: 37690 - DNA, 1293 bp, Legionella pneumophila subsp. pneumophila str. Philadelphia 1; identical to SEQ ID NO: 19894
  CDS (1)..(1293): transl_table=11

SEQ ID NO: 37691 - protein, 430 aa, Legionella pneumophila subsp. pneumophila str. Philadelphia 1; identical to SEQ ID NO: 19895

SEQ ID NO: 37692 - DNA, 1239 bp, Legionella pneumophila subsp. pneumophila str. Philadelphia 1; identical to SEQ ID NO: 19896
  CDS (1)..(1239): transl_table=11

SEQ ID NO: 37693 - protein, 412 aa, Legionella pneumophila subsp. pneumophila str. Philadelphia 1; identical to SEQ ID NO: 19897

SEQ ID NO: 37694 - DNA, 1263 bp, Bacteroides fragilis YCH46; identical to SEQ ID NO: 19898
  CDS (1)..(1263): transl_table=11

SEQ ID NO: 37695 - protein, 420 aa, Bacteroides fragilis YCH46; identical to SEQ ID NO: 19899

SEQ ID NO: 37696 - DNA, 1239 bp, Burkholderia mallei ATCC 23344; identical to SEQ ID NO: 19900
  CDS (1)..(1239): transl_table=11

SEQ ID NO: 37697 - protein, 412 aa, Burkholderia mallei ATCC 23344; identical to SEQ ID NO: 19901

SEQ ID NO: 37698 - DNA, 1206 bp, Methylococcus capsulatus str. Bath; identical to SEQ ID NO: 19902
  CDS (1)..(1206): transl_table=11

SEQ ID NO: 37699 - protein, 401 aa, Methylococcus capsulatus str. Bath; identical to SEQ ID NO: 19903

SEQ ID NO: 37700 - DNA, 1251 bp, Nocardia farcinica IFM 10152; identical to SEQ ID NO: 19904
  CDS (1)..(1251): transl_table=11

SEQ ID NO: 37701 - protein, 416 aa, Nocardia farcinica IFM 10152; identical to SEQ ID NO: 19905

SEQ ID NO: 37702 - DNA, 1230 bp, Legionella pneumophila str. Paris; identical to SEQ ID NO: 19906
  CDS (1)..(1230): transl_table=11

SEQ ID NO: 37703 - protein, 409 aa, Legionella pneumophila str. Paris; identical to SEQ ID NO: 19907

SEQ ID NO: 37704 - DNA, 1293 bp, Legionella pneumophila str. Paris; identical to SEQ ID NO: 19908
  CDS (1)..(1293): transl_table=11

SEQ ID NO: 37705 - protein, 430 aa, Legionella pneumophila str. Paris; identical to SEQ ID NO: 19909

SEQ ID NO: 37706 - DNA, 1239 bp, Legionella pneumophila str. Paris; identical to SEQ ID NO: 19910
  CDS (1)..(1239): transl_table=11

SEQ ID NO: 37707 - protein, 412 aa, Legionella pneumophila str. Paris; identical to SEQ ID NO: 19911

SEQ ID NO: 37708 - DNA, 1239 bp, Legionella pneumophila str. Lens; identical to SEQ ID NO: 19912
  CDS (1)..(1239): transl_table=11

SEQ ID NO: 37709 - protein, 412 aa, Legionella pneumophila str. Lens; identical to SEQ ID NO: 19913

SEQ ID NO: 37710 - DNA, 1242 bp, Photobacterium profundum SS9; identical to SEQ ID NO: 19914
  CDS (1)..(1242): transl_table=11

SEQ ID NO: 37711 - protein, 413 aa, Photobacterium profundum SS9; identical to SEQ ID NO: 19915

SEQ ID NO: 37712 - DNA, 1233 bp, Streptococcus thermophilus LMG 18311; identical to SEQ ID NO: 19916
  CDS (1)..(1233): transl_table=11

SEQ ID NO: 37713 - protein, 410 aa, Streptococcus thermophilus LMG 18311; identical to SEQ ID NO: 19917

SEQ ID NO: 37714 - DNA, 1227 bp, Thermus thermophilus HB8; identical to SEQ ID NO: 19918
  CDS (1)..(1227): transl_table=11

SEQ ID NO: 37715 - protein, 408 aa, Thermus thermophilus HB8; identical to SEQ ID NO: 19919

SEQ ID NO: 37716 - DNA, 1239 bp, Geobacillus kaustophilus HTA426; identical to SEQ ID NO: 19920
  CDS (1)..(1239): transl_table=11

SEQ ID NO: 37717 - protein, 412 aa, Geobacillus kaustophilus HTA426; identical to SEQ ID NO: 19921

SEQ ID NO: 37718 - DNA, 1242 bp, Salmonella enterica subsp. enterica serovar Paratyphi A str. ATCC; identical to SEQ ID NO: 19922
  CDS (1)..(1242): transl_table=11

SEQ ID NO: 37719 - protein, 413 aa, Salmonella enterica subsp. enterica serovar Paratyphi A str. ATCC; identical to SEQ ID NO: 19923

SEQ ID NO: 37720 - DNA, 1284 bp, Anaplasma marginale str. St. Maries; identical to SEQ ID NO: 19924
  CDS (1)..(1284): transl_table=11

SEQ ID NO: 37721 - protein, 427 aa, Anaplasma marginale str. St. Maries; identical to SEQ ID NO: 19925

SEQ ID NO: 37722 - DNA, 1239 bp, Azoarcus sp. EbN1; identical to SEQ ID NO: 19926
  CDS (1)..(1239): transl_table=11

SEQ ID NO: 37723 - protein, 412 aa, Azoarcus sp. EbN1; identical to SEQ ID NO: 19927

SEQ ID NO: 37724 - DNA, 1299 bp, Zymomonas mobilis subsp. mobilis ZM4; identical to SEQ ID NO: 19928
  CDS (1)..(1299): transl_table=11

SEQ ID NO: 37725 - protein, 432 aa, Zymomonas mobilis subsp. mobilis ZM4; identical to SEQ ID NO: 19929

SEQ ID NO: 37726 - DNA, 1209 bp, Silicibacter pomeroyi DSS-3; identical to SEQ ID NO: 19930
  CDS (1)..(1209): transl_table=11

SEQ ID NO: 37727 - protein, 402 aa, Silicibacter pomeroyi DSS-3; identical to SEQ ID NO: 19931

SEQ ID NO: 37728 - DNA, 1266 bp, Silicibacter pomeroyi DSS-3; identical to SEQ ID NO: 19932
  CDS (1)..(1266): transl_table=11

SEQ ID NO: 37729 - protein, 421 aa, Silicibacter pomeroyi DSS-3; identical to SEQ ID NO: 19933

SEQ ID NO: 37730 - DNA, 1260 bp, Francisella tularensis subsp. tularensis SCHU S4; identical to SEQ ID NO: 19934
  CDS (1)..(1260): transl_table=11

SEQ ID NO: 37731 - protein, 419 aa, Francisella tularensis subsp. tularensis SCHU S4; identical to SEQ ID NO: 19935

SEQ ID NO: 37732 - DNA, 1254 bp, Synechococcus elongatus PCC 6301; identical to SEQ ID NO: 19936
  CDS (1)..(1254): transl_table=11

SEQ ID NO: 37733 - protein, 417 aa, Synechococcus elongatus PCC 6301; identical to SEQ ID NO: 19937

SEQ ID NO: 37734 - DNA, 1242 bp, Bacillus clausii KSM-K16; identical to SEQ ID NO: 19938
  CDS (1)..(1242): transl_table=11

SEQ ID NO: 37735 - protein, 413 aa, Bacillus clausii KSM-K16; identical to SEQ ID NO: 19939

SEQ ID NO: 37736 - DNA, 1215 bp, Campylobacter jejuni RM1221; identical to SEQ ID NO: 19940
  CDS (1)..(1215): transl_table=11

SEQ ID NO: 37737 - protein, 404 aa, Campylobacter jejuni RM1221; identical to SEQ ID NO: 19941

SEQ ID NO: 37738 - DNA, 1272 bp, Ehrlichia ruminantium str. Welgevonden; identical to SEQ ID NO: 19942
  CDS (1)..(1272): transl_table=11

SEQ ID NO: 37739 - protein, 423 aa, Ehrlichia ruminantium str. Welgevonden; identical to SEQ ID NO: 19943

SEQ ID NO: 37740 - DNA, 1269 bp, Dehalococcoides ethenogenes 195; identical to SEQ ID NO: 19944
  CDS (1)..(1269): transl_table=11

SEQ ID NO: 37741 - protein, 422 aa, Dehalococcoides ethenogenes 195; identical to SEQ ID NO: 19945

SEQ ID NO: 37742 - DNA, 1245 bp, Staphylococcus epidermidis RP62A; identical to SEQ ID NO: 19946
  CDS (1)..(1245): transl_table=11

SEQ ID NO: 37743 - protein, 414 aa, Staphylococcus epidermidis RP62A; identical to SEQ ID NO: 19947

SEQ ID NO: 37744 - DNA, 1287 bp, Gluconobacter oxydans 621H; identical to SEQ ID NO: 19948
  CDS (1)..(1287): transl_table=11

SEQ ID NO: 37745 - protein, 428 aa, Gluconobacter oxydans 621H; identical to SEQ ID NO: 19949

SEQ ID NO: 37746 - DNA, 1272 bp, Ehrlichia ruminantium str. Gardel; identical to SEQ ID NO: 19950
  CDS (1)..(1272): transl_table=11

SEQ ID NO: 37747 - protein, 423 aa, Ehrlichia ruminantium str. Gardel; identical to SEQ ID NO: 19951

SEQ ID NO: 37748 - DNA, 1269 bp, Wolbachia endosymbiont strain TRS of Brugia malayi; identical to SEQ ID NO: 19952
  CDS (1)..(1269): transl_table=11

SEQ ID NO: 37749 - protein, 422 aa, Wolbachia endosymbiont strain TRS of Brugia malayi; identical to SEQ ID NO: 19953

SEQ ID NO: 37750 - DNA, 1299 bp, Xanthomonas oryzae pv. oryzae KACC10331; identical to SEQ ID NO: 19954
  CDS (1)..(1299): transl_table=11

SEQ ID NO: 37751 - protein, 432 aa, Xanthomonas oryzae pv. oryzae KACC10331; identical to SEQ ID NO: 19955

SEQ ID NO: 37752 - DNA, 1245 bp, Vibrio fischeri ES114; identical to SEQ ID NO: 19956
  CDS (1)..(1245): transl_table=11

SEQ ID NO: 37753 - protein, 414 aa, Vibrio fischeri ES114; identical to SEQ ID NO: 19957

SEQ ID NO: 37754 - DNA, 1248 bp, Neisseria gonorrhoeae FA 1090; identical to SEQ ID NO: 19958
  CDS (1)..(1248): transl_table=11

SEQ ID NO: 37755 - protein, 415 aa, Neisseria gonorrhoeae FA 1090; identical to SEQ ID NO: 19959

SEQ ID NO: 37756 - DNA, 1263 bp, Bacteroides fragilis NCTC 9343; identical to SEQ ID NO: 19960
  CDS (1)..(1263): transl_table=11

SEQ ID NO: 37757 - protein, 420 aa, Bacteroides fragilis NCTC 9343; identical to SEQ ID NO: 19961

SEQ ID NO: 37758 - DNA, 1251 bp, Chlamydophila abortus S26/3; identical to SEQ ID NO: 19962
  CDS (1)..(1251): transl_table=11

SEQ ID NO: 37759 - protein, 416 aa, Chlamydophila abortus S26/3; identical to SEQ ID NO: 19963

SEQ ID NO: 37760 - DNA, 1263 bp, Brucella abortus biovar 1 str. 9-941; identical to SEQ ID NO: 19964
  CDS (1)..(1263): transl_table=11

SEQ ID NO: 37761 - protein, 420 aa, Brucella abortus biovar 1 str. 9-941; identical to SEQ ID NO: 19965

SEQ ID NO: 37762 - DNA, 1236 bp, Xanthomonas campestris pv. campestris str. 8004; identical to SEQ ID NO: 19966
  CDS (1)..(1236): transl_table=11

SEQ ID NO: 37763 - protein, 411 aa, Xanthomonas campestris pv. campestris str. 8004; identical to SEQ ID NO: 19967

SEQ ID NO: 37764 - DNA, 1281 bp, Rickettsia felis URRWXCal2; identical to SEQ ID NO: 19968
  CDS (1)..(1281): transl_table=11

SEQ ID NO: 37765 - protein, 426 aa, Rickettsia felis URRWXCal2; identical to SEQ ID NO: 19969

SEQ ID NO: 37766 - DNA, 1245 bp, Staphylococcus haemolyticus JCSC1435; identical to SEQ ID NO: 19970
  CDS (1)..(1245): transl_table=11

SEQ ID NO: 37767 - protein, 414 aa, Staphylococcus haemolyticus JCSC1435; identical to SEQ ID NO: 19971

SEQ ID NO: 37768 - DNA, 1245 bp, Pseudomonas fluorescens Pf-5; identical to SEQ ID NO: 19972
  CDS (1)..(1245): transl_table=11

SEQ ID NO: 37769 - protein, 414 aa, Pseudomonas fluorescens Pf-5; identical to SEQ ID NO: 19973

SEQ ID NO: 37770 - DNA, 1269 bp, Pseudomonas fluorescens Pf-5; identical to SEQ ID NO: 19974
  CDS (1)..(1269): transl_table=11

SEQ ID NO: 37771 - protein, 422 aa, Pseudomonas fluorescens Pf-5; identical to SEQ ID NO: 19975

SEQ ID NO: 37772 - DNA, 1416 bp, Psychrobacter arcticum 273-4; identical to SEQ ID NO: 19976
  CDS (1)..(1416): transl_table=11

SEQ ID NO: 37773 - protein, 471 aa, Psychrobacter arcticum 273-4; identical to SEQ ID NO: 19977

SEQ ID NO: 37774 - DNA, 1239 bp, Colwellia psychrerythraea 34H; identical to SEQ ID NO: 19978
  CDS (1)..(1239): transl_table=11

SEQ ID NO: 37775 - protein, 412 aa, Colwellia psychrerythraea 34H; identical to SEQ ID NO: 19979

SEQ ID NO: 37776 - DNA, 1212 bp, Colwellia psychrerythraea 34H; identical to SEQ ID NO: 19980
  CDS (1)..(1212): transl_table=11

SEQ ID NO: 37777 - protein, 403 aa, Colwellia psychrerythraea 34H; identical to SEQ ID NO: 19981

SEQ ID NO: 37778 - DNA, 1245 bp, Pseudomonas syringae pv. phaseolicola 1448A; identical to SEQ ID NO: 19982
  CDS (1)..(1245): transl_table=11

SEQ ID NO: 37779 - protein, 414 aa, Pseudomonas syringae pv. phaseolicola 1448A; identical to SEQ ID NO: 19983

SEQ ID NO: 37780 - DNA, 1233 bp, Streptococcus pyogenes MGAS5005; identical to SEQ ID NO: 19984
  CDS (1)..(1233): transl_table=11

SEQ ID NO: 37781 - protein, 410 aa, Streptococcus pyogenes MGAS5005; identical to SEQ ID NO: 19985

SEQ ID NO: 37782 - DNA, 1236 bp, Dechloromonas aromatica RCB; identical to SEQ ID NO: 19986
  CDS (1)..(1236): transl_table=11

SEQ ID NO: 37783 - protein, 411 aa, Dechloromonas aromatica RCB; identical to SEQ ID NO: 19987

SEQ ID NO: 37784 - DNA, 1263 bp, Thermobifida fusca YX; identical to SEQ ID NO: 19988
  CDS (1)..(1263): transl_table=11

SEQ ID NO: 37785 - protein, 420 aa, Thermobifida fusca YX; identical to SEQ ID NO: 19989

SEQ ID NO: 37786 - DNA, 1239 bp, Thermobifida fusca YX; identical to SEQ ID NO: 19990
  CDS (1)..(1239): transl_table=11

SEQ ID NO: 37787 - protein, 412 aa, Thermobifida fusca YX; identical to SEQ ID NO: 19991

SEQ ID NO: 37788 - DNA, 1248 bp, Prochlorococcus marinus str. NATL2A; identical to SEQ ID NO: 19992
  CDS (1)..(1248): transl_table=11

SEQ ID NO: 37789 - protein, 415 aa, Prochlorococcus marinus str. NATL2A; identical to SEQ ID NO: 19993

SEQ ID NO: 37790 - DNA, 1233 bp, Ralstonia eutropha JMP134; identical to SEQ ID NO: 19994
  CDS (1)..(1233): transl_table=11

SEQ ID NO: 37791 - protein, 410 aa, Ralstonia eutropha JMP134; identical to SEQ ID NO: 19995

SEQ ID NO: 37792 - DNA, 1245 bp, Staphylococcus saprophyticus subsp. saprophyticus ATCC 15305; identical to SEQ ID NO: 19996
  CDS (1)..(1245): transl_table=11

SEQ ID NO: 37793 - protein, 414 aa, Staphylococcus saprophyticus subsp. saprophyticus ATCC 15305; identical to SEQ ID NO: 19997

SEQ ID NO: 37794 - DNA, 1269 bp, Ehrlichia canis str. Jake; identical to SEQ ID NO: 19998
  CDS (1)..(1269): transl_table=11

SEQ ID NO: 37795 - protein, 422 aa, Ehrlichia canis str. Jake; identical to SEQ ID NO: 19999

SEQ ID NO: 37796 - DNA, 1269 bp, Dehalococcoides sp. CBDB1; identical to SEQ ID NO: 20000
  CDS (1)..(1269): transl_table=11

SEQ ID NO: 37797 - protein, 422 aa, Dehalococcoides sp. CBDB1; identical to SEQ ID NO: 20001

SEQ ID NO: 37798 - DNA, 1233 bp, Thiobacillus denitrificans ATCC 25259; identical to SEQ ID NO: 20002
  CDS (1)..(1233): transl_table=11

SEQ ID NO: 37799 - protein, 410 aa, Thiobacillus denitrificans ATCC 25259; identical to SEQ ID NO: 20003

SEQ ID NO: 37800 - DNA, 1215 bp, Pseudomonas syringae pv. syringae B728a; identical to SEQ ID NO: 20004
  CDS (1)..(1215)

SEQ ID NO: 37801 - protein, 404 aa, Pseudomonas syringae pv. syringae B728a; identical to SEQ ID NO: 20005

SEQ ID NO: 37802 - DNA, 1215 bp, Pseudomonas aeruginosa UCBPP-PA14; identical to SEQ ID NO: 20006
  CDS (1)..(1215)

SEQ ID NO: 37803 - protein, 404 aa, Pseudomonas aeruginosa UCBPP-PA14; identical to SEQ ID NO: 20007

SEQ ID NO: 37804 - DNA, 1215 bp, Pseudomonas fluorescens PfO-1; identical to SEQ ID NO: 20008
  CDS (1)..(1215)

SEQ ID NO: 37805 - protein, 404 aa, Pseudomonas fluorescens PfO-1; identical to SEQ ID NO: 20009

SEQ ID NO: 37806 - DNA, 1236 bp, Enterococcus faecium DO; identical to SEQ ID NO: 20010
  CDS (1)..(1236): transl_table=11

SEQ ID NO: 37807 - protein, 411 aa, Enterococcus faecium DO; identical to SEQ ID NO: 20011

SEQ ID NO: 37808 - DNA, 1308 bp, Neurospora crassa; identical to SEQ ID NO: 20012
  misc_feature (251)..(251): n is a, c, g, or t
  misc_feature (463)..(463): n is a, c, g, or t
  misc_feature (522)..(522): n is a, c, g, or t
  misc_feature (669)..(669): n is a, c, g, or t
  misc_feature (677)..(677): n is a, c, g, or t
  misc_feature (908)..(908): n is a, c, g, or t
  misc_feature (982)..(982): n is a, c, g, or t
  misc_feature (996)..(996): n is a, c, g, or t
  misc_feature (1033)..(1033): n is a, c, g, or t
  misc_feature (1036)..(1036): n is a, c, g, or t
  misc_feature (1047)..(1047): n is a, c, g, or t
  misc_feature (1067)..(1067): n is a, c, g, or t
  misc_feature (1150)..(1150): n is a, c, g, or t
  misc_feature (1263)..(1263): n is a, c, g, or t
  misc_feature (1266)..(1266): n is a, c, g, or t
  misc_feature (1302)..(1302): n is a, c, g, or t
  CDS (1)..(1308)

SEQ ID NO: 37809 - protein, 435 aa, Neurospora crassa; identical to SEQ ID NO: 20013
  misc_feature (84)..(84): Xaa can be any naturally occuring amino acid
  misc_feature (155)..(155): Xaa can be any naturally occuring amino acid
  misc_feature (174)..(174): Xaa can be any naturally occuring amino acid
  misc_feature (226)..(226): Xaa can be any naturally occuring amino acid
  misc_feature (303)..(303): Xaa can be any naturally occuring amino acid
  misc_feature (328)..(328): Xaa can be any naturally occuring amino acid
  misc_feature (332)..(332): Xaa can be any naturally occuring amino acid
  misc_feature (345)..(346): Xaa can be any naturally occuring amino acid
  misc_feature (349)..(349): Xaa can be any naturally occuring amino acid
  misc_feature (356)..(356): Xaa can be any naturally occuring amino acid
  misc_feature (384)..(384): Xaa can be any naturally occuring amino acid
  misc_feature (422)..(422): Xaa can be any naturally occuring amino acid
  misc_feature (434)..(434): Xaa can be any naturally occuring amino acid

SEQ ID NO: 37810 - DNA, 1425 bp, Perilla frutescens; identical to SEQ ID NO: 20014
  CDS (1)..(1425)

SEQ ID NO: 37811 - protein, 474 aa, Perilla frutescens; identical to SEQ ID NO: 20015

SEQ ID NO: 37812 - DNA, 1593 bp, Perilla frutescens; identical to SEQ ID NO: 20016
  CDS (1)..(1593)

SEQ ID NO: 37813 - protein, 530 aa, Perilla frutescens; identical to SEQ ID NO: 20017

SEQ ID NO: 37814 - DNA, 1278 bp, Streptomyces roseofulvus; identical to SEQ ID NO: 20018
  CDS (1)..(1278): transl_table=11

SEQ ID NO: 37815 - protein, 425 aa, Streptomyces roseofulvus; identical to SEQ ID NO: 20019

SEQ ID NO: 37816 - DNA, 1467 bp, Capsicum chinense; identical to SEQ ID NO: 20020
  CDS (1)..(1467)

SEQ ID NO: 37817 - protein, 488 aa, Capsicum chinense; identical to SEQ ID NO: 20021

SEQ ID NO: 37818 - DNA, 1554 bp, Cuphea wrightii; identical to SEQ ID NO: 20022
  CDS (1)..(1554)

SEQ ID NO: 37819 - protein, 517 aa, Cuphea wrightii; identical to SEQ ID NO: 20023

SEQ ID NO: 37820 - DNA, 1623 bp, Cuphea wrightii; identical to SEQ ID NO: 20024
  CDS (1)..(1623)

SEQ ID NO: 37821 - protein, 540 aa, Cuphea wrightii; identical to SEQ ID NO: 20025

SEQ ID NO: 37822 - DNA, 1488 bp, Hordeum vulgare; identical to SEQ ID NO: 20026
  CDS (1)..(1488)

SEQ ID NO: 37823 - protein, 495 aa, Hordeum vulgare; identical to SEQ ID NO: 20027

SEQ ID NO: 37824 - DNA, 1470 bp, Hordeum vulgare; identical to SEQ ID NO: 20028
  CDS (1)..(1470)

SEQ ID NO: 37825 - protein, 489 aa, Hordeum vulgare; identical to SEQ ID NO: 20029

SEQ ID NO: 37826 - DNA, 1608 bp, Ricinus communis; identical to SEQ ID NO: 20030
  CDS (1)..(1608)

SEQ ID NO: 37827 - protein, 535 aa, Ricinus communis; identical to SEQ ID NO: 20031

SEQ ID NO: 37828 - DNA, 1410 bp, Ricinus communis; identical to SEQ ID NO: 20032
  CDS (1)..(1410)

SEQ ID NO: 37829 - protein, 469 aa, Ricinus communis; identical to SEQ ID NO: 20033

SEQ ID NO: 37830 - DNA, 1269 bp, Pseudomonas syringae pv; identical to SEQ ID NO: 20034
  CDS (1)..(1269): transl_table=11

SEQ ID NO: 37831 - protein, 422 aa, Pseudomonas syringae pv; identical to SEQ ID NO: 20035

SEQ ID NO: 37832 - DNA, 1272 bp, Streptomyces glaucescens; identical to SEQ ID NO: 20036
  CDS (1)..(1272): transl_table=11

SEQ ID NO: 37833 - protein, 423 aa, Streptomyces glaucescens; identical to SEQ ID NO: 20037

SEQ ID NO: 37834 - DNA, 1269 bp, Streptomyces griseus; identical to SEQ ID NO: 20038
  CDS (1)..(1269): transl_table=11

SEQ ID NO: 37835 - protein, 422 aa, Streptomyces griseus; identical to SEQ ID NO: 20039

SEQ ID NO: 37836 - DNA, 1293 bp, Streptomyces nogalater; identical to SEQ ID NO: 20040
  CDS (1)..(1293): transl_table=11

SEQ ID NO: 37837 - protein, 430 aa, Streptomyces nogalater; identical to SEQ ID NO: 20041

SEQ ID NO: 37838 - DNA, 1260 bp, Streptomyces peucetius; identical to SEQ ID NO: 20042
  CDS (1)..(1260): transl_table=11

SEQ ID NO: 37839 - protein, 419 aa, Streptomyces peucetius; identical to SEQ ID NO: 20043

SEQ ID NO: 37840 - DNA, 1278 bp, Streptomyces roseofulvus; identical to SEQ ID NO: 20044
  CDS (1)..(1278): transl_table=11

SEQ ID NO: 37841 - protein, 425 aa, Streptomyces roseofulvus; identical to SEQ ID NO: 20045

SEQ ID NO: 37842 - DNA, 1467 bp, Glycine max; identical to SEQ ID NO: 20046
  CDS (1)..(1467)

SEQ ID NO: 37843 - protein, 488 aa, Glycine max; identical to SEQ ID NO: 20047

SEQ ID NO: 37844 - DNA, 1470 bp, Glycine max; identical to SEQ ID NO: 20048
  CDS (1)..(1470)

SEQ ID NO: 37845 - protein, 489 aa, Glycine max; identical to SEQ ID NO: 20049

SEQ ID NO: 37846 - DNA, 1299 bp, Streptomyces spiramyceticus; identical to SEQ ID NO: 20050
  CDS (1)..(1299): transl_table=11

SEQ ID NO: 37847 - protein, 432 aa, Streptomyces spiramyceticus; identical to SEQ ID NO: 20051

SEQ ID NO: 37848 - DNA, 1218 bp, Saccharopolyspora erythraea; identical to SEQ ID NO: 20052
  CDS (1)..(1218): transl_table=11

SEQ ID NO: 37849 - protein, 405 aa, Saccharopolyspora erythraea; identical to SEQ ID NO: 20053

SEQ ID NO: 37850 - DNA, 1269 bp, Streptomyces griseoruber; identical to SEQ ID NO: 20054
  CDS (1)..(1269): transl_table=11

SEQ ID NO: 37851 - protein, 422 aa, Streptomyces griseoruber; identical to SEQ ID NO: 20055

SEQ ID NO: 37852 - DNA, 1398 bp, Oryza sativa; identical to SEQ ID NO: 20056
  CDS (1)..(1398)

SEQ ID NO: 37853 - protein, 465 aa, Oryza sativa; identical to SEQ ID NO: 20057

SEQ ID NO: 37854 - DNA, 1254 bp, Treponema hyodysenteriae; identical to SEQ ID NO: 20058
  CDS (1)..(1254): transl_table=11

SEQ ID NO: 37855 - protein, 417 aa, Treponema hyodysenteriae; identical to SEQ ID NO: 20059

SEQ ID NO: 37856 - DNA, 1269 bp, Rhizobium sp; identical to SEQ ID NO: 20060
  CDS (1)..(1269): transl_table=11

SEQ ID NO: 37857 - protein, 422 aa, Rhizobium sp; identical to SEQ ID NO: 20061

SEQ ID NO: 37858 - DNA, 1305 bp, Plasmodium yoelii yoelii; identical to SEQ ID NO: 20062
  CDS (1)..(1305)

SEQ ID NO: 37859 - protein, 434 aa, Plasmodium yoelii yoelii; identical to SEQ ID NO: 20063

SEQ ID NO: 37860 - DNA, 1275 bp, Streptomyces murayamaensis; identical to SEQ ID NO: 20064
  CDS (1)..(1275): transl_table=11

SEQ ID NO: 37861 - protein, 424 aa, Streptomyces murayamaensis; identical to SEQ ID NO: 20065

SEQ ID NO: 37862 - DNA, 1446 bp, Dictyostelium discoideum; identical to SEQ ID NO: 20066
  CDS (1)..(1446)

SEQ ID NO: 37863 - protein, 481 aa, Dictyostelium discoideum; identical to SEQ ID NO: 20067

SEQ ID NO: 37864 - DNA, 1248 bp, Heliobacillus mobilis; identical to SEQ ID NO: 20068
  CDS (1)..(1248): transl_table=11

SEQ ID NO: 37865 - protein, 415 aa, Heliobacillus mobilis; identical to SEQ ID NO: 20069

SEQ ID NO: 37866 - DNA, 1626 bp, Arabidopsis thaliana; identical to SEQ ID NO: 20070
  CDS (1)..(1626)

SEQ ID NO: 37867 - protein, 541 aa, Arabidopsis thaliana; identical to SEQ ID NO: 20071

SEQ ID NO: 37868 - DNA, 1272 bp, Streptomyces galilaeus; identical to SEQ ID NO: 20072
  CDS (1)..(1272): transl_table=11

SEQ ID NO: 37869 - protein, 423 aa, Streptomyces galilaeus; identical to SEQ ID NO: 20073

SEQ ID NO: 37870 - DNA, 1617 bp, Cuphea lanceolata; identical to SEQ ID NO: 20074
  CDS (1)..(1617)

SEQ ID NO: 37871 - protein, 538 aa, Cuphea lanceolata; identical to SEQ ID NO: 20075

SEQ ID NO: 37872 - DNA, 1371 bp, Coriandrum sativum; identical to SEQ ID NO: 20076
  CDS (1)..(1371)

SEQ ID NO: 37873 - protein, 456 aa, Coriandrum sativum; identical to SEQ ID NO: 20077

SEQ ID NO: 37874 - DNA, 1236 bp, Xanthomonas albilineans; identical to SEQ ID NO: 20078
  CDS (1)..(1236): transl_table=11

SEQ ID NO: 37875 - protein, 411 aa, Xanthomonas albilineans; identical to SEQ ID NO: 20079

SEQ ID NO: 37876 - DNA, 1272 bp, Streptomyces maritimus; identical to SEQ ID NO: 20080
  CDS (1)..(1272): transl_table=11

SEQ ID NO: 37877 - protein, 423 aa, Streptomyces maritimus; identical to SEQ ID NO: 20081

SEQ ID NO: 37878 - DNA, 1272 bp, Streptomyces galilaeus; identical to SEQ ID NO: 20082
  CDS (1)..(1272): transl_table=11

SEQ ID NO: 37879 - protein, 423 aa, Streptomyces galilaeus; identical to SEQ ID NO: 20083

SEQ ID NO: 37880 - DNA, 1635 bp, Brassica napus; identical to SEQ ID NO: 20084
  CDS (1)..(1635)

SEQ ID NO: 37881 - protein, 544 aa, Brassica napus; identical to SEQ ID NO: 20085

SEQ ID NO: 37882 - DNA, 1302 bp, Brassica napus; identical to SEQ ID NO: 20086
  CDS (1)..(1302)

SEQ ID NO: 37883 - protein, 433 aa, Brassica napus; identical to SEQ ID NO: 20087

SEQ ID NO: 37884 - DNA, 1467 bp, Glycine max; identical to SEQ ID NO: 20088
  CDS (1)..(1467)

SEQ ID NO: 37885 - protein, 488 aa, Glycine max; identical to SEQ ID NO: 20089

SEQ ID NO: 37886 - DNA, 1410 bp, Glycine max; identical to SEQ ID NO: 20090
  CDS (1)..(1410)

SEQ ID NO: 37887 - protein, 469 aa, Glycine max; identical to SEQ ID NO: 20091

SEQ ID NO: 37888 - DNA, 1410 bp, Glycine max; identical to SEQ ID NO: 20092
  CDS (1)..(1410)

SEQ ID NO: 37889 - protein, 469 aa, Glycine max; identical to SEQ ID NO: 20093

SEQ ID NO: 37890 - DNA, 1722 bp, Elaeis guineensis var; identical to SEQ ID NO: 20094
  CDS (1)..(1722)

SEQ ID NO: 37891 - protein, 573 aa, Elaeis guineensis var; identical to SEQ ID NO: 20095

SEQ ID NO: 37892 - DNA, 1248 bp, Vibrio marinus; identical to SEQ ID NO: 20096
  CDS (1)..(1248): transl_table=11

SEQ ID NO: 37893 - protein, 415 aa, Vibrio marinus; identical to SEQ ID NO: 20097

SEQ ID NO: 37894 - DNA, 1260 bp, Streptomyces rochei; identical to SEQ ID NO: 20098
  CDS (1)..(1260): transl_table=11

SEQ ID NO: 37895 - protein, 419 aa, Streptomyces rochei; identical to SEQ ID NO: 20099

SEQ ID NO: 37896 - DNA, 1689 bp, Arabidopsis thaliana; identical to SEQ ID NO: 20100
  CDS (1)..(1689)

SEQ ID NO: 37897 - protein, 562 aa, Arabidopsis thaliana; identical to SEQ ID NO: 20101

SEQ ID NO: 37898 - DNA, 1605 bp, Cuphea hookeriana; identical to SEQ ID NO: 20102
  CDS (1)..(1605)

SEQ ID NO: 37899 - protein, 534 aa, Cuphea hookeriana; identical to SEQ ID NO: 20103

SEQ ID NO: 37900 - DNA, 1641 bp, Cuphea pulcherrima; identical to SEQ ID NO: 20104
  CDS (1)..(1641)

SEQ ID NO: 37901 - protein, 546 aa, Cuphea pulcherrima; identical to SEQ ID NO: 20105

SEQ ID NO: 37902 - DNA, 1329 bp, Saccharomyces cerevisiae; identical to SEQ ID NO: 20106
  CDS (1)..(1329)

SEQ ID NO: 37903 - protein, 442 aa, Saccharomyces cerevisiae; identical to SEQ ID NO: 20107

SEQ ID NO: 37904 - DNA, 1251 bp, Mycobacterium leprae; identical to SEQ ID NO: 20108
  CDS (1)..(1251): transl_table=11

SEQ ID NO: 37905 - protein, 416 aa, Mycobacterium leprae; identical to SEQ ID NO: 20109

SEQ ID NO: 37906 - DNA, 1221 bp, Haemophilus influenzae; identical to SEQ ID NO: 20110
  CDS (1)..(1221): transl_table=11

SEQ ID NO: 37907 - protein, 406 aa, Haemophilus influenzae; identical to SEQ ID NO: 20111

SEQ ID NO: 37908 - DNA, 1266 bp, Rhizobium meliloti; identical to SEQ ID NO: 20112
  CDS (1)..(1266): transl_table=11

SEQ ID NO: 37909 - protein, 421 aa, Rhizobium meliloti; identical to SEQ ID NO: 20113

SEQ ID NO: 37910 - DNA, 1251 bp, Synechocystis sp; identical to SEQ ID NO: 20114
  CDS (1)..(1251): transl_table=11

SEQ ID NO: 37911 - protein, 416 aa, Synechocystis sp; identical to SEQ ID NO: 20115

SEQ ID NO: 37912 - DNA, 1245 bp, Vibrio cholerae; identical to SEQ ID NO: 20116
  CDS (1)..(1245)

SEQ ID NO: 37913 - protein, 414 aa, Vibrio cholerae; identical to SEQ ID NO: 19655

SEQ ID NO: 37914 - DNA, 1248 bp, Vibrio harveyi; identical to SEQ ID NO: 20118
  CDS (1)..(1248)

SEQ ID NO: 37915 - protein, 415 aa, Vibrio harveyi; identical to SEQ ID NO: 20119

SEQ ID NO: 37916 - DNA, 1272 bp, Streptomyces coelicolor; identical to SEQ ID NO: 20120
  CDS (1)..(1272): transl_table=11

SEQ ID NO: 37917 - protein, 423 aa, Streptomyces coelicolor; identical to SEQ ID NO: 20121

SEQ ID NO: 37918 - DNA, 1269 bp, Streptomyces halstedii; identical to SEQ ID NO: 20122
  CDS (1)..(1269): transl_table=11

SEQ ID NO: 37919 - protein, 422 aa, Streptomyces halstedii; identical to SEQ ID NO: 20123

SEQ ID NO: 37920 - DNA, 1422 bp, Arabidopsis thaliana; identical to SEQ ID NO: 20124
  CDS (1)..(1422)

SEQ ID NO: 37921 - protein, 473 aa, Arabidopsis thaliana; identical to SEQ ID NO: 20125

SEQ ID NO: 37922 - DNA, 1389 bp, Hordeum vulgare; identical to SEQ ID NO: 20126
  CDS (1)..(1389)

SEQ ID NO: 37923 - protein, 462 aa, Hordeum vulgare; identical to SEQ ID NO: 20127

SEQ ID NO: 37924 - DNA, 1386 bp, Arabidopsis thaliana; identical to SEQ ID NO: 20128
  CDS (1)..(1386)

SEQ ID NO: 37925 - protein, 461 aa, Arabidopsis thaliana; identical to SEQ ID NO: 20129

SEQ ID NO: 37926 - DNA, 24 bp, Artificial sequence
  Primer sequence
atgtctaagcgtcgtgtagttgtg

SEQ ID NO: 37927 - DNA, 27 bp, Artificial sequence
  Primer sequence
ttagatctttttaaagatcaaagaacc

SEQ ID NO: 37928 - protein, 494 aa, Artificial sequence; identical to SEQ ID NO: 20132
  Consensus
  Variant (10)..(10): Xaa in position 10 is any amino acid
  Variant (16)..(21): Xaa in position 16 to 21 is any amino acid
  Variant (23)..(24): Xaa in position 23 to 24 is any amino acid
  Variant (26)..(27): Xaa in position 26 to 27 is any amino acid
  Variant (29)..(30): Xaa in position 29 to 30 is any amino acid
  Variant (33)..(34): Xaa in position 33 to 34 is any amino acid
  Variant (36)..(45): Xaa in position 36 to 45 is any amino acid
  Variant (46)..(57): Xaa in position 46 to 57 is any or no amino acid
  Variant (60)..(60): Xaa in position 60 is any amino acid
  Variant (62)..(69): Xaa in position 62 to 69 is any amino acid
  Variant (70)..(86): Xaa in position 70 to 86 is any or no amino acid
  Variant (88)..(89): Xaa in position 88 to 89 is any amino acid
  Variant (94)..(97): Xaa in position 94 to 97 is any amino acid
  Variant (101)..(101): Xaa in position 101 is any amino acid
  Variant (104)..(105): Xaa in position 104 to 105 is any amino acid
  Variant (108)..(109): Xaa in position 108 to 109 is any amino acid
  Variant (111)..(117): Xaa in position 111 to 117 is any amino acid
  Variant (118)..(131): Xaa in position 118 to 131 is any or no amino acid
  Variant (133)..(133): Xaa in position 133 is any amino acid
  Variant (136)..(136): Xaa in position 136 is any amino acid
  Variant (145)..(157): Xaa in position 145 to 157 is any amino acid
  Variant (158)..(172): Xaa in position 158 to 172 is any or no amino acid
  Variant (174)..(179): Xaa in position 174 to 179 is any or no amino acid
  Variant (181)..(181): Xaa in position 181 is any amino acid
  Variant (183)..(184): Xaa in position 183 to 184 is any amino acid
  Variant (187)..(188): Xaa in position 187 to 188 is any amino acid
  Variant (190)..(191): Xaa in position 190 to 191 is any amino acid
  Variant (193)..(193): Xaa in position 193 is any amino acid
  Variant (196)..(196): Xaa in position 196 is any amino acid
  Variant (200)..(201): Xaa in position 200 to 201 is any amino acid
  Variant (203)..(204): Xaa in position 203 to 204 is any amino acid
  Variant (206)..(211): Xaa in position 206 to 211 is any amino acid
  Variant (215)..(215): Xaa in position 215 is any amino acid
  Variant (217)..(220): Xaa in position 217 to 220 is any amino acid
  Variant (223)..(223): Xaa in position 223 is any amino acid
  Variant (225)..(227): Xaa in position 225 to 227 is any amino acid
  Variant (229)..(230): Xaa in position 229 to 230 is any amino acid
  Variant (232)..(232): Xaa in position 232 is any amino acid
  Variant (234)..(244): Xaa in position 234 to 244 is any or no amino acid
  Variant (246)..(246): Xaa in position 246 is any amino acid
  Variant (249)..(249): Xaa in position 249 is any amino acid
  Variant (252)..(252): Xaa in position 252 is any amino acid
  Variant (254)..(254): Xaa in position 254 is any amino acid
  Variant (255)..(255): Xaa in position 255 is any or no amino acid
  Variant (257)..(258): Xaa in position 257 to 258 is any amino acid
  Variant (260)..(260): Xaa in position 260 is any amino acid
  Variant (265)..(265): Xaa in position 265 is any amino acid
  Variant (267)..(267): Xaa in position 267 is any amino acid
  Variant (272)..(272): Xaa in position 272 is any amino acid
  Variant (273)..(274): Xaa in position 273 to 274 is any or no amino acid
  Variant (276)..(277): Xaa in position 276 to 277 is any or no amino acid
  Variant (279)..(279): Xaa in position 279 is any or no amino acid
  Variant (281)..(282): Xaa in position 281 to 282 is any or no amino acid
  Variant (289)..(290): Xaa in position 289 to 290 is any amino acid
  Variant (292)..(292): Xaa in position 292 is any amino acid
  Variant (307)..(308): Xaa in position 307 to 308 is any amino acid
  Variant (312)..(313): Xaa in position 312 to 313 is any amino acid
  Variant (317)..(317): Xaa in position 317 is any amino acid
  Variant (319)..(319): Xaa in position 319 is any amino acid
  Variant (323)..(323): Xaa in position 323 is any amino acid
  Variant (325)..(325): Xaa in position 325 is any amino acid
  Variant (327)..(327): Xaa in position 327 is any amino acid
  Variant (329)..(329): Xaa in position 329 is any amino acid
  Variant (332)..(332): Xaa in position 332 is any amino acid
  Variant (336)..(336): Xaa in position 336 is any amino acid
  Variant (338)..(338): Xaa in position 338 is any amino acid
  Variant (339)..(340): Xaa in position 339 to 340 is any or no amino acid
  Variant (342)..(342): Xaa in position 342 is any amino acid
  Variant (344)..(346): Xaa in position 344 to 346 is any amino acid
  Variant (347)..(347): Xaa in position 347 is any or no amino acid
  Variant (349)..(350): Xaa in position 349 to 350 is any amino acid
  Variant (353)..(354): Xaa in position 353 to 354 is any amino acid
  Variant (356)..(356): Xaa in position 356 is any amino acid
  Variant (358)..(363): Xaa in position 358 to 363 is any or no amino acid
  Variant (365)..(365): Xaa in position 365 is any amino acid
  Variant (375)..(376): Xaa in position 375 to 376 is any amino acid
  Variant (377)..(377): Xaa in position 377 is any or no amino acid
  Variant (379)..(380): Xaa in position 379 to 380 is any amino acid
  Variant (382)..(383): Xaa in position 382 to 383 is any amino acid
  Variant (386)..(389): Xaa in position 386 to 389 is any amino acid
  Variant (391)..(392): Xaa in position 391 to 392 is any amino acid
  Variant (393)..(406): Xaa in position 393 to 406 is any or no amino acid
  Variant (408)..(408): Xaa in position 408 is any or no amino acid
  Variant (410)..(410): Xaa in position 410 is any amino acid
  Variant (415)..(416): Xaa in position 415 to 416 is any amino acid
  Variant (419)..(419): Xaa in position 419 is any amino acid
  Variant (430)..(431): Xaa in position 430 to 431 is any amino acid
  Variant (433)..(433): Xaa in position 433 is any amino acid
  Variant (436)..(441): Xaa in position 436 to 441 is any amino acid
  Variant (446)..(452): Xaa in position 446 to 452 is any amino acid
  Variant (453)..(459): Xaa in position 453 to 459 is any or no amino acid
  Variant (461)..(462): Xaa in position 461 to 462 is any amino acid
  Variant (464)..(473): Xaa in position 464 to 473 is any amino acid
  Variant (474)..(480): Xaa in position 474 to 480 is any or no amino acid
  Variant (484)..(484): Xaa in position 484 is any amino acid
  Variant (490)..(490): Xaa in position 490 is any amino acid
  Variant (492)..(493): Xaa in position 492 to 493 is any amino acid

SEQ ID NO: 37929 - protein, 31 aa, Artificial sequence; identical to SEQ ID NO: 20133
  Consensus
  Variant (2)..(2): Xaa in position 2 is any amino acid
  Variant (3)..(3): Xaa in position 3 is any or no amino acid
  Variant (5)..(5): Xaa in position 5 is Ile or Val
  Variant (8)..(8): Xaa in position 8 is any amino acid
  Variant (10)..(11): Xaa in position 10 to 11 is any amino acid
  Variant (12)..(12): Xaa in position 12 is Ala, Ser or Thr
  Variant (13)..(14): Xaa in position 13 to 14 is any amino acid
  Variant (15)..(15): Xaa in position 15 is Ala or Gly
  Variant (16)..(16): Xaa in position 16 is any amino acid
  Variant (17)..(17): Xaa in position 17 is Asp, Glu, Gly, Asn, Ser or Thr
  Variant (18)..(27): Xaa in position 18 to 27 is any amino acid
  Variant (29)..(30): Xaa in position 29 to 30 is any amino acid
  Variant (31)..(31): Xaa in position 31 is Ala or Gly

SEQ ID NO: 37930 - protein, 10 aa, Artificial sequence
  Consensus
  Variant (2)..(4): Xaa in position 2 to 4 is any amino acid
  Variant (6)..(6): Xaa in position 6 is Ala, Cys, Asn, Ser, Thr or Val
  Variant (7)..(8): Xaa in position 7 to 8 is any amino acid
  Variant (10)..(10): Xaa in position 10 is Ala, Cys, Asp, Gly, Asn or Ser
GXXXGXXXGX

SEQ ID NO: 37931 - protein, 45 aa, Artificial sequence; identical to SEQ ID NO: 20135
  Consensus
  Variant (2)..(5): Xaa in position 2 to 5 is any amino acid
  Variant (6)..(6): Xaa in position 6 is Asp or Asn
  Variant (7)..(7): Xaa in position 7 is any amino acid
  Variant (8)..(8): Xaa in position 8 is Ala, Gly, Ile, Leu, Pro or Val
  Variant (9)..(9): Xaa in position 9 is Ala, Gly, Pro, Ser or Thr
  Variant (10)..(10): Xaa in position 10 is Ala or Gly
  Variant (11)..(12): Xaa in position 11 to 12 is any amino acid
  Variant (13)..(13): Xaa in position 13 is Ala, Gly, Ser or Thr
  Variant (14)..(14): Xaa in position 14 is Ile, Leu, Met or Val
  Variant (15)..(19): Xaa in position 15 to 19 is any amino acid
  Variant (21)..(25): Xaa in position 21 to 25 is any amino acid
  Variant (26)..(27): Xaa in position 26 to 27 is any or no amino acid
  Variant (29)..(30): Xaa in position 29 to 30 is any or no amino acid
  Variant (32)..(33): Xaa in position 32 to 33 is Ala, Ser or Thr
  Variant (34)..(34): Xaa in position 34 is Ala, Gly or Ser
  Variant (35)..(36): Xaa in position 35 to 36 is any amino acid
  Variant (37)..(37): Xaa in position 37 is Ala, Cys, Asn, Ser or Thr
  Variant (38)..(38): Xaa in position 38 is Phe, Ile, Leu, Met or Val
  Variant (39)..(40): Xaa in position 39 to 40 is any amino acid
  Variant (41)..(41): Xaa in position 41 is Ala, Gly or Ser
  Variant (42)..(44): Xaa in position 42 to 44 is any amino acid
  Variant (45)..(45): Xaa in position 45 is Ile, Leu or Val

SEQ ID NO: 37932 - protein, 37 aa, Artificial sequence; identical to SEQ ID NO: 20136
  Consensus
  Variant (2)..(6): Xaa in position 2 to 6 is any amino acid
  Variant (8)..(8): Xaa in position 8 is Asp, Asn or Ser
  Variant (12)..(12): Xaa in position 12 is Ile, Leu or Met
  Variant (13)..(13): Xaa in position 13 is Ala, Gly or Ser
  Variant (14)..(14): Xaa in position 14 is Asp, Glu or Gly
  Variant (16)..(16): Xaa in position 16 is Ala, Cys, Gly or Ser
  Variant (17)..(17): Xaa in position 17 is Ala or Gly
  Variant (18)..(18): Xaa in position 18 is any amino acid
  Variant (19)..(19): Xaa in position 19 is Phe, Ile, Leu, Met or Val
  Variant (20)..(20): Xaa in position 20 is Ile, Leu, Met or Val
  Variant (21)..(21): Xaa in position 21 is Phe, Ile, Leu, Met or Val
  Variant (23)..(23): Xaa in position 23 is Ala, Asp, Glu, Ser or Thr
  Variant (24)..(26): Xaa in position 24 to 26 is any amino acid
  Variant (28)..(29): Xaa in position 28 to 29 is any amino acid
  Variant (31)..(31): Xaa in position 31 is any amino acid
  Variant (33)..(33): Xaa in position 33 is any amino acid
  Variant (34)..(34): Xaa in position 34 is Ile, Pro or Val
  Variant (35)..(36): Xaa in position 35 to 36 is any amino acid

SEQ ID NO: 37933 - protein, 23 aa, Artificial sequence
  Consensus
  Variant (2)..(2): Xaa in position 2 is Ile, Leu or Val
  Variant (3)..(3): Xaa in position 3 is Asn or Ser
  Variant (4)..(4): Xaa in position 4 is Ala, Cys, Thr or Val
  Variant (6)..(6): Xaa in position 6 is Ala or Gly
  Variant (7)..(7): Xaa in position 7 is Ser or Thr
  Variant (8)..(8): Xaa in position 8 is Ala, Gly or Ser
  Variant (10)..(11): Xaa in position 10 to 11 is any amino acid
  Variant (12)..(12): Xaa in position 12 is any or no amino acid
  Variant (14)..(15): Xaa in position 14 to 15 is any amino acid
  Variant (17)..(18): Xaa in position 17 to 18 is any amino acid
  Variant (19)..(22): Xaa in position 19 to 22 is any or no amino acid
YXXXHXXXTXXXDXXEXXXXXXA

SEQ ID NO: 37934 - protein, 32 aa, Artificial sequence; identical to SEQ ID NO: 20138
  Consensus
  Variant (3)..(3): Xaa in position 3 is Gly or Ser
  Variant (4)..(5): Xaa in position 4 to 5 is any amino acid
  Variant (8)..(8): Xaa in position 8 is any or no amino acid
  Variant (10)..(10): Xaa in position 10 is any or no amino acid
  Variant (12)..(12): Xaa in position 12 is Ala or Gly
  Variant (13)..(13): Xaa in position 13 is Ala, Ser or Thr
  Variant (15)..(15): Xaa in position 15 is Ala, Gly, Asn, Ser or Val
  Variant (16)..(16): Xaa in position 16 is any amino acid
  Variant (18)..(30): Xaa in position 18 to 30 is any amino acid
  Variant (31)..(31): Xaa in position 31 is any or no amino acid

SEQ ID NO: 37935 - DNA, 216 bp, Escherichia coli; identical to SEQ ID NO: 17081
  CDS (1)..(216)

SEQ ID NO: 37936 - protein, 71 aa, Escherichia coli; identical to SEQ ID NO: 17082

SEQ ID NO: 37937 - DNA, 228 bp, Escherichia coli; identical to SEQ ID NO: 17083
  CDS (1)..(228): transl_table=11

SEQ ID NO: 37938 - protein, 75 aa, Escherichia coli; identical to SEQ ID NO: 17084

SEQ ID NO: 37939 - DNA, 210 bp, Shigella flexneri; identical to SEQ ID NO: 17085
  CDS (1)..(210): transl_table=11

SEQ ID NO: 37940 - protein, 69 aa, Shigella flexneri; identical to SEQ ID NO: 17086

SEQ ID NO: 37941 - DNA, 219 bp, Salmonella typhimurium LT2; identical to SEQ ID NO: 17087
  CDS (1)..(219): transl_table=11

SEQ ID NO: 37942 - protein, 72 aa, Salmonella typhimurium LT2; identical to SEQ ID NO: 17088

SEQ ID NO: 37943 - DNA, 231 bp, Salmonella typhimurium LT2; identical to SEQ ID NO: 17089
  CDS (1)..(231): transl_table=11

SEQ ID NO: 37944 - protein, 76 aa, Salmonella typhimurium LT2; identical to SEQ ID NO: 17090

SEQ ID NO: 37945 - DNA, 213 bp, Salmonella enterica subsp. enterica serovar Typhi str. CT18; identical to SEQ ID NO: 17091
  CDS (1)..(213): transl_table=11

SEQ ID NO: 37946 - protein, 70 aa, Salmonella enterica subsp. enterica serovar Typhi str. CT18; identical to SEQ ID NO: 17092

SEQ ID NO: 37947 - DNA, 231 bp, Escherichia coli CFT073; identical to SEQ ID NO: 17093
  CDS (1)..(231): transl_table=11

SEQ ID NO: 37948 - protein, 76 aa, Escherichia coli CFT073; identical to SEQ ID NO: 17094

SEQ ID NO: 37949 - DNA, 231 bp, Citrobacter freundii; identical to SEQ ID NO: 17095
  CDS (1)..(231): transl_table=11

SEQ ID NO: 37950 - protein, 76 aa, Citrobacter freundii; identical to SEQ ID NO: 17096

SEQ ID NO: 37951 - DNA, 210 bp, Escherichia coli; identical to SEQ ID NO: 17097
  CDS (1)..(210): transl_table=11

SEQ ID NO: 37952 - protein, 69 aa, Escherichia coli; identical to SEQ ID NO: 17098

SEQ ID NO: 37953 - DNA, 204 bp, Wigglesworthia glossinidia endosymbiont of Glossina brevipalpis; identical to SEQ ID NO: 17099
  CDS (1)..(204): transl_table=11

SEQ ID NO: 37954 - protein, 67 aa, Wigglesworthia glossinidia endosymbiont of Glossina brevipalpis; identical to SEQ ID NO: 17100

SEQ ID NO: 37955 - DNA, 204 bp, Photorhabdus luminescens subsp. laumondii TTO1; identical to SEQ ID NO: 17101
  CDS (1)..(204): transl_table=11

SEQ ID NO: 37956 - protein, 67 aa, Photorhabdus luminescens subsp. laumondii TTO1; identical to SEQ ID NO: 17102

SEQ ID NO: 37957 - DNA, 213 bp, Serratia marcescens; identical to SEQ ID NO: 17103
  CDS (1)..(213): transl_table=11

SEQ ID NO: 37958 - protein, 70 aa, Serratia marcescens; identical to SEQ ID NO: 17104

SEQ ID NO: 37959 - DNA, 231 bp, Erwinia amylovora; identical to SEQ ID NO: 17105
  CDS (1)..(231): transl_table=11

SEQ ID NO: 37960 - protein, 76 aa, Erwinia amylovora; identical to SEQ ID NO: 17106

SEQ ID NO: 37961 - DNA, 204 bp, Klebsiella pneumoniae; identical to SEQ ID NO: 17107
  CDS (1)..(204): transl_table=11

SEQ ID NO: 37962 - protein, 67 aa, Klebsiella pneumoniae; identical to SEQ ID NO: 17108

SEQ ID NO: 37963 - DNA, 210 bp, Escherichia coli O157:H7; identical to SEQ ID NO: 17109
  CDS (1)..(210): transl_table=11

SEQ ID NO: 37964 - protein, 69 aa, Escherichia coli O157:H7; identical to SEQ ID NO: 17110

SEQ ID NO: 37965 - DNA, 204 bp, Erwinia carotovora subsp. atroseptica SCRI1043; identical to SEQ ID NO: 17111
  CDS (1)..(204)

SEQ ID NO: 37966 - protein, 67 aa, Erwinia carotovora subsp. atroseptica SCRI1043; identical to SEQ ID NO: 17112

SEQ ID NO: 37967 - DNA, 210 bp, Escherichia coli; identical to SEQ ID NO: 17113
  CDS (1)..(210): transl_table=11

SEQ ID NO: 37968 - protein, 69 aa, Escherichia coli; identical to SEQ ID NO: 17114

SEQ ID NO: 37969 - DNA, 285 bp, Salmonella enterica subsp. enterica serovar Choleraesuis str; identical to SEQ ID NO: 17115
  CDS (1)..(285): transl_table=11

SEQ ID NO: 37970 - protein, 94 aa, Salmonella enterica subsp. enterica serovar Choleraesuis str; identical to SEQ ID NO: 17116

SEQ ID NO: 37971 - DNA, 210 bp, Escherichia coli; identical to SEQ ID NO: 17117
  CDS (1)..(210): transl_table=11

SEQ ID NO: 37972 - protein, 69 aa, Escherichia coli; identical to SEQ ID NO: 17118

SEQ ID NO: 37973 - DNA, 387 bp, Escherichia coli; identical to SEQ ID NO: 17119
  CDS (1)..(387): transl_table=11

SEQ ID NO: 37974 - protein, 128 aa, Escherichia coli; identical to SEQ ID NO: 17120

SEQ ID NO: 37975 - DNA, 210 bp, Escherichia coli; identical to SEQ ID NO: 17121
  CDS (1)..(210): transl_table=11

SEQ ID NO: 37976 - protein, 69 aa, Escherichia coli; identical to SEQ ID NO: 17122

SEQ ID NO: 37977 - DNA, 219 bp, Escherichia coli; identical to SEQ ID NO: 17123
  CDS (1)..(219): transl_table=11

SEQ ID NO: 37978 - protein, 72 aa, Escherichia coli; identical to SEQ ID NO: 17124

SEQ ID NO: 37979 - DNA, 216 bp, Salmonella paratyphi; identical to SEQ ID NO: 17125
  CDS (1)..(216): transl_table=11

SEQ ID NO: 37980 - protein, 71 aa, Salmonella paratyphi; identical to SEQ ID NO: 17126

SEQ ID NO: 37981 - DNA, 204 bp, Yersinia enterocolitica; identical to SEQ ID NO: 17127
  CDS (1)..(204): transl_table=11

SEQ ID NO: 37982 - protein, 67 aa, Yersinia enterocolitica; identical to SEQ ID NO: 17128

SEQ ID NO: 37983 - DNA, 26 bp, Artificial sequence
  Primer sequence
atgactgttcaggactacttattaaa

SEQ ID NO: 37984 - DNA, 23 bp, Artificial sequence
  Primer sequence
ttattggacatagtgccagacgg

SEQ ID NO: 37985 - protein, 72 aa, Artificial sequence; identical to SEQ ID NO: 17131
  Consensus
  Variant (4)..(4): Xaa in position 4 is any amino acid
  Variant (29)..(29): Xaa in position 29 is any amino acid
  Variant (34)..(35): Xaa in position 34 to 35 is any or no amino acid
  Variant (39)..(39): Xaa in position 39 is any amino acid
  Variant (54)..(54): Xaa in position 54 is any amino acid
  Variant (55)..(57): Xaa in position 55 to 57 is any or no amino acid
  Variant (65)..(65): Xaa in position 65 is any amino acid

SEQ ID NO: 37986 - protein, 10 aa, Artificial sequence
  Consensus
  Variant (2)..(2): Xaa in position 2 is Lys or Arg
  Variant (3)..(3): Xaa in position 3 is any amino acid
  Variant (4)..(4): Xaa in position 4 is Gln, Ser or Thr
  Variant (5)..(5): Xaa in position 5 is Ser or Thr
  Variant (6)..(6): Xaa in position 6 is any amino acid
  Variant (7)..(7): Xaa in position 7 is Asp, Glu or Asn
  Variant (8)..(8): Xaa in position 8 is Ser or Thr
RXXXXXXXLE

SEQ ID NO: 37987 - protein, 8 aa, Artificial sequence
  Consensus
  Variant (2)..(2): Xaa in position 2 is Ala or Val
  Variant (6)..(6): Xaa in position 6 is any amino acid
AXDHRXAE

SEQ ID NO: 37988 - protein, 5 aa, Artificial sequence
  Consensus
  Variant (2)..(2): Xaa in position 2 is any amino acid
  Variant (3)..(3): Xaa in position 3 is Ala, Gly, Ser, Thr or Val
PXXVW

SEQ ID NO: 37989 - DNA, 582 bp, Escherichia coli K12; identical to SEQ ID NO: 20184
  CDS (1)..(582): transl_table=11

SEQ ID NO: 37990 - protein, 193 aa, Escherichia coli K12; identical to SEQ ID NO: 20185

SEQ ID NO: 37991 - DNA, 603 bp, Thermotoga maritima MSB8; identical to SEQ ID NO: 20186
  CDS (1)..(603): transl_table=11

SEQ ID NO: 37992 - protein, 200 aa, Thermotoga maritima MSB8; identical to SEQ ID NO: 20187

SEQ ID NO: 37993 - DNA, 642 bp, Vibrio cholerae O1 biovar eltor str. N16961; identical to SEQ ID NO: 20188
  CDS (1)..(642): transl_table=11

SEQ ID NO: 37994 - protein, 213 aa, Vibrio cholerae O1 biovar eltor str. N16961; identical to SEQ ID NO: 20189

SEQ ID NO: 37995 - DNA, 729 bp, Pasteurella multocida subsp. multocida str. Pm70; identical to SEQ ID NO: 20190
  CDS (1)..(729): transl_table=11

SEQ ID NO: 37996 - protein, 242 aa, Pasteurella multocida subsp. multocida str. Pm70; identical to SEQ ID NO: 20191

SEQ ID NO: 37997 - DNA, 669 bp, Clostridium perfringens str. 13; identical to SEQ ID NO: 20192
  CDS (1)..(669): transl_table=11

SEQ ID NO: 37998 - protein, 222 aa, Clostridium perfringens str. 13; identical to SEQ ID NO: 20193

SEQ ID NO: 37999 - DNA, 576 bp, Clostridium perfringens str. 13; identical to SEQ ID NO: 20194
  CDS (1)..(576): transl_table=11

SEQ ID NO: 38000 - protein, 191 aa, Clostridium perfringens str. 13; identical to SEQ ID NO: 20195

SEQ ID NO: 38001 - DNA, 585 bp, Fusobacterium nucleatum subsp. nucleatum ATCC 25586; identical to SEQ ID NO: 20196
  CDS (1)..(585): transl_table=11

SEQ ID NO: 38002 - protein, 194 aa, Fusobacterium nucleatum subsp. nucleatum ATCC 25586; identical to SEQ ID NO: 20197

SEQ ID NO: 38003 - DNA, 618 bp, Fusobacterium nucleatum subsp. nucleatum ATCC 25586; identical to SEQ ID NO: 20198
  CDS (1)..(618): transl_table=11

SEQ ID NO: 38004 - protein, 205 aa, Fusobacterium nucleatum subsp. nucleatum ATCC 25586; identical to SEQ ID NO: 20199

SEQ ID NO: 38005 - DNA, 642 bp, Methanosarcina acetivorans C2A; identical to SEQ ID NO: 20200
  CDS (1)..(642): transl_table=11

SEQ ID NO: 38006 - protein, 213 aa, Methanosarcina acetivorans C2A; identical to SEQ ID NO: 20201

SEQ ID NO: 38007 - DNA, 600 bp, Methanosarcina acetivorans C2A; identical to SEQ ID NO: 20202
  CDS (1)..(600): transl_table=11

SEQ ID NO: 38008 - protein, 199 aa, Methanosarcina acetivorans C2A; identical to SEQ ID NO: 20203

SEQ ID NO: 38009 - DNA, 603 bp, Yersinia pestis KIM; identical to SEQ ID NO: 20204
  CDS (1)..(603): transl_table=11

SEQ ID NO: 38010 - protein, 200 aa, Yersinia pestis KIM; identical to SEQ ID NO: 20205

SEQ ID NO: 38011 - DNA, 645 bp, Yersinia pestis KIM; identical to SEQ ID NO: 20206
  CDS (1)..(645): transl_table=11

SEQ ID NO: 38012 - protein, 214 aa, Yersinia pestis KIM; identical to SEQ ID NO: 20207

SEQ ID NO: 38013 - DNA, 624 bp, Yersinia pestis KIM; identical to SEQ ID NO: 20208
  CDS (1)..(624): transl_table=11

SEQ ID NO: 38014 - protein, 207 aa, Yersinia pestis KIM; identical to SEQ ID NO: 20209

SEQ ID NO: 38015 - DNA, 696 bp, Shigella flexneri 2a str. 301; identical to SEQ ID NO: 20210
  CDS (1)..(696): transl_table=11

SEQ ID NO: 38016 - protein, 231 aa, Shigella flexneri 2a str. 301; identical to SEQ ID NO: 20211

SEQ ID NO: 38017 - DNA, 621 bp, Shewanella oneidensis MR-1; identical to SEQ ID NO: 20212
  CDS (1)..(621): transl_table=11

SEQ ID NO: 38018 - protein, 206 aa, Shewanella oneidensis MR-1; identical to SEQ ID NO: 20213

SEQ ID NO: 38019 - DNA, 609 bp, Shewanella oneidensis MR-1; identical to SEQ ID NO: 20214
  CDS (1)..(609): transl_table=11

SEQ ID NO: 38020 - protein, 202 aa, Shewanella oneidensis MR-1; identical to SEQ ID NO: 20215

SEQ ID NO: 38021 - DNA, 633 bp, Shewanella oneidensis MR-1; identical to SEQ ID NO: 20216
  CDS (1)..(633): transl_table=11

SEQ ID NO: 38022 - protein, 210 aa, Shewanella oneidensis MR-1; identical to SEQ ID NO: 20217

SEQ ID NO: 38023 - DNA, 609 bp, Shewanella oneidensis MR-1; identical to SEQ ID NO: 20218
  CDS (1)..(609): transl_table=11

SEQ ID NO: 38024 - protein, 202 aa, Shewanella oneidensis MR-1; identical to SEQ ID NO: 20219

SEQ ID NO: 38025 - DNA, 579 bp, Shewanella oneidensis MR-1; identical to SEQ ID NO: 20220
  CDS (1)..(579): transl_table=11

SEQ ID NO: 38026 - protein, 192 aa, Shewanella oneidensis MR-1; identical to SEQ ID NO: 20221

SEQ ID NO: 38027 - DNA, 699 bp, Shewanella oneidensis MR-1; identical to SEQ ID NO: 20222
  CDS (1)..(699): transl_table=11

SEQ ID NO: 38028 - protein, 232 aa, Shewanella oneidensis MR-1; identical to SEQ ID NO: 20223

SEQ ID NO: 38029 - DNA, 549 bp, Pseudomonas putida KT2440; identical to SEQ ID NO: 20224
  CDS (1)..(549): transl_table=11

SEQ ID NO: 38030 - protein, 182 aa, Pseudomonas putida KT2440; identical to SEQ ID NO: 20225

SEQ ID NO: 38031 - DNA, 603 bp, Clostridium tetani E88; identical to SEQ ID NO: 20226
  CDS (1)..(603): transl_table=11

SEQ ID NO: 38032 - protein, 200 aa, Clostridium tetani E88; identical to SEQ ID NO: 20227

SEQ ID NO: 38033 - DNA, 576 bp, Clostridium tetani E88; identical to SEQ ID NO: 20228
  CDS (1)..(576): transl_table=11

SEQ ID NO: 38034 - protein, 191 aa, Clostridium tetani E88; identical to SEQ ID NO: 20229

SEQ ID NO: 38035 - DNA, 639 bp, Vibrio parahaemolyticus RIMD 2210633; identical to SEQ ID NO: 20230
  CDS (1)..(639): transl_table=11

SEQ ID NO: 38036 - protein, 212 aa, Vibrio parahaemolyticus RIMD 2210633; identical to SEQ ID NO: 20231

SEQ ID NO: 38037 - DNA, 585 bp, Bacteroides thetaiotaomicron VPI-5482; identical to SEQ ID NO: 20232
  CDS (1)..(585): transl_table=11

SEQ ID NO: 38038 - protein, 194 aa, Bacteroides thetaiotaomicron VPI-5482; identical to SEQ ID NO: 20233

SEQ ID NO: 38039 - DNA, 573 bp, Bacteroides thetaiotaomicron VPI-5482; identical to SEQ ID NO: 20234
  CDS (1)..(573): transl_table=11

SEQ ID NO: 38040 - protein, 190 aa, Bacteroides thetaiotaomicron VPI-5482; identical to SEQ ID NO: 20235

SEQ ID NO: 38041 - DNA, 627 bp, Bacteroides thetaiotaomicron VPI-5482; identical to SEQ ID NO: 20236
  CDS (1)..(627): transl_table=11

SEQ ID NO: 38042 - protein, 208 aa, Bacteroides thetaiotaomicron VPI-5482; identical to SEQ ID NO: 20237

SEQ ID NO: 38043 - DNA, 642 bp, Bacteroides thetaiotaomicron VPI-5482; identical to SEQ ID NO: 20238
  CDS (1)..(642): transl_table=11

SEQ ID NO: 38044 - protein, 213 aa, Bacteroides thetaiotaomicron VPI-5482; identical to SEQ ID NO: 20239

SEQ ID NO: 38045 - DNA, 696 bp, Shigella flexneri 2a str. 2457T; identical to SEQ ID NO: 20240
  CDS (1)..(696): transl_table=11

SEQ ID NO: 38046 - protein, 231 aa, Shigella flexneri 2a str. 2457T; identical to SEQ ID NO: 20241

SEQ ID NO: 38047 - DNA, 609 bp, Nitrosomonas europaea ATCC 19718; identical to SEQ ID NO: 20242
  CDS (1)..(609): transl_table=11

SEQ ID NO: 38048 - protein, 202 aa, Nitrosomonas europaea ATCC 19718; identical to SEQ ID NO: 20243

SEQ ID NO: 38049 - DNA, 672 bp, Nitrosomonas europaea ATCC 19718; identical to SEQ ID NO: 20244
  CDS (1)..(672): transl_table=11

SEQ ID NO: 38050 - protein, 223 aa, Nitrosomonas europaea ATCC 19718; identical to SEQ ID NO: 20245

SEQ ID NO: 38051 - DNA, 627 bp, Rhodopirellula baltica SH 1; identical to SEQ ID NO: 20246
  CDS (1)..(627): transl_table=11

SEQ ID NO: 38052 - protein, 208 aa, Rhodopirellula baltica SH 1; identical to SEQ ID NO: 20247

SEQ ID NO: 38053 - DNA, 642 bp, Rhodopirellula baltica SH 1; identical to SEQ ID NO: 20248
  CDS (1)..(642): transl_table=11

SEQ ID NO: 38054 - protein, 213 aa, Rhodopirellula baltica SH 1; identical to SEQ ID NO: 20249

SEQ ID NO: 38055 - DNA, 591 bp, Porphyromonas gingivalis W83; identical to SEQ ID NO: 20250
  CDS (1)..(591): transl_table=11

SEQ ID NO: 38056 - protein, 196 aa, Porphyromonas gingivalis W83; identical to SEQ ID NO: 20251

SEQ ID NO: 38057 - DNA, 573 bp, Porphyromonas gingivalis W83; identical to SEQ ID NO: 20252
  CDS (1)..(573): transl_table=11

SEQ ID NO: 38058 - protein, 190 aa, Porphyromonas gingivalis W83; identical to SEQ ID NO: 20253

SEQ ID NO: 38059 - DNA, 615 bp, Porphyromonas gingivalis W83; identical to SEQ ID NO: 20254
  CDS (1)..(615): transl_table=11

SEQ ID NO: 38060 - protein, 204 aa, Porphyromonas gingivalis W83; identical to SEQ ID NO: 20255

SEQ ID NO: 38061 - DNA, 630 bp, Porphyromonas gingivalis W83; identical to SEQ ID NO: 20256
  CDS (1)..(630): transl_table=11

SEQ ID NO: 38062 - protein, 209 aa, Porphyromonas gingivalis W83; identical to SEQ ID NO: 20257

SEQ ID NO: 38063 - DNA, 630 bp, Photorhabdus luminescens subsp. laumondii TTO1; identical to SEQ ID NO: 20258
  CDS (1)..(630): transl_table=11

SEQ ID NO: 38064 - protein, 209 aa, Photorhabdus luminescens subsp. laumondii TTO1; identical to SEQ ID NO: 20259

SEQ ID NO: 38065 - DNA, 597 bp, Photorhabdus luminescens subsp. laumondii TTO1; identical to SEQ ID NO: 20260
  CDS (1)..(597): transl_table=11

SEQ ID NO: 38066 - protein, 198 aa, Photorhabdus luminescens subsp. laumondii TTO1; identical to SEQ ID NO: 20261

SEQ ID NO: 38067 - DNA, 582 bp, Photorhabdus luminescens subsp. laumondii TTO1; identical to SEQ ID NO: 20262
  CDS (1)..(582): transl_table=11

SEQ ID NO: 38068 - protein, 193 aa, Photorhabdus luminescens subsp. laumondii TTO1; identical to SEQ ID NO: 20263

SEQ ID NO: 38069 - DNA, 699 bp, Photorhabdus luminescens subsp. laumondii TTO1; identical to SEQ ID NO: 20264
  CDS (1)..(699): transl_table=11

SEQ ID NO: 38070 - protein, 232 aa, Photorhabdus luminescens subsp. laumondii TTO1; identical to SEQ ID NO: 20265

SEQ ID NO: 38071 - DNA, 705 bp, Vibrio vulnificus YJ016; identical to SEQ ID NO: 20266
  CDS (1)..(705): transl_table=11

SEQ ID NO: 38072 - protein, 234 aa, Vibrio vulnificus YJ016; identical to SEQ ID NO: 20267

SEQ ID NO: 38073 - DNA, 639 bp, Vibrio vulnificus YJ016; identical to SEQ ID NO: 20268
  CDS (1)..(639): transl_table=11

SEQ ID NO: 38074 - protein, 212 aa, Vibrio vulnificus YJ016; identical to SEQ ID NO: 20269

SEQ ID NO: 38075 - DNA, 573 bp, Treponema denticola ATCC 35405; identical to SEQ ID NO: 20270
  CDS (1)..(573): transl_table=11

SEQ ID NO: 38076 - protein, 190 aa, Treponema denticola ATCC 35405; identical to SEQ ID NO: 20271

SEQ ID NO: 38077 - DNA, 660 bp, Treponema denticola ATCC 35405; identical to SEQ ID NO: 20272
  CDS (1)..(660): transl_table=11

SEQ ID NO: 38078 - protein, 219 aa, Treponema denticola ATCC 35405; identical to SEQ ID NO: 20273

SEQ ID NO: 38079 - DNA, 744 bp, Parachlamydia sp. UWE25; identical to SEQ ID NO: 20274
  CDS (1)..(744): transl_table=11

SEQ ID NO: 38080 - protein, 247 aa, Parachlamydia sp. UWE25; identical to SEQ ID NO: 20275

SEQ ID NO: 38081 - DNA, 636 bp, Parachlamydia sp. UWE25; identical to SEQ ID NO: 20276
  CDS (1)..(636): transl_table=11

SEQ ID NO: 38082 - protein, 211 aa, Parachlamydia sp. UWE25; identical to SEQ ID NO: 20277

SEQ ID NO: 38083 - DNA, 576 bp, Desulfovibrio vulgaris subsp. vulgaris str. Hildenborough; identical to SEQ ID NO: 20278
  CDS (1)..(576): transl_table=11

SEQ ID NO: 38084 - protein, 191 aa, Desulfovibrio vulgaris subsp. vulgaris str. Hildenborough; identical to SEQ ID NO: 20279

SEQ ID NO: 38085 - DNA, 582 bp, Erwinia carotovora subsp. atroseptica SCRI1043; identical to SEQ ID NO: 20280
  CDS (1)..(582): transl_table=11

SEQ ID NO: 38086 - protein, 193 aa, Erwinia carotovora subsp. atroseptica SCRI1043; identical to SEQ ID NO: 20281

SEQ ID NO: 38087 - DNA, 624 bp, Desulfotalea psychrophila LSv54; identical to SEQ ID NO: 20282
  CDS (1)..(624): transl_table=11

SEQ ID NO: 38088 - protein, 207 aa, Desulfotalea psychrophila LSv54; identical to SEQ ID NO: 20283

SEQ ID NO: 38089 - DNA, 609 bp, Desulfotalea psychrophila LSv54; identical to SEQ ID NO: 20284
  CDS (1)..(609): transl_table=11

SEQ ID NO: 38090 - protein, 202 aa, Desulfotalea psychrophila LSv54; identical to SEQ ID NO: 20285

SEQ ID NO: 38091 - DNA, 597 bp, Yersinia pseudotuberculosis IP 32953; identical to SEQ ID NO: 20286
  CDS (1)..(597): transl_table=11

SEQ ID NO: 38092 - protein, 198 aa, Yersinia pseudotuberculosis IP 32953; identical to SEQ ID NO: 20287

SEQ ID NO: 38093 - DNA, 702 bp, Yersinia pseudotuberculosis IP 32953; identical to SEQ ID NO: 20288
  CDS (1)..(702): transl_table=11

SEQ ID NO: 38094 - protein, 233 aa, Yersinia pseudotuberculosis IP 32953; identical to SEQ ID NO: 20289

SEQ ID NO: 38095 - DNA, 708 bp, Symbiobacterium thermophilum IAM 14863; identical to SEQ ID NO: 20290
  CDS (1)..(708): transl_table=11

SEQ ID NO: 38096 - protein, 235 aa, Symbiobacterium thermophilum IAM 14863; identical to SEQ ID NO: 20291

SEQ ID NO: 38097 - DNA, 588 bp, Symbiobacterium thermophilum IAM 14863; identical to SEQ ID NO: 20292
  CDS (1)..(588): transl_table=11

SEQ ID NO: 38098 - protein, 195 aa, Symbiobacterium thermophilum IAM 14863; identical to SEQ ID NO: 20293

SEQ ID NO: 38099 - DNA, 597 bp, Mannheimia succiniciproducens MBEL55E; identical to SEQ ID NO: 20294
  CDS (1)..(597): transl_table=11

SEQ ID NO: 38100 - protein, 198 aa, Mannheimia succiniciproducens MBEL55E; identical to SEQ ID NO: 20295

SEQ ID NO: 38101 - DNA, 624 bp, Mannheimia succiniciproducens MBEL55E; identical to SEQ ID NO: 20296
  CDS (1)..(624): transl_table=11

SEQ ID NO: 38102 - protein, 207 aa, Mannheimia succiniciproducens MBEL55E; identical to SEQ ID NO: 20297

SEQ ID NO: 38103 - DNA, 648 bp, Mannheimia succiniciproducens MBEL55E; identical to SEQ ID NO: 20298
  CDS (1)..(648): transl_table=11

SEQ ID NO: 38104 - protein, 215 aa, Mannheimia succiniciproducens MBEL55E; identical to SEQ ID NO: 20299

SEQ ID NO: 38105 - DNA, 630 bp, Mannheimia succiniciproducens MBEL55E; identical to SEQ ID NO: 20300
  CDS (1)..(630): transl_table=11

SEQ ID NO: 38106 - protein, 209 aa, Mannheimia succiniciproducens MBEL55E; identical to SEQ ID NO: 20301

SEQ ID NO: 38107 - DNA, 609 bp, Methylococcus capsulatus str. Bath; identical to SEQ ID NO: 20302
  CDS (1)..(609): transl_table=11

SEQ ID NO: 38108 - protein, 202 aa, Methylococcus capsulatus str. Bath; identical to SEQ ID NO: 20303

SEQ ID NO: 38109 - DNA, 660 bp, Methylococcus capsulatus str. Bath; identical to SEQ ID NO: 20304
  CDS (1)..(660): transl_table=11

SEQ ID NO: 38110 - protein, 219 aa, Methylococcus capsulatus str. Bath; identical to SEQ ID NO: 20305

SEQ ID NO: 38111 - DNA, 687 bp, Methylococcus capsulatus str. Bath; identical to SEQ ID NO: 20306
  CDS (1)..(687): transl_table=11

SEQ ID NO: 38112 - protein, 228 aa, Methylococcus capsulatus str. Bath; identical to SEQ ID NO: 20307

SEQ ID NO: 38113 - DNA, 582 bp, Methylococcus capsulatus str. Bath; identical to SEQ ID NO: 20308
  CDS (1)..(582): transl_table=11

SEQ ID NO: 38114 - protein, 193 aa, Methylococcus capsulatus str. Bath; identical to SEQ ID NO: 20309

SEQ ID NO: 38115 - DNA, 582 bp, Methylococcus capsulatus str. Bath; identical to SEQ ID NO: 20310
  CDS (1)..(582): transl_table=11

SEQ ID NO: 38116 - protein, 193 aa, Methylococcus capsulatus str. Bath; identical to SEQ ID NO: 20311

SEQ ID NO: 38117 - DNA, 702 bp, Methylococcus capsulatus str. Bath; identical to SEQ ID NO: 20312
  CDS (1)..(702): transl_table=11

SEQ ID NO: 38118 - protein, 233 aa, Methylococcus capsulatus str. Bath; identical to SEQ ID NO: 20313

SEQ ID NO: 38119 - DNA, 633 bp, Photobacterium profundum SS9; identical to SEQ ID NO: 20314
  CDS (1)..(633): transl_table=11

SEQ ID NO: 38120 - protein, 210 aa, Photobacterium profundum SS9; identical to SEQ ID NO: 20315

SEQ ID NO: 38121 - DNA, 597 bp, Photobacterium profundum SS9; identical to SEQ ID NO: 20316
  CDS (1)..(597): transl_table=11

SEQ ID NO: 38122 - protein, 198 aa, Photobacterium profundum SS9; identical to SEQ ID NO: 20317

SEQ ID NO: 38123 - DNA, 582 bp, Photobacterium profundum SS9; identical to SEQ ID NO: 20318
  CDS (1)..(582): transl_table=11

SEQ ID NO: 38124 - protein, 193 aa, Photobacterium profundum SS9; identical to SEQ ID NO: 20319

SEQ ID NO: 38125 - DNA, 702 bp, Photobacterium profundum SS9; identical to SEQ ID NO: 20320
  CDS (1)..(702): transl_table=11

SEQ ID NO: 38126 - protein, 233 aa, Photobacterium profundum SS9; identical to SEQ ID NO: 20321

SEQ ID NO: 38127 - DNA, 609 bp, Idiomarina loihiensis L2TR; identical to SEQ ID NO: 20322
  CDS (1)..(609): transl_table=11

SEQ ID NO: 38128 - protein, 202 aa, Idiomarina loihiensis L2TR; identical to SEQ ID NO: 20323

SEQ ID NO: 38129 - DNA, 633 bp, Idiomarina loihiensis L2TR; identical to SEQ ID NO: 20324
  CDS (1)..(633): transl_table=11

SEQ ID NO: 38130 - protein, 210 aa, Idiomarina loihiensis L2TR; identical to SEQ ID NO: 20325

SEQ ID NO: 38131 - DNA, 582 bp, Idiomarina loihiensis L2TR; identical to SEQ ID NO: 20326
  CDS (1)..(582): transl_table=11

SEQ ID NO: 38132 - protein, 193 aa, Idiomarina loihiensis L2TR; identical to SEQ ID NO: 20327

SEQ ID NO: 38133 - DNA, 681 bp, Idiomarina loihiensis L2TR; identical to SEQ ID NO: 20328
  CDS (1)..(681): transl_table=11

SEQ ID NO: 38134 - protein, 226 aa, Idiomarina loihiensis L2TR; identical to SEQ ID NO: 20329

SEQ ID NO: 38135 - DNA, 582 bp, Azoarcus sp. EbN1; identical to SEQ ID NO: 20330
  CDS (1)..(582): transl_table=11

SEQ ID NO: 38136 - protein, 193 aa, Azoarcus sp. EbN1; identical to SEQ ID NO: 20331

SEQ ID NO: 38137 - DNA, 585 bp, Azoarcus sp. EbN1; identical to SEQ ID NO: 20332
  CDS (1)..(585): transl_table=11

SEQ ID NO: 38138 - protein, 194 aa, Azoarcus sp. EbN1; identical to SEQ ID NO: 20333

SEQ ID NO: 38139 - DNA, 582 bp, Zymomonas mobilis subsp. mobilis ZM4; identical to SEQ ID NO: 20334
  CDS (1)..(582): transl_table=11

SEQ ID NO: 38140 - protein, 193 aa, Zymomonas mobilis subsp. mobilis ZM4; identical to SEQ ID NO: 20335

SEQ ID NO: 38141 - DNA, 654 bp, Silicibacter pomeroyi DSS-3; identical to SEQ ID NO: 20336
  CDS (1)..(654): transl_table=11

SEQ ID NO: 38142 - protein, 217 aa, Silicibacter pomeroyi DSS-3; identical to SEQ ID NO: 20337

SEQ ID NO: 38143 - DNA, 609 bp, Silicibacter pomeroyi DSS-3; identical to SEQ ID NO: 20338
  CDS (1)..(609): transl_table=11

SEQ ID NO: 38144 - protein, 202 aa, Silicibacter pomeroyi DSS-3; identical to SEQ ID NO: 20339

SEQ ID NO: 38145 - DNA, 633 bp, Vibrio fischeri ES114; identical to SEQ ID NO: 20340
  CDS (1)..(633): transl_table=11

SEQ ID NO: 38146 - protein, 210 aa, Vibrio fischeri ES114; identical to SEQ ID NO: 20341

SEQ ID NO: 38147 - DNA, 684 bp, Vibrio fischeri ES114; identical to SEQ ID NO: 20342
  CDS (1)..(684): transl_table=11

SEQ ID NO: 38148 - protein, 227 aa, Vibrio fischeri ES114; identical to SEQ ID NO: 20343

SEQ ID NO: 38149 - DNA, 582 bp, Vibrio fischeri ES114; identical to SEQ ID NO: 20344
  CDS (1)..(582): transl_table=11

SEQ ID NO: 38150 - protein, 193 aa, Vibrio fischeri ES114; identical to SEQ ID NO: 20345

SEQ ID NO: 38151 - DNA, 594 bp, Neisseria gonorrhoeae FA 1090; identical to SEQ ID NO: 20346
  CDS (1)..(594): transl_table=11

SEQ ID NO: 38152 - protein, 197 aa, Neisseria gonorrhoeae FA 1090; identical to SEQ ID NO: 20347

SEQ ID NO: 38153 - DNA, 633 bp, Bacteroides fragilis NCTC 9343; identical to SEQ ID NO: 20348
  CDS (1)..(633): transl_table=11

SEQ ID NO: 38154 - protein, 210 aa, Bacteroides fragilis NCTC 9343; identical to SEQ ID NO: 20349

SEQ ID NO: 38155 - DNA, 627 bp, Bacteroides fragilis NCTC 9343; identical to SEQ ID NO: 20350
  CDS (1)..(627): transl_table=11

SEQ ID NO: 38156 - protein, 208 aa, Bacteroides fragilis NCTC 9343; identical to SEQ ID NO: 20351

SEQ ID NO: 38157 - DNA, 573 bp, Bacteroides fragilis NCTC 9343; identical to SEQ ID NO: 20352
  CDS (1)..(573): transl_table=11

SEQ ID NO: 38158 - protein, 190 aa, Bacteroides fragilis NCTC 9343; identical to SEQ ID NO: 20353

SEQ ID NO: 38159 - DNA, 588 bp, Bacteroides fragilis NCTC 9343; identical to SEQ ID NO: 20354
  CDS (1)..(588): transl_table=11

SEQ ID NO: 38160 - protein, 195 aa, Bacteroides fragilis NCTC 9343; identical to SEQ ID NO: 20355

SEQ ID NO: 38161 - DNA, 642 bp, Chlamydophila abortus S26/3; identical to SEQ ID NO: 20356
  CDS (1)..(642): transl_table=11

SEQ ID NO: 38162 - protein, 213 aa, Chlamydophila abortus S26/3; identical to SEQ ID NO: 20357

SEQ ID NO: 38163 - DNA, 597 bp, Haemophilus influenzae 86-028NP; identical to SEQ ID NO: 20358
  CDS (1)..(597): transl_table=11

SEQ ID NO: 38164 - protein, 198 aa, Haemophilus influenzae 86-028NP; identical to SEQ ID NO: 20359

SEQ ID NO: 38165 - DNA, 579 bp, Haemophilus influenzae 86-028NP; identical to SEQ ID NO: 20360
  CDS (1)..(579): transl_table=11

SEQ ID NO: 38166 - protein, 192 aa, Haemophilus influenzae 86-028NP; identical to SEQ ID NO: 20361

SEQ ID NO: 38167 - DNA, 708 bp, Haemophilus influenzae 86-028NP; identical to SEQ ID NO: 20362
  CDS (1)..(708): transl_table=11

SEQ ID NO: 38168 - protein, 235 aa, Haemophilus influenzae 86-028NP; identical to SEQ ID NO: 20363

SEQ ID NO: 38169 - DNA, 582 bp, Pseudomonas fluorescens Pf-5; identical to SEQ ID NO: 20364
  CDS (1)..(582): transl_table=11

SEQ ID NO: 38170 - protein, 193 aa, Pseudomonas fluorescens Pf-5; identical to SEQ ID NO: 20365

SEQ ID NO: 38171 - DNA, 672 bp, Psychrobacter arcticum 273-4; identical to SEQ ID NO: 20366
  CDS (1)..(672): transl_table=11

SEQ ID NO: 38172 - protein, 223 aa, Psychrobacter arcticum 273-4; identical to SEQ ID NO: 20367

SEQ ID NO: 38173 - DNA, 609 bp, Psychrobacter arcticum 273-4; identical to SEQ ID NO: 20368
  CDS (1)..(609): transl_table=11

SEQ ID NO: 38174 - protein, 202 aa, Psychrobacter arcticum 273-4; identical to SEQ ID NO: 20369

SEQ ID NO: 38175 - DNA, 624 bp, Colwellia psychrerythraea 34H; identical to SEQ ID NO: 20370
  CDS (1)..(624): transl_table=11

SEQ ID NO: 38176 - protein, 207 aa, Colwellia psychrerythraea 34H; identical to SEQ ID NO: 20371

SEQ ID NO: 38177 - DNA, 624 bp, Colwellia psychrerythraea 34H; identical to SEQ ID NO: 20372
  CDS (1)..(624): transl_table=11

SEQ ID NO: 38178 - protein, 207 aa, Colwellia psychrerythraea 34H; identical to SEQ ID NO: 20373

SEQ ID NO: 38179 - DNA, 792 bp, Colwellia psychrerythraea 34H; identical to SEQ ID NO: 20374
  CDS (1)..(792): transl_table=11

SEQ ID NO: 38180 - protein, 263 aa, Colwellia psychrerythraea 34H; identical to SEQ ID NO: 20375

SEQ ID NO: 38181 - DNA, 582 bp, Colwellia psychrerythraea 34H; identical to SEQ ID NO: 20376
  CDS (1)..(582): transl_table=11

SEQ ID NO: 38182 - protein, 193 aa, Colwellia psychrerythraea 34H; identical to SEQ ID NO: 20377

SEQ ID NO: 38183 - DNA, 693 bp, Dechloromonas aromatica RCB; identical to SEQ ID NO: 20378
  CDS (1)..(693): transl_table=11

SEQ ID NO: 38184 - protein, 230 aa, Dechloromonas aromatica RCB; identical to SEQ ID NO: 20379

SEQ ID NO: 38185 - DNA, 585 bp, Dechloromonas aromatica RCB; identical to SEQ ID NO: 20380
  CDS (1)..(585): transl_table=11

SEQ ID NO: 38186 - protein, 194 aa, Dechloromonas aromatica RCB; identical to SEQ ID NO: 20381

SEQ ID NO: 38187 - DNA, 675 bp, Dechloromonas aromatica RCB; identical to SEQ ID NO: 20382
  CDS (1)..(675): transl_table=11

SEQ ID NO: 38188 - protein, 224 aa, Dechloromonas aromatica RCB; identical to SEQ ID NO: 20383

SEQ ID NO: 38189 - DNA, 582 bp, Dechloromonas aromatica RCB; identical to SEQ ID NO: 20384
  CDS (1)..(582): transl_table=11

SEQ ID NO: 38190 - protein, 193 aa, Dechloromonas aromatica RCB; identical to SEQ ID NO: 20385

SEQ ID NO: 38191 - DNA, 576 bp, Thiobacillus denitrificans ATCC 25259; identical to SEQ ID NO: 20386
  CDS (1)..(576): transl_table=11

SEQ ID NO: 38192 - protein, 191 aa, Thiobacillus denitrificans ATCC 25259; identical to SEQ ID NO: 20387

SEQ ID NO: 38193 - DNA, 678 bp, Thiobacillus denitrificans ATCC 25259; identical to SEQ ID NO: 20388
  CDS (1)..(678): transl_table=11

SEQ ID NO: 38194 - protein, 225 aa, Thiobacillus denitrificans ATCC 25259; identical to SEQ ID NO: 20389

SEQ ID NO: 38195 - DNA, 570 bp, Pseudomonas fluorescens PfO-1; identical to SEQ ID NO: 20390
  CDS (1)..(570)

SEQ ID NO: 38196 - protein, 189 aa, Pseudomonas fluorescens PfO-1; identical to SEQ ID NO: 20391

SEQ ID NO: 38197 - DNA, 711 bp, Microbulbifer degradans 2-40; identical to SEQ ID NO: 20392
  CDS (1)..(711)

SEQ ID NO: 38198 - protein, 236 aa, Microbulbifer degradans 2-40; identical to SEQ ID NO: 20393

SEQ ID NO: 38199 - DNA, 714 bp, Azotobacter vinelandii AvOP; identical to SEQ ID NO: 20394
  CDS (1)..(714): transl_table=11

SEQ ID NO: 38200 - protein, 237 aa, Azotobacter vinelandii AvOP; identical to SEQ ID NO: 20395

SEQ ID NO: 38201 - DNA, 579 bp, Shewanella baltica OS155; identical to SEQ ID NO: 20396
  CDS (1)..(579): transl_table=11

SEQ ID NO: 38202 - protein, 192 aa, Shewanella baltica OS155; identical to SEQ ID NO: 20397

SEQ ID NO: 38203 - DNA, 627 bp, Shewanella amazonensis SB2B; identical to SEQ ID NO: 20398
  CDS (1)..(627): transl_table=11

SEQ ID NO: 38204 - protein, 208 aa, Shewanella amazonensis SB2B; identical to SEQ ID NO: 20399

SEQ ID NO: 38205 - DNA, 654 bp, Silicibacter sp. TM1040; identical to SEQ ID NO: 20400
  CDS (1)..(654): transl_table=11

SEQ ID NO: 38206 - protein, 217 aa, Silicibacter sp. TM1040; identical to SEQ ID NO: 20401

SEQ ID NO: 38207 - DNA, 579 bp, Shewanella denitrificans OS-217; identical to SEQ ID NO: 20402
  CDS (1)..(579): transl_table=11

SEQ ID NO: 38208 - protein, 192 aa, Shewanella denitrificans OS-217; identical to SEQ ID NO: 20403

SEQ ID NO: 38209 - DNA, 585 bp, Ectothiorhodospira halophila; identical to SEQ ID NO: 20404
  CDS (1)..(585): transl_table=11

SEQ ID NO: 38210 - protein, 194 aa, Ectothiorhodospira halophila; identical to SEQ ID NO: 20405

SEQ ID NO: 38211 - DNA, 573 bp, Pseudomonas stutzeri; identical to SEQ ID NO: 20406
  CDS (1)..(573): transl_table=11

SEQ ID NO: 38212 - protein, 190 aa, Pseudomonas stutzeri; identical to SEQ ID NO: 20407

SEQ ID NO: 38213 - DNA, 642 bp, Chlamydophila caviae; identical to SEQ ID NO: 20408
  CDS (1)..(642): transl_table=11

SEQ ID NO: 38214 - protein, 213 aa, Chlamydophila caviae; identical to SEQ ID NO: 20409

SEQ ID NO: 38215 - DNA, 642 bp, Chlamydia muridarum; identical to SEQ ID NO: 20410
  CDS (1)..(642): transl_table=11

SEQ ID NO: 38216 - protein, 213 aa, Chlamydia muridarum; identical to SEQ ID NO: 20411

SEQ ID NO: 38217 - DNA, 642 bp, Chlamydia pneumoniae; identical to SEQ ID NO: 20412
  CDS (1)..(642): transl_table=11

SEQ ID NO: 38218 - protein, 213 aa, Chlamydia pneumoniae; identical to SEQ ID NO: 20413

SEQ ID NO: 38219 - DNA, 642 bp, Chlamydia trachomatis; identical to SEQ ID NO: 20414
  CDS (1)..(642): transl_table=11

SEQ ID NO: 38220 - protein, 213 aa, Chlamydia trachomatis; identical to SEQ ID NO: 20415

SEQ ID NO: 38221 - DNA, 624 bp, Haemophilus ducreyi; identical to SEQ ID NO: 20416
  CDS (1)..(624): transl_table=11

SEQ ID NO: 38222 - protein, 207 aa, Haemophilus ducreyi; identical to SEQ ID NO: 20417

SEQ ID NO: 38223 - DNA, 627 bp, Haemophilus influenzae; identical to SEQ ID NO: 20418
  CDS (1)..(627): transl_table=11

SEQ ID NO: 38224 - protein, 208 aa, Haemophilus influenzae; identical to SEQ ID NO: 20419

SEQ ID NO: 38225 - DNA, 627 bp, Neisseria meningitidis serogroup A; identical to SEQ ID NO: 20420
  CDS (1)..(627): transl_table=11

SEQ ID NO: 38226 - protein, 208 aa, Neisseria meningitidis serogroup A; identical to SEQ ID NO: 20421

SEQ ID NO: 38227 - DNA, 627 bp, Neisseria meningitidis serogroup B; identical to SEQ ID NO: 20422
  CDS (1)..(627): transl_table=11

SEQ ID NO: 38228 - protein, 208 aa, Neisseria meningitidis serogroup B; identical to SEQ ID NO: 20423

SEQ ID NO: 38229 - DNA, 627 bp, Pasteurella multocida; identical to SEQ ID NO: 20424
  CDS (1)..(627): transl_table=11

SEQ ID NO: 38230 - protein, 208 aa, Pasteurella multocida; identical to SEQ ID NO: 20425

SEQ ID NO: 38231 - DNA, 675 bp, Pseudomonas aeruginosa; identical to SEQ ID NO: 20426
  CDS (1)..(675): transl_table=11

SEQ ID NO: 38232 - protein, 224 aa, Pseudomonas aeruginosa; identical to SEQ ID NO: 20427

SEQ ID NO: 38233 - DNA, 633 bp, Vibrio alginolyticus; identical to SEQ ID NO: 20428
  CDS (1)..(633)

SEQ ID NO: 38234 - protein, 210 aa, Vibrio alginolyticus; identical to SEQ ID NO: 20429

SEQ ID NO: 38235 - DNA, 633 bp, Vibrio anguillarum; identical to SEQ ID NO: 20430
  CDS (1)..(633): transl_table=11

SEQ ID NO: 38236 - protein, 210 aa, Vibrio anguillarum; identical to SEQ ID NO: 20431

SEQ ID NO: 38237 - DNA, 633 bp, Vibrio cholerae; identical to SEQ ID NO: 20432
  CDS (1)..(633): transl_table=11

SEQ ID NO: 38238 - protein, 210 aa, Vibrio cholerae; identical to SEQ ID NO: 20433

SEQ ID NO: 38239 - DNA, 633 bp, Vibrio harveyi; identical to SEQ ID NO: 20434
  CDS (1)..(633): transl_table=11

SEQ ID NO: 38240 - protein, 210 aa, Vibrio harveyi; identical to SEQ ID NO: 20435

SEQ ID NO: 38241 - DNA, 633 bp, Vibrio parahaemolyticus; identical to SEQ ID NO: 20436
  CDS (1)..(633): transl_table=11

SEQ ID NO: 38242 - protein, 210 aa, Vibrio parahaemolyticus; identical to SEQ ID NO: 20437

SEQ ID NO: 38243 - DNA, 633 bp, Vibrio vulnificus; identical to SEQ ID NO: 20438
  CDS (1)..(633): transl_table=11

SEQ ID NO: 38244 - protein, 210 aa, Vibrio vulnificus; identical to SEQ ID NO: 20439

SEQ ID NO: 38245 - DNA, 633 bp, Vibrio vulnificus; identical to SEQ ID NO: 20440
  CDS (1)..(633): transl_table=11

SEQ ID NO: 38246 - protein, 210 aa, Vibrio vulnificus; identical to SEQ ID NO: 20441

SEQ ID NO: 38247 - DNA, 630 bp, Yersinia pestis; identical to SEQ ID NO: 20442
  CDS (1)..(630): transl_table=11

SEQ ID NO: 38248 - protein, 209 aa, Yersinia pestis; identical to SEQ ID NO: 20443

SEQ ID NO: 38249 - DNA, 795 bp, Chlamydophila caviae; identical to SEQ ID NO: 20444
  CDS (1)..(795): transl_table=11

SEQ ID NO: 38250 - protein, 264 aa, Chlamydophila caviae; identical to SEQ ID NO: 20445

SEQ ID NO: 38251 - DNA, 735 bp, Chlamydia muridarum; identical to SEQ ID NO: 20446
  CDS (1)..(735): transl_table=11

SEQ ID NO: 38252 - protein, 244 aa, Chlamydia muridarum; identical to SEQ ID NO: 20447

SEQ ID NO: 38253 - DNA, 771 bp, Chlamydia pneumoniae; identical to SEQ ID NO: 20448
  CDS (1)..(771): transl_table=11

SEQ ID NO: 38254 - protein, 256 aa, Chlamydia pneumoniae; identical to SEQ ID NO: 20449

SEQ ID NO: 38255 - DNA, 735 bp, Chlamydia trachomatis; identical to SEQ ID NO: 20450
  CDS (1)..(735): transl_table=11

SEQ ID NO: 38256 - protein, 244 aa, Chlamydia trachomatis; identical to SEQ ID NO: 20451

SEQ ID NO: 38257 - DNA, 597 bp, Haemophilus ducreyi; identical to SEQ ID NO: 20452
  CDS (1)..(597): transl_table=11

SEQ ID NO: 38258 - protein, 198 aa, Haemophilus ducreyi; identical to SEQ ID NO: 20453

SEQ ID NO: 38259 - DNA, 597 bp, Haemophilus influenzae; identical to SEQ ID NO: 20454
  CDS (1)..(597): transl_table=11

SEQ ID NO: 38260 - protein, 198 aa, Haemophilus influenzae; identical to SEQ ID NO: 20455

SEQ ID NO: 38261 - DNA, 594 bp, Neisseria meningitidis serogroup A; identical to SEQ ID NO: 20456
  CDS (1)..(594): transl_table=11

SEQ ID NO: 38262 - protein, 197 aa, Neisseria meningitidis serogroup A; identical to SEQ ID NO: 20457

SEQ ID NO: 38263 - DNA, 594 bp, Neisseria meningitidis serogroup B; identical to SEQ ID NO: 20458
  CDS (1)..(594): transl_table=11

SEQ ID NO: 38264 - protein, 197 aa, Neisseria meningitidis serogroup B; identical to SEQ ID NO: 20459

SEQ ID NO: 38265 - DNA, 597 bp, Pasteurella multocida; identical to SEQ ID NO: 20460
  CDS (1)..(597): transl_table=11

SEQ ID NO: 38266 - protein, 198 aa, Pasteurella multocida; identical to SEQ ID NO: 20461

SEQ ID NO: 38267 - DNA, 609 bp, Pseudomonas aeruginosa; identical to SEQ ID NO: 20462
  CDS (1)..(609): transl_table=11

SEQ ID NO: 38268 - protein, 202 aa, Pseudomonas aeruginosa; identical to SEQ ID NO: 20463

SEQ ID NO: 38269 - DNA, 597 bp, Vibrio alginolyticus; identical to SEQ ID NO: 20464
  CDS (1)..(597): transl_table=11

SEQ ID NO: 38270 - protein, 198 aa, Vibrio alginolyticus; identical to SEQ ID NO: 20465

SEQ ID NO: 38271 - DNA, 597 bp, Vibrio anguillarum; identical to SEQ ID NO: 20466
  CDS (1)..(597): transl_table=11

SEQ ID NO: 38272 - protein, 198 aa, Vibrio anguillarum; identical to SEQ ID NO: 20467

SEQ ID NO: 38273 - DNA, 597 bp, Vibrio cholerae; identical to SEQ ID NO: 20468
  CDS (1)..(597): transl_table=11

SEQ ID NO: 38274 - protein, 198 aa, Vibrio cholerae [sequence omitted]

SEQ ID NO: 38275 - DNA, 597 bp, Vibrio harveyi; identical to SEQ ID NO: 20470
  CDS (1)..(597): transl_table=11

SEQ ID NO: 38276 - protein, 198 aa, Vibrio harveyi; identical to SEQ ID NO: 20471

SEQ ID NO: 38277 - DNA, 597 bp, Vibrio parahaemolyticus; identical to SEQ ID NO: 20472
  CDS (1)..(597): transl_table=11

SEQ ID NO: 38278 - protein, 198 aa, Vibrio parahaemolyticus; identical to SEQ ID NO: 20473

SEQ ID NO: 38279 - DNA, 597 bp, Vibrio vulnificus; identical to SEQ ID NO: 20474
  CDS (1)..(597): transl_table=11

SEQ ID NO: 38280 - protein, 198 aa, Vibrio vulnificus; identical to SEQ ID NO: 20475

SEQ ID NO: 38281 - DNA, 600 bp, Yersinia pestis; identical to SEQ ID NO: 20476
  CDS (1)..(600): transl_table=11

SEQ ID NO: 38282 - protein, 199 aa, Yersinia pestis; identical to SEQ ID NO: 20477

SEQ ID NO: 38283 - DNA, 582 bp, Buchnera aphidicola subsp; identical to SEQ ID NO: 20478
  CDS (1)..(582): transl_table=11

SEQ ID NO: 38284 - protein, 193 aa, Buchnera aphidicola subsp; identical to SEQ ID NO: 20479

SEQ ID NO: 38285 - DNA, 582 bp, Buchnera aphidicola subsp; identical to SEQ ID NO: 20480
  CDS (1)..(582): transl_table=11

SEQ ID NO: 38286 - protein, 193 aa, Buchnera aphidicola subsp; identical to SEQ ID NO: 20481

SEQ ID NO: 38287 - DNA, 585 bp, Buchnera aphidicola subsp; identical to SEQ ID NO: 20482
  CDS (1)..(585): transl_table=11

SEQ ID NO: 38288 - protein, 194 aa, Buchnera aphidicola subsp; identical to SEQ ID NO: 20483

SEQ ID NO: 38289 - DNA, 582 bp, Haemophilus ducreyi; identical to SEQ ID NO: 20484
  CDS (1)..(582): transl_table=11

SEQ ID NO: 38290 - protein, 193 aa, Haemophilus ducreyi; identical to SEQ ID NO: 20485

SEQ ID NO: 38291 - DNA, 579 bp, Haemophilus influenzae; identical to SEQ ID NO: 20486
  CDS (1)..(579): transl_table=11

SEQ ID NO: 38292 - protein, 192 aa, Haemophilus influenzae; identical to SEQ ID NO: 20487

SEQ ID NO: 38293 - DNA, 579 bp, Pasteurella multocida; identical to SEQ ID NO: 20488
  CDS (1)..(579): transl_table=11

SEQ ID NO: 38294 - protein, 192 aa, Pasteurella multocida; identical to SEQ ID NO: 20489

SEQ ID NO: 38295 - DNA, 585 bp, Pseudomonas aeruginosa; identical to SEQ ID NO: 20490
  CDS (1)..(585): transl_table=11

SEQ ID NO: 38296 - protein, 194 aa, Pseudomonas aeruginosa; identical to SEQ ID NO: 20491

SEQ ID NO: 38297 - DNA, 582 bp, Rhodobacter capsulatus; identical to SEQ ID NO: 20492
  CDS (1)..(582): transl_table=11

SEQ ID NO: 38298 - protein, 193 aa, Rhodobacter capsulatus; identical to SEQ ID NO: 20493

SEQ ID NO: 38299 - DNA, 717 bp, Azotobacter vinelandii; identical to SEQ ID NO: 20494
  CDS (1)..(717): transl_table=11

SEQ ID NO: 38300 - protein, 238 aa, Azotobacter vinelandii; identical to SEQ ID NO: 20495

SEQ ID NO: 38301 - DNA, 672 bp, Buchnera aphidicola subsp; identical to SEQ ID NO: 20496
  CDS (1)..(672): transl_table=11

SEQ ID NO: 38302 - protein, 223 aa, Buchnera aphidicola subsp; identical to SEQ ID NO: 20497

SEQ ID NO: 38303 - DNA, 726 bp, Buchnera aphidicola subsp; identical to SEQ ID NO: 20498
  CDS (1)..(726): transl_table=11

SEQ ID NO: 38304 - protein, 241 aa, Buchnera aphidicola subsp; identical to SEQ ID NO: 20499

SEQ ID NO: 38305 - DNA, 696 bp, Escherichia coli O157; identical to SEQ ID NO: 20500
  CDS (1)..(696): transl_table=11

SEQ ID NO: 38306 - protein, 231 aa, Escherichia coli O157; identical to SEQ ID NO: 20501

SEQ ID NO: 38307 - DNA, 696 bp, Escherichia coli O6; identical to SEQ ID NO: 20502
  CDS (1)..(696): transl_table=11

SEQ ID NO: 38308 - protein, 231 aa, Escherichia coli O6; identical to SEQ ID NO: 20503

SEQ ID NO: 38309 - DNA, 696 bp, Escherichia coli; identical to SEQ ID NO: 20504
  CDS (1)..(696): transl_table=11

SEQ ID NO: 38310 - protein, 231 aa, Escherichia coli; identical to SEQ ID NO: 20505

SEQ ID NO: 38311 - DNA, 684 bp, Haemophilus ducreyi; identical to SEQ ID NO: 20506
  CDS (1)..(684): transl_table=11

SEQ ID NO: 38312 - protein, 227 aa, Haemophilus ducreyi; identical to SEQ ID NO: 20507

SEQ ID NO: 38313 - DNA, 708 bp, Haemophilus influenzae; identical to SEQ ID NO: 20508
  CDS (1)..(708): transl_table=11

SEQ ID NO: 38314 - protein, 235 aa, Haemophilus influenzae; identical to SEQ ID NO: 20509

SEQ ID NO: 38315 - DNA, 723 bp, Pseudomonas aeruginosa; identical to SEQ ID NO: 20510
  CDS (1)..(723): transl_table=11

SEQ ID NO: 38316 - protein, 240 aa, Pseudomonas aeruginosa; identical to SEQ ID NO: 20511

SEQ ID NO: 38317 - DNA, 726 bp, Pseudomonas stutzeri; identical to SEQ ID NO: 20512
  CDS (1)..(726): transl_table=11

SEQ ID NO: 38318 - protein, 241 aa, Pseudomonas stutzeri; identical to SEQ ID NO: 20513

SEQ ID NO: 38319 - DNA, 732 bp, Rhodobacter capsulatus; identical to SEQ ID NO: 20514
  CDS (1)..(732): transl_table=11

SEQ ID NO: 38320 - protein, 243 aa, Rhodobacter capsulatus; identical to SEQ ID NO: 20515

SEQ ID NO: 38321 - DNA, 693 bp, Salmonella choleraesuis; identical to SEQ ID NO: 20516
  CDS (1)..(693): transl_table=11

SEQ ID NO: 38322 - protein, 230 aa, Salmonella choleraesuis; identical to SEQ ID NO: 20517

SEQ ID NO: 38323 - DNA, 693 bp, Salmonella paratyphi; identical to SEQ ID NO: 20518
  CDS (1)..(693): transl_table=11

SEQ ID NO: 38324 - protein, 230 aa, Salmonella paratyphi; identical to SEQ ID NO: 20519

SEQ ID NO: 38325 - DNA, 693 bp, Vibrio cholerae; identical to SEQ ID NO: 20520
  CDS (1)..(693): transl_table=11

SEQ ID NO: 38326 - protein, 230 aa, Vibrio cholerae; identical to SEQ ID NO: 20521

SEQ ID NO: 38327 - DNA, 693 bp, Vibrio parahaemolyticus; identical to SEQ ID NO: 20522
  CDS (1)..(693): transl_table=11

SEQ ID NO: 38328 - protein, 230 aa, Vibrio parahaemolyticus; identical to SEQ ID NO: 20523

SEQ ID NO: 38329 - DNA, 693 bp, Vibrio vulnificus; identical to SEQ ID NO: 20524
  CDS (1)..(693): transl_table=11

SEQ ID NO: 38330 - protein, 230 aa, Vibrio vulnificus; identical to SEQ ID NO: 20525

SEQ ID NO: 38331 - DNA, 702 bp, Yersinia pestis; identical to SEQ ID NO: 20526
  CDS (1)..(702): transl_table=11

SEQ ID NO: 38332 - protein, 233 aa, Yersinia pestis; identical to SEQ ID NO: 20527

SEQ ID NO: 38333 - DNA, 25 bp, Artificial sequence
  Primer sequence
atgactgactacctgttactgtttg

SEQ ID NO: 38334 - DNA, 25 bp, Artificial sequence
  Primer sequence
ttacaacttcaccaaaccactaaag

SEQ ID NO: 38335 - protein, 232 aa, Artificial sequence; identical to SEQ ID NO: 20530
  Consensus
  Variant (2)..(5): Xaa in position 2 to 5 is any amino acid
  Variant (7)..(9): Xaa in position 7 to 9 is any amino acid
  Variant (11)..(15): Xaa in position 11 to 15 is any amino acid
  Variant (16)..(16): Xaa in position 16 is any or no amino acid
  Variant (21)..(22): Xaa in position 21 to 22 is any amino acid
  Variant (27)..(29): Xaa in position 27 to 29 is any amino acid
  Variant (30)..(33): Xaa in position 30 to 33 is any or no amino acid
  Variant (35)..(36): Xaa in position 35 to 36 is any or no amino acid
  Variant (41)..(43): Xaa in position 41 to 43 is any amino acid
  Variant (45)..(53): Xaa in position 45 to 53 is any amino acid
  Variant (56)..(58): Xaa in position 56 to 58 is any amino acid
  Variant (60)..(62): Xaa in position 60 to 62 is any amino acid
  Variant (63)..(87): Xaa in position 63 to 87 is any or no amino acid
  Variant (89)..(93): Xaa in position 89 to 93 is any amino acid
  Variant (95)..(95): Xaa in position 95 is any amino acid
  Variant (99)..(100): Xaa in position 99 to 100 is any amino acid
  Variant (102)..(103): Xaa in position 102 to 103 is any amino acid
  Variant (106)..(107): Xaa in position 106 to 107 is any amino acid
  Variant (109)..(114): Xaa in position 109 to 114 is any amino acid
  Variant (116)..(116): Xaa in position 116 is any amino acid
  Variant (117)..(118): Xaa in position 117 to 118 is any or no amino acid
  Variant (120)..(120): Xaa in position 120 is any amino acid
  Variant (124)..(124): Xaa in position 124 is any amino acid
  Variant (127)..(128): Xaa in position 127 to 128 is any amino acid
  Variant (131)..(131): Xaa in position 131 is any amino acid
  Variant (135)..(147): Xaa in position 135 to 147 is any amino acid
  Variant (148)..(158): Xaa in position 148 to 158 is any or no amino acid
  Variant (160)..(160): Xaa in position 160 is any amino acid
  Variant (162)..(162): Xaa in position 162 is any amino acid
  Variant (164)..(166): Xaa in position 164 to 166 is any amino acid
  Variant (171)..(173): Xaa in position 171 to 173 is any amino acid
  Variant (176)..(177): Xaa in position 176 to 177 is any amino acid
  Variant (179)..(179): Xaa in position 179 is any amino acid
  Variant (183)..(183): Xaa in position 183 is any amino acid
  Variant (185)..(188): Xaa in position 185 to 188 is any amino acid
  Variant (189)..(203): Xaa in position 189 to 203 is any or no amino acid
  Variant (205)..(219): Xaa in position 205 to 219 is any amino acid
  Variant (220)..(220): Xaa in position 220 is any or no amino acid
  Variant (222)..(224): Xaa in position 222 to 224 is any amino acid
  Variant (227)..(231): Xaa in position 227 to 231 is any amino acid

SEQ ID NO: 38336 - protein, 30 aa, Artificial sequence; identical to SEQ ID NO: 20531
  Consensus
  Variant (2)..(4): Xaa in position 2 to 4 is any or no amino acid
  Variant (7)..(7): Xaa in position 7 is Ile, Leu, Met or Val
  Variant (9)..(9): Xaa in position 9 is Pro, Ser or Thr
  Variant (10)..(10): Xaa in position 10 is any amino acid
  Variant (11)..(11): Xaa in position 11 is Leu or Met
  Variant (12)..(12): Xaa in position 12 is Ala or Gly
  Variant (13)..(13): Xaa in position 13 is any amino acid
  Variant (14)..(14): Xaa in position 14 is Ser or Thr
  Variant (15)..(18): Xaa in position 15 to 18 is any amino acid
  Variant (19)..(19): Xaa in position 19 is Asn, Ser, Thr or Val
  Variant (20)..(20): Xaa in position 20 is Ala, Gly, Ser or Thr
  Variant (21)..(22): Xaa in position 21 to 22 is any amino acid
  Variant (23)..(23): Xaa in position 23 is Leu or Met
  Variant (24)..(24): Xaa in position 24 is Ala, Cys, Gly, Ser or Thr
  Variant (25)..(25): Xaa in position 25 is any amino acid
  Variant (26)..(26): Xaa in position 26 is Ala, Cys, Gly, Ser or Thr
  Variant (27)..(29): Xaa in position 27 to 29 is any amino acid
  Variant (30)..(30): Xaa in position 30 is Ala, Ile, Leu or Val

SEQ ID NO: 38337 - protein, 38 aa, Artificial sequence; identical to SEQ ID NO: 20532
  Consensus
  Variant (3)..(4): Xaa in position 3 to 4 is any amino acid
  Variant (6)..(8): Xaa in position 6 to 8 is any amino acid
  Variant (9)..(9): Xaa in position 9 is Asp, Glu or Gln
  Variant (10)..(11): Xaa in position 10 to 11 is any amino acid
  Variant (12)..(12): Xaa in position 12 is Phe, Ile, Leu, Met or Val
  Variant (13)..(18): Xaa in position 13 to 18 is any amino acid
  Variant (19)..(19): Xaa in position 19 is Ile, Leu, Met or Val
  Variant (20)..(22): Xaa in position 20 to 22 is any amino acid
  Variant (24)..(24): Xaa in position 24 is Gly or Ser
  Variant (25)..(25): Xaa in position 25 is Ile, Leu or Val
  Variant (26)..(26): Xaa in position 26 is Phe or Tyr
  Variant (27)..(27): Xaa in position 27 is Ile, Leu or Val
  Variant (28)..(28): Xaa in position 28 is Ala, Gly, Pro or Ser
  Variant (30)..(30): Xaa in position 30 is Ile or Leu
  Variant (31)..(31): Xaa in position 31 is any amino acid
  Variant (32)..(32): Xaa in position 32 is Thr or Val
  Variant (35)..(35): Xaa in position 35 is any amino acid
  Variant (36)..(36): Xaa in position 36 is Ile or Val
  Variant (37)..(37): Xaa in position 37 is Phe, Ile, Leu, Met or Val
  Variant (38)..(38): Xaa in position 38 is Ala or Gly

SEQ ID NO: 38338 - protein, 14 aa, Artificial sequence
  Consensus
  Variant (2)..(4): Xaa in position 2 to 4 is any amino acid
  Variant (5)..(5): Xaa in position 5 is Ala, Ile or Val
  Variant (6)..(6): Xaa in position 6 is Ile, Leu or Met
  Variant (7)..(8): Xaa in position 7 to 8 is any amino acid
  Variant (9)..(9): Xaa in position 9 is Phe, Ile, Leu, Met or Val
  Variant (10)..(10): Xaa in position 10 is Ala, Gly or Ser
  Variant (11)..(12): Xaa in position 11 to 12 is any amino acid
GXXXXXXXXXXXRE

SEQ ID NO: 38339 - DNA, 294 bp, Escherichia coli K12; identical to SEQ ID NO: 18672
  CDS (1)..(294): transl_table=11

SEQ ID NO: 38340 - protein, 97 aa, Escherichia coli K12; identical to SEQ ID NO: 18673

SEQ ID NO: 38341 - DNA, 300 bp, Mesorhizobium loti MAFF303099; identical to SEQ ID NO: 18674
  CDS (1)..(300): transl_table=11

SEQ ID NO: 38342 - protein, 99 aa, Mesorhizobium loti MAFF303099; identical to SEQ ID NO: 18675

SEQ ID NO: 38343 - DNA, 273 bp, Thermoplasma volcanium GSS1; identical to SEQ ID NO: 18676
  CDS (1)..(273): transl_table=11

SEQ ID NO: 38344 - protein, 90 aa, Thermoplasma volcanium GSS1; identical to SEQ ID NO: 18677

SEQ ID NO: 38345 - DNA, 279 bp, Thermotoga maritima MSB8; identical to SEQ ID NO: 18678
  CDS (1)..(279): transl_table=11

SEQ ID NO: 38346 - protein, 92 aa, Thermotoga maritima MSB8; identical to SEQ ID NO: 18679

SEQ ID NO: 38347 - DNA, 297 bp, Escherichia coli O157:H7; identical to SEQ ID NO: 18680
  CDS (1)..(297): transl_table=11

SEQ ID NO: 38348 - protein, 98 aa, Escherichia coli O157:H7; identical to SEQ ID NO: 18681

SEQ ID NO: 38349 - DNA, 282 bp, Sulfolobus tokodaii str. 7; identical to SEQ ID NO: 18682
  CDS (1)..(282): transl_table=11

SEQ ID NO: 38350 - protein, 93 aa, Sulfolobus tokodaii str. 7; identical to SEQ ID NO: 18683

SEQ ID NO: 38351 - DNA, 273 bp, Thermoplasma acidophilum DSM 1728; identical to SEQ ID NO: 18684
  CDS (1)..(273): transl_table=11

SEQ ID NO: 38352 - protein, 90 aa, Thermoplasma acidophilum DSM 1728; identical to SEQ ID NO: 18685

SEQ ID NO: 38353 - DNA, 291 bp, Pyrobaculum aerophilum str. IM2; identical to SEQ ID NO: 18686
  CDS (1)..(291): transl_table=11

SEQ ID NO: 38354 - protein, 96 aa, Pyrobaculum aerophilum str. IM2; identical to SEQ ID NO: 18687

SEQ ID NO: 38355 - DNA, 285 bp, Fusobacterium nucleatum subsp. nucleatum ATCC 25586; identical to SEQ ID NO: 18688
  CDS (1)..(285): transl_table=11

SEQ ID NO: 38356 - protein, 94 aa, Fusobacterium nucleatum subsp. nucleatum ATCC 25586; identical to SEQ ID NO: 18689

SEQ ID NO: 38357 - DNA, 297 bp, Shigella flexneri 2a str. 301; identical to SEQ ID NO: 18690
  CDS (1)..(297): transl_table=11

SEQ ID NO: 38358 - protein, 98 aa, Shigella flexneri 2a str. 301; identical to SEQ ID NO: 18691

SEQ ID NO: 38359 - DNA, 297 bp, Escherichia coli CFT073; identical to SEQ ID NO: 18692
  CDS (1)..(297): transl_table=11

SEQ ID NO: 38360 - protein, 98 aa, Escherichia coli CFT073; identical to SEQ ID NO: 18693

SEQ ID NO: 38361 - DNA, 297 bp, Rhodopseudomonas palustris CGA009; identical to SEQ ID NO: 18694
  CDS (1)..(297): transl_table=11

SEQ ID NO: 38362 - protein, 98 aa, Rhodopseudomonas palustris CGA009; identical to SEQ ID NO: 18695

SEQ ID NO: 38363 - DNA, 294 bp, Salmonella enterica subsp. enterica serovar Choleraesuis str; identical to SEQ ID NO: 18696
  CDS (1)..(294): transl_table=11

SEQ ID NO: 38364 - protein, 97 aa, Salmonella enterica subsp. enterica serovar Choleraesuis str; identical to SEQ ID NO: 18697

SEQ ID NO: 38365 - DNA, 291 bp, Sulfolobus acidocaldarius DSM 639; identical to SEQ ID NO: 18698
  CDS (1)..(291): transl_table=11

SEQ ID NO: 38366 - protein, 96 aa, Sulfolobus acidocaldarius DSM 639; identical to SEQ ID NO: 18699

SEQ ID NO: 38367 - DNA, 297 bp, Shigella sonnei Ss046; identical to SEQ ID NO: 18700
  CDS (1)..(297): transl_table=11

SEQ ID NO: 38368 - protein, 98 aa, Shigella sonnei Ss046; identical to SEQ ID NO: 18701

SEQ ID NO: 38369 - DNA, 291 bp, Rhodospirillum rubrum; identical to SEQ ID NO: 18702
  CDS (1)..(291)

SEQ ID NO: 38370 - protein, 96 aa, Rhodospirillum rubrum; identical to SEQ ID NO: 18703

SEQ ID NO: 38371 - DNA, 300 bp, Burkholderia fungorum LB400; identical to SEQ ID NO: 18704
  CDS (1)..(300)

SEQ ID NO: 38372 - protein, 99 aa, Burkholderia fungorum LB400; identical to SEQ ID NO: 18705

SEQ ID NO: 38373 - DNA, 285 bp, Azotobacter vinelandii AvOP; identical to SEQ ID NO: 18706
  CDS (1)..(285): transl_table=11

SEQ ID NO: 38374 - protein, 94 aa, Azotobacter vinelandii AvOP; identical to SEQ ID NO: 18707

SEQ ID NO: 38375 - DNA, 300 bp, Burkholderia vietnamiensis G4; identical to SEQ ID NO: 18708
  CDS (1)..(300): transl_table=11

SEQ ID NO: 38376 - protein, 99 aa, Burkholderia vietnamiensis G4; identical to SEQ ID NO: 18709

SEQ ID NO: 38377 - DNA, 282 bp, Desulfitobacterium hafniense DCB-2; identical to SEQ ID NO: 18710
  CDS (1)..(282): transl_table=11

SEQ ID NO: 38378 - protein, 93 aa, Desulfitobacterium hafniense DCB-2; identical to SEQ ID NO: 18711

SEQ ID NO: 38379 - DNA, 279 bp, Desulfitobacterium hafniense DCB-2; identical to SEQ ID NO: 18712
  CDS (1)..(279): transl_table=11

SEQ ID NO: 38380 - protein, 92 aa, Desulfitobacterium hafniense DCB-2; identical to SEQ ID NO: 18713

SEQ ID NO: 38381 - DNA, 297 bp, Desulfitobacterium hafniense DCB-2; identical to SEQ ID NO: 18714
  CDS (1)..(297): transl_table=11

SEQ ID NO: 38382 - protein, 98 aa, Desulfitobacterium hafniense DCB-2; identical to SEQ ID NO: 18715

SEQ ID NO: 38383 - DNA, 288 bp, Desulfitobacterium hafniense DCB-2; identical to SEQ ID NO: 18716
  CDS (1)..(288): transl_table=11

SEQ ID NO: 38384 - protein, 95 aa, Desulfitobacterium hafniense DCB-2; identical to SEQ ID NO: 18717

SEQ ID NO: 38385 - DNA, 279 bp, Moorella thermoacetica ATCC 39073; identical to SEQ ID NO: 18718
  CDS (1)..(279): transl_table=11

SEQ ID NO: 38386 - protein, 92 aa, Moorella thermoacetica ATCC 39073; identical to SEQ ID NO: 18719

SEQ ID NO: 38387 - DNA, 285 bp, Syntrophomonas wolfei str. Goettingen; identical to SEQ ID NO: 18720
  CDS (1)..(285): transl_table=11

SEQ ID NO: 38388 - protein, 94 aa, Syntrophomonas wolfei str. Goettingen; identical to SEQ ID NO: 18721

SEQ ID NO: 38389 - DNA, 288 bp, Syntrophobacter fumaroxidans MPOB; identical to SEQ ID NO: 18722
  CDS (1)..(288): transl_table=11

SEQ ID NO: 38390 - protein, 95 aa, Syntrophobacter fumaroxidans MPOB; identical to SEQ ID NO: 18723

SEQ ID NO: 38391 - DNA, 297 bp, Rhizobium leguminosarum; identical to SEQ ID NO: 18724
  CDS (1)..(297): transl_table=11

SEQ ID NO: 38392 - protein, 98 aa, Rhizobium leguminosarum; identical to SEQ ID NO: 18725

SEQ ID NO: 38393 - DNA, 297 bp, Rhizobium leguminosarum bv; identical to SEQ ID NO: 18726
  CDS (1)..(297): transl_table=11

SEQ ID NO: 38394 - protein, 98 aa, Rhizobium leguminosarum bv; identical to SEQ ID NO: 18727

SEQ ID NO: 38395 - DNA, 300 bp, Rhizobium loti; identical to SEQ ID NO: 18728
  CDS (1)..(300): transl_table=11

SEQ ID NO: 38396 - protein, 99 aa, Rhizobium loti; identical to SEQ ID NO: 18729

SEQ ID NO: 38397 - DNA, 294 bp, Azospirillum brasilense; identical to SEQ ID NO: 18730
  CDS (1)..(294): transl_table=11

SEQ ID NO: 38398 - protein, 97 aa, Azospirillum brasilense; identical to SEQ ID NO: 18731

SEQ ID NO: 38399 - DNA, 285 bp, Acetobacter diazotrophicus; identical to SEQ ID NO: 18732
  CDS (1)..(285): transl_table=11

SEQ ID NO: 38400 - protein, 94 aa, Acetobacter diazotrophicus; identical to SEQ ID NO: 18733

SEQ ID NO: 38401 - DNA, 294 bp, Azorhizobium caulinodans; identical to SEQ ID NO: 18734
  CDS (1)..(294): transl_table=11

SEQ ID NO: 38402 - protein, 97 aa, Azorhizobium caulinodans; identical to SEQ ID NO: 18735

SEQ ID NO: 38403 - DNA, 285 bp, Azotobacter vinelandii; identical to SEQ ID NO: 18736
  CDS (1)..(285): transl_table=11

SEQ ID NO: 38404 - protein, 94 aa, Azotobacter vinelandii; identical to SEQ ID NO: 18737

SEQ ID NO: 38405 - DNA, 297 bp, Bradyrhizobium japonicum; identical to SEQ ID NO: 18738
  CDS (1)..(297): transl_table=11

SEQ ID NO: 38406 - protein, 98 aa, Bradyrhizobium japonicum; identical to SEQ ID NO: 18739

SEQ ID NO: 38407 - DNA, 288 bp, Escherichia coli O157; identical to SEQ ID NO: 18740
  CDS (1)..(288): transl_table=11

SEQ ID NO: 38408 - protein, 95 aa, Escherichia coli O157; identical to SEQ ID NO: 18741

SEQ ID NO: 38409 - DNA, 297 bp, Rhizobium leguminosarum; identical to SEQ ID NO: 18742
  CDS (1)..(297): transl_table=11

SEQ ID NO: 38410 - protein, 98 aa, Rhizobium leguminosarum; identical to SEQ ID NO: 18743

SEQ ID NO: 38411 - DNA, 300 bp, Rhizobium leguminosarum bv; identical to SEQ ID NO: 18744
  CDS (1)..(300): transl_table=11

SEQ ID NO: 38412 - protein, 99 aa, Rhizobium leguminosarum bv; identical to SEQ ID NO: 18745

SEQ ID NO: 38413 - DNA, 297 bp, Rhizobium leguminosarum bv; identical to SEQ ID NO: 18746
  CDS (1)..(297): transl_table=11

SEQ ID NO: 38414 - protein, 98 aa, Rhizobium leguminosarum bv; identical to SEQ ID NO: 18747

SEQ ID NO: 38415 - DNA, 297 bp, Rhizobium meliloti; identical to SEQ ID NO: 18748
  CDS (1)..(297): transl_table=11

SEQ ID NO: 38416 - protein, 98 aa, Rhizobium meliloti; identical to SEQ ID NO: 18749

SEQ ID NO: 38417 - DNA, 294 bp, Rhizobium sp; identical to SEQ ID NO: 18750
  CDS (1)..(294): transl_table=11

SEQ ID NO: 38418 - protein, 97 aa, Rhizobium sp; identical to SEQ ID NO: 18751

SEQ ID NO: 38419 - DNA, 288 bp, Salmonella typhi; identical to SEQ ID NO: 18752
  CDS (1)..(288): transl_table=11

SEQ ID NO: 38420 - protein, 95 aa, Salmonella typhi; identical to SEQ ID NO: 18753

SEQ ID NO: 38421 - DNA, 288 bp, Salmonella typhimurium; identical to SEQ ID NO: 18754
  CDS (1)..(288): transl_table=11

SEQ ID NO: 38422 - protein, 95 aa, Salmonella typhimurium; identical to SEQ ID NO: 18755

SEQ ID NO: 38423 - DNA, 288 bp, Shigella flexneri; identical to SEQ ID NO: 18756
  CDS (1)..(288): transl_table=11

SEQ ID NO: 38424 - protein, 95 aa, Shigella flexneri; identical to SEQ ID NO: 18757

SEQ ID NO: 38425 - DNA, 297 bp, Escherichia coli; identical to SEQ ID NO: 18758
  CDS (1)..(297): transl_table=11

SEQ ID NO: 38426 - protein, 98 aa, Escherichia coli; identical to SEQ ID NO: 18759

SEQ ID NO: 38427 - DNA, 23 bp, Artificial sequence
  Primer sequence
atgagccagaacgctacggttaa

SEQ ID NO: 38428 - DNA, 24 bp, Artificial sequence
  Primer sequence
ttagccgtagcgaaaatcaatacc

SEQ ID NO: 38429 - protein, 97 aa, Artificial sequence; identical to SEQ ID NO: 18762
  Consensus
  Variant (3)..(3): Xaa in position 3 is any amino acid
  Variant (6)..(9): Xaa in position 6 to 9 is any amino acid
  Variant (11)..(12): Xaa in position 11 to 12 is any amino acid
  Variant (14)..(16): Xaa in position 14 to 16 is any amino acid
  Variant (17)..(17): Xaa in position 17 is any or no amino acid
  Variant (20)..(20): Xaa in position 20 is any amino acid
  Variant (22)..(36): Xaa in position 22 to 36 is any amino acid
  Variant (37)..(42): Xaa in position 37 to 42 is any or no amino acid
  Variant (46)..(47): Xaa in position 46 to 47 is any amino acid
  Variant (49)..(54): Xaa in position 49 to 54 is any amino acid
  Variant (55)..(56): Xaa in position 55 to 56 is any or no amino acid
  Variant (58)..(62): Xaa in position 58 to 62 is any amino acid
  Variant (74)..(80): Xaa in position 74 to 80 is any amino acid
  Variant (81)..(82): Xaa in position 81 to 82 is any or no amino acid
  Variant (84)..(84): Xaa in position 84 is any amino acid
  Variant (87)..(87): Xaa in position 87 is any amino acid
  Variant (89)..(90): Xaa in position 89 to 90 is any amino acid
  Variant (93)..(93): Xaa in position 93 is any amino acid

SEQ ID NO: 38430 - protein, 11 aa, Artificial sequence
  Consensus
  Variant (3)..(3): Xaa in position 3 is Ile, Leu, Met or Val
  Variant (9)..(9): Xaa in position 9 is Asn or Arg
  Variant (10)..(10): Xaa in position 10 is any amino acid
  Variant (11)..(11): Xaa in position 11 is Ala, Gly, Ile, Leu or Val
GCXECGTCXXX

SEQ ID NO: 38431 - protein, 15 aa, Artificial sequence
  Consensus
  Variant (2)..(3): Xaa in position 2 to 3 is any amino acid
  Variant (5)..(5): Xaa in position 5 is any amino acid
  Variant (7)..(7): Xaa in position 7 is Asp, Glu, Gly, Asn or Thr
  Variant (8)..(8): Xaa in position 8 is any amino acid
  Variant (10)..(10): Xaa in position 10 is Ile or Val
  Variant (11)..(11): Xaa in position 11 is any amino acid
  Variant (12)..(12): Xaa in position 12 is Phe, Trp or Tyr
  Variant (13)..(13): Xaa in position 13 is Lys or Arg
  Variant (14)..(14): Xaa in position 14 is any amino acid
WXXPXGXXGXXXXXG

SEQ ID NO: 38432 - DNA, 1515 bp, Escherichia coli
  CDS (1)..(1515)
atgcaacagtctaccccgtatctctcatttcgcggcatcggtaaaacgtttcccggcgttaaggcgctgacggatattagttttgactgctatgccggtcaggttcatgcgttgatgggtgaaaatggcgcaggaaaatcaactctcttaaaaatcctcagcggcaactatgcgccaaccacgggttctgtagtgattaatgggcaggaaatgtccttttccgacacgaccgcagcacttaacgcgggtgtggcgattatttaccaggaactgcatctcgtgccggaaatgaccgtcgcggaaaacatctatctcggccagctgccgcataaaggcggcattgtgaatcgctcattgctgaattatgaggcgggtttacaacttaaacatcttggtatggatattgacccggacacgccgctgaaatatctctccattggtcagtggcagatggttgaaatcgccaaggcgctggcgcgtaacgctaaaattatcgcctttgatgagccaaccagctccctttctgcccgcgaaatcgacaatcttttccgcgttattcgtgaactgcgaaaagaggggcgggtgatcttatacgtttctcaccgtatggaagaaatatttgccctcagcgatgccatcactgtctttaaagatggacgttatgtcaaaacctttaccgatatgcagcaggttgaccacgacgcgctggtgcaggcgatggtcgggcgcgacattggcgatatctacggctggcaaccgcgtagttatggcgaggagcgcctgcgtcttgatgctgtgaaagcaccaggcgtgcgtacgccaataagtctggcggttcgcagtggtgaaattgttgggctgtttggtctggtaggggcggggcgtagcgaattaatgaaaggcatgtttggcgggacgcaaatcaccgccggtcaggtttatatcgaccaacagccgatcgatattcgtaaaccgagccacgccattgccgcaggcatgatgctctgcccggaagatcgcaaagcggaaggcattattcctgtgcactccgttcgcgacaatatcaacatcagtgccagacgtaaacatgtgctcggcggttgtgtaatcaacaacggttgggaagaaaacaatgccgatcaccacattcgttcgctcaacatcaaaacgccgggcgctgagcaactgattatgaatctctcaggtggaaatcagcaaaaagccattctgggccgctggttatcggaagagatgaaggtcattttgctggatgaacctacgcgcggcattgatgttggtgctaagcacgaaatatataacgtgatttatgcgctggcggcgcagggtgtggcggtgctgtttgcctccagcgacttacctgaagtcctcggcgttgccgaccggattgtggtgatgcgcgaaggtgaaatcgccggtgaattgttacacgagcaggcagatgagcgtcaggcactgagccttgcgatgcctaaagtcagccaggcagttgcctga

SEQ ID NO: 38433 - protein, 504 aa, Escherichia coli
MQQSTPYLSFRGIGKTFPGVKALTDISFDCYAGQVHALMGENGAGKSTLLKILSGNYAPTTGSVVINGQEMSFSDTTAALNAGVAIIYQELHLVPEMTVAENIYLGQLPHKGGIVNRSLLNYEAGLQLKHLGMDIDPDTPLKYLSIGQWQMVEIAKALARNAKIIAFDEPTSSLSAREIDNLFRVIRELRKEGRVILYVSHRMEEIFALSDAITVFKDGRYVKTFTDMQQVDHDALVQAMVGRDIGDIYGWQPRSYGEERLRLDAVKAPGVRTPISLAVRSGEIVGLFGLVGAGRSELMKGMFGGTQITAGQVYIDQQPIDIRKPSHAIAAGMMLCPEDRKAEGIIPVHSVRDNINISARRKHVLGGCVINNGWEENNADHHIRSLNIKTPGAEQLIMNLSGGNQQKAILGRWLSEEMKVILLDEPTRGIDVGAKHEIYNVIYALAAQGVAVLFASSDLPEVLGVADRIVVMREGEIAGELLHEQADERQALSLAMPKVSQAVA

SEQ ID NO: 38434 - DNA, 1497 bp, Agrobacterium rhizogenes
  CDS (1)..(1497): transl_table=11
atggccaaccttatagaaatgtcgaacatttcaaagtcgtttggcggaagtctggcactggatagggtgtcgctggagctcttgccgggttccgtccatgccctgatgggcgaaaatggcgccggcaaatcgacgctgatgaagatcctcgcgggtgttcaccagcccgatagcggcgagatcttcaagaacggccacaagattgccttcctcaatccgaaagaggcgctcgacttcggcatctcgactgtcttccaggagatgacgcttctggcgaacctgacgatcgccgaaaacatgtttctcggacgtgagccggtcacgcgcttcggaacggtcgactacaagcgcatgaatgccgaaaccggaaaggcgttgaaggagctttcgctcgatctcgatcctcggacgctggtttcgaacctcaccattgccgagcggcaattcgtcgaaattgcccacgggatcaaggccgatgcctcgatcttcattctcgatgagccgacagcagcactcaacgccgccgacgtcgagatcctcaacaagcatatccgccgcttgcgcgatgcaggcaaggccctcgtctatatctcgcatcgcatggatgaaatcttccagatctgcgacaccgtcacggtgctgaaagatggcaagctgatcggcacgcgcccgctttcggaaatgacgccgacgtcgttgatcgcaatgatggtcggccgcgagctgaaggacctcttcccggcaagaaacggctcggcatccggcgagccgatgctcgacatcaagcatttcaagatcggtgcctcgacgaagcctttctcgctccatgtttgcaagggcgagatcgtcgccctggcagggctcgaaggacaaggccagcagaagcttctgcgctcgctcgtcggcaaattccaaccgttttccggtaccatcacgctgaacggaaaatcgctcgccctgccggtgccgaacgaaaacggtgtgcgcaagctgcagcagatgggtgtcggcttcattcctgaggaccgcaaggaggaaggcttgttcctcaacctcccgatcgcgcacaatatcgagattgcgctccattcggcgcgcgcaggattttctcccgccaagaactaccggacgttggttgccgacaccatcaagcggctgaacgtccggacgatcaacgcatccgcacccgtcggcgctctctccggcggcaatcagcagaaggtcctgcttggccgctatatcgccgccaatctcgatatcctgctgatcgaggagccgacgcgcggcgtcgatatcggcgccaagtcggaaatctacaaactgcttcgcgacttcacgcagaacggcggggccgtgctggtcctgtcgagagaaaccgttgagctcatcggcctttgcgatcgcatctatgtcgtccatggcgacacggttgtggccgacatgcccgccgccaaggcgacagagcacgacatcctcgacgccgccttgagcgcgtga

SEQ ID NO: 38435 - protein, 498 aa, Agrobacterium rhizogenes
MANLIEMSNISKSFGGSLALDRVSLELLPGSVHALMGENGAGKSTLMKILAGVHQPDSGEIFKNGHKIAFLNPKEALDFGISTVFQEMTLLANLTIAENMFLGREPVTRFGTVDYKRMNAETGKALKELSLDLDPRTLVSNLTIAERQFVEIAHGIKADASIFILDEPTAALNAADVEILNKHIRRLRDAGKALVYISHRMDEIFQICDTVTVLKDGKLIGTRPLSEMTPTSLIAMMVGRELKDLFPARNGSASGEPMLDIKHFKIGASTKPFSLHVCKGEIVALAGLEGQGQQKLLRSLVGKFQPFSGTITLNGKSLALPVPNENGVRKLQQMGVGFIPEDRKEEGLFLNLPIAHNIEIALHSARAGFSPAKNYRTLVADTIKRLNVRTINASAPVGALSGGNQQKVLLGRYIAANLDILLIEEPTRGVDIGAKSEIYKLLRDFTQNGGAVLVLSRETVELIGLCDRIYVVHGDTVVADMPAAKATEHDILDAALSA

SEQ ID NO: 38436 - DNA, 1494 bp, Mesorhizobium loti MAFF303099
  CDS (1)..(1494): transl_table=11
atgaaggacgcagttctcgaaatgcgcggcatccacaagcgctttccgggtgtgcatgcgctgaacaatgtcagcttcgccgtgcgcaagggaagcgtgcatggcgtcatcggtgaaaacggtgccggcaagtcgacattgatgcgcgtcctgtctggcgcgttcccggccaacgagggtgaagtggccatcgacggggatgtggtggcggcgccgacgcctgagcggatgcttgagctcggaatcgcggtcatttatcaagagctcgcccaggctccgcatctcacagtggttgaaaacatctttctcggccgcctgccgaaaacgcgtctgggcacgatcgactggcgccgggcgaaagccgcagctcaagatgtgctcgacaggcttggcttccgtgtcgatccggcagcgcgcatcgacacgatcagtgtcgcgcagcgccagatggtcgagatagccaaggcgattgcccgcgaggctcgcatcgtggtgctcgatgagccgtccgctgttctcggcgacttcgagcttgaacatcttttcaagacgatccggcggctgagcagcgaacacggcgtcgcgttcatctacatcacccatcgcctcaaggagctctatgagatttgcgacgaggtcaccgtgcttcgggatggccaggtcgttgcctcgatgccgcttggccagacgaccacggccgatctcatccgccatatggtcgggcgcgaattcaaggacgtatttccaccgcgctcgcagcccggcgacgagatccgcttagacgtacgcaacctatcgcggaacggcgtgctgaaggatatctccttcaatgtcaggcgcggcgaaatcgtcggcatctgcggtcttgccggagcgggccggaccgaggtgctgcgcgctatcgccggcgccgatccgatcgacggcggcgagatcaggatcgacggccaagtggtcgctatcgacgggccgcgtcgggcacttgcgcatggcgtcggtctgctgcccgaggatcgcaagacagaggggctgttcctcgaccagtcggtggcatttaacgtcaccgtttcccagatgacgccgttgacccgcagtggcctgatcagtggccgtcgcgagcacgaggctgtctccctgttcatccagcagatgcgcatcaagacgccgagccccagcaccaaggtccgcaccttgtcgggcggcaatcagcagaaatgtggcatcgcccgacaactgcatgcggggacggaaattctgctggtcgacgaaccgacgcgcggcgtcgacgtggcagccaagcgtgaaatctacgacctgctcgccgaactgacatcgaagcgcggcgcaagcgtcgtgatggtctcgtcagaattgccggaaatccttggcctctgcaatcgcatcatcgtcatgcgcgagggcgccatttcggcggttctcgacggcgaggacgcgaccgaggaaacaatcatggcccatgcggtttggcagtga

SEQ ID NO: 38437 - protein, 497 aa, Mesorhizobium loti MAFF303099
MKDAVLEMRGIHKRFPGVHALNNVSFAVRKGSVHGVIGENGAGKSTLMRVLSGAFPANEGEVAIDGDVVAAPTPERMLELGIAVIYQELAQAPHLTVVENIFLGRLPKTRLGTIDWRRAKAAAQDVLDRLGFRVDPAARIDTISVAQRQMVEIAKAIAREARIVVLDEPSAVLGDFELEHLFKTIRRLSSEHGVAFIYITHRLKELYEICDEVTVLRDGQVVASMPLGQTTTADLIRHMVGREFKDVFPPRSQPGDEIRLDVRNLSRNGVLKDISFNVRRGEIVGICGLAGAGRTEVLRAIAGADPIDGGEIRIDGQVVAIDGPRRALAHGVGLLPEDRKTEGLFLDQSVAFNVTVSQMTPLTRSGLISGRREHEAVSLFIQQMRIKTPSPSTKVRTLSGGNQQKCGIARQLHAGTEILLVDEPTRGVDVAAKREIYDLLAELTSKRGASVVMVSSELPEILGLCNRIIVMREGAISAVLDGEDATEETIMAHAVWQ

SEQ ID NO: 38438 - DNA, 1548 bp, Mesorhizobium loti MAFF303099
  CDS (1)..(1548): transl_table=11
atggacagtgcggttccgctcttccagatggaaggcatatccaagcgctatggtggcgtgcgcgctctggaaaaggcggagcttgtcgtcacatccggcagcatccacgccatccttggcgaaaacggtgccggcaagtcgacgctgatcaaggtcatggccggtgtcgtggcgcccgatgagggccgcatgacgctggatggccgggaggtgaccttcctgtcgccggccgccgcaaaccaggcaggcatcgtctgcatcttccaggagctgtcgctggttccagatctcagcgtcgccgacaacatcgtcatttccgatccccccaaacgcttcggcatgatcgaccgcaaggcgcaacgacgcgtcgcggaggaagcgcttgcccgcgcgggtgcggccgacatccatccgctggcgctggtcaaggatcttcccctttcaagaaggcagatggtcgagatcgccaaggcgctagccagaaagccgcgcatccttatcctcgacgaggcgacatccgcgctgacggcggcggatgtctcgaagatttttggcgtcctgaaacggctgcgttcggaaggtctggcgctgctctacatctcgcaccgcatgaacgagatcgccgaacttgccgatcagtgcacggtgttccgcaacggccgtaatgtcgccagctacaaggccggctcgaagagcgacaatgaggtggtcgagctgatgatcggccgcgaatacagccacatcttcccggccaagccggcggccgtgccagctacggccgcacccaggcttgaagcccgcaagctctcgtggaccgaccggttgcatgacatctcgctgaccgtcagggcaggcgaggtggtcggcctcggcggtctcgacggccagggccagcgcgaattgctgcttgccttcttcggcgtgctgcgcggcctttccggcgaggtgctgatcgatggcaagccggtcgcgatcggcagccccgccaaggcgcggcaggacggcatcggcatggcgctgatcccggaggaccgcaagaccgagggcttgatgctgccgatgacggtgcgcgagaacctgtccttcgccgcgctcgaccgcctgtccaaaggcggcattatcgaccgcgccgccgagcagcggctgatcgacgacatggtcggcctgctggcgatcaagacggcgggtctcgacataccggtcggcgcgctgtcgggcggcaaccagcagaaggtggtcatcgccaaatggctgatgcgccagccgcgcatcatcctgctcaacgatccgacgcggggcatcgatgtcggcaccaagcaggagctctatcagctgatgcgcaagctggcggacgccggggcggcgatcctgttctattcgaccgactatgacgagctgatcggctgctgcgaccgcgtgctggtgctctatgacggcgcgctcaagcgcgaactggtcggctccgagatcaccgagcgggcgctgatagcgagcgcgctcaacatccatggcgaggagagcccggtgggcctgggagcaagtgcgtga

SEQ ID NO: 38439 - protein, 515 aa, Mesorhizobium loti MAFF303099
MDSAVPLFQMEGISKRYGGVRALEKAELVVTSGSIHAILGENGAGKSTLIKVMAGVVAPDEGRMTLDGREVTFLSPAAANQAGIVCIFQELSLVPDLSVADNIVISDPPKRFGMIDRKAQRRVAEEALARAGAADIHPLALVKDLPLSRRQMVEIAKALARKPRILILDEATSALTAADVSKIFGVLKRLRSEGLALLYISHRMNEIAELADQCTVFRNGRNVASYKAGSKSDNEVVELMIGREYSHIFPAKPAAVPATAAPRLEARKLSWTDRLHDISLTVRAGEVVGLGGLDGQGQRELLLAFFGVLRGLSGEVLIDGKPVAIGSPAKARQDGIGMALIPEDRKTEGLMLPMTVRENLSFAALDRLSKGGIIDRAAEQRLIDDMVGLLAIKTAGLDIPVGALSGGNQQKVVIAKWLMRQPRIILLNDPTRGIDVGTKQELYQLMRKLADAGAAILFYSTDYDELIGCCDRVLVLYDGALKRELVGSEITERALIASALNIHGEESPVGLGASA

SEQ ID NO: 38440 - DNA, 1497 bp, Mesorhizobium loti MAFF303099
  CDS (1)..(1497): transl_table=11
atggaaccgatcgttcgcctggaaaacgtcaccaaaaactatcgtggtgtgcccgcggtcaagaatgtcagcttcgacttgcgcaagggtgaaatccacgcgctgcttggcgagaacggcgccggcaaatcgacgctgaccaagatcatcgccggagtggtcgacgccacgtcgggcaagatgttccacaagggccgcgagatcgcctacgcctcgccgcacgcggcccttgaggccggcatcgccatggtgttccaggaaaccagcctggtgccgtcgatgacggtggcgcagaacctctacctcggcactgaaaaattcctcaaccggctgcgcggcacgtatattgcagcacagcaattcctgcagtcgctgaatttcccggtcgatccgaacgccatggtggcgacgctgggtgcggccaagcggcagatggtcgagatcgcgcgcgcggtgcaccacaatgccgagatcatcatcttcgacgagccgacggcgacgctgacgccggaggaaaaacgccacttcttcgcactgatccgccggctgaaggccagcggcgtctccatcgtcttcatcagccacgcgctggaagaggcgcttgccattgccgaccgcatcaccattttgcgcgatggcgaactggtcatcaccgacgacacgtcggccttcgatcgcgacaagatcgtcgccgccatggtcgggcgcacattgtcgggccagatctaccgccagcgcgacgaggccaggctgcgcaaagcgggcaagaaagtgctgtcggtgcaggacatttcgatgagcaatgtcgtgcgcaacaattccttctcgatcttcgaaggccagattaccggcgtattcgggctgatcggctcgggcagaaccgagaccttcaagatcgtctcgggcatctacaagcgcgattttctgcgcggcggtgcgatcgagctcgacgacaggcccgtgcgctatcttgtgccaagcgaagccgttgccgacggtatcgtctacgtcaccgaggaccgcaagagcgaaggcattttcgagacgatgggcattgccgaaaacctgttcggcgggctgctcgccgcgggccgcgaaaaggcctgggtgatcaaccagcaggagatgcggcagctgtcggcgcaatggaccaagacgctcaacatcaaggcgatcaacgacaatgcccgcgtcgtcgaactgtcgggcggcaaccagcagaaggtggtgatcggcaagggactggtgcagcagccgcgcatcgtcatcttcgacgaaccgacgcgcggcgtcgatgtcggcgccatcgccgagatccaccagatcatcaaccggctggccgatgaggggctcgctgtcgtggtcatctcgtcctacttgccggagattatgaacctgtcggaccggatactcgtttgccgacagggccgcatcgtcgaggagtattcgccggcggaggcgacggaggagaagatcatgtacgcggcggttcactag

SEQ ID NO: 38441 - protein, 498 aa, Mesorhizobium loti MAFF303099
MEPIVRLENVTKNYRGVPAVKNVSFDLRKGEIHALLGENGAGKSTLTKIIAGVVDATSGKMFHKGREIAYASPHAALEAGIAMVFQETSLVPSMTVAQNLYLGTEKFLNRLRGTYIAAQQFLQSLNFPVDPNAMVATLGAAKRQMVEIARAVHHNAEIIIFDEPTATLTPEEKRHFFALIRRLKASGVSIVFISHALEEALAIADRITILRDGELVITDDTSAFDRDKIVAAMVGRTLSGQIYRQRDEARLRKAGKKVLSVQDISMSNVVRNNSFSIFEGQITGVFGLIGSGRTETFKIVSGIYKRDFLRGGAIELDDRPVRYLVPSEAVADGIVYVTEDRKSEGIFETMGIAENLFGGLLAAGREKAWVINQQEMRQLSAQWTKTLNIKAINDNARVVELSGGNQQKVVIGKGLVQQPRIVIFDEPTRGVDVGAIAEIHQIINRLADEGLAVVVISSYLPEIMNLSDRILVCRQGRIVEEYSPAEATEEKIMYAAVH

SEQ ID NO: 38442 - DNA, 1572 bp, Mesorhizobium loti MAFF303099
  CDS (1)..(1572): transl_table=11
atggtcgaacagggttcgattgcgccattttccgggacgcccttgctgcgcgtcgagggcgtcaggaagcggttcggcggcgtcaatgcgctgcgcggcgtcggtctcgaaatcctctccggcgaagtccacgcactgctcggcgaaaacggcgccggcaaatcgacgctgatcaagatcctgagcggcgtgcatgtgcatgatggcggctcgatcgaaatcgacggcaagcctgtctcgttttcttcgccggcccagtcgcgcgatgccggcgttgcggtggtttaccaggatctgagcctggtcgagtcgctgtcggtcgccgacaatctgcttctggggcgagagccgaagacccggctcggcttcctgaaaaaacgccagctggtagcgcaggccgaggcgttcctcaaatcgcagaacattccgctcgatgcccgcgccatggtcgggtcgctgcccttcgcctatcgccagatgaccgagatcgccaaggcgctgatgggcgatgtccgcctgctcatcctggacgagccgacctcggcgttgaccgatgatgaggagaagatcctgttcgaggcgatccgggcggtcgcagcacgtggcgtcggggtgatctacgtcacccaccgcctcaacgaagtgttccgcatctcgaaccgggtgactgtgttccgcgacggccagaacgccgggaccttcgtcacggcgcagaccaatatgcggcaattggtcggcgcgattgtcggggcggatcacgctgtgctgaaggcggatggcgccgcatctggacaaggcatggcgccatccgccggttcatctgaaaatcccgtgctcgaattgaaaagcgtcagcaatgaccggctcgacggggccagtctccaattgcgcgccggcgaaatccacggccttgccgggctgatcggcagcggtcgcaccgaaatcctgcagaccatcttcggcctgcggccggtccagtcgggcgaggccagcctggacggcgtgtcgctgaagggcacagacccggcggcggcgatcgggctgggcatcgcgctggtgccggaggaccggcacgtccagggcctggttctcgaacattcgatcgagcgcaacctgactttgccgcgcctgccttatttctcgcgccttggctggctgcagcgccggccggcgagcgagcatgccaatgcggcgatgcgccggctggccgtgaaggcgccaggcgcgtcgaccatggtgaagaacctgtcgggcggcaaccagcagaaggtggtgttcggcaagtggaacgagccgcggccgcgcgtgctgttgctcgacgagccgacggtcggggtcgatgtcggcgcgcgcgaggagatttacggcgtcattcgcgccgcggcggtggccggcagtggcgtgctgctggtgtcttcggatctctccgaactgctgcagctttgcgaccgcatctcgatcgtcgtcgatggccggatcaccaggactgtcgcgcggccggaattcggcagcgccgaggacctccatcacctcattcagatatcgcagccatcggaagagcacgcggcatga

SEQ ID NO: 38443 - protein, 523 aa, Mesorhizobium loti MAFF303099
MVEQGSIAPFSGTPLLRVEGVRKRFGGVNALRGVGLEILSGEVHALLGENGAGKSTLIKILSGVHVHDGGSIEIDGKPVSFSSPAQSRDAGVAVVYQDLSLVESLSVADNLLLGREPKTRLGFLKKRQLVAQAEAFLKSQNIPLDARAMVGSLPFAYRQMTEIAKALMGDVRLLILDEPTSALTDDEEKILFEAIRAVAARGVGVIYVTHRLNEVFRISNRVTVFRDGQNAGTFVTAQTNMRQLVGAIVGADHAVLKADGAASGQGMAPSAGSSENPVLELKSVSNDRLDGASLQLRAGEIHGLAGLIGSGRTEILQTIFGLRPVQSGEASLDGVSLKGTDPAAAIGLGIALVPEDRHVQGLVLEHSIERNLTLPRLPYFSRLGWLQRRPASEHANAAMRRLAVKAPGASTMVKNLSGGNQQKVVFGKWNEPRPRVLLLDEPTVGVDVGAREEIYGVIRAAAVAGSGVLLVSSDLSELLQLCDRISIVVDGRITRTVARPEFGSAEDLHHLIQISQPSEEHAA

SEQ ID NO: 38444 - DNA, 1614 bp, Mesorhizobium loti MAFF303099
  CDS (1)..(1614): transl_table=11
ttgccagctgaagccgcacctgtcctgcttgccgtcgagggcgtcaccaagcatttcgccggtgtcaccgcgctgagcgatgtcttgctcgacatccaccccggcgagatcctcggcctgctcggcgaaaacggcgcgggcaaatcgacgctgctcaaaatcctgtcgggcgtcatgccgccgtccagcgggcgcatcactttcgacggcgccgactatgcgccgtccagcccgcaggatgccaagcggctcggcatcgtcaccatttaccaggaattgagcctgatcccgacgctgacggtggcggagaacattttcatcggccgcgcgccggtcgggccactggggctggtgagctggaagcgcatggagcgggattcgcgcgacatcatcgcccgcgtcggcctttccatcgatccgatgacgccggtctcggcgctgtcggtggccgagcagcaactggtcgagatcgcccgggcgctatcgctaaagagccggctgatcatcatggacgagccgacctcggcgctgaccgaaacagaggtgcagcggctgttgtcgatcatgggccggctgcgccaggacaaggtcgccatcatgttcgtcacccaccggctggaggaggcgtcggcgatctgcgaccgcatgacggtgctgcgcgacggccggctggccgggcatctcgaccgcgacaagggacgaccgatccagctgccgcggatcatcgagaaaatggtcggccgcgccgcttcggaactttacgcgcggccggtgcaacgcgcggtggcgggcaatgtcgtgctgtcggtgcgtggtctgcgcaccgtgcgcgatcccgaggcgccgcatgccattgtgctcgacggcgtcgacatcgatctcaaggccggcgaaatcctcggcgtcgccggccttgtcggctccggccgcaccgagctggcacgcgccatttttggggccgaccgcatcgcggccggaaccatcacgctcgacggtaagccgatcgctccggcctcgccggccgacgccatcgcgctcggcatcggcctggtgccggaggaccgcaagcaccaggcgatcttcgccgccttgggcatcctgccgaatttctccgtcgcttcgctgggccgcttcagcaacggcttaggcttcatggccgagcggcgcgagcgtgatgcgctgtcgggtttcaggaaaatgctgtcgatccgcatggcctcggccgagcaggcgatcgagggcctgtcgggcggcaaccagcagaaagtgatcctggcgcgctggctggcgcgcgacccgaaagtgctgatcgtcgacgagccgacgcgcggcgtcgatgtcggcgccaaggcggaggtgcatcagatcctggtgcaactggcggcgcgcggcatcgcggtgatgatggtctcgtccgaactgcctgaagtgctggcggtgtcggaccgcatcgtcaccatgcgccggggtcgcatcactggtgagatgccgggcgtcgaggcaaacgaggaaaaactgatggaactgatggcgctcgacaagcaggatgctcttgggcaagacgcgcttgggcaagacgcgcttgggcaggatgcggaggatcaggcacgatga

SEQ ID NO: 38445 - protein, 537 aa, Mesorhizobium loti MAFF303099
MPAEAAPVLLAVEGVTKHFAGVTALSDVLLDIHPGEILGLLGENGAGKSTLLKILSGVMPPSSGRITFDGADYAPSSPQDAKRLGIVTIYQELSLIPTLTVAENIFIGRAPVGPLGLVSWKRMERDSRDIIARVGLSIDPMTPVSALSVAEQQLVEIARALSLKSRLIIMDEPTSALTETEVQRLLSIMGRLRQDKVAIMFVTHRLEEASAICDRMTVLRDGRLAGHLDRDKGRPIQLPRIIEKMVGRAASELYARPVQRAVAGNVVLSVRGLRTVRDPEAPHAIVLDGVDIDLKAGEILGVAGLVGSGRTELARAIFGADRIAAGTITLDGKPIAPASPADAIALGIGLVPEDRKHQAIFAALGILPNFSVASLGRFSNGLGFMAERRERDALSGFRKMLSIRMASAEQAIEGLSGGNQQKVILARWLARDPKVLIVDEPTRGVDVGAKAEVHQILVQLAARGIAVMMVSSELPEVLAVSDRIVTMRRGRITGEMPGVEANEEKLMELMALDKQDALGQDALGQDALGQDAEDQAR

SEQ ID NO: 38446 - DNA, 1518 bp, Mesorhizobium loti MAFF303099
  CDS (1)..(1518): transl_table=11
gtgctcgagcccggcaggacgatcctcgaactgcgtggcctcgagaagaaatatccgggcacccatgcgctgaagccggtgacactggccttcaagtcaggcgaaatccacgccatcgtcggcgagaacggtgccggcaaatccactctgatcaagcttctgaccggcgtcatgccgcgcacctctggcgatgtcatctgggaaggcaagccggcggcgctggcgaccccgcatgaggcgatggcgctcggcatcaatgccgtgcaccaggaagtcgtgctctgccgtcatttgaccgtcgccgccaacatgttcctcggcgaggagaattcgcgcttgggcatcctgcagcagcgcgccatggtcaaggaagcgcagaagatcatcgacgatctcggcttcgatctgccggcgcatgtcgtgctcggcgacctcaccatcggccagcagcagctgatcgccgccgctcgcgccaccgtgcgtggtaccaaattcctgatcttcgacgagccgaccgcctacctcacccgcaaggaggccgaccagctcttcaccctgatccgccgcctgaagtccgagggcgtgacgatcatctacatcagccatcgcatggaggaagtcttcgagctcgccgatcgcgtctccgtgctgcgtgacggcacgctggtcggtaccagaaacatcgctgagaccaacgatgccgaactggtcaagctgatgatcaatcgctcgatcgagcaggtctatcataaggagcacttcacgccgggtgccgcgatcgtggaaacgaggaacctgtcgggcaagggcttcgaaaatgtctcgatgacggtccgcgccggcgagatcgtcgggctctacgggctgatcggcgccgggcgcagcgaattcgtcaccacgctctacggccgccatcgcaaatcggccggccagatcctgtgggaaggcaagccggttcaggtcaattcggagcatgacgcgatcaagctcggcatggcgctggcgccggaaagccgccgcgatcagggtctctgtctcaatttgccggtcggcctcaacctcaacctgccgatctacaagcgcatctccaaaaacatgttgatttccggcgcgcaggagaagacccaggccgaccgccagatcgccgatctgcgcatcaagacgccgacacgccacgcgctggcctccagcctgtcgggcggcaatcagcagaagatcgtcatcggcaaatggctggcgcatggcgccaaactgttcatcttcgacgagccgacagtcggcgtcgatgtcggcaccaaggccgagatctaccgcctgttcggcgcgctcttgtcgaagggcgccggcatcatcctgatctcgtcctatctgccggaagtctatgaactggccgacacgctgcatgtgttccgccgtggcaagctggtggcgacacacggattccgcaccgccgatcacgaggaaattctcacacaggcgctcgccgagaaacaagaaaagctgggaggaaagatatga

SEQ ID NO: 38447 - protein, 505 aa, Mesorhizobium loti MAFF303099
MLEPGRTILELRGLEKKYPGTHALKPVTLAFKSGEIHAIVGENGAGKSTLIKLLTGVMPRTSGDVIWEGKPAALATPHEAMALGINAVHQEVVLCRHLTVAANMFLGEENSRLGILQQRAMVKEAQKIIDDLGFDLPAHVVLGDLTIGQQQLIAAARATVRGTKFLIFDEPTAYLTRKEADQLFTLIRRLKSEGVTIIYISHRMEEVFELADRVSVLRDGTLVGTRNIAETNDAELVKLMINRSIEQVYHKEHFTPGAAIVETRNLSGKGFENVSMTVRAGEIVGLYGLIGAGRSEFVTTLYGRHRKSAGQILWEGKPVQVNSEHDAIKLGMALAPESRRDQGLCLNLPVGLNLNLPIYKRISKNMLISGAQEKTQADRQIADLRIKTPTRHALASSLSGGNQQKIVIGKWLAHGAKLFIFDEPTVGVDVGTKAEIYRLFGALLSKGAGIILISSYLPEVYELADTLHVFRRGKLVATHGFRTADHEEILTQALAEKQEKLGGKI

SEQ ID NO: 38448 - DNA, 1545 bp, Mesorhizobium loti MAFF303099; identical to SEQ ID NO: 27152
  CDS (1)..(1545): transl_table=11

SEQ ID NO: 38449 - protein, 514 aa, Mesorhizobium loti MAFF303099; identical to SEQ ID NO: 27153

SEQ ID NO: 38450 - DNA, 1539 bp, Mesorhizobium loti MAFF303099
  CDS (1)..(1539): transl_table=11
atgaactattccgatacatccatcgcagcgaccacgccgttcctcagcctcgagagcgtgcgcaagacctatccgggcgtcgtcgcgttggatggcttctccatggaggtcaggccgggcgaggtcatcggcctggtcggcgagaacggcgccggcaagtcgaccctgatgaagatcctcggcggcgtcaccacgccggacaccggcacgatcacggtcgacggcaccgcccataaggggctgagtgtcgaaggcagcctgggttcgggcatcgccttcgtccaccaggaactcaatctgttcgaaaatctcgacgtcgccgccaacatcttcttcggccgcgagccgctgcgcgccgggccgctgaaactcgtcgaccgctcgaagctgcgcgagatggtggcgccgctcctgaagcgcgtcggcgccaatttctccgccgatgcgcaggtcgcttccctgtcgctggcgcagcagcagatggtcgagatcgccaaggcgctgtcgatcaaggcaaggctggtcatcctcgacgagccgacatccagcctgccgctcgccgagaccgacaaattgctcgacgtcatcaaggcgctgaaggccgacggcatcagcgtcatcttcatttcgcaccgcctgcacgaggtcgagcgtgtcgccgaccgcgtcgtcgtgctgcgcgacggcatgctggccggcacgctgggcaagcgcgacatcaaccacgaccagatggtcaagctgatgatcgggcgcatgctgaaggagcgcgagaaggcctccgaggccgcgcgtgcccctggcgccgtggcacttgcggccaaagccatccgcacccctacctatcccagccggcctgtcgacctcgatgtcaggcgcggcgagatcctcggccttgccggcctcgtcggctccggccgcactgagctcgcccgcgtgttcttcggcatcgacggcagcctcggcggcacgctcgagctcgacggcaagacgcttgtgctgggttcggcggccgacgccgtcgcgcacggcattttcctggtgccggaagaccgcaagctgaccggcatcctgctcgacctgtcgatcgcccagaacatttcgctgcccaatctgccggcgcatgccaggcgttcgctggtctcggcaagcgctgagacggcaaccgccgagaagcagaagaaaaatctcggcatcaaggcgccttcggtgcagacgcgcaccggcacgctgtcgggcggcaaccagcagaaggtcgtgctcggcaagtggctggccatgaacccgaaggtgatgatcctcgacgagccgacgcgcggcatcgacatcggcgccaaggcggaaatctacgggctgatgcgcgccctggccgatgccggcgtcgccgtgctgatgatctccagcgacatggaggaggtgatcggcgtgtccgaccgcatcgccgtcatgcatgagggccagatctcgggcattctcgacaaggaccagttcagccaggaaaacgtgctgctgctggcggtgggcaagcagccgaaatag

SEQ ID NO: 38451 - protein, 512 aa, Mesorhizobium loti MAFF303099
MNYSDTSIAATTPFLSLESVRKTYPGVVALDGFSMEVRPGEVIGLVGENGAGKSTLMKILGGVTTPDTGTITVDGTAHKGLSVEGSLGSGIAFVHQELNLFENLDVAANIFFGREPLRAGPLKLVDRSKLREMVAPLLKRVGANFSADAQVASLSLAQQQMVEIAKALSIKARLVILDEPTSSLPLAETDKLLDVIKALKADGISVIFISHRLHEVERVADRVVVLRDGMLAGTLGKRDINHDQMVKLMIGRMLKEREKASEAARAPGAVALAAKAIRTPTYPSRPVDLDVRRGEILGLAGLVGSGRTELARVFFGIDGSLGGTLELDGKTLVLGSAADAVAHGIFLVPEDRKLTGILLDLSIAQNISLPNLPAHARRSLVSASAETATAEKQKKNLGIKAPSVQTRTGTLSGGNQQKVVLGKWLAMNPKVMILDEPTRGIDIGAKAEIYGLMRALADAGVAVLMISSDMEEVIGVSDRIAVMHEGQISGILDKDQFSQENVLLLAVGKQPK

SEQ ID NO: 38452 - DNA, 1533 bp, Mesorhizobium loti MAFF303099
  CDS (1)..(1533): transl_table=11
atgacctcgacgattttggagatgcgcgacatcaccaagacgtttcccggcgtgaaggcgctgtcgaatgtcaacctcagcgtcgaggaaggcgaaatccacgccgtggtcggcgagaacggcgccggcaagtcgacgctgatgaaagtgctgtcgggcgtctatcccgcgggcacatatgacggccagatcatctttcaaggccaggaatgccagttcaaaggcatccatgacagcgaacacaagggcatcgtcatcatccaccaggagcttgcgctggtgccgatgctgtcgattgccgaaaacattttcctcggcaacgaacacgccaaatacggtgtgatcgactgggacgccaacgaggcgcgcaccagcgcgctgttgaagaaggtgggcctcaaggaggaccccaagacgctgatcaccaatatcggcgtcggcaagcagcagctggtcgagatcgccaaggcgctgagcaaggaagtcaagctcctgatcctcgacgagcccaccgcatcgctcagcgagaaggacagccaggcgctgctcgaccttttgctcgagttcaagcggcaaggcatgacctcgatcctgatctcgcacaaactcaacgaggtgaaccgggtcgccgacaaggttaccgtcatccgcgacgggcgcactatcgagacgctggccaggaaggacatctcggaagaccgcatcatcacctcgatggtcggccgctcgctcgacgaccgctatccgccgcgcgaaccaaagatcggcgaggtcgtcttcgaagtgaagaactggtcggtctatcacccgatccatgccgagcggcaagtgatcaagggcatcgacatcaacgtgcgcaagggcgaggtggtcggcatagctgggctgatgggcgccggccgcaccgaattcgccatgagcctgttcggccgttcctatggccgccgcatcacgggcgaggtgctgctcaaaggcaagccgatcgatgtctcgtccgtgagcaaggcggtcgaacacggcatcgcctacgtgaccgaggaccgcaagacttacggtctcaacctgatcgaccatatcaagcacaacatcacgcttgccaatctcggcggcgtgtcgcgtcacagcgtgatcgacgatctgcgcgaactcgccgttgccaacgattatcgcaagaagaccaacatccgcgcttcgagcgtctatcagatgacgggcaatctttccggcggcaaccagcagaaggtggtgctgtcgaaatggctgttcgccgacccggaattgctgatcctcgacgagccgacgcgcggcatcgatgtcggcgccaagtacgaaatctacacgatcatcgcgcgtcttgcctcggagggtaaggcgatcgtggtcatctcgtcggaaatgccggaattgctcggcatcaccgaccgcatctacgtcatgaacgaaggccgcatcgtcggcgaaatgcccgcggcggacgcaagccaggaaaaaataatgcgcgccatcgttcgcggagaaggaaaagcagcatga

SEQ ID NO: 38453 - protein, 510 aa, Mesorhizobium loti MAFF303099
MTSTILEMRDITKTFPGVKALSNVNLSVEEGEIHAVVGENGAGKSTLMKVLSGVYPAGTYDGQIIFQGQECQFKGIHDSEHKGIVIIHQELALVPMLSIAENIFLGNEHAKYGVIDWDANEARTSALLKKVGLKEDPKTLITNIGVGKQQLVEIAKALSKEVKLLILDEPTASLSEKDSQALLDLLLEFKRQGMTSILISHKLNEVNRVADKVTVIRDGRTIETLARKDISEDRIITSMVGRSLDDRYPPREPKIGEVVFEVKNWSVYHPIHAERQVIKGIDINVRKGEVVGIAGLMGAGRTEFAMSLFGRSYGRRITGEVLLKGKPIDVSSVSKAVEHGIAYVTEDRKTYGLNLIDHIKHNITLANLGGVSRHSVIDDLRELAVANDYRKKTNIRASSVYQMTGNLSGGNQQKVVLSKWLFADPELLILDEPTRGIDVGAKYEIYTIIARLASEGKAIVVISSEMPELLGITDRIYVMNEGRIVGEMPAADASQEKIMRAIVRGEGKAA

SEQ ID NO: 38454 - DNA, 1542 bp, Mesorhizobium loti MAFF303099
  CDS (1)..(1542): transl_table=11
atggacacgacagcccagcacggcacggtgaaggaggggcctcaggactccacgccacgcctgacgctgtccggcatctccaagagtttcccgggtgtgcgcgcgctgcacaatgtcagcctgtcgctctatcccggccaggtgacggcactgatcggcgagaacggcgccggcaagtcgacgctggtcaagatcatgaccggcatctaccagcccgacgccggcacgatcagcatcgacggccaggctgtcaccttgcccagcgcgcatgccgccttcggccatggcgttaccgccatccatcaggaaaccgtgctgttcgacgatctcacagtcgccgaaaatatctttctcggccatgcgccgcgcacacggctaggcaccatcgactggcgcacgatgcgcggaaatgcccgcgaagtgctcgacaccatgcatgccggccatatcgacgccgatgcgcggctgaaggacctcggcatcgccaacaagcatctcgtcgccgtcgcccgcgccatgtcgatcgacgcccagatcgtcatcatggacgagccgaccgccgcgctttcgatgaaggagatcgaggagcttttcctgctcatcgaattcctcaaggaggaaggcaaggcgatcctgttcatcagccacaagttcgacgagatctaccgcatcgccgaccgctacacggtgttccgcgacggcgaggtggttggcgaaggcctgatcaaggatgccggccagagccagatcgtgcgcatgatggtcggccgctcggtcgatcatatcttcccgcagcgcaaggccgagatcggcgcgccggtgctgtcggtcgccggcctgtcgcacccgaccgagttcaacgacatcggcttcgagctgcacaagggcgagatcctcggcttctacggccttgtcggcgccggccgcagcgaggtgatgcaagcgatatcgggcatcacccgaacctctggcggcacgatcacgctggaaggcaaggcgatagcgccgaaatcggcggcggattcgatcgaagccggcatcgtctacgtgccggaagagcgcggcaagcagggcgtggtgatcggcctgccgatcttccagaacgtctcgctgccctcgctcaagcgtacctccaagtctggcttgctgcggctggccgaagagttttcgctcgcccgctcctacaccgagcggcttgacctcagggcctcctcgctcagccaggatgtcggcacgctgtcgggcggcaaccagcagaagatcgttatcgccaagtggctggcgaccgcgcccaaggtgatcatcctggacgagccgaccaagggcatcgacatcggctcgaaagccgccgtgcacggcttcatggccgagctggtggcgcaaggcctgtcggtgatcatggtgtcgtcggaactgccggagatactcggcatgtccgaccgggtggtggttatgcgcgaaggccttgtcgcggcgacatatgacaataaggggctggacgccgagacgttggtgcggacggcagcggggatcgcggcatga

SEQ ID NO: 38455 - protein, 513 aa, Mesorhizobium loti MAFF303099
MDTTAQHGTVKEGPQDSTPRLTLSGISKSFPGVRALHNVSLSLYPGQVTALIGENGAGKSTLVKIMTGIYQPDAGTISIDGQAVTLPSAHAAFGHGVTAIHQETVLFDDLTVAENIFLGHAPRTRLGTIDWRTMRGNAREVLDTMHAGHIDADARLKDLGIANKHLVAVARAMSIDAQIVIMDEPTAALSMKEIEELFLLIEFLKEEGKAILFISHKFDEIYRIADRYTVFRDGEVVGEGLIKDAGQSQIVRMMVGRSVDHIFPQRKAEIGAPVLSVAGLSHPTEFNDIGFELHKGEILGFYGLVGAGRSEVMQAISGITRTSGGTITLEGKAIAPKSAADSIEAGIVYVPEERGKQGVVIGLPIFQNVSLPSLKRTSKSGLLRLAEEFSLARSYTERLDLRASSLSQDVGTLSGGNQQKIVIAKWLATAPKVIILDEPTKGIDIGSKAAVHGFMAELVAQGLSVIMVSSELPEILGMSDRVVVMREGLVAATYDNKGLDAETLVRTAAGIAA

SEQ ID NO: 38456 - DNA, 1572 bp, Mesorhizobium loti MAFF303099
  CDS (1)..(1572): transl_table=11
atgaccacggcgcttgatcatgacgtcatcctgaagctggaagacgtctccaaagtctatgccggcaccgtcgcggtcaagcaggccaatttcgaggtgcgcaagggtgcggtcaatgtgctcgttggcgaaaacggcgccggcaaatcgacgctgatgaagatcatcgccggcgtcgagcagccgacggccgggcgcatcctgctcgacggcaacgaggtttccttctcctcctcaggtgatgcggtgacccgcggcatcggtatggtgttccaggagctaaacctgttcggcaacatgaccgttgccgagaatatttttgccacgcgcgagatcaccaaccggtttcgcaagatcgaccgcaagaagcaggagcggcgggccggtgaattcctcgatcggctcgaagccggcatccggccggacatgctggtcgaggacctgcgcatcggccagcagcaactggtcgagatcgccaaggctgtctcgctcgacgcgcgcatcctgatcatggatgagccgacctcggcgctcagtgcggcggaagtcgagatcctgttcaaggtgatcgccgacctcaaggcgcgcggcgtggcgatcgtctacatctcgcaccggctggaggaactgatccgcatcggcgactacatcaccgtgctgcgcgacggccgcatcaccggccaggaggaggtgaagaacgtcgacacgcagtggatcgtgcggcagatgatcggctcggacgccaaggatttcgccaaggccgacggccatgttcccggcgaggagatcttccgcgccgaagacatctgcctgccgcgcgtcaccggcggactggcggtcgaccatgtctcgctgtcgctgcgcgccggcgagattctgggcatctacggactgatgggcgccggccgcagcgagctgttcgactgcatcatgggccgccacggccatgccagcggcaagatcttcatcgacggaaagcatatcagggaacgcgatacgacgcggcgcatacggcgcgggctggcgctgattccggaagaccgccaacgcgagggcctggtgtcgatcctctcggtcgccagcaacctgacgctggccagcctgtcgcgtttcgtgcgcgtcttccatatccgtggcggcgcagagcgtcaggcggtcacgcagatggtgcgggagctttcgatcaaggtcgcggatccgacgcaggaagtctcgtcgctttccggcggcaaccagcagaaggtggtaatcggcaaggcgctcctcaccgggccgaaggtgctgttgatggacgagccgagccgcgggatcgatgtcggcgccaaggcggatgtcttccgcaccatgcgcaagttgtcgcgcgatgggctcggcatcctcttcgccacttccgatctcgacgaggtgatggcgctatctgaccgcatcgcggtcatgagcaatggcaaactgaccggcatgttcgatcgcgccgaggcgagcgaagccgcgattgtcgccgcatcggcgctcggccatggacccgccccgcacatcttgccccagaatttggagagcaacgctgatgactga

SEQ ID NO: 38457 - protein, 523 aa, Mesorhizobium loti MAFF303099
MTTALDHDVILKLEDVSKVYAGTVAVKQANFEVRKGAVNVLVGENGAGKSTLMKIIAGVEQPTAGRILLDGNEVSFSSSGDAVTRGIGMVFQELNLFGNMTVAENIFATREITNRFRKIDRKKQERRAGEFLDRLEAGIRPDMLVEDLRIGQQQLVEIAKAVSLDARILIMDEPTSALSAAEVEILFKVIADLKARGVAIVYISHRLEELIRIGDYITVLRDGRITGQEEVKNVDTQWIVRQMIGSDAKDFAKADGHVPGEEIFRAEDICLPRVTGGLAVDHVSLSLRAGEILGIYGLMGAGRSELFDCIMGRHGHASGKIFIDGKHIRERDTTRRIRRGLALIPEDRQREGLVSILSVASNLTLASLSRFVRVFHIRGGAERQAVTQMVRELSIKVADPTQEVSSLSGGNQQKVVIGKALLTGPKVLLMDEPSRGIDVGAKADVFRTMRKLSRDGLGILFATSDLDEVMALSDRIAVMSNGKLTGMFDRAEASEAAIVAASALGHGPAPHILPQNLESNADD

SEQ ID NO: 38458 - DNA, 1524 bp, Mesorhizobium loti MAFF303099
  CDS (1)..(1524): transl_table=11
ttgacgcaatcggacttcttctcgctcgacggcatatcgaaacgcttcggcgtcgtccaggcgctcgacaacgtctcgattgctttccggccaggcgaggtgctcgctttggtcggcgagaatggcgccggcaaatcaacgatgatgcgcattctcgagggcgtgtccggaccggacaccggcaccgtgcggcatggttccacgccgatcgttttcggcgaaccgcgcgacagccaccgggccgggatccgcgtcatccatcaggagccggagatcgttccgaacctgacggtggccgagaacattttcgtcggcgaattgccgcgcctggcaggcgtcctgctcgactggcgcaagctggaggagcagaccgaccgggtccttgcgaccttcggcatgcagcaggacatgcggccacgccaactctgcggcacgctcggcccggcgcaacgccagatgattgagatcatgcgcgccatccgcgccggcggccggctgatcgccttcgatgagccgacctcgtcgctgaccgatgatgaagcgcgtcgcctgttttccgtcgtccgcaggctgcgcgagaagggcacgtcgatcatctacatctcgcaccggctgaacgagatcatcgatctggccgaccgcattgtcgttttgcgcgacggcaggctggtcgacgattcgccggcggccggcgccagcgagcagaccatcgccaagctcatggtcggccgcaacatcgacgatcttttcactcgcgagacctggcggtccggggaacaattgcttgatgtggcgggattgaccaccgaccgcgtcaacgatgtcagcctcagggttcgtcgcggtgaggtgctcggcatcgccggcctcatgggtgcgggccgctccgaactggcaaaggcgattgtcggatatgaccggcgcatcgccggcaccatagccatgaacggcgtgcccgttctccccaacagtccgcatgcggcgatcgtcgcgggcatcggttttgctcccgaagaccgcaagcacgaggcgttgctgctgttcagaagcattctcgacaacgcagcactttgcgtgcccgacaagacatcgagcttcggcttcttcaaccggcgcaaggcaatggagattgtctcgccgctggctgccaagatgtcgatcaaggcacccaacctcgacgagcaggtttcgaaactgtcgggtggcaatcagcagaaggtcgttctggcgcgctggcttgcccggcagccgatgctgctcatcctcgacgaaccgacgcgcggcatcgacatcggcgccaaggcggaaatctatcggctgatcgatgaactcgcggcaagcggcattggtatcatcctgatttcctcggaaatgccggaactgatcggtctcgccgacagggttcttgtcatggcaggaggccgcatcacggccgagcttgcccgccccgacatcgacgaagcgacgatcctcaaacacgccatgccgcaatccgcatcatcgcctggagactacattcaatga

SEQ ID NO: 38459 - protein, 507 aa, Mesorhizobium loti MAFF303099
MTQSDFFSLDGISKRFGVVQALDNVSIAFRPGEVLALVGENGAGKSTMMRILEGVSGPDTGTVRHGSTPIVFGEPRDSHRAGIRVIHQEPEIVPNLTVAENIFVGELPRLAGVLLDWRKLEEQTDRVLATFGMQQDMRPRQLCGTLGPAQRQMIEIMRAIRAGGRLIAFDEPTSSLTDDEARRLFSVVRRLREKGTSIIYISHRLNEIIDLADRIVVLRDGRLVDDSPAAGASEQTIAKLMVGRNIDDLFTRETWRSGEQLLDVAGLTTDRVNDVSLRVRRGEVLGIAGLMGAGRSELAKAIVGYDRRIAGTIAMNGVPVLPNSPHAAIVAGIGFAPEDRKHEALLLFRSILDNAALCVPDKTSSFGFFNRRKAMEIVSPLAAKMSIKAPNLDEQVSKLSGGNQQKVVLARWLARQPMLLILDEPTRGIDIGAKAEIYRLIDELAASGIGIILISSEMPELIGLADRVLVMAGGRITAELARPDIDEATILKHAMPQSASSPGDYIQ

SEQ ID NO: 38460 - DNA, 1518 bp, Mesorhizobium loti MAFF303099; identical to SEQ ID NO: 27156
  CDS (1)..(1518): transl_table=11

SEQ ID NO: 38461 - protein, 505 aa, Mesorhizobium loti MAFF303099; identical to SEQ ID NO: 27157

SEQ ID NO: 38462 - DNA, 1563 bp, Thermotoga maritima MSB8; identical to SEQ ID NO: 27158
  CDS (1)..(1563): transl_table=11

SEQ ID NO: 38463 - protein, 520 aa, Thermotoga maritima MSB8; identical to SEQ ID NO: 27159

SEQ ID NO: 38464 - DNA, 1572 bp, Thermotoga maritima MSB8
  CDS (1)..(1572): transl_table=11
atgatgctcaacacagaaaaagaaagggaagtattgctggaagccagaaatattaccaaaacttttccgggagtaatcgctgtcaataatgtaactcttcaaatatataaaggggaagtttgcgctctggttggagaaaacggagctggcaaatccactctcatgaagattttggccggggtatatccggattacgagggacagatctttctggaaggaaaagaggttcgattcaggaatccaagagaagcccaggagaatggaatcgccttaattcctcaagaactagatcttgtacctaatcttagttcagctgaaaatatctttctctccagagaaccggtcaacgagtttggtgtgattgaataccagaaaatgtttgaacaagcttcaaaattattttcaaagctaggagttaatatcgatccaaaaacaaaagtggaagatctgagcactagtcaacaacaaatggtagctattgctaaagcactttcacttgacgccaaaataatcatcatggacgaaccaacctctgccataggtaaacgtgaaactgaacaactgttcaatattataagatctttaaaaaatgaaggaaaatctgtgatttacatttctcatcgattagaggaaatattcgaaatagctgacagggttgttgtgatgagagatggtagaaaggtaggagagggtcccatagaagaatttgatcatgataaacttgttagattaatggtaggaagaagtatagatcagttttttataaaagaacgtgcgacaataacagacgaaattttcagagtggaaggtattaaactgtggagtttggacagaaagaaacttttagttgatgatgtgagtttttacgtcaggaagggagaagtattgggaatatatggattagtcggcgctggaagaacagaacttttggaggctatattcggcgcccatccaggtcgtacagaaggaaaggtattcattggaggaaaagaaataaaaattcactctcctagggacgctgtaaagaatgggataggattagtcccagaggatagaaaaactgcaggactgattcttcaaatgtctgttttgcataatataaccctcccttcagtggtaatgaaacttatcgttagaaaatttggattaatagatagtcaactcgaaaaagaaatcgttcgttcgtttatagaaaaattaaacattaaaactccttcaccctatcaaatcgtggagaacctcagtggaggaaaccagcaaaaagtagttctggcaaaatggcttgcaataaaaccaaaggtacttctcttagatgaacctaccagaggaattgatgtaaacgcaaagagtgagatttacaaactcataagtgaaatggctgtttcaggaatgggtgtagttatggtttcctctgaacttccagagatacttgccatgtccgacagaattcttgttatgtctgaggggcggaaaacagctgagtttctcagagaagaagtcaccgaggaagatcttctgaaagcagcaatccccagaagtgtgaaggtagaaacaacacaaagggaggagtga

SEQ ID NO: 38465 - protein, 523 aa, Thermotoga maritima MSB8
MMLNTEKEREVLLEARNITKTFPGVIAVNNVTLQIYKGEVCALVGENGAGKSTLMKILAGVYPDYEGQIFLEGKEVRFRNPREAQENGIALIPQELDLVPNLSSAENIFLSREPVNEFGVIEYQKMFEQASKLFSKLGVNIDPKTKVEDLSTSQQQMVAIAKALSLDAKIIIMDEPTSAIGKRETEQLFNIIRSLKNEGKSVIYISHRLEEIFEIADRVVVMRDGRKVGEGPIEEFDHDKLVRLMVGRSIDQFFIKERATITDEIFRVEGIKLWSLDRKKLLVDDVSFYVRKGEVLGIYGLVGAGRTELLEAIFGAHPGRTEGKVFIGGKEIKIHSPRDAVKNGIGLVPEDRKTAGLILQMSVLHNITLPSVVMKLIVRKFGLIDSQLEKEIVRSFIEKLNIKTPSPYQIVENLSGGNQQKVVLAKWLAIKPKVLLLDEPTRGIDVNAKSEIYKLISEMAVSGMGVVMVSSELPEILAMSDRILVMSEGRKTAEFLREEVTEEDLLKAAIPRSVKVETTQREE

SEQ ID NO: 38466 - DNA, 1545 bp, Vibrio cholerae O1 biovar eltor str. N16961
  CDS (1)..(1545): transl_table=11
gtgttgtctgaatttttgcataataaaagtgatgccatggtcaatcaaacacatgaattcctgttggaaatgacaggggtgagtaaagagttccccggagtgaaagctctggataaggtgaatttaaaagtgcgtccgcattcggttcatgccttgatgggtgaaaatggcgcaggcaaatccaccttgttgaaatgcttatttggtatttatgagaaagatgaaggcgatatcatttttcttggccagcatgtgaacttttcctcatcaaaagaggcgctggaatccggtgtctctatggttcaccaagagttgaaccaagtaaaacagtgctcggtgatggataatatttggcttggccgttatcccaccaaaggattttttgtcgatcacgacaaaatgtatcgggataccaaagcgatttttgccgaactcgatattgatatcgatccgaaggtcaaagtcgcgaccttgtcggtttcacagatgcagatgctcgagatcgccaaagcgttttcctacgatgccaaagtggtgatcatggatgaacctacctcatccctgaccgaaaaagaggtaaaccatctttttaccatcatcaaaaagctcaaagaaaaaggctgtggggtggtgtacatctcgcacaaaatggaagagatcttttctatttgcgatgagatcaccattttgcgtgatggccagtgggtcgatacgcgtccgttgaaagggttggacatggacaagatcatttcgatgatggttggccgtgaactgacccagcgtttccctgaaaaaagcaacgaaccgaagaatgtcattcttgaggtgaagaatctcaccgcactcaatcaaccctcgattcaagatatttcgtttgaactacgagctggggaaattttgggcgtggcgggtctcgtcggttcgcgccgtaccgacattgtggagaccatttttggtgtgcgtgaacgcagtgccggacatattctgctccatggtcgtgaaatgaaaaatcacgatgcgcatgaagcgatcagaaacggttttgcactcgtgaccgaagagcgccgctcgacggggatttactccaatctcgacatcacttttaactcgttagttgccaacgtggacgagtacaaaacgccttacggtctactcagtgacaagaagatgaaaagtgatacgcaatgggtgattgattctatgcgggtgaaaaccccgtcgcatcaaactcatatcggttcgctttccggtggtaaccagcaaaaagtcatcatcgggcgctggctgctgactcaacccgagattttgatgttggatgaaccgacacgcggtattgatgtgggcgcaaagtacgaaatttatcagctgattttagagctggccaagaaagacaaaggcatcatcattatttcctctgagatgccggaactgctcggaattaccgaccggatcatggtgatgagcaacggccgcaatgcaggcattgtgaataccaaacaaacttctcagaacgaaattctagaactggcctctcgatacctctaa

SEQ ID NO: 38467 - protein, 514 aa, Vibrio cholerae O1 biovar eltor str. N16961
MLSEFLHNKSDAMVNQTHEFLLEMTGVSKEFPGVKALDKVNLKVRPHSVHALMGENGAGKSTLLKCLFGIYEKDEGDIIFLGQHVNFSSSKEALESGVSMVHQELNQVKQCSVMDNIWLGRYPTKGFFVDHDKMYRDTKAIFAELDIDIDPKVKVATLSVSQMQMLEIAKAFSYDAKVVIMDEPTSSLTEKEVNHLFTIIKKLKEKGCGVVYISHKMEEIFSICDEITILRDGQWVDTRPLKGLDMDKIISMMVGRELTQRFPEKSNEPKNVILEVKNLTALNQPSIQDISFELRAGEILGVAGLVGSRRTDIVETIFGVRERSAGHILLHGREMKNHDAHEAIRNGFALVTEERRSTGIYSNLDITFNSLVANVDEYKTPYGLLSDKKMKSDTQWVIDSMRVKTPSHQTHIGSLSGGNQQKVIIGRWLLTQPEILMLDEPTRGIDVGAKYEIYQLILELAKKDKGIIIISSEMPELLGITDRIMVMSNGRNAGIVNTKQTSQNEILELASRYL

SEQ ID NO: 38468 - DNA, 1503 bp, Vibrio cholerae O1 biovar eltor str. N16961
  CDS (1)..(1503): transl_table=11
atgactcaagcaattttagccctgagccaaattgaaaaagcgttccctggcgtgaaagccttggacaaagcgagcctgaatgtctatccggggcgggtaatggcgttaatgggtgaaaacggtgctggcaaatcaaccttgatgaaagttctgaccggcatttatagcaaagatgcgggcagcattgagtatcaaggccaacctgtcagttttaaaggcccacgagattcgcagctggcgggcatcagcattattcaccaagagctcaacctgatcccgcagctgacgattgcggaaaatattttccttggccgtgagatgacttcgccattcggacgcattctgtgggatgaaatgcatcgtaaagcggatcaactgctcgcacgtttgaatgtgaaacacagtgctaaaaccttgctcggagagctgagcttgggtgagcagcagatggtggaaattgccaaagcgctgtcgtttgaatcgaaagttatcatcatggatgaaccgaccgatgcgctgaccgataccgaaaccgaatctctgtttaatgtcattaatgaactgcgcgaacaaggctgcggcattgtgtatatctcacaccgtttgaaagaaatttttgagatttgtgacgacatcacagtgctgcgtgacggcaaatttattggcgagtgccgcgtgtgcgataccaatgaagatggcctgattgagatgatggttggccgtaaactggaagagcagtacccacgtattgccgcgcagcagggtgacatcagccttgaggtgattggcctaactggctcgggtgtgcacgatgtcagctttacgcttaaaaaaggcgagattcttggtgtctctggcctgatgggggctgggcgcactgaactgatgaaggtgatttatggcgcgctcccttcggagcgtggcgtgattaacctcaacgggcgcacggttaaccctgtcagtccgcaagatggtttggccaatggcatcgcctatatttctgaagatcgtaaaggcgatggcttggtactcggtctttcggtgaaagagaacatgtcactttgcgcgctcgatcaactgagcaaaggtgtgcaaattcgtcatgccgatgaagtgattgctgtggatgactttattcgtctgttcaacatcaaaaccccaagtcgtgagcaaatcattggcaacctttctgggggcaatcagcagaaagtggcgatcgctaaaggactgatgaccaaacccaaagtactgattttggacgaaccgactcgcggtgttgacgttggcgccaaaaaagagatttaccaactgatcaaccaattcaaagctgaaggcatgagcatcattttagtctcctcagaaatgcccgaagtgctgggcatgagtgaccgcattctggtgatgcatgaagggcggattagcggcgagtttatggcgagcgaagccgatcaagagaaattaatggcgtgtgcggtagggcgtaaccctgctcacgcagcatga

SEQ ID NO: 38469 - protein, 500 aa, Vibrio cholerae O1 biovar eltor str. N16961
MTQAILALSQIEKAFPGVKALDKASLNVYPGRVMALMGENGAGKSTLMKVLTGIYSKDAGSIEYQGQPVSFKGPRDSQLAGISIIHQELNLIPQLTIAENIFLGREMTSPFGRILWDEMHRKADQLLARLNVKHSAKTLLGELSLGEQQMVEIAKALSFESKVIIMDEPTDALTDTETESLFNVINELREQGCGIVYISHRLKEIFEICDDITVLRDGKFIGECRVCDTNEDGLIEMMVGRKLEEQYPRIAAQQGDISLEVIGLTGSGVHDVSFTLKKGEILGVSGLMGAGRTELMKVIYGALPSERGVINLNGRTVNPVSPQDGLANGIAYISEDRKGDGLVLGLSVKENMSLCALDQLSKGVQIRHADEVIAVDDFIRLFNIKTPSREQIIGNLSGGNQQKVAIAKGLMTKPKVLILDEPTRGVDVGAKKEIYQLINQFKAEGMSIILVSSEMPEVLGMSDRILVMHEGRISGEFMASEADQEKLMACAVGRNPAHAA

SEQ ID NO: 38470 - DNA, 1569 bp, Bacillus halodurans C-125
  CDS (1)..(1569): transl_table=11
atgggtgaacattttttattagaaatggtagacatcacaaaggaattccccggcgtgaaggcgctcgatcgggttcaattaaaagtgagaaaaggctccgtccatgcattaatgggggaaaatggcgctgggaaatcaacgttaatgaaaatcttaatcggcatgtacaaaccgaacgagggaaaaattatttttgatggtgaggaagtgacgtttaacagtattaacgacgctctcgataaagggatatcgatgatccatcaagagttaagtccaattccagagatgacagtagcagaaaatatatttttaggcagagagcctacctttggaaagagtgggctcgtagacaataaaaaactaatagaaatgacacggaatttgttagaaagtttagagataaacatcgatccaagaaaaaagatgggcgagcttagcatagccaatacgcaaatgattgaaatcgcgaaagccatatcttttcattcaaagcttgtcattatggatgagccgacatctgccatcacagaaaaggaagtagcacagcttttcaaaatgattgaatcattgaaaaagaaaggtgttggcattatatacattactcataaaatgagcgaactggatgaaattgctgatgacatttctgtttttcgtgatggcaagtacattggtacggatacagcgaaaaacttaacgagagatgacttgattaaaatgatggtcggtcgcgaattgaaccaaattttcgataaacctgaaccgaagcttggcgaagtgatcctttccgtaaaaagcctaacaaaacaagactactttgaagacgttagctttgaagtccggaaaggagaaattgttggatttgcaggcttaatgggttcaggaagaaccgaagtgcttgagacgatcttcggcgtcaaggaagccgaatcaggggaaatttttgtaaacgggcaaaaagctagaataaagagcccgcaggatgctgtgaagaacaatatgggttttttaacggaggaccgcaagttgacaggtttatttcttcccttgtcggttagggagaacatgatcactgtcaatatcgataaatacattaacatgggttggcttaatggaaaacgagtgaaaaaagattgcgagcaacaaaaacaaaagctctacatcaaaactccgtccattgaacagatcgttgaaaatctgagcgggggtaatcaacagaaagtcttgcttgctagatggcttttaaaaaacccagatattttgtttctcgatgaaccgactcgaggaatcgatgtaggggcaaaatcagaattttacaatttaatctttgaattagcgagtcaagggaaagcaatcgttgttgtatcatcagagatggcagaaattcttgggttgtgtgatcgaattttggttatgcatgaagggaaggttaccggggagctcacacgggaggaagcgaaccaggagaagattatgcaatatgcgacaggccaagcaaaaatggcgaaaaagcttcacgttcataacaatttcgaacaaacggttacagccaataagatagagatcggttga

SEQ ID NO: 38471 - protein, 522 aa, Bacillus halodurans C-125
MGEHFLLEMVDITKEFPGVKALDRVQLKVRKGSVHALMGENGAGKSTLMKILIGMYKPNEGKIIFDGEEVTFNSINDALDKGISMIHQELSPIPEMTVAENIFLGREPTFGKSGLVDNKKLIEMTRNLLESLEINIDPRKKMGELSIANTQMIEIAKAISFHSKLVIMDEPTSAITEKEVAQLFKMIESLKKKGVGIIYITHKMSELDEIADDISVFRDGKYIGTDTAKNLTRDDLIKMMVGRELNQIFDKPEPKLGEVILSVKSLTKQDYFEDVSFEVRKGEIVGFAGLMGSGRTEVLETIFGVKEAESGEIFVNGQKARIKSPQDAVKNNMGFLTEDRKLTGLFLPLSVRENMITVNIDKYINMGWLNGKRVKKDCEQQKQKLYIKTPSIEQIVENLSGGNQQKVLLARWLLKNPDILFLDEPTRGIDVGAKSEFYNLIFELASQGKAIVVVSSEMAEILGLCDRILVMHEGKVTGELTREEANQEKIMQYATGQAKMAKKLHVHNNFEQTVTANKIEIG

SEQ ID NO: 38472 - DNA, 1500 bp, Bacillus halodurans C-125
  CDS (1)..(1500): transl_table=11
ttgatcgttgaaatgactggcatccataaatcatttagtggcaacccagtgttaaaggatgtctcattcaccctagaaaaaggggaaatccacgcccttatgggtgaaaatggcgctggaaagtccacgttaatgaagatcttaaccggcatttatgaacgagacagcggaacggtaaaaattaaaggacgtgaggtccattacaagcacccgaaagaagcggaagcggacgggcttgcggttatccaccaagagctaaacattcttcccgagctaacggttgctgaaaatctgtttgtcggcaaagaacgtacctacggaaaaacgggctggattaagtcgaaagaaatgaatcggctcgcagaagagaaattggctgagctcggattaaaggtgaaaggcactgagcgcgcagggaatctgtcggtcggaaaacaacagctcattgaaattgcaaaagcattgatgacgaatgccgatattattatcatggatgaaccgactgcggcgcttaccgatcgggaaattgacaccctttttgccaccgttcgcgagttgcaaaaaaaaggtgtaacgttcgtctacatttcccaccggatggaggaaatcttctctctctgtcaacggattacggtgcttcgtgatggtgaatatgttgggacaaaagtcattgccgagacgagcttcgatgaaatcgtgaaaatgatggtcggccgcgcattaggtaatcgcttccctgaacatacactcacgccaggtgacgtcaagcttgaaattaaacatttgactcgtgctggcgaatttgaaaacgtttccctttccgtcagagccggtgaaattctcggcatttccgggctcatgggggctggacgctctgagcttgtggaaacgattttcggctatcggaaggctgacagcggggaagtgtggatcgatggaaagcaagcggcgattaaaggaccggatcaagcgatcgcccaaggcatcggctttgtttcggaagatcgcaagtcaaaagggttaatcgttgatttttccattcgagacaacattagcttaacgaatctatcacgcatttcgacctcaagctggatctccagtgaaaaggaacgttcactctacgaagagctcgcgaaaaagctccacgtgaaggcgtctggcccttcgcaacaagcaaagtcactaagtggtggcaatcagcaaaagatcgtcattgccaagtggcttgggatcgagccgaaaattttaattttggatgagcctactcgcggagtggatgttggtgcgaaaaaagaaatttacacgattatgaatgaactcgctaagcaaggagtggccattatcatggtctcttccgaattgccagaagtcattggcctaagtacacgagtggctgtcatgtttgaaggaaagctgatgcacatccttgagcgggacgagctctcagaggagacgatcatgcattacgccacaggaggggataaacatgtccgacaataa

SEQ ID NO: 38473 - protein, 499 aa, Bacillus halodurans C-125
MIVEMTGIHKSFSGNPVLKDVSFTLEKGEIHALMGENGAGKSTLMKILTGIYERDSGTVKIKGREVHYKHPKEAEADGLAVIHQELNILPELTVAENLFVGKERTYGKTGWIKSKEMNRLAEEKLAELGLKVKGTERAGNLSVGKQQLIEIAKALMTNADIIIMDEPTAALTDREIDTLFATVRELQKKGVTFVYISHRMEEIFSLCQRITVLRDGEYVGTKVIAETSFDEIVKMMVGRALGNRFPEHTLTPGDVKLEIKHLTRAGEFENVSLSVRAGEILGISGLMGAGRSELVETIFGYRKADSGEVWIDGKQAAIKGPDQAIAQGIGFVSEDRKSKGLIVDFSIRDNISLTNLSRISTSSWISSEKERSLYEELAKKLHVKASGPSQQAKSLSGGNQQKIVIAKWLGIEPKILILDEPTRGVDVGAKKEIYTIMNELAKQGVAIIMVSSELPEVIGLSTRVAVMFEGKLMHILERDELSEETIMHYATGGDKHVRQ

SEQ ID NO: 38474 - DNA, 1497 bp, Pasteurella multocida subsp. multocida str. Pm70
  CDS (1)..(1497): transl_table=11
atgcaacacgaaaccttactccacatccaaggaattgataagtcttttcccggtgtcaaagcgctcagtaatgcttgcttatccgtttatgcaggacgtgccatggcattaatgggggaaaatggtgcgggtaaatcgaccttaatgaaagtgctcaccggcatttacagcaaagacgcaggcacaattgaatatttaggtaaacaagtcaccttcaaaggaccaaaagagtcgcaagaagccggcatcagcatcattcaccaagagttgaatttagttggcaacctaacaatcgcagaaaatattttcttaggccgtgaatttgtgacgccttggggaagtattgattggaaaaaaatgcaccaagaagcggacaaattacttaaacgtttaggtgttagccatagtagccatcaattgtgttccgaattatcaattggtgaacaacaaatggttgaaattgccaaagcactcagctttgaatctaaagtcattattatggatgaacccaccgatgcgctaaccgatacggaaacagccgctttatttaaggtgattcgggaactcaaagccgaaaaacgtggcattgtctatatctcgcatcgtatcaaagagatttttgaaatttgcgatgatgtgacggtattacgtgatggtgagtttattggtgaaaaagccgtcaatgtattagatgaagatcagctgattgaaatgatggttggacgccgtttagatgaacaatatccacatttagataaacctcgtggcgaattattacttgaagtcgaaaatctcagtggcagtggtgtacatgatgtcagtttcacattacatcgaggagaaattctaggggtttctggtctgatgggagcgggacgaacagagcttatgaaagtgttatatggcgcgctaccccgttcaagtggcaaagtgcggttagctcagcaagaaattcacaatacttgcccacaagatggcttaaatcatggcattgtgtacatttccgaagatcgcaaaggtgatggcttaattttaggcatgtcagtgaaagaaaatatgtcactcaccgctttagcctatttttctaaatctattcaaattgatcacaaagcagaacaattggcagtgggtgacttcatcaccatgtttaatatcaaaacaccaagccaagagcagcaaattgggctcttatctggcggtaatcagcaaaaagtggcgattgctaaaggcttaatgacacgtcccaacgtgttgattttagatgagccaacacgtggcgtggatgtgggggcgaaaaaagaaatttatcaactcattaatgaattcaaaaaagagggcttaagtatcattttagtgtcctctgaaatgccagaagtgcttggcatgagtgatcgtattttggtcatgcatgaagggcgaattagtgcagaattccaacgtggtgaagccacgcaagaaaaattattagccgcagccattggcaaaagtgcgctctaa

SEQ ID NO: 38475 - protein, 498 aa, Pasteurella multocida subsp. multocida str. Pm70
MQHETLLHIQGIDKSFPGVKALSNACLSVYAGRAMALMGENGAGKSTLMKVLTGIYSKDAGTIEYLGKQVTFKGPKESQEAGISIIHQELNLVGNLTIAENIFLGREFVTPWGSIDWKKMHQEADKLLKRLGVSHSSHQLCSELSIGEQQMVEIAKALSFESKVIIMDEPTDALTDTETAALFKVIRELKAEKRGIVYISHRIKEIFEICDDVTVLRDGEFIGEKAVNVLDEDQLIEMMVGRRLDEQYPHLDKPRGELLLEVENLSGSGVHDVSFTLHRGEILGVSGLMGAGRTELMKVLYGALPRSSGKVRLAQQEIHNTCPQDGLNHGIVYISEDRKGDGLILGMSVKENMSLTALAYFSKSIQIDHKAEQLAVGDFITMFNIKTPSQEQQIGLLSGGNQQKVAIAKGLMTRPNVLILDEPTRGVDVGAKKEIYQLINEFKKEGLSIILVSSEMPEVLGMSDRILVMHEGRISAEFQRGEATQEKLLAAAIGKSAL

SEQ ID NO: 38476 - DNA, 1521 bp, Pasteurella multocida subsp. multocida str. Pm70
  CDS (1)..(1521): transl_table=11
atgacaactcaaattccaaatcaagacagtgaaatactgctcacaatgaccaatgtctgtaaatcctttcccggtgttaaagcgttagacaatgcaaacctaactgtgcgctcgcattctgtccatgccttaatgggcgaaaatggggcgggcaaatcaaccttattaaaatgcttatttggtatttacagtaaagatgaaggtgacatccttttcttaggcaagccagtcaactttaaaacgtcgaaagaagccttagagaacgggatttccatggtgcaccaagaacttaacttggttaaacaatgtactgtaatggataatctttggttaggacgttatccattaaaagcaggctttgtcgatcacggcaaaatgtatcgtgataccaaagcgatttttgaagaattagatatcgatatcgatccaaaggaaaaagtggccaaattgtcagtgtcacaaatgcaaatgatcgagatcgcaaaggccttttcatacaatgccaaaatcgtaatcatggacgaaccgacttcttcgctttcagaaaaagaagttgaacacctatttaaaattatcgcgaagctgaaacaacgtggctgtggcattatttatatttcgcacaaaatggacgaaatcttcaaaatttgtgacgaaattacgattttacgcgatggtaaatggatcaatacagtcgctgttaaaggcaccacaatggatcagattgtatccatgatggttgggcgtgaactcacacaacgtttcccaccaaaaaccaataccccaaaagaaaccatcttaacggtggaaaatctgaccgcacttaatcagccatctattcaagatgtcagttttgaattacgcaaaggcgaagtgctcggcattgcgggactggttggggcaaaacgtaccgatattgtggaaacgatcttcggggtgcgtgaacgtaaatctggtgtgattaaactgcacgataaggaaatgaaaaaccgcaatgcgttcgaagccattaacaatggttttgctttggtcacggaagaacgtcgctctacagggatttatgcgaatctcagtattgagtttaactcattaatttctaacatgaaatcctatatcagcaagttaggtttattgagtaacacaaaaatgaaaagcgacacgcaatgggtcattgattccatgaatgtgaaaacgccatctcacaaaaccaatattggctcattatctggtggtaaccaacaaaaagtggtcattggtcgttggttattaacccaacctgaaatcttgatgttagacgaaccaacacgtggtatcgacattggtgcgaaatatgaaatttatcagctgattatggagttagccaaaaaagataaaggtatcatcatgatttcatctgaaatgccagagttattaggggttactgaccgaattcttgtgatgagtaacggtaaagtcgcaggtatcgtgaatactgctgaaacctcacaagaagaaattttacagctcgctgcaaaatatttataa

SEQ ID NO: 38477 - protein, 506 aa, Pasteurella multocida subsp. multocida str. Pm70
MTTQIPNQDSEILLTMTNVCKSFPGVKALDNANLTVRSHSVHALMGENGAGKSTLLKCLFGIYSKDEGDILFLGKPVNFKTSKEALENGISMVHQELNLVKQCTVMDNLWLGRYPLKAGFVDHGKMYRDTKAIFEELDIDIDPKEKVAKLSVSQMQMIEIAKAFSYNAKIVIMDEPTSSLSEKEVEHLFKIIAKLKQRGCGIIYISHKMDEIFKICDEITILRDGKWINTVAVKGTTMDQIVSMMVGRELTQRFPPKTNTPKETILTVENLTALNQPSIQDVSFELRKGEVLGIAGLVGAKRTDIVETIFGVRERKSGVIKLHDKEMKNRNAFEAINNGFALVTEERRSTGIYANLSIEFNSLISNMKSYISKLGLLSNTKMKSDTQWVIDSMNVKTPSHKTNIGSLSGGNQQKVVIGRWLLTQPEILMLDEPTRGIDIGAKYEIYQLIMELAKKDKGIIMISSEMPELLGVTDRILVMSNGKVAGIVNTAETSQEEILQLAAKYL

SEQ ID NO: 38478 - DNA, 1512 bp, Pasteurella multocida subsp. multocida str. Pm70
  CDS (1)..(1512): transl_table=11
atgtggattgacgttatgacgcagagagattgtattttaaagttaaaaaatatcggcaaaagcttttttgatgtaccggtattgaaaaacgtggatcttgatatttatgcgggtgaggttcactgtttagtgggtgaaaatggcgcaggaaaatccacattatgtaaaataattgcaggtatttatccatttgagcagggtgaaatgttttatgaaggaaagtcttattttcctaaaacagtgaaagaagcgcaatctctaggcatcggatttattcatcaagaattgatgttagtgccgcagttatccgtcttggaaaacatttttctagggaatgaaaaaacggtattttgtggaaaaatggattggcaaacgatgcgtcataaaacgcagcaaatcattagtgaattggagttagacattgatcctgatgcgaaagtagcggatctctccatcgcacagcaacaaatggttgagattgcaaaagccgtatttagtgaatataaagtgattatttttgatgagccaacctcttcaatttcgcgtaaaaatacacaaaccctgtttaaaattattcatcaattaaaagaaaaaaatgttgcaatgatttatatctctcaccgtctagatgaatttcaatacattgcggatcaagtaacggttttaagagatgggattcgaaccggtactatggcatatcgcgacacttctcctgatgaaatcgtcaaattaatggtagggcgggaaattaattttgctgaatatcatcgtcattatttaccaacacgagaagttttgcgcgtcgagagtttaacgaataaacatattaaaagcagttctttttctttatatgaaggtgaaatacttggttttgcgggattagtgggtgctggacgtacagagttattgcgagctatttttggtgcagatgaggctagcggagcgatttatctcaatgcgcaacgggtggaaattcgttcgccagaagatgcagtgaaacagaaaataggttttattaccgaagaccggaagcaacaaggcttaattttaggactcagtattcgagaaaatattacattaccgattttaaagcgcttttggaatggcttatttttaaataaaaagcaagagcgcttagtggcagaagaaaatcggcaaaaactccggattgtttcacatagccaagaccaaatcagccaaaccctttcaggcggtaatcaacaaaaagtgattattgctcgttggctcgaaagtggtgttaagattctgttttttgatgagccaacaaggggtatcgacgtgggagcgaagtccgaaatttatgatcttatgcggcagtttaccgataacggtggggcgattgtgatggtttcttcggatctgcctgaactgattacgatgtcagatcgtgttatcgtgatgcgacaaggtgggattgtgcgtgaagtaaaagataaagcagaaatgacagaagagaatttaatgcgtttaatgattggtgtagatgaatag

SEQ ID NO: 38479 - protein, 503 aa, Pasteurella multocida subsp. multocida str. Pm70
MWIDVMTQRDCILKLKNIGKSFFDVPVLKNVDLDIYAGEVHCLVGENGAGKSTLCKIIAGIYPFEQGEMFYEGKSYFPKTVKEAQSLGIGFIHQELMLVPQLSVLENIFLGNEKTVFCGKMDWQTMRHKTQQIISELELDIDPDAKVADLSIAQQQMVEIAKAVFSEYKVIIFDEPTSSISRKNTQTLFKIIHQLKEKNVAMIYISHRLDEFQYIADQVTVLRDGIRTGTMAYRDTSPDEIVKLMVGREINFAEYHRHYLPTREVLRVESLTNKHIKSSSFSLYEGEILGFAGLVGAGRTELLRAIFGADEASGAIYLNAQRVEIRSPEDAVKQKIGFITEDRKQQGLILGLSIRENITLPILKRFWNGLFLNKKQERLVAEENRQKLRIVSHSQDQISQTLSGGNQQKVIIARWLESGVKILFFDEPTRGIDVGAKSEIYDLMRQFTDNGGAIVMVSSDLPELITMSDRVIVMRQGGIVREVKDKAEMTEENLMRLMIGVDE

SEQ ID NO: 38480 - DNA, 1560 bp, Pasteurella multocida subsp. multocida str. Pm70
  CDS (1)..(1560): transl_table=11
atggttaaatgcgactatgtttactttatcaagggattttttcggatggagcacgttaattcaacaccacctgctcgccctctgttagaaatgaaaggtattgccaagcgctttggtaccttttatgcgctacaagatgtggatttatccatttatcgtggtgaaatccatgcattgatgggggaaaatggggcaggtaaaagtaccttaatgaaaattctcgctggggcgtacaccgcttctgcgggtgagatcttaattgacggtgaaccgtttcctatttcctcgccaaaagatgcgattaaagccggtattaccttgatttatcaagaaatccacctttcacctaatttaactgtggcagaaaatatttttctcggctgtgagattaaaaccctgtttggtttggatcgtaaaaccatggcagaagagtcacagaaagtacttgatcgtttaggcgcacagtttttagcgacgcaaaaagtctcatctttaacgatcgcagaacagcaacaagtggaaattgcccgtgccttatatcgaaaaagtcgtattctcgtgatggatgagccgactgcggcgttgtcttctcgtgaaacggaacgactgtttgccttagtgaaaaaattacgtgatgagggaatggcgatcatttatatcagtcaccgtatggcagaaatttatgagcttgctgaccgtgttagcgtgctacgcgatggtaagtatgtcggttctctaacccgcgataacttggattccgctactctcgtacagatgatggtaggacgcccgttaactgacttatttaataaagagaaagtgcctgttggggaagaggttctacgagtagaaaatttatccgatggacacaaacttaaagatgcctctttggttgttcgtgccggtgagattgtcggattgtctggattagtgggcgcgggacgctctgagctcgcacatttactcttcggcgtgaaacgcgcaacgaaaggcaaaatctatttgagtggcggtgaaatcagtttttcttcaccacgagaggcgatcgctcatcatgtagctttgttgccagaaaaccgtaaagaagaaggattgtttttagatctcaatattctcaaaaatgtcacaatggcgactttagagcgggatgccacgatgttggtgatcgaccaaaataaaggcaagcaaaccacgcaagcggcgattgaaggattgaaaatgcgtgtgccgagtgcgaatgtcaatgtcagtggcttatctggtgggaatcaacaaaaagtcttgttatcacgctgggcggcaattgaaccgaagctattcatcatggacgagccaacgcgcggtgtggatgtcggggcgaaaagtgaaatttatcgcatgatgattgaaatggcgaagaaaggggtcgcgattttaatgatttccagtgagttgcctgaaattgtgggtatgagcgatcgcgtttatgtcatgcgtgagggctataccgtgggtgaattagaaggcgatgacattaatcaagagcgtatcatggcatttgcttgtggcgcacaatcataa

SEQ ID NO: 38481 - protein, 519 aa, Pasteurella multocida subsp. multocida str. Pm70
MVKCDYVYFIKGFFRMEHVNSTPPARPLLEMKGIAKRFGTFYALQDVDLSIYRGEIHALMGENGAGKSTLMKILAGAYTASAGEILIDGEPFPISSPKDAIKAGITLIYQEIHLSPNLTVAENIFLGCEIKTLFGLDRKTMAEESQKVLDRLGAQFLATQKVSSLTIAEQQQVEIARALYRKSRILVMDEPTAALSSRETERLFALVKKLRDEGMAIIYISHRMAEIYELADRVSVLRDGKYVGSLTRDNLDSATLVQMMVGRPLTDLFNKEKVPVGEEVLRVENLSDGHKLKDASLVVRAGEIVGLSGLVGAGRSELAHLLFGVKRATKGKIYLSGGEISFSSPREAIAHHVALLPENRKEEGLFLDLNILKNVTMATLERDATMLVIDQNKGKQTTQAAIEGLKMRVPSANVNVSGLSGGNQQKVLLSRWAAIEPKLFIMDEPTRGVDVGAKSEIYRMMIEMAKKGVAILMISSELPEIVGMSDRVYVMREGYTVGELEGDDINQERIMAFACGAQS

SEQ ID NO: 38482 - DNA, 1533 bp, Pseudomonas aeruginosa PAO1
  CDS (1)..(1533): transl_table=11
atgtctagcgacgcattgccgctgctgagcatccgcggggtcggcaagacctacgcgcagccggtgctggcggagatcgacctgcaactgttcggcggcgaggtgctggccctgaccggcgagaacggcgccggcaagagcaccctgtcgaagatcgtcggcggcctggagcgtcccggcgccggcagcctggaactcctcggccggccctacgcccccgctagccgccgcgaggccgaggcgctgggcgtgcgcatggtgatgcaggaactgaacctgctgccgaccctgtcggtggcggagaacctgttcctccacgacctgccccggcgcgccggctggatcgaccgtcggcgcctgcgcgcggcggcccgcgaggcgatggcccaggtcggcctggaggcgatcgatcccgacacgctggtcggcgacctcggcatcggccaccagcagatggtcgagatcgcccgcaacctgatcggcgactgccgcttgctgatcctcgacgaacccacggcgatgcttaccgcgcgcgaagtggacatgctcttcgagcaggtcgagcggctgcgcgaacgcggcgtggcgatcgtctacatctcccatcgcctggaagagctggcgcggatttcgcagcgcatcgcggtgttgcgcgatggccgcctggtctgcgtcgagccgatcgagcgctacgacgccgaccaactggtgaccctgatggtcggccgcgacctgggcgagcgcttcgacctgggcccacggcagaccggtgcgccgctgctgcgggtggagcggctgagccggcgcggcaaggtgcatgaggtgtcgttcgaggtgcgcgcgggggagatcttcggcatttccggactgatcggctccgggcgcaccgaattgttgcgcctgatctacggcgccgaccgcgccgacggtgggcaggtcctgctcggcgatccgccgcagcgcctgagcctgcgttcgccggccgactcggtgcgccagggggtggcgctgatcaccgaggaccgcaagggcgagggcctgctgctggaccagtcgatcagcgccaacctcgccctgggcaacctgccggcgctggcgcgccacggggtgatcgaccggcgccgcgaggaagccctggcgcggcgccaggtggaggcgctgcgggtgcgctgcgcggacaccgcgcaggcggtgggcgaactgtccggcggcaaccagcagaaggtggtgatcggccgctggctggaacgcgactgccaggtgctgctgttcgacgagccgacccgtggcatcgacgtcggcgccaagttcgacatctatgccttgctcgccgaactgacccgccggggcaaggcgctggtggtggtgtccagcgacctgcgcgagctgatgctgatctgcgatcgcatcggcgtgctctcggcgggacgtatggtggacaccttcgagcgcgacgcctggacccaggacgcgctgctggcggcggccttcgccggttacaagaaacgcgacgcgctgctggcgacgtcgtga

SEQ ID NO: 38483 - protein, 510 aa, Pseudomonas aeruginosa PAO1
MSSDALPLLSIRGVGKTYAQPVLAEIDLQLFGGEVLALTGENGAGKSTLSKIVGGLERPGAGSLELLGRPYAPASRREAEALGVRMVMQELNLLPTLSVAENLFLHDLPRRAGWIDRRRLRAAAREAMAQVGLEAIDPDTLVGDLGIGHQQMVEIARNLIGDCRLLILDEPTAMLTAREVDMLFEQVERLRERGVAIVYISHRLEELARISQRIAVLRDGRLVCVEPIERYDADQLVTLMVGRDLGERFDLGPRQTGAPLLRVERLSRRGKVHEVSFEVRAGEIFGISGLIGSGRTELLRLIYGADRADGGQVLLGDPPQRLSLRSPADSVRQGVALITEDRKGEGLLLDQSISANLALGNLPALARHGVIDRRREEALARRQVEALRVRCADTAQAVGELSGGNQQKVVIGRWLERDCQVLLFDEPTRGIDVGAKFDIYALLAELTRRGKALVVVSSDLRELMLICDRIGVLSAGRMVDTFERDAWTQDALLAAAFAGYKKRDALLATS

SEQ ID NO: 38484 - DNA, 1479 bp, Lactococcus lactis subsp. lactis Il1403
  CDS (1)..(1479): transl_table=11
ttgaaaatagaaatgaagaacatttctaaatcatttggaacgaataaagttcttgaagcaattgatttaacgattaattcaggagaagttcatgccttaatgggagaaaatggggctggaaaatctactttgatgaatattctaactggtctatttccagcttctggtggggaaattgagattgacagtgaaaagaaaatttttaaaaatcctcaggaagcagaaggatttggaattagttttattcatcaggaaatgaatacttggcctgatttaacagtcttagagaatctttttttaggacgagagataaaaaataaatttggtattttagatacgaaggccatgcgaaaaaaagcaaattttgcttttgaacagttgggagtaaaaattgatttagacaaagaaattggtaatttatcagttggtcagcaacaaatggttgaaatagctaaaagttttttgtctgatttaaaaattttgattatggatgaaccaacagcagcattgaccgaaagagaaacagaaagattgttttcagttattgctggtctaaaaaatcaaggggttggaattatttatatttctcatcgaatggaagaaatttttaaaatcacagattgtataactgtcatgcgtgatggtctagtcatcgatacgcaaaagacgaaagaaaccaacgttgatgaattagttagaaaaatggttggtcggtcaattacagattactatcccccaaaaaatgctgaaattcgagaaattgtatttgaagccgaccatttatcggcagaattttttaaagatatttcattttcagttcgttcaggtgaaattctcggatttgcaggactcatgggagctggtagaactgaggtcatgcgagcaatttttggaattgataagctaaaatcaggcacgataaaaattaatggaaagagtctaactatcaataacccggcacaagcaatcaaagaaggaattggctttttaacagaagaccgaaaagatgaaggacttgttcttgatttctcaataaaagataatattactcttccgagtacaaaggattttattcatcatggcctctttgatgataaaacagcaacaacttttgttaagcaactctctgagcgtcttaatgttaaagcgacagatgaagaacaaatagttgggtctctatctggaggaaatcaacaaaaagttgtccttgccaaatggattggcattgcgccaaaagttttaatcttagatgaaccaacacgaggagtcgacgtgggagccaagcgtgaaatttatcaattaatgaatgaacttgctgaacgtggtgttccaattattatgatttcaagtgatttacccgaaattcttggtgttgcagaccgaattgcagtgatgcatgaaggagaaatagcaggaattttagccaaaaatgaagcaacacaagaaaatgtgatgcagctcgcaacaggaggacaataa

SEQ ID NO: 38485 - protein, 492 aa, Lactococcus lactis subsp. lactis Il1403
MKIEMKNISKSFGTNKVLEAIDLTINSGEVHALMGENGAGKSTLMNILTGLFPASGGEIEIDSEKKIFKNPQEAEGFGISFIHQEMNTWPDLTVLENLFLGREIKNKFGILDTKAMRKKANFAFEQLGVKIDLDKEIGNLSVGQQQMVEIAKSFLSDLKILIMDEPTAALTERETERLFSVIAGLKNQGVGIIYISHRMEEIFKITDCITVMRDGLVIDTQKTKETNVDELVRKMVGRSITDYYPPKNAEIREIVFEADHLSAEFFKDISFSVRSGEILGFAGLMGAGRTEVMRAIFGIDKLKSGTIKINGKSLTINNPAQAIKEGIGFLTEDRKDEGLVLDFSIKDNITLPSTKDFIHHGLFDDKTATTFVKQLSERLNVKATDEEQIVGSLSGGNQQKVVLAKWIGIAPKVLILDEPTRGVDVGAKREIYQLMNELAERGVPIIMISSDLPEILGVADRIAVMHEGEIAGILAKNEATQENVMQLATGGQ

SEQ ID NO: 38486 - DNA, 1521 bp, Escherichia coli O157:H7 EDL933
  CDS (1)..(1521): transl_table=11
atggtcagctcaacgactccgtcttccggggaatacttgttggaaatgagcggtatcaacaagtcttttcctggtgttaaggcacttgataacgttaatttaaaagtccggccacattctatccatgcattaatgggggaaaacggcgcaggaaaatcaacattattaaaatgcctgtttggtatttataaaaaagactccggcaccattttattccagggtaaagagatcgatttccattcggccaaagaagcactggaaaatggtatttcgatggtacaccaggagttaaacctggtattacaacgttcggtgatggacaacatgtggcttgggcgataccccaccaaaggcatgtttgtcgatcaggacaaaatgtaccgcgaaaccaaagcgatttttgatgaactggatattgatatcgatccgcgtgcgcgcgtcggcacattatctgtttcgcaaatgcagatgatcgaaatcgccaaagcgttttcctataacgcgaaaattgtgattatggatgaaccgacttcttcgttaaccgaaaaagaggtcaatcatctgttcactattattcgtaaattaaaagagcgcggctgcggtattgtttatatctcgcataaaatggaggaaatcttccagttatgtgatgaagttaccgtattgcgcgacggtcagtggatcgccaccgaaccgctggcagggctgacgatggacaagattatcgccatgatggttgggcgttctcttaaccagcgttttcctgacaaagaaaacaagccgggcgaagtcatcctcgaggtacgtaacctgacgtcactgcgccagccgtcgattcgcgatgtctcgtttgatctgcataaaggggagatcctcggtattgccggtctggtgggggcgaaacgtaccgatattgttgagacgttatttggtattcgcgagaaatcggctggcaccattacgttgcacggcaaaaagatcaataaccataatgccaacgaagccataaaccacggatttgcactggtaactgaggagcgccgctcaacgggaatttatgcctatctggatattggttttaactcgttaatttccaatattcgcaactacaaaaataaagttggtttactggataactcgcggatgaaaagcgatacccagtgggtgattgattcgatgcgggtaaaaacaccggggcatcggacgcaaattggttcgctctcaggtggtaatcagcaaaaggtgattattgggcgctggctgttaacgcaaccagaaatattaatgytcgatgaaccgacgcgcggtattgatgttggggcgaagtttgagatttatcagttaattgccgaactggcgaagaaaggcaaggggattattattatctcctctgaaatgccagagttgttagggataacagaccgtattctggttatgagcaatggcctcgtttccggaattgtcgatacaaaaacaacaacgcaaaacgaaattctacgtcttgcgtctttgcacctttaa

SEQ ID NO: 38487 - protein, 506 aa, Escherichia coli O157:H7 EDL933
  misc_feature (430)..(430): Xaa can be any naturally occuring amino acid
MVSSTTPSSGEYLLEMSGINKSFPGVKALDNVNLKVRPHSIHALMGENGAGKSTLLKCLFGIYKKDSGTILFQGKEIDFHSAKEALENGISMVHQELNLVLQRSVMDNMWLGRYPTKGMFVDQDKMYRETKAIFDELDIDIDPRARVGTLSVSQMQMIEIAKAFSYNAKIVIMDEPTSSLTEKEVNHLFTIIRKLKERGCGIVYISHKMEEIFQLCDEVTVLRDGQWIATEPLAGLTMDKIIAMMVGRSLNQRFPDKENKPGEVILEVRNLTSLRQPSIRDVSFDLHKGEILGIAGLVGAKRTDIVETLFGIREKSAGTITLHGKKINNHNANEAINHGFALVTEERRSTGIYAYLDIGFNSLISNIRNYKNKVGLLDNSRMKSDTQWVIDSMRVKTPGHRTQIGSLSGGNQQKVIIGRWLLTQPEILMXDEPTRGIDVGAKFEIYQLIAELAKKGKGIIIISSEMPELLGITDRILVMSNGLVSGIVDTKTTTQNEILRLASLHL

SEQ ID NO: 38488 - DNA, 1554 bp, Escherichia coli O157:H7 EDL933
  CDS (1)..(1554): transl_table=11
gtgctgatatcgacaacctcgcaggagtccaccatgaacagcacgccagttctggagatgcgcaatattgccaaagccttcggcaaattttatgcactcaaaggggtggatttgacggtctaccctggcgagatccatgccctgatgggggaaaacggcgcgggaaaaagcacgctgatgaaggtgctggcgggggcgtataccgccaccagcggcgagattctcatagacggcaagccctttcacattcgcacgccaaaagatgccttaagcgccggtattacgctgatttatcaggagatgcagctggcaccgaatctgtcggtggcagaaaatatttttctcggcagcgagctttcccacggcgggctggtgcagcgtaaagagatgctagtgcaggcgcaaaaagtgatcgaccgcctcggcgcgcagtttaacgccagcgataaggtcatgacgctgaccattgccgagcaacagcaggtcgaaatcgcccgcgcactacatcgcaacagccgcattctggtgatggacgaacccaccgctgccytctcctcccgcgaaactcaccgcctgtttgaactgattatgcggctgcgcgatgaagggatggcgattatctacattagccaccgcatggcggaagtgtatgagctttccgatcgcgtcagcgtgctacgcgacgggcaatacgttggcagcctgacccgcgataacctcaatgccggggagctggtgcggatgatggtcggcaggccactgagcgatctgttcaataaagagcgcgatatcccgctcggtaaagcccgcctgaatgttcaccacctgaccgacggcggcaaagtccagccgagtagcctgctggtgcgttccggcgaaattgttggcctcgccggactggtgggtgccggacgttccgaactggcgcagttgatcttcggcgtgcggaaagcgacaggcggaatgattgaagtcgatggtgaaccggtggtgatccactccccgcgcgaagccatcgatcttggcattggttttctcaccgaaaaccgcaaagaacaaggcttattccttgaaatggcagcagccgaaaacatcaccatggcaaccctggagcgcgatgcccgctggggaatgctcaatcgcaaaaaagcgcaaaccatttccgatgacgccattaagttgctcaacattcgcgtgcctcatgcccaggtacgcgcgggcgggctttccggcggcaatcagcaaaaactgttgatctcccgctgggtggcgattggcccgcgcattttactgctcgatgaacccgcccgcggcgtggacgttggcgccaaaagtgagatctaccggatcatgaacgagatggcgcgcaagggcgtggcgatcctgatgatctccagcgaactgccggagatagtgggaatgagcgatcgcgtctatgtgatgcgcgaaggcagcattgccggtgagttaaacggcaaaaacatcacccaggaaaacattatgaccttagcgactggcgtcaacgacgcccattcccaggcggtaacctcatga

SEQ ID NO: 38489 - protein, 517 aa, Escherichia coli O157:H7 EDL933
  misc_feature (184)..(184): Xaa can be any naturally occuring amino acid
MLISTTSQESTMNSTPVLEMRNIAKAFGKFYALKGVDLTVYPGEIHALMGENGAGKSTLMKVLAGAYTATSGEILIDGKPFHIRTPKDALSAGITLIYQEMQLAPNLSVAENIFLGSELSHGGLVQRKEMLVQAQKVIDRLGAQFNASDKVMTLTIAEQQQVEIARALHRNSRILVMDEPTAAXSSRETHRLFELIMRLRDEGMAIIYISHRMAEVYELSDRVSVLRDGQYVGSLTRDNLNAGELVRMMVGRPLSDLFNKERDIPLGKARLNVHHLTDGGKVQPSSLLVRSGEIVGLAGLVGAGRSELAQLIFGVRKATGGMIEVDGEPVVIHSPREAIDLGIGFLTENRKEQGLFLEMAAAENITMATLERDARWGMLNRKKAQTISDDAIKLLNIRVPHAQVRAGGLSGGNQQKLLISRWVAIGPRILLLDEPARGVDVGAKSEIYRIMNEMARKGVAILMISSELPEIVGMSDRVYVMREGSIAGELNGKNITQENIMTLATGVNDAHSQAVTS

SEQ ID NO: 38490 - DNA, 1566 bp, Deinococcus radiodurans R1
  CDS (1)..(1566): transl_table=11
atgaccgcccccgcacccacgctcgcccatgcccacgcctcgccggtggccctgtcgctgcgcggcatcaccaaacgctttccgctggtgctcgccaacgacgacatttcgctggacgtgaagtggggcagcgtccacgccctgtgcggtgaaaacggcgcgggcaaaagcaccctgatgaaaatcgtctacggcgcccagccgccgaccagcggcgaaatcgtggtggacgggcagccggtgagcttcgccagccccgccgacgcgattgcccagggcatcggcatggtgtttcagcactttcaactcgtggacaccctgaccgtcaccgagaacgtgattctgggcgccgagccgacccagggcacctccatcaactacggcgcggcgcgggcgcgggtggccgaactgatccggcagttcaacttcgacctcaaccccgacgcgcgggtgggcgacctgccggtgggcctccagcagaaggtggagattctcaagacgctctaccggggagcccgcatcctgattctggacgagccgacggcggtgctgaccccttcggaaaccgacgaactgttcgacttcctgaaaaaccagtacgcggcgagcggcaacgcggtgattttcatttcgcacaagctgcacgaggtgctgcacatctccgacaccatttcggtcatccgtgacggcaagatgatcggttctatcccggcggcgggcgcgaccaccgagacactggcgaagatgatggtgggccgcgacgtgtcgctgcgggtggacaagcgccccgcgcagcccggcgaagtcgcactcgacgtgcagaacgtgacggtgcgcggcgaaaacggtgggcatggcggccatgccgaagccgtgcgcgatgtcagttttcaggttcgcgctggggaaatcgtgggcatcgcgggcgtggaaggcaacggccagagcgaactcgtcgaggcgattaccgggctgctgccgtaccagggccgcatcacctacctgggccgcgaagcgcggggcgtgcgcgaggtcgaagcgtcgggcctctcgcacgtccccgaagaccgcaatgagcgtgggctggtgctggaaatgtccaccgccgagaacttcattctgggcgagcaggaccgcgcccccttcgccggaccgctgggcctgctgcggctcgacgtgatcgagcagaatgcccgcgaactctccgagcagtacgacgtgcgcccgcgctccacctcgctgcctgccgggcgctactcgggcggcaacgcgcagaaaatcatcgtcgcccgcgagatgcgcaaagggccaaagattctggtcgccagccagcccacgcgcggggtggacatcggcgccatcgaattcatccacgcccgcatcgtggaggcgcgcgaccagggcctcgcggtgctgcttatttccgccgacctcggcgaagtgatgaacctcgccgaccgcattctggtgatgttcgagggccagattgccggcgaagtcgccgcgagcgaggccaccgaaacgggcctgggcctgctgatgaccgggagcggggcgcgaggctga

SEQ ID NO: 38491 - protein, 521 aa, Deinococcus radiodurans R1
MTAPAPTLAHAHASPVALSLRGITKRFPLVLANDDISLDVKWGSVHALCGENGAGKSTLMKIVYGAQPPTSGEIVVDGQPVSFASPADAIAQGIGMVFQHFQLVDTLTVTENVILGAEPTQGTSINYGAARARVAELIRQFNFDLNPDARVGDLPVGLQQKVEILKTLYRGARILILDEPTAVLTPSETDELFDFLKNQYAASGNAVIFISHKLHEVLHISDTISVIRDGKMIGSIPAAGATTETLAKMMVGRDVSLRVDKRPAQPGEVALDVQNVTVRGENGGHGGHAEAVRDVSFQVRAGEIVGIAGVEGNGQSELVEAITGLLPYQGRITYLGREARGVREVEASGLSHVPEDRNERGLVLEMSTAENFILGEQDRAPFAGPLGLLRLDVIEQNARELSEQYDVRPRSTSLPAGRYSGGNAQKIIVAREMRKGPKILVASQPTRGVDIGAIEFIHARIVEARDQGLAVLLISADLGEVMNLADRILVMFEGQIAGEVAASEATETGLGLLMTGSGARG

SEQ ID NO: 38492 - DNA, 1521 bp, Escherichia coli O157:H7
  CDS (1)..(1521): transl_table=11
atggtcagctcaacgactccgtcttccggggaatacttgttggaaatgagcggtatcaacaagtcttttcctggtgttaaggcacttgataacgttaatttaaaagtccggccacattctatccatgcattaatgggggaaaacggcgcaggaaaatcaacattattaaaatgcctgtttggtatttataaaaaagactccggcaccattttattccagggtaaagagatcgatttccattcggccaaagaagcactggaaaatggtatttcgatggtacaccaggagttaaacctggtattacaacgttcggtgatggacaacatgtggcttgggcgataccccaccaaaggcatgtttgtcgatcaggacaaaatgtaccgcgaaaccaaagcgatttttgatgaactggatattgatatcgatccgcgtgcgcgcgtcggcacattatctgtttcgcaaatgcagatgatcgaaatcgccaaagcgttttcctataacgcgaaaattgtgattatggatgaaccgacttcttcgttaaccgaaaaagaggtcaatcatctgttcactattattcgtaaattaaaagagcgcggctgcggtattgtttatatctcgcataaaatggaggaaatcttccagttatgtgatgaagttaccgtattgcgcgacggtcagtggatcgccaccgaaccgctggcagggctgacgatggacaagattatcgccatgatggttgggcgttctcttaaccagcgttttcctgacaaagaaaacaagccgggcgaagtcatcctcgaggtacgtaacctgacgtcactgcgccagccgtcgattcgcgatgtctcgtttgatctgcataaaggggagatcctcggtattgccggtctggtgggggcgaaacgtaccgatattgttgagacgttatttggtattcgcgagaaatcggctggcaccattacgttgcacggcaaaaagatcaataaccataatgccaacgaagccataaaccacggatttgcactggtaactgaggagcgccgctcaacgggaatttatgcctatctggatattggttttaactcgttaatttccaatattcgcaactacaaaaataaagttggtttactggataactcgcggatgaaaagcgatacccagtgggtgattgattcgatgcgggtaaaaacaccggggcatcggacgcaaattggttcgctctcaggtggtaatcagcaaaaggtgattattgggcgctggctgttaacgcaaccagaaatattaatgctcgatgaaccgacgcgcggtattgatgttggggcgaagtttgagatttatcagttaattgccgaactggcgaagaaaggcaaggggattattattatctcctctgaaatgccagagttgttagggataacagaccgtattctggttatgagcaatggcctcgtttccggaattgtcgatacaaaaacaacaacgcaaaacgaaattctacgtcttgcgtctttgcacctttaa

SEQ ID NO: 38493 - protein, 506 aa, Escherichia coli O157:H7
MVSSTTPSSGEYLLEMSGINKSFPGVKALDNVNLKVRPHSIHALMGENGAGKSTLLKCLFGIYKKDSGTILFQGKEIDFHSAKEALENGISMVHQELNLVLQRSVMDNMWLGRYPTKGMFVDQDKMYRETKAIFDELDIDIDPRARVGTLSVSQMQMIEIAKAFSYNAKIVIMDEPTSSLTEKEVNHLFTIIRKLKERGCGIVYISHKMEEIFQLCDEVTVLRDGQWIATEPLAGLTMDKIIAMMVGRSLNQRFPDKENKPGEVILEVRNLTSLRQPSIRDVSFDLHKGEILGIAGLVGAKRTDIVETLFGIREKSAGTITLHGKKINNHNANEAINHGFALVTEERRSTGIYAYLDIGFNSLISNIRNYKNKVGLLDNSRMKSDTQWVIDSMRVKTPGHRTQIGSLSGGNQQKVIIGRWLLTQPEILMLDEPTRGIDVGAKFEIYQLIAELAKKGKGIIIISSEMPELLGITDRILVMSNGLVSGIVDTKTTTQNEILRLASLHL

SEQ ID NO: 38494 - DNA, 1512 bp, Escherichia coli O157:H7; identical to SEQ ID NO: 27178
  CDS (1)..(1512): transl_table=11

SEQ ID NO: 38495 - protein, 503 aa, Escherichia coli O157:H7; identical to SEQ ID NO: 27179

SEQ ID NO: 38496 - DNA, 1542 bp, Escherichia coli O157:H7
  CDS (1)..(1542): transl_table=11
atgccttatctacttgaaatgaagaacattaccaaaaccttcggcagtgtgaaggcgattgataacgtcagcttgcggttgaatgctggcgaaatcgtctcactctgtggggaaaatgggtctggtaaatcaacgctgatgaaagtgctgtgtggtatttatccccatggctcctacgaaggcgaaattatttttgcgggagaagagattcaggcgagtcacatccgcgataccgaacgcaaaggtatcgccatcattcaccaggaattggccctggtgaaagaattgaccgtgctggaaaatatcttcctgggtaacgaaataacccacaatggcattatggattatgacctgatgacgctacgctgtcagaagctgctcgcacaggtcagtttatccatttcacctgatacccgcgttggcgatttagggcttgggcaacaacaactggttgaaattgccaaggcacttaataaacaggtgcgcttgttaattctcgatgaaccgacagcctcattaactgagcaggaaacgtcggttttactggatattattcgcgatctacaacagcacggtatcgcctgtatttatatttcgcacaaactcaacgaagtcaaagcgatttccgatacgatttgcgttattcgcgacggacagcacattggtacgcgtgatgctgccggaatgagtgaagacgatattatcaccatgatggtcgggcgagagttaaccgcgctttaccctaatgaaccacataccaccggagatgaaatattacgtattgaacatctgacggcatggcatccggttaatcgtcatattaaacgagttaatgatgtctcgttttccctgaaacgtggcgaaatactgggtattgccggactcgttggtgccggacgtaccgagaccattcagtgcctgtttggtgtgtggcccggacaatgggaaggaaaaatttatattgatggcaaacaggtagatattcgtaactgtcagcaagccatcgcccaggggattgcgatggtccccgaagacagaaagcgcgacggcatcgttccggtaatggcggttggtaaaaatattaccctcgccgcactcaataaatttaccggtggcattagccagcttgatgacgcggcagagcaaaaatgtattctggaatcaatccagcaactcaaagttaaaacgtcgtcccccgaccttgctattggacgtttgagcggcggcaatcagcaaaaagcgatcctcgctcgctgtctgttacttaacccgcgcattctcattcttgatgaacccaccaggggtatcgatattggcgcgaaatacgagatctacaaattaattaaccaactcgtccagcagggtattgccgttattgtcatctcttctgaattacctgaagtgctcggccttagcgatcgtgtactagtaatgcatgaagggaaactaaaagccaacctgataaatcataacctgactcaggagcaggtgatggaagccgcattgaggagcgaacatcatgtcgaaaagcaatccgtctga

SEQ ID NO: 38497 - protein, 513 aa, Escherichia coli O157:H7
MPYLLEMKNITKTFGSVKAIDNVSLRLNAGEIVSLCGENGSGKSTLMKVLCGIYPHGSYEGEIIFAGEEIQASHIRDTERKGIAIIHQELALVKELTVLENIFLGNEITHNGIMDYDLMTLRCQKLLAQVSLSISPDTRVGDLGLGQQQLVEIAKALNKQVRLLILDEPTASLTEQETSVLLDIIRDLQQHGIACIYISHKLNEVKAISDTICVIRDGQHIGTRDAAGMSEDDIITMMVGRELTALYPNEPHTTGDEILRIEHLTAWHPVNRHIKRVNDVSFSLKRGEILGIAGLVGAGRTETIQCLFGVWPGQWEGKIYIDGKQVDIRNCQQAIAQGIAMVPEDRKRDGIVPVMAVGKNITLAALNKFTGGISQLDDAAEQKCILESIQQLKVKTSSPDLAIGRLSGGNQQKAILARCLLLNPRILILDEPTRGIDIGAKYEIYKLINQLVQQGIAVIVISSELPEVLGLSDRVLVMHEGKLKANLINHNLTQEQVMEAALRSEHHVEKQSV

SEQ ID NO: 38498 - DNA, 1506 bp, Escherichia coli O157:H7
  CDS (1)..(1506): transl_table=11
atggaagcattacttcagcttaaaggcatcgataaagccttcccgggcgtaaaagccctctcgggcgcagcgttaaatgtctatccgggccgcgtgatggcgctggtgggcgaaaacggcgcgggtaaatccaccatgatgaaagtgcttactggcatctatactcgcgatgccggtacgcttttatggctggggaaagaaacgacatttaccgggccgaaatcttcccaggaagccgggattgggattatccatcaggaactgaacctgatcccgcagttaaccattgccgaaaacattttcctcggtcgtgagtttgttaatcgctttggcaaaattgactggaaaaccatgtatgccgaagcggataaattgctggctaaacttaacctgcgctttaaaagcgacaagctggtgggcgatctttccatcggtgaccagcaaatggttgaaatagccaaagtgctgagctttgagtcgaaagtcatcattatggatgaaccgaccgatgcgctgaccgataccgaaaccgaatccctgttccgcgtcatccgcgagctgaaatcgcaaggccgcggtattgtctatatctcccaccgcatgaaagaaatcttcgagagttgcgatgacgttaccgtttttcgtgacggacaatttattgctgagcgcgaagtggcatcactgaccgaagattcgctgattgagatgatggtgggtcgcaagctggaagatcaatatccgcacctggacaaagcgccgggagatatccgcctgaaagtcgataatctctgcggacctggcgttaacgatgtctcttttactttacgcaaaggcgaaattcttggcgtctctggtttgatgggcgcaggtcgtaccgaactgatgaaagtgctctacggcgcactaccgcgcaccagcggttacgtcaccctggatgggcatgaagtcgttacccgttcaccgcaggatggcctggcaaacggcattgtgtatatctccgaagaccgtaaacgtgacggtttagtgttgggcatgtcagtaaaagagaacatgtcgctgacagcgctgcgctacttcagccgcgctggcggcagtttgaagcatgccgatgaacagcaggctgtgagtgattttattcgcctgttcaatgtgaaaacgccgtcgatggagcaggcaattggtctgctttccggtggcaatcagcaaaaagtggcgattgcccgcggtctgatgacacgccccaaagtgttgatccttgatgaacctacccgtggcgtagatgtcggcgcgaaaaaagagatctatcaactgattaaccagttcaaagccgatggcttgagcatcattctggtgtcatcggagatgccagaagtattaggcatgagcgatcgcatcatcgtcatgcatgaagggcatctcagcggggaatttactcgtgagcaggccacccaggaagtgttaatggctgccgctgtgggcaagcttaatcgcgtgaatcaggagtaa

SEQ ID NO: 38499 - protein, 501 aa, Escherichia coli O157:H7
MEALLQLKGIDKAFPGVKALSGAALNVYPGRVMALVGENGAGKSTMMKVLTGIYTRDAGTLLWLGKETTFTGPKSSQEAGIGIIHQELNLIPQLTIAENIFLGREFVNRFGKIDWKTMYAEADKLLAKLNLRFKSDKLVGDLSIGDQQMVEIAKVLSFESKVIIMDEPTDALTDTETESLFRVIRELKSQGRGIVYISHRMKEIFESCDDVTVFRDGQFIAEREVASLTEDSLIEMMVGRKLEDQYPHLDKAPGDIRLKVDNLCGPGVNDVSFTLRKGEILGVSGLMGAGRTELMKVLYGALPRTSGYVTLDGHEVVTRSPQDGLANGIVYISEDRKRDGLVLGMSVKENMSLTALRYFSRAGGSLKHADEQQAVSDFIRLFNVKTPSMEQAIGLLSGGNQQKVAIARGLMTRPKVLILDEPTRGVDVGAKKEIYQLINQFKADGLSIILVSSEMPEVLGMSDRIIVMHEGHLSGEFTREQATQEVLMAAAVGKLNRVNQE

SEQ ID NO: 38500 - DNA, 1521 bp, Escherichia coli O157:H7
  CDS (1)..(1521): transl_table=11
atgaacagcacgccagttctggagatgcgcaatattgccaaagccttcggcaaattttatgcactcaaaggggtggatttgacggtctaccctggcgagatccatgccctgatgggggaaaacggcgcgggaaaaagcacgctgatgaaggtgctggcgggggcgtataccgccaccagcggcgagattctcatagacggcaagccctttcacattcgcacgccaaaagatgccttaagcgccggtattacgctgatttatcaggagatgcagctggcaccgaatctgtcggtggcagaaaatatttttctcggcagcgagctttcccacggcgggctggtgcagcgtaaagagatgctagtgcaggcgcaaaaagtgatcgaccgcctcggcgcgcagtttaacgccagcgataaggtcatgacgctgaccattgccgagcaacagcaggtcgaaatcgcccgcgcactacatcgcaacagccgcattctggtgatggacgaacccaccgctgccctctcctcccgcgaaactcaccgcctgtttgaactgattatgcggctgcgcgatgaagggatggcgattatctacattagccaccgcatggcggaagtgtatgagctttccgatcgcgtcagcgtgctacgcgacgggcaatacgttggcagcctgacccgcgataacctcaatgccggggagctggtgcggatgatggtcggcaggccactgagcgatctgttcaataaagagcgcgatatcccgctcggtaaagcccgcctgaatgttcaccacctgaccgacggcggcaaagtccagccgagtagcctgctggtgcgttccggcgaaattgttggcctcgccggactggtgggtgccggacgttccgaactggcgcagttgatcttcggcgtgcggaaagcgacaggcggaatgattgaagtcgatggtgaaccggtggtgatccactccccgcgcgaagccatcgatcttggcattggttttctcaccgaaaaccgcaaagaacaaggcttattccttgaaatggcagcagccgaaaacatcaccatggcaaccctggagcgcgatgcccgctggggaatgctcaatcgcaaaaaagcgcaaaccatttccgatgacgccattaagttgctcaacattcgcgtgcctcatgcccaggtacgcgcgggcgggctttccggcggcaatcagcaaaaactgttgatctcccgctgggtggcgattggcccgcgcattttactgctcgatgaacccgcccgcggcgtggacgttggcgccaaaagtgagatctaccggatcatgaacgagatggcgcgcaagggcgtggcgatcctgatgatctccagcgaactgccggagatagtgggaatgagcgatcgcgtctatgtgatgcgcgaaggcagcattgccggtgagttaaacggcaaaaacatcacccaggaaaacattatgaccttagcgactggcgtcaacgacgcccattcccaggcggtaacctcatga

SEQ ID NO: 38501 - protein, 506 aa, Escherichia coli O157:H7
MNSTPVLEMRNIAKAFGKFYALKGVDLTVYPGEIHALMGENGAGKSTLMKVLAGAYTATSGEILIDGKPFHIRTPKDALSAGITLIYQEMQLAPNLSVAENIFLGSELSHGGLVQRKEMLVQAQKVIDRLGAQFNASDKVMTLTIAEQQQVEIARALHRNSRILVMDEPTAALSSRETHRLFELIMRLRDEGMAIIYISHRMAEVYELSDRVSVLRDGQYVGSLTRDNLNAGELVRMMVGRPLSDLFNKERDIPLGKARLNVHHLTDGGKVQPSSLLVRSGEIVGLAGLVGAGRSELAQLIFGVRKATGGMIEVDGEPVVIHSPREAIDLGIGFLTENRKEQGLFLEMAAAENITMATLERDARWGMLNRKKAQTISDDAIKLLNIRVPHAQVRAGGLSGGNQQKLLISRWVAIGPRILLLDEPARGVDVGAKSEIYRIMNEMARKGVAILMISSELPEIVGMSDRVYVMREGSIAGELNGKNITQENIMTLATGVNDAHSQAVTS

SEQ ID NO: 38502 - DNA, 1581 bp, Mycoplasma pulmonis UAB CTIP
  CDS (1)..(1581): transl_table=4
atgaacactaacgaagatgtcattcttgagttaaaaaatgttacaaaagtctatcctggtgtagttgctttaaataatgtttcttttaaagttaaaagaaaatccattttatctcttgtaggagaaaatggagctggtaaatcaaccattttaaaggttataagtggcgttattccaaatgataaatttgatggagcaattttttacaacggtattcaaacaaacttttctaatttaaaacaatctgaaaaagctggaattgcaattattcaccaagaacttgctatctcaccacatctttcactttatgaaaatatttttttaggtaactatgaagcaaaacatgggctaattaatcgtaatgaaatgattaaaaaagctaattattatcttcatttagtaggtcttaaaaaaaatccagatactaaagctggaacactttcaattgctgatcaacaacttttggaaatagcaaaagcattggctaaaaaagctaagttattaattttagatgaacccacttcttcattaaatgacaaagatagttatgcacttttagatattatgaaaagacttcgtgatgaagaaggaataacatgtatttttgttagtcataaacttaaagaagttgcatatgtagcagattacataaccatcattagggatggaaaacacatctctgactatagtaattcaaaagaaaaaaccataaatgaagctactttaattaaagacattgttggaagggacttagaatctaaatttcctgaaaaaccagctgagcgaaaaattggaaaaattaaacttgaagttgaaaaattccaagttgaaaatccaaaagttaatggaaaattagatgtcattaatgcttcatttaatgttagagaaggcgaaattgttggaataagtggactagttggttcaggaagaagtgaacttgctatgtcaatttttggaaatgcctatggtattagaaaaaatggtaatatcaaaattgatggcaagatagttaatttaaaaactccgcttcaagctattaaaaatggtctaatgtacgcctctgaggatcgaaaaaatgttggtttaattcaaatgttttcaattcattgaaatatctcctcagctgcctctcacattttttctaacaaatttggaattctaaaaaaagaaaaagaaacacaaaactcttcatatatgagaagcaaagttaacattaaagccccttctgttgactatctagttgagactctttcaggaggaaatcaacaaaaagttttaatagccaaggccttaacaactaattttgatatattaattattgatgaacctactaaaggtattgacgttggatctaaatatgaaatttataaaatattattagatcttgcctcagaaggaaaagccattgttgttatttcctctgaattagaagagcttttaggaattacagatagaatctttgttatgtcacaaggaattatcaaaggagagcttccttcaaaagaggcaactccagaaaaagtaatgcaaattgccattggaacaaaacaaaatgaaaggagtcaagcaaatgtccaataa

SEQ ID NO: 38503 - protein, 526 aa, Mycoplasma pulmonis UAB CTIP
MNTNEDVILELKNVTKVYPGVVALNNVSFKVKRKSILSLVGENGAGKSTILKVISGVIPNDKFDGAIFYNGIQTNFSNLKQSEKAGIAIIHQELAISPHLSLYENIFLGNYEAKHGLINRNEMIKKANYYLHLVGLKKNPDTKAGTLSIADQQLLEIAKALAKKAKLLILDEPTSSLNDKDSYALLDIMKRLRDEEGITCIFVSHKLKEVAYVADYITIIRDGKHISDYSNSKEKTINEATLIKDIVGRDLESKFPEKPAERKIGKIKLEVEKFQVENPKVNGKLDVINASFNVREGEIVGISGLVGSGRSELAMSIFGNAYGIRKNGNIKIDGKIVNLKTPLQAIKNGLMYASEDRKNVGLIQMFSIHWNISSAASHIFSNKFGILKKEKETQNSSYMRSKVNIKAPSVDYLVETLSGGNQQKVLIAKALTTNFDILIIDEPTKGIDVGSKYEIYKILLDLASEGKAIVVISSELEELLGITDRIFVMSQGIIKGELPSKEATPEKVMQIAIGTKQNERSQANVQ

SEQ ID NO: 38504 - DNA, 1545 bp, Clostridium acetobutylicum ATCC 824
  CDS (1)..(1545): transl_table=11
atggataaagtaatcgagatgaaggggattactaaggtctttccgggaaccatagcaaatgacaatgtgaattttgaattaacaaggggagaaactcatgttttactaggtgaaaatggagctggaaaaactacgttaatgaatatattatatggtttgtatcatccagaaaaaggccagattattgttaatggtaaaagtgttcagttcagtggcccaaatgatgcaattaaaagcggtataggaatggtgcatcaacattttatgttggttaataactttactgttgctgaaaacatagttctaggtatggaacctaaaaatggcataagggttgatatgggtaaggctattaataatgtaaaagaactatcagacaaatatggttttgctattgaacctaaggctattatagaggatatatcagtaggccagcaacaaaaggttgaaattttaaaggcgctttacagaggagcagatgttttaattctggacgagcctacagctgttttaacgcctcaagaaatagatgaacttggagatataattgaaaaccttaagaaggaaggaaaatcagttatacttattacccataaattaaaagaagtaatgaagatgagcgatagagttacaataataagaagaggtaaggtcacagggactgttaatacaaaggatacaagtattgatgaactagcagagcttatggtaggaagaaaggttaatcttactattgctaaaaaagaaagcaaagctggaaaagaagttctaagagttgaagaacttaaagttaaggatcatagggatgttttagttgtaaaaggtattaatttagttgttaattcgggagaaatactaggaattgcaggtgttgacggaaatggacaatcagagtttatagaagcgttaactggacttaaaaaagtagaatcaggtaatgtaatacttaatggaaagaatatttcaggaaaatccgcaaaatacataaccaatagtggtgtaggacatattcctgaagataggcataagaggggcttagtacttaagtattcactttatgaaaattctatacttggtatgcatcatagaaagccattttcgagaatgtttaatataaattataaggctgttagaaaacactgtaaaaaacttatagaggaatttgatattagaacgcctaatgatgaggttaatgcggcagctctttcgggcggaaatcaacaaaagctagtagtagcaagagaaatatctagaaatccagatttacttatagcatctcagccgactaggggacttgatgtaggggctatagaatatatacataaaagaattgttgaagagagggataaaggaaaagctgtccttttagtttctcttgagcttgatgaaatattagccttatcagatagaatagcagttatgtatgatggcaaaatagtggatgttttagagagaaaagatgcggatgaaaagaagttaggcatacttatggcgggaggaaacttagataagaaagagagtgtgaatactgttgaagaaagataa

SEQ ID NO: 38505 - protein, 514 aa, Clostridium acetobutylicum ATCC 824
MDKVIEMKGITKVFPGTIANDNVNFELTRGETHVLLGENGAGKTTLMNILYGLYHPEKGQIIVNGKSVQFSGPNDAIKSGIGMVHQHFMLVNNFTVAENIVLGMEPKNGIRVDMGKAINNVKELSDKYGFAIEPKAIIEDISVGQQQKVEILKALYRGADVLILDEPTAVLTPQEIDELGDIIENLKKEGKSVILITHKLKEVMKMSDRVTIIRRGKVTGTVNTKDTSIDELAELMVGRKVNLTIAKKESKAGKEVLRVEELKVKDHRDVLVVKGINLVVNSGEILGIAGVDGNGQSEFIEALTGLKKVESGNVILNGKNISGKSAKYITNSGVGHIPEDRHKRGLVLKYSLYENSILGMHHRKPFSRMFNINYKAVRKHCKKLIEEFDIRTPNDEVNAAALSGGNQQKLVVAREISRNPDLLIASQPTRGLDVGAIEYIHKRIVEERDKGKAVLLVSLELDEILALSDRIAVMYDGKIVDVLERKDADEKKLGILMAGGNLDKKESVNTVEER

SEQ ID NO: 38506 - DNA, 1572 bp, Agrobacterium tumefaciens str. C58
  CDS (1)..(1572): transl_table=11
atgcgcggggcattcattggtttgtctttaggcaattttggacacaaagccgtggtgtatcgccactgcgattacgtccctggaggtcccgtcatgcgcgagccggttctttcgctccgtggcatcagcaaacgctatggtccgctcgaggttctgaagtccgtcgatctcgaggtctatccgggcgaagtggtagcgttgctgggtgaaaatggcgcgggcaagtccacgctgtcaggcatcatcgccggttcccgcgaaccttcagagggtaagatgacctggcttgggcagccgtatcagccggcatcgccgcgcgaggcgatcgacaagggcatcgtcctcatccatcaggaactgaagcttctgccggagctttccatcgctgagaatgtcttcatcggccgctggcccatgaaaaacggcattgtcgaccgcgccgagatggtgcggagagcccagcagcaactggcgcgccttaacctgcatattcccgcaacgcgcaaggtggcaggcctttccaccgccaaccagcagctgattgagatcgccaaggcgctcgcgctcgacgccaaactcctcatcctcgacgagccgacggccgcacttggcggcgccgaaacgcaggcgctgttcgagcaggtgcgcaagctgcgtgccgaaggcgtgggcatcatctacatctcccaccgcatggaagagatcagacagatcaccgaccgtatcgtcgtgttgcgcgacggcgagcgggtgcatgaatttgccgacagtgcgacgccggtgcgcaccattgtcgaaagcatggtcggccgctcgctggagcgcctgttcccggcgctgcctgaaccgcaggagaaggtggtactcgaggtcaaggggctgacgggcgcgaccaatgcctttcgcgacatcagcttcggcgtccgcgccggtgaaattctcggcattgccggcctgatcggcgcgggacgaacggaattggtgcgcgccatctccggtgccgatccgacgagcgcgggtgaagtacgactggatggcgaggtgctttcgctgaaaagcccggcggatgccatcgccaagggcatcgtcatggtgccggaagaccgcaaattgcaggggctggtggtggaacacgagatcggtgaaaacctgatctatgccaatctcgaccgcgtgggcacgggctggatcacgccggctatcaagcgcgctttcacccgggacgccatcgccaaattcggggtgaagggccgtagcgaacagccggcctccgatctctccggcggcaaccagcagaaagtggtcatcgccaaatggcttgcccgcaatccgcgtgtggtggtgctggatgaaccgacgcgcggcatcgatgtcggtgcgcgggcaggcatttacgatatcattgttggcctggcgaaggacggcgtggccgtcatcgtcgtcagttccgatctggaagaggtgctgggcgtttcgaaccgtatcctcgtgctcgcgcagggaaaacaggctggcatccttaaccgcgacgaggcaaacgacgtctcggtcatggaactggcaaccatctga

SEQ ID NO: 38507 - protein, 523 aa, Agrobacterium tumefaciens str. C58
MRGAFIGLSLGNFGHKAVVYRHCDYVPGGPVMREPVLSLRGISKRYGPLEVLKSVDLEVYPGEVVALLGENGAGKSTLSGIIAGSREPSEGKMTWLGQPYQPASPREAIDKGIVLIHQELKLLPELSIAENVFIGRWPMKNGIVDRAEMVRRAQQQLARLNLHIPATRKVAGLSTANQQLIEIAKALALDAKLLILDEPTAALGGAETQALFEQVRKLRAEGVGIIYISHRMEEIRQITDRIVVLRDGERVHEFADSATPVRTIVESMVGRSLERLFPALPEPQEKVVLEVKGLTGATNAFRDISFGVRAGEILGIAGLIGAGRTELVRAISGADPTSAGEVRLDGEVLSLKSPADAIAKGIVMVPEDRKLQGLVVEHEIGENLIYANLDRVGTGWITPAIKRAFTRDAIAKFGVKGRSEQPASDLSGGNQQKVVIAKWLARNPRVVVLDEPTRGIDVGARAGIYDIIVGLAKDGVAVIVVSSDLEEVLGVSNRILVLAQGKQAGILNRDEANDVSVMELATI

SEQ ID NO: 38508 - DNA, 1518 bp, Agrobacterium tumefaciens str. C58
  CDS (1)..(1518): transl_table=11
atgcggaacatcaccaagacgtttccgggcgtgaaagcgcttgagaacgttaacctcaaggtgaaagagggtgagatccacgcactcgtcggtgagaacggcgcggggaagtcgaccttgatgaaggtcctttccggtgtttaccccgccggcacctatgagggcgaaatccactatgaaggcgcagtcaggaattttcgcgccatcaacgacagtgaagatattggtatcatcatcattcaccaggagcttgcactcgtgccgctcctgtcgattgcggaaaacatcttccttggcaacgaagtcgcttcgaacggcgtcatcagctggcagcagaccttcaaccgtacccgcgaactcctgaagaaggtgggtctgaaggaatcgcccgagacgctgatcaccgatatcggcgtcggcaagcagcagctggtcgaaatcgccaaggcactgtcgaagagcgtgaagctgctcatcctcgacgagccgacggcttcgctcaacgaaagcgattccgaggcgctgctcaatctcctgatggaattccgcaatcagggcatgacctcgatcatcattacccacaagctgaacgaagtgcgcaaggtggccgaccagatcaccgtgctgcgcgacggcatgacggtgaagacgctcgactgtcatcaggaagaaatcagcgaggatgtcatcatccgcaacatggtgggacgcgatctggaagatcgttatccgccgcgtgatgtgccgatcggcgagaccattctcgaagtcaaaaactggaacgcctatcaccagcagcatcgcgaccgccaggttctgcacgacatcaacgtcaccgtccgcaagggcgaagtcgtcggcatcgccgggctgatgggggcaggacgcaccgagttcgcgatgagcgtgttcggcaagtcctatggccacaggatcaccggcgacgtgctgatcgacggcaagcctgtcgatgtcagcaccgtgcgcaaggcgatcgacgccggtctcgcttatgtgaccgaagaccgcaaacatctcgggctcgtgctcaacgacaacatcctgcacaataccacgctggcaaatctcgccggcgtgtcgaaggccagcatcatcgacgacatcaaggaaatgaaggtggcgagcgatttccgcacgcgtcttcgcattcggtcatcgggcatcttccaggaaacggtcaatctttcgggcggcaaccagcagaaggttgtgctctccaagtggctgttctccaaccctgatgtgctgatcctcgatgaaccgacacgcggcatcgacgttggcgcaaaatacgaaatctacaccatcatcaaccagctcgctgccgatggtaaaggcgttctgatgatctcatcggaaatgcctgaactgctcggcaattgcgaccgcatctacgtcatgaacgaaggccgcatcgtcgctgaattgccgaagggagaggcgagccaggaaagcatcatgcgcgctatcatgcgctcaggggagaagaactcatga

SEQ ID NO: 38509 - protein, 505 aa, Agrobacterium tumefaciens str. C58
MRNITKTFPGVKALENVNLKVKEGEIHALVGENGAGKSTLMKVLSGVYPAGTYEGEIHYEGAVRNFRAINDSEDIGIIIIHQELALVPLLSIAENIFLGNEVASNGVISWQQTFNRTRELLKKVGLKESPETLITDIGVGKQQLVEIAKALSKSVKLLILDEPTASLNESDSEALLNLLMEFRNQGMTSIIITHKLNEVRKVADQITVLRDGMTVKTLDCHQEEISEDVIIRNMVGRDLEDRYPPRDVPIGETILEVKNWNAYHQQHRDRQVLHDINVTVRKGEVVGIAGLMGAGRTEFAMSVFGKSYGHRITGDVLIDGKPVDVSTVRKAIDAGLAYVTEDRKHLGLVLNDNILHNTTLANLAGVSKASIIDDIKEMKVASDFRTRLRIRSSGIFQETVNLSGGNQQKVVLSKWLFSNPDVLILDEPTRGIDVGAKYEIYTIINQLAADGKGVLMISSEMPELLGNCDRIYVMNEGRIVAELPKGEASQESIMRAIMRSGEKNS

SEQ ID NO: 38510 - DNA, 1566 bp, Agrobacterium tumefaciens str. C58
  CDS (1)..(1566): transl_table=11
atgtcgcagggcgcatcgacaattcggggcgatttttcgcctgaggagatggcgcgtgcggagcgttcggtccttctgcgtctcgagaacatcagcaaggaatttccaggcgtaaaagcgctgtcgaacgttcatttcgatctgcgcagcggcgaagtgcatgccgtctgcggcgagaatggcgcgggaaaatcgacactgatgaagatcatcagcggtgtctaccagccgagtgaaggaacgatcctgcacaaaggcgagaaggtgcaatatgcatcgccgctgcaatccgaagcggccggcatcgccatcatccatcaggaactcaaccttgttccgcatctttccgttgccgagaacatttatctggcgcgtgagccgcgccggggttttctcgtggaccgcaagaaactgcgactcgatgccaaacgctgtctcgaccggctgggggtcgatatcaaccccgaccagctggtccgcagtctttccgtcgcgcaatgtcagatggtggaaatcgccaaggcgctctctcttgatgccgaagtgctgatcatggacgagccgacctcctcgctgaccgagcaggaaacccggcttctgttcaaggttatccgcgatctcaaggcctccggcgtcggtatcgtttatatttcccatcgtctcgatgagatggccgagatcgtcgatcgcgtgacgatcctgcgcgacggacgttatatctcaaccgacgatttcgcctcgatcactgttgatgacattgtcacgcgtatggtcgggcgttcgctggaagacaaattccccgaacgcacctcgcgcccgacggatgatattctcttttccgtcgaagggctgacgcgcaatggcgtgttcagtgacgtcagtttttcactgcggcgtggcgaaatcttaggttttgccggacttatgggcgcgggacgaacggaagttgcgcgggcaatcttcggggccgatccgctcgatgcgggtaagatcgttttcaacgggcgcgaactttcgatcggctcgccgcaggacgctatcgaggaaggcattgcctatctctcggaagatcgcaaaagcgatggcctcgccatcaagatgtcggtggcggccaatacgacgctcgccaatctcggcgaggtttccaaccgtttcgggctgatcgatttcaagaagcatgacgatgtggcgaagcgttacgtcgatctgctgaatatccgcactccctcgatcgatcagaccgtgcggctgctttcgggtggcaaccagcagaaaatcatcatcggcaaatggctgttccggcagtcgcgcgtgctgttcttcgacgagccgacgcgcggcatcgatgttggcgcgaagtttgcgatctacaagatcatggacgaactggccgcgcagggcatcggcgtcattctcatcagttcggaactgccggaaattctgggactgacggatcgtattgcggtgttccatcagggccgtatcaccggcgtgctcgaaaccgccaagaccaatcaagaagaaatcatgcggtatgcgtccggttacggccgggccgcgcagtga

SEQ ID NO: 38511 - protein, 521 aa, Agrobacterium tumefaciens str. C58
MSQGASTIRGDFSPEEMARAERSVLLRLENISKEFPGVKALSNVHFDLRSGEVHAVCGENGAGKSTLMKIISGVYQPSEGTILHKGEKVQYASPLQSEAAGIAIIHQELNLVPHLSVAENIYLAREPRRGFLVDRKKLRLDAKRCLDRLGVDINPDQLVRSLSVAQCQMVEIAKALSLDAEVLIMDEPTSSLTEQETRLLFKVIRDLKASGVGIVYISHRLDEMAEIVDRVTILRDGRYISTDDFASITVDDIVTRMVGRSLEDKFPERTSRPTDDILFSVEGLTRNGVFSDVSFSLRRGEILGFAGLMGAGRTEVARAIFGADPLDAGKIVFNGRELSIGSPQDAIEEGIAYLSEDRKSDGLAIKMSVAANTTLANLGEVSNRFGLIDFKKHDDVAKRYVDLLNIRTPSIDQTVRLLSGGNQQKIIIGKWLFRQSRVLFFDEPTRGIDVGAKFAIYKIMDELAAQGIGVILISSELPEILGLTDRIAVFHQGRITGVLETAKTNQEEIMRYASGYGRAAQ

SEQ ID NO: 38512 - DNA, 1617 bp, Agrobacterium tumefaciens str. C58
  CDS (1)..(1617): transl_table=11
ttgggtcggggtgaccaaagaaaacatggacaagtacgacttctgatccgaaccacggagggaggggcaaccctctctctgtgcaccccgtgttttccagccttgcacgaggccattatgactgaaaatctgatcgagctgcgccacatcggtaagcggtttggtggcgtgaaggcgctcgacgacgtatcgctgagcattcgcccgggcgaaatccattgccttgccggtgaaaacggttccggcaaatccaccgtcatcaaaatcatgtccggggtttacacacccgaggacggtgagatcctgatcgacgggaagcctgtcggcaaactcgatccggtaaaatccgttcaccacggtattcaggtgatctatcaggatttttcgctgtttggtaacctgacggtcgccgagaacctggccatcaatacctttctgatggaaggtcgcaaaacggtcgactggcgacatgtccgtgagctggcccaaaaggcgttggaccgcctcggcgtgagcatcgatcttgatacggatgtcgaaaccctgccgacctctggaaagcagatcgtggcgattgcccgtgccgtcatggccgatgcacgcctgatcatcatggatgagccgacgaccgcgctgacgcgccatgaggttgatgccctcttcaagattgtgcgtgatattcaggcgcagggcatcgccgtgctcttcgtcagccacaaaatgcgcgagatgctcgaaatcagcgagcgcctgacagttttccgcaatggcaagaaggtggccgaagggccgatcgccgaattcgatgagccggcaatcacccgcgcgatgacggggcaggagctgaccgcccacagctacaagtgggcaccgcaggaaggtgccgatacaccggtgctggaagtccgcaacctctcggttccggcttccgtggaaaacaccgacctgacgttaaggccaggcgaaatcgtcggtatttcgggtttgatcggttcggggcgtaccgaacttgcgctggcgctgtttggcatgcgccccgattttaccggttcagtgcgcctcgcaggccgcgaggttcacccaaggaccgttcaggagggtattgcctgcggtgtcgcttatgtgccggaggatcgcctgaccgaggggctattcctgacgcaatcgatcgaacggaatatcattgtcacgtcgattgagaaattcgtccgcggtcttttcatcaatcgcaaaaaggcggacgagacgacccgcgaaatgttctcggccatgcagatcgtggcaccaggaccgcacacgccggtcaaccatttgtccggtggcaacgcacagcgcgtcgttctggctcgctggttgttgactggggccaaagtgctgatcctgaacggcccgaccgtcggcgtcgatgtcggttccaaagcacagatccacaccatcatccgcaagctggccgaaaaggaagggctggccgtgctgatgatttccgacgatgtgccggaactggtgcagaactgcaaccgcgtgctggtcatgcatcgcggccgtttcgttgacgagttgtctggagagagcatgaccgaagacgccgttaacgaccggctcaagatgctgaattga

SEQ ID NO: 38513 - protein, 538 aa, Agrobacterium tumefaciens str. C58
MGRGDQRKHGQVRLLIRTTEGGATLSLCTPCFPALHEAIMTENLIELRHIGKRFGGVKALDDVSLSIRPGEIHCLAGENGSGKSTVIKIMSGVYTPEDGEILIDGKPVGKLDPVKSVHHGIQVIYQDFSLFGNLTVAENLAINTFLMEGRKTVDWRHVRELAQKALDRLGVSIDLDTDVETLPTSGKQIVAIARAVMADARLIIMDEPTTALTRHEVDALFKIVRDIQAQGIAVLFVSHKMREMLEISERLTVFRNGKKVAEGPIAEFDEPAITRAMTGQELTAHSYKWAPQEGADTPVLEVRNLSVPASVENTDLTLRPGEIVGISGLIGSGRTELALALFGMRPDFTGSVRLAGREVHPRTVQEGIACGVAYVPEDRLTEGLFLTQSIERNIIVTSIEKFVRGLFINRKKADETTREMFSAMQIVAPGPHTPVNHLSGGNAQRVVLARWLLTGAKVLILNGPTVGVDVGSKAQIHTIIRKLAEKEGLAVLMISDDVPELVQNCNRVLVMHRGRFVDELSGESMTEDAVNDRLKMLN

SEQ ID NO: 38514 - DNA, 1545 bp, Agrobacterium tumefaciens str. C58
  CDS (1)..(1545): transl_table=11
atgccgagcgccacgtctgcgatgctttcgcggcgaaaggagagatacgccatcatgagcgcagaaccgctcctgtcccttaaaaatgtcaaggtcaccttcggtggcgtacgcgccctgaagggtgtttccttcgaggtcaatccgggtgaagtgcattgccttgccggcgaaaacggctgcggcaaaagcaccgtgatcaaggtcatcaccggtgtctataagccggagagcgatgcggaactctatttcgatggcaaacccatcgctgctatgaccccgacacttgcgcaatcgctgggcattcaggtgatctggcaggatctggcgctgttcgatgagatgacggtggccgaaaatatcggtttccaatatgcggtgaacggcagatttgggctggtcgacaagcgcgctatcaaaaatgccgccgaaaaggcgctggcacggctcggtgtctcgttcgatctcgacaggccgctcaaggaactgccgattgcccaacgccagatcgtggcgattgcccgtgcgctggttggcgaagcccgtctcgtttttatggatgaacccaccgcatctctgacgcagtcggagaccgattacctcatcgatatcgtccgcaacctctcggcgtcaggtgtcgctgtcgtgttcgtttcgcatcgtctggcggaagtgcttgagatatcggatcgcatcaccgttttgcgggatggatcgcttgtcggcgttttcccggtcgaaggcatgacccagtctcgcgtgaccgagttgatgaccggccgcaacttcgatagcgccgtcattgccgccgatcacgacgacaagcccgtggttctctcggtgcgaggcctgacacgggccggcgagttcgaggatgtttccttcgatctgcggcgcggggagacgttggggatcaccggtcttctcggcgcgggccgaaccgaacttgccctgacgctgttcggcatgcaccggccgcaatcgggtgaagtccttatcgatggaaagaaggtggatttccattccaaccgggatgcgatccgggttggtgtcgcctatctctccgaagaccggctgtcgctcggtctgaaccagccgcagtcgattgccgacaatctcgtcatggcctcccttgataagttgttgagtggcggtcttatctccacgtcgaaaaaggcggatgtcgtttcccgctggatttcagcgctcggcgtcaagatcggcctgccggaagatccgatccgcacgctctctggcggcaaccagcagcgcgtggcgattgccaaatggctggcgatcgggccgaaaattctcatcctcgatgcgccgaccgtgggtgtcgacgtcggcgcccgcgccggcatctttgaaatcgtccgcaagctcgccgcagagggcctgtcgatcatcgtcatctccgatgaggcgccggaagtttattttaatacagacagggtcatccacatggtcgaaggccggttccacgccacctatgatccgcgacgcctgtcgctgaccgaactggaggccgccatctatgcgtag

SEQ ID NO: 38515 - protein, 514 aa, Agrobacterium tumefaciens str. C58
MPSATSAMLSRRKERYAIMSAEPLLSLKNVKVTFGGVRALKGVSFEVNPGEVHCLAGENGCGKSTVIKVITGVYKPESDAELYFDGKPIAAMTPTLAQSLGIQVIWQDLALFDEMTVAENIGFQYAVNGRFGLVDKRAIKNAAEKALARLGVSFDLDRPLKELPIAQRQIVAIARALVGEARLVFMDEPTASLTQSETDYLIDIVRNLSASGVAVVFVSHRLAEVLEISDRITVLRDGSLVGVFPVEGMTQSRVTELMTGRNFDSAVIAADHDDKPVVLSVRGLTRAGEFEDVSFDLRRGETLGITGLLGAGRTELALTLFGMHRPQSGEVLIDGKKVDFHSNRDAIRVGVAYLSEDRLSLGLNQPQSIADNLVMASLDKLLSGGLISTSKKADVVSRWISALGVKIGLPEDPIRTLSGGNQQRVAIAKWLAIGPKILILDAPTVGVDVGARAGIFEIVRKLAAEGLSIIVISDEAPEVYFNTDRVIHMVEGRFHATYDPRRLSLTELEAAIYA

SEQ ID NO: 38516 - DNA, 1521 bp, Agrobacterium tumefaciens str. C58
  CDS (1)..(1521): transl_table=11
gtgacaagcattattcggggacatgcgatggcgaacgctctggaagcggccggcataacgaagaattttggcgccgtgcgtgcgctttccgccggcaggctgaccgttggtcgcggtgaaattcacgcgctgctaggcgccaatggctgcggcaagagcacgctttgcaagatcgttgcgggcgcggtggctccgaccagcggcaccatcaggttcaatggcgaagacgtgcgcttcaagagcccgcgggatgccgaaaatgccggtatcgccctgttttatcaggagctgagcctcattccgcagctctccgtcgctgacaatatctttctcggccgcgagccgaagcgcggcatctttgttgatggcaaggcgcttaaggcggaagcagcaagactgatcgcgctgtttgatggtgtggcaggcgagggactggagccggatgcgatcgttggcaatctgccgcccgatcagcgccagctcgtcgaaattctcaaggtcttcgcccagaatgccagcctgatgatcatggatgaggcgacggcggcgctcgatggccgccagtcccagcgctttttcgagatactccgggccaagaaggccgatggtgtctccaccattatgatttcccatcgtctcgacgaggtctttgccgtctgcgaccgcattaccgtgatgcgcaacggtgcgaccatttccgaactcgacaccgctgccaccacccgtgaagccgtggtgcacgatatggtcggtgatgtccgcgccgcacccgcccgcgagcaggggcgggccgccgcagttcccagcctcaaggtaactgacgttgcgggcgacggcgtgcgcggcgtctctctagaagcttatccgggcgaaatcgtcggtctggccggcctgcaggggcagggacaatcggccttgctgagaggcctcttcggcgccagtccgtttgcaaccgggcaagtccggttcgagggccgcgaaatcatcgtcggcaagccttcgcaggcggttcacaacggttttgcttatgtctcgggtgaccgtgggcgcgacgcctcgcttcagggccggtcgatcttcgaaaatctcgtcgccgcgctgatggtgcgcgaaaagatgcggctggttcggccggcaacgctgaagccgcgggtgcagaaggtcgcggatgacatgaagacgaaatttgccggcatggacatgccgatcggcacgctttcgggtggcaaccagcagaagatcttcatttcccgctggctcgccacttcgcccaagctgctgctgctcgatgatccgaccaagggtatcgatctcggcgccaaggccgatctcttcgcgctgatgcggcagcaggccgatgccggtgcgaccattcttctctattcctcggaagatgcggaaatcctcgaatatgccgaccgcattcttgtcttcaacggcggacgcatctctgcggaactgaccggagccgacatgacatccgtcaacatgacccgcgccgcctatggagacgccgcatga

SEQ ID NO: 38517 - protein, 506 aa, Agrobacterium tumefaciens str. C58
MTSIIRGHAMANALEAAGITKNFGAVRALSAGRLTVGRGEIHALLGANGCGKSTLCKIVAGAVAPTSGTIRFNGEDVRFKSPRDAENAGIALFYQELSLIPQLSVADNIFLGREPKRGIFVDGKALKAEAARLIALFDGVAGEGLEPDAIVGNLPPDQRQLVEILKVFAQNASLMIMDEATAALDGRQSQRFFEILRAKKADGVSTIMISHRLDEVFAVCDRITVMRNGATISELDTAATTREAVVHDMVGDVRAAPAREQGRAAAVPSLKVTDVAGDGVRGVSLEAYPGEIVGLAGLQGQGQSALLRGLFGASPFATGQVRFEGREIIVGKPSQAVHNGFAYVSGDRGRDASLQGRSIFENLVAALMVREKMRLVRPATLKPRVQKVADDMKTKFAGMDMPIGTLSGGNQQKIFISRWLATSPKLLLLDDPTKGIDLGAKADLFALMRQQADAGATILLYSSEDAEILEYADRILVFNGGRISAELTGADMTSVNMTRAAYGDAA

SEQ ID NO: 38518 - DNA, 1419 bp, Agrobacterium tumefaciens str. C58
  CDS (1)..(1419): transl_table=11
gtgcatgcgcttctgggcgaaaacggtgccggcaagtcgactttgatgaagatcctatgcggcattttgcagccatcggagggaacgatccgcattgacggcaaggatcgccgcttcgccaattatgacgaagcgattgccgctggcgtcggcatcgtgtttcaggaattcagcctgatcccctatctcaatgccgttgaaaacatgttcctcgcccgcgaaattcgcgggccgctgcgccttttgaacaagggcgcgatgcgcaagcgcgcggccgaaatcatgggccggctggccgtggatgtgccgctcgacgtgccggtgcaccgcctgtcggttgcccagcagcaatttgtcgaaatcgccaaggcattgtcgctggatgcccgcattctcgtgctcgacgagccgaccgcgacgctcacgccctccgagacagagcacctgttcaatgtcatgcgcgagctgcgccgtcagggcgtggcgatcatcttcatttcgcatcacctcgatgaaatattcgagatctgcgaccgcatcaccgttcttcgcgatggcgagttgattggctcctgcctgacgtcggaggtcgataatgaccgtctggtggagatgatggtcggccggcgcatcgaagccagcttcccgccgaagccgcagatcgatccttccgccgcaaaggtgatcgaagtcgaagagctgcaattgaagaagggcggccctgtctcgcgcttttcgctgcgcaagggtgaaatcctcggctttgccgggctcgtcggctcgggccgcacggaaacggtgctggccatgctcggtgcgcattccgcttcgcgccgcaagatcaagcttgatggtgtggatacgcgtttgtccggccccgatgatgcgctgatgcgcggcatcggcctgctgccggaaagccgcaaggaggaggggctgatcaccagcttctcgatcctgcagaatatttcgctgaacaattatcgtaagtaccgcaaggcccactggttcctcgacctcaagaaggaactggagcacacgacgaaggccatggcgcaggtgcaggtcaaggcgcagggcccctatgcccgtgtcgacacgctgtccggcggcaaccagcagaagatcgttatcgcccgctggctgaaccatgacatgcgcgtgctgatcttcgacgagccgacacgcggcatcgacgttggcgccaaggcagaaatctattcgctgatgcgcgaatttgccgccaggggtcattcgatcatcatgatctcctcggagttgccggaagtgatcggcatgtccgacagggtctgcgtcttccgctccggcggcattgtcgccacggtcgagggcgaagacatcaattcagaaacaataatgacaaacgccaccaccgggagagttgaacatgtcgcttga

SEQ ID NO: 38519 - protein, 472 aa, Agrobacterium tumefaciens str. C58
MHALLGENGAGKSTLMKILCGILQPSEGTIRIDGKDRRFANYDEAIAAGVGIVFQEFSLIPYLNAVENMFLAREIRGPLRLLNKGAMRKRAAEIMGRLAVDVPLDVPVHRLSVAQQQFVEIAKALSLDARILVLDEPTATLTPSETEHLFNVMRELRRQGVAIIFISHHLDEIFEICDRITVLRDGELIGSCLTSEVDNDRLVEMMVGRRIEASFPPKPQIDPSAAKVIEVEELQLKKGGPVSRFSLRKGEILGFAGLVGSGRTETVLAMLGAHSASRRKIKLDGVDTRLSGPDDALMRGIGLLPESRKEEGLITSFSILQNISLNNYRKYRKAHWFLDLKKELEHTTKAMAQVQVKAQGPYARVDTLSGGNQQKIVIARWLNHDMRVLIFDEPTRGIDVGAKAEIYSLMREFAARGHSIIMISSELPEVIGMSDRVCVFRSGGIVATVEGEDINSETIMTNATTGRVEHVA

SEQ ID NO: 38520 - DNA, 1518 bp, Agrobacterium tumefaciens str. C58
  CDS (1)..(1518): transl_table=11
atgctctgggaggagaatatgacggcaacggcgagtgcgctgcgcatgcgggggatcagcaagatatttcccggtgtaaaagcgctgtccaacgtcaatttcacagtcgaatacggtcgcatccacgccgtcgtcggtgaaaacggcgctggtaaatcgacgctgatgaaaatcctgagcggcagctatgctcccaccaccggtacgacggaaatcgcgggcgtggaggtgcagatgcgccggccggccgacgcccagaaactcggcatccgcatggtgcatcaggagctgaacctcgttccggaccttaccgttgcggaaaatatctatctcggccgcatgccgcaccgccgcttcctggtcgacaggcaggccatgctgcgcaaggcggctgcggttttgaaagaactggaagcggcgatcgacccgaaggcgcggctcggtgatctgccgatcagccagcagcagctcgtcgagatcgccaaatcctattccgccgatccgcgtatcatcgtcctggacgagccgacatccagcctgagcgagcatgagacaacagccctgttttccatccttcgcaagatgaaaagccagggtatcgccatcatctatatcagccatcggctgaaagaagtgcttgatatcgctgatgacgtgaccatcctgcgcgatggcagcatgatcgacacccgaccggccgccggcatcaccgccgccgaaatgatccgcctcatggtcggtcgcgaagttgccaatgtctttcccaaaacaccatcgaagatcggcccggtggcgttcaaggtcacgggactgagcgacggcgaaaaattccacgacgtcggtttcgatgtgcggtcaggcgaaattctcggcctgaccggcctggtcggcgccggccgcaccgaggtcgcccaggcgattttcggccttgcgccgctggccacgggcaggatcgagataaacggcaaggccgttacgattggttcaccggcagcggccgttaaggcgggcgtcgcctatgttcccgaagatcggaaaggcgatggcatcgtgccgtccatgagcgtgcgcgaaaacatcagcctgccggtgctgcgacgtctgagccgtctcgggcgcatcggcatgagtagggatcggggactggcggcgaaatatacgcgcgatttttccatcgtcccgcccgatccggagcggcgcatcaacctgctttcgggcggcaatcagcagaaggcgatcatttcacgctggctggcggcgggaccgaaggtgttgatcctcgacgaaccgacacgcggcgtcgatgtcggcgcgaaggcggaaatccaccgcatcatcggcgaactcgtggccggtggcatggcggtggttatgatctcgtcggaactgcctgaggtgatgggggtctgcgaccgggtggtggtcatgcgcgatgggcgcgcctcctccccgattgcacgcggagacttgacggaagagcgcatcatggcgcttgcaacaggggaagaaccagcgtga

SEQ ID NO: 38521 - protein, 505 aa, Agrobacterium tumefaciens str. C58
MLWEENMTATASALRMRGISKIFPGVKALSNVNFTVEYGRIHAVVGENGAGKSTLMKILSGSYAPTTGTTEIAGVEVQMRRPADAQKLGIRMVHQELNLVPDLTVAENIYLGRMPHRRFLVDRQAMLRKAAAVLKELEAAIDPKARLGDLPISQQQLVEIAKSYSADPRIIVLDEPTSSLSEHETTALFSILRKMKSQGIAIIYISHRLKEVLDIADDVTILRDGSMIDTRPAAGITAAEMIRLMVGREVANVFPKTPSKIGPVAFKVTGLSDGEKFHDVGFDVRSGEILGLTGLVGAGRTEVAQAIFGLAPLATGRIEINGKAVTIGSPAAAVKAGVAYVPEDRKGDGIVPSMSVRENISLPVLRRLSRLGRIGMSRDRGLAAKYTRDFSIVPPDPERRINLLSGGNQQKAIISRWLAAGPKVLILDEPTRGVDVGAKAEIHRIIGELVAGGMAVVMISSELPEVMGVCDRVVVMRDGRASSPIARGDLTEERIMALATGEEPA

SEQ ID NO: 38522 - DNA, 1536 bp, Agrobacterium tumefaciens str. C58
  CDS (1)..(1536): transl_table=11
atgatgcgtgctgaaacccaaacaataaaaatgaccgaggcttccagccccacgcccgttctggaaatgcgcggcatcagccagatattccccggcgtcaaagcgcttgatggcgtcgatatcgcactataccccggcaaggtcacggcgctgatcggcgagaacggtgcgggtaaatccacgctcgtcaaaatccttaccggcatctaccgcccgaacgagggcgaaatcctgctggatggcaaggccgtccacttccacagcgcacaggatgccatcgatgccggcgtcaccgccattcatcaggaaaccgtgctgttcgacgagctttcggtcggtgagaacatcttcctcggccatgcgccgaagggtcgtttcggcctgattgactggaagaccatcaacgagcgggccagaattctgctggaacagctcgaaagcaccatcgatcctaccatccggttgaaagatctttcgatcgcccagcgccatctggtggccatcgcccgtgcgttgtcagtcgaggcgcgcatcgtcatcatggacgaaccgacagccgcgctttcccgcaaggagatcgacgatctcttccgcatcgtcgagaacctgaagcggcagggcaaggcgatcctcttcatcagccacaagttcgatgaagtgtatgaaatcgccgagaattatgccgtattccgtgacggaaaaatggttggcgccggcacgcttgccaccaccccgcaagatgaaatcgtgcggctgatggttggccgcgacgtgacgaatgccttcccgaagcaggcggtcacccttggtccaacggttctttcggtgcgtgattattcgcaccagaccgaattccgcgatatttccctcgatcttcgcaagggtgaaattctcggcctttacgggctgatcggcgccgggcgctccgaactttgccaatcgctgttcggcatcacccgcccggcttcgggagaggtgacgctggatggccagccgctcaccatccgctcgccggaagatgcgatccgcgccgggatcgtatacgtgccggaagagcgtggccgccacgggctggcactcgatatgccgatctatcagaacatgtcgctgccatccctcacccgcacgtcgcgcaaggggtttctcactgccgccaatgaattcgcgctagcgcgcaaatatgccgcgcggctcgatctgcgcgctgccgcgctttcggtgcccgttggcacgctttcgggcggcaaccagcagaaggtggtgatcggcaagtggctggccacgaagccgaaggtcatcattctcgatgagccgaccaagggcatcgatatcggctccaaggccgccgtgcatggtttcatcagcgagcttgcggcagagggcctgtcgatcatcatgatttcatccgaacttcccgaaatcctcggcatgtccgaccgcgccatcgtcatgcgcgaaggcctgatggcgggccagttcgaacgcgccgaattttctccggaaaagctggtgcgcgctgccaccggcaatgcctga

SEQ ID NO: 38523 - protein, 511 aa, Agrobacterium tumefaciens str. C58
MMRAETQTIKMTEASSPTPVLEMRGISQIFPGVKALDGVDIALYPGKVTALIGENGAGKSTLVKILTGIYRPNEGEILLDGKAVHFHSAQDAIDAGVTAIHQETVLFDELSVGENIFLGHAPKGRFGLIDWKTINERARILLEQLESTIDPTIRLKDLSIAQRHLVAIARALSVEARIVIMDEPTAALSRKEIDDLFRIVENLKRQGKAILFISHKFDEVYEIAENYAVFRDGKMVGAGTLATTPQDEIVRLMVGRDVTNAFPKQAVTLGPTVLSVRDYSHQTEFRDISLDLRKGEILGLYGLIGAGRSELCQSLFGITRPASGEVTLDGQPLTIRSPEDAIRAGIVYVPEERGRHGLALDMPIYQNMSLPSLTRTSRKGFLTAANEFALARKYAARLDLRAAALSVPVGTLSGGNQQKVVIGKWLATKPKVIILDEPTKGIDIGSKAAVHGFISELAAEGLSIIMISSELPEILGMSDRAIVMREGLMAGQFERAEFSPEKLVRAATGNA

SEQ ID NO: 38524 - DNA, 1587 bp, Agrobacterium tumefaciens str. C58
  CDS (1)..(1587): transl_table=11
atggcgagcctgtcgccggtatttttgtctattgtggaggatgagatggtcgtcagtccatcgacaatggccgccgtgcgcgccagcggagccgtgccgaatgcggaatttcttctcgcggcggatggcatacgcaaggaatttccaggcgttgtggcgctcgacgatgtgcagttccacctcaagcgcggtaccgtgcatgcgctgatgggtgagaatggcgccggcaaatcgacgcttatgaagattctcgccggcatctaccagccggataacggagaaatccgcctgaagggcgcgccgatacgtctcgattccccgctcgacgcgctggaaaacggcattgccatgatccatcaggaactgaacctgatggcttatatgacggtagccgaaaatatctggattcgccgcgagccgaaaaaccggctgggcttcatcgatcatggcgaaatgtatcgccgcacggaaacgctgctggaacggttgggcatcgatctcgatccggaaacgcgtgtcggcgagctttccgtcgccagccgtcagatggtcgaaatcgccaaggcggtttcctacaattcagacgttctcatcatggatgagccgacatcggctttgacggagcgcgaggtcgagcatctcttccgcatcatccgcgatctgagggaacgaggtatcggcatcgtttacatcactcacaagatgaacgagctgttcgagatcgccgacgagttctccgttttccgcgacggcaaatatatcggcacccacgcgtccaccgatgtgacgcgtgacgacatcatccgcatgatggtaggccgagaaatcacccagatgttcccgaaggaagaggttccgatcggtgacgtagtgctgtcggtcaagaacctgaatctggacggtgtcttccatgacgtctctttcgatgtccgcgccggtgaaattctcggcgtcgcgggcctcgtcggctccggacgctccaatgtggcggaaacggtatttggcgtgacgcccgcttcctcgggtacgatttcgatcgacggcaagccggtttcgatcgacagcccgacaacggctatcagtcaccgcatggcgttcctgacggaggaccgcaaggataccgggtgcctgctcatcctcaatattctcgagaatatgcagatcgcggtgctgcaggacaaatatgtcgccaacggcttcgtgcaggaaaacgcgctgtcggaagcctgcgaagaaatgtgccgcaagctccgcgtcaagacgccgcatctttacgagcgcatcgagaacctgtcaggcggcaaccagcagaaggtactgatcggacgctggatgctgaccaagccgcgcattctcattctcgatgaaccgacgcgcggcattgatgtcggggccaaggcggaaattcacaagctggtttgcgagatggcgcgccagggcgtcgccgtcattatgatttcctccgaaatgccggaggttctgggtatgagcgaccgtgtcatggtcatgcatgaaggtcgggtgacgggtttccttgctagaagtgaagccacgcaggtgaaggtgatggatctcgcatcgcggtga

SEQ ID NO: 38525 - protein, 528 aa, Agrobacterium tumefaciens str. C58
MASLSPVFLSIVEDEMVVSPSTMAAVRASGAVPNAEFLLAADGIRKEFPGVVALDDVQFHLKRGTVHALMGENGAGKSTLMKILAGIYQPDNGEIRLKGAPIRLDSPLDALENGIAMIHQELNLMAYMTVAENIWIRREPKNRLGFIDHGEMYRRTETLLERLGIDLDPETRVGELSVASRQMVEIAKAVSYNSDVLIMDEPTSALTEREVEHLFRIIRDLRERGIGIVYITHKMNELFEIADEFSVFRDGKYIGTHASTDVTRDDIIRMMVGREITQMFPKEEVPIGDVVLSVKNLNLDGVFHDVSFDVRAGEILGVAGLVGSGRSNVAETVFGVTPASSGTISIDGKPVSIDSPTTAISHRMAFLTEDRKDTGCLLILNILENMQIAVLQDKYVANGFVQENALSEACEEMCRKLRVKTPHLYERIENLSGGNQQKVLIGRWMLTKPRILILDEPTRGIDVGAKAEIHKLVCEMARQGVAVIMISSEMPEVLGMSDRVMVMHEGRVTGFLARSEATQVKVMDLASR

SEQ ID NO: 38526 - DNA, 1554 bp, Sinorhizobium meliloti 1021
  CDS (1)..(1554): transl_table=11
atgatagggcttcaagaggtcagccatcgccatgacgaacaggtgagggcggcgggcggccgtccggttccgaagggcgcacccatcctggaactccgcagcctgcagaaaaactatggcgcggtcgaggctctgaagcccgcgacgatgaccttcctatccggcgaaatccacgcgatcgtcggcgagaacggtgccggcaaatcgacgctgatcaagctcctgaccggggtcattgcccgcagtgccggagaaatccgctggtgcggcgaaactgtcgacctcgccacgcccaacgaagcgatcgcccgcggcatcaatgcggttcaccaggaggtggtgctttgcccgcatctgagcgttgcggcgaacatgttcctgggcgacgagatgaaccgccgcgggctgatgcgcaagcgcgcgatgaccggcgcggcccagggcgtgcttgacgatctcggcttcaatctgcccgccaatgccgaactcggcagcctgacgatcggccagcagcagctggtcgccactgctcgggcggccatgcgcggcacgcagttcctcatcttcgacgagcccacggcctatctcacgcgacaggaatcggcacagcttttccgcctgatccgccggctgcagggcgagggcgtcacgatcgtctatatcagccacaggctggaggaggtgttcgagctcgcggaccgcgtctcggtgcttcgcgacggcacgcatgtcggcacgcgcgcgatttccgagacgaacgaggccgaactcatcactttgatgatcaaccgcacgatcgaacagatctaccacaaggaacgtttcgaacagggcgagatgatcgtcgagacgcgcgggctctccggtccaggtttccgcgacatatcgctctcggtcagggcgggcgagatcgtcgggctctacggtctgatcggcgccggccgcagcgagttcgcgctcggcctttacgggcgcaatccggtgagcgccggagagatcttctggcagggccgcaaggtcgcgataggcaatgagcggaaggccatggacctcgggatcgcgctcgcgccggagagccgccgcgatcagggcctgtgcctcaacctgccgatcggcgtcaatatcaacctgcctgttttcaaaaggctgacgcgcggcttgacgatcaaccgcgcgcaggaggcctccaatgccgaacgtcagatcagggatctgaacatcaagacgccgtcgcggcgggtgcttgcttccgccatgtccggcggcaaccagcagaaaatcgttatcggcagatggctgagccacggagcgaagctcttcatcttcgacgagccgaccgtgggcgtcgatgtcggcaccaaggcggaaatctaccggctgtttgcgcggcttctggagaagggggcagggatcatcctgatctcctcctacctgccggaggtctatgaactggccgatcgcctgcatgtgttccggcaggggcggcttgtggcaagccacgactaccgggccgcaagccatgaggaagtgctggcgcaggcgatcaatgcctga

SEQ ID NO: 38527 - protein, 517 aa, Sinorhizobium meliloti 1021
MIGLQEVSHRHDEQVRAAGGRPVPKGAPILELRSLQKNYGAVEALKPATMTFLSGEIHAIVGENGAGKSTLIKLLTGVIARSAGEIRWCGETVDLATPNEAIARGINAVHQEVVLCPHLSVAANMFLGDEMNRRGLMRKRAMTGAAQGVLDDLGFNLPANAELGSLTIGQQQLVATARAAMRGTQFLIFDEPTAYLTRQESAQLFRLIRRLQGEGVTIVYISHRLEEVFELADRVSVLRDGTHVGTRAISETNEAELITLMINRTIEQIYHKERFEQGEMIVETRGLSGPGFRDISLSVRAGEIVGLYGLIGAGRSEFALGLYGRNPVSAGEIFWQGRKVAIGNERKAMDLGIALAPESRRDQGLCLNLPIGVNINLPVFKRLTRGLTINRAQEASNAERQIRDLNIKTPSRRVLASAMSGGNQQKIVIGRWLSHGAKLFIFDEPTVGVDVGTKAEIYRLFARLLEKGAGIILISSYLPEVYELADRLHVFRQGRLVASHDYRAASHEEVLAQAINA

SEQ ID NO: 38528 - DNA, 1512 bp, Sinorhizobium meliloti 1021
  CDS (1)..(1512): transl_table=11
atgaagcccgccattgcgcttgaaggcatatcgaagtcctttccgggcgtgcgcgctctttccgatgtctcgctcgctctctatcccggctcggtgacggcgctcgtcggcgaaaacggcgccggcaagtcgacgctcgtcaagatactgaccggcatctatcagcctgatgcgggcaccatccggctcggcgacacggagaccacctttccgaccgcccttgcggcgtcccgcgccggggtcacggcgattcatcaggagacggtgctcttcgacgagctctccgtcgcggaaaacatctttctcggccacgcaccgcgcaaccgcttcggcctcatcgactggaagcagctcaacgccgacgctcaggccctgttaggccgcgcgggcgccgatttcgacccgacgatccgcctgcgcgatctcggcatcgccaagaagcatctggtcgcgatcgcccgggcgctctcggtcgatgcgcgcgtcgtcatcatggacgagccgacggccgcgctgtcgcacaaggaaattcacgagctctacgatctgatcgaacggctcaaggccgacggcaaggctgtcctgttcatcagccacaaattcgatgagatcttccgcatcgcagaccgctataccgtctttcgcgacggggcgatgatcggcgaagggctgatcgccgacgtcagccaggacgatctcgtccgcatgatggtcggccgcgccgtcggctccgtctatccgaagaaggaggtgaccatcggtcagccggtgcttaccgtttccggttatcgccacccgaccgaattcgaggacatcaacttcgaactcaggcgcggcgagatcctgggtttctatggcctggtcggcgccgggcgttcggaattcatgcagtcgctgatcggcatcacccggccgtccgccggtgccgtgaagctcgatggcgaggtgctggtcatccgcagcccggcggaggcgatccgcgcaggcatcgtctatgtgccggaagagcgcggacggcagggggcgatcatcggcatgccgatcttccagaatgtgacgctgccctcgctttcacacacctcgcgctcgggcttcctgcggcttgccgaggaattcgcgctggcgcgcgaatacacctcccgcctcgatctgcgggccgccgcgctcgatcaggacgtcggcacgctttccggcggcaaccagcagaaggtggtcatcgccaagtggctcgcgacccggccgaaggtcatcatcctcgacgagccgaccaagggcatcgacatcggctccaaggccgccgttcatgccttcatgagcgagcttgcggcgcaaggcttgagcgtcatcatggtgtcctcggaaattcccgagatcatggggatgtctgaccgcgtcatcgtcatgcgcgaggggcgcgtcgccggaagatacgagcggtctgaactgaccgctgagaagctggtgcgggccgccgcaggcatcgaaacgcaagccgatgggagggccgcatga

SEQ ID NO: 38529 - protein, 503 aa, Sinorhizobium meliloti 1021
MKPAIALEGISKSFPGVRALSDVSLALYPGSVTALVGENGAGKSTLVKILTGIYQPDAGTIRLGDTETTFPTALAASRAGVTAIHQETVLFDELSVAENIFLGHAPRNRFGLIDWKQLNADAQALLGRAGADFDPTIRLRDLGIAKKHLVAIARALSVDARVVIMDEPTAALSHKEIHELYDLIERLKADGKAVLFISHKFDEIFRIADRYTVFRDGAMIGEGLIADVSQDDLVRMMVGRAVGSVYPKKEVTIGQPVLTVSGYRHPTEFEDINFELRRGEILGFYGLVGAGRSEFMQSLIGITRPSAGAVKLDGEVLVIRSPAEAIRAGIVYVPEERGRQGAIIGMPIFQNVTLPSLSHTSRSGFLRLAEEFALAREYTSRLDLRAAALDQDVGTLSGGNQQKVVIAKWLATRPKVIILDEPTKGIDIGSKAAVHAFMSELAAQGLSVIMVSSEIPEIMGMSDRVIVMREGRVAGRYERSELTAEKLVRAAAGIETQADGRAA

SEQ ID NO: 38530 - DNA, 1485 bp, Sinorhizobium meliloti 1021
  CDS (1)..(1485): transl_table=11
atggaccagcacgaaatccttctgaagctcgagaatatcgagaagcgctttcccggtgtcgtggcgttgaagtcgatctcgctagaggtgcgcgcgggcgaggtgcaggtgcttctcggcgaaaacggcgcgggcaagtcgacgctgatgaagattctcgccggcgaacatgcgccgacgggcggggaaatcgtggtgggtggccgcaaggtttcggcgctgacgccgacgcttgccaccgaactcggcatcggcctcgtgcatcaggaactgagtcttgtcccggcgctcagcgtcgccgaaaacatcctgatcggccggatgccgcgcaatgcgttcggcaggataaactggggcaaggcctacgaggacgcgcgccgcgctctcgaggcgctcggcgtttccatcgatccgacagccgaagtgcgcacgctcgaagtggccgagcagcaattgatcgagattacccgcgtcctggagcgcggcccgcgcatccttctgctcgatgagcccacctcggcagtctcggataatgagcgcagccggctcttcgatgtcattcgtcgcctgaaacagcgcggccacggcatcatctacatttcccatcacctctcggaaattccgatgatcgccgatcgcgtcacggtgctgcgcgacggcctcgtcgtggagacgctgcctgccgacgaggcggacgaggcgacggtgatcaggctgatggtcggccgcaggctggaggaacagtttcccaaggaaacggtggaactcggggcgcccgtgcttgccgtcgaaaacctcgcctccggccgcacgctcaaggatctttccttcaccctccgccgtggcgaaatcctcggcatctacggcctgatgggcgcgggacaggccgagatcgccaacgccctgttcggcctgcaggcggtcaagaccggttcgatcgaggtcgggggcaagcgcgcggatttccggcattcctcggatgcgatcgcggcggggctcggtctgatctcccgcgaccgccggcagagcctcgtgccgatgcagccggtcggtcccaatctcagcctctcctggctttccgggaagtcgcttctgtcgcggctcgatcttacgcgcgagcgcgaggagggcagccgctacatttccgatctgcgcatccgtccggcttccaccacgcacaagctgttcttcttcagcggcggcaaccagcagaaggtcattctggcgcggtggatgtcgagcggcgcgcggatcctgattttcgacgagccgacccgcggcatcgatgtcggcgccaaggcagaagtgttcgcggtgatgagccggctggtgtcggaaggcgcgtcaattctgatgatctcctcggagctcaacgaactgatcggcatggcggaccgcgtgctcgtcatgcggagcggacgcctctcggcggagctgccgagggaagagatatcgcagcagaacctgctgcgatatgcaagctag

SEQ ID NO: 38531 - protein, 494 aa, Sinorhizobium meliloti 1021
MDQHEILLKLENIEKRFPGVVALKSISLEVRAGEVQVLLGENGAGKSTLMKILAGEHAPTGGEIVVGGRKVSALTPTLATELGIGLVHQELSLVPALSVAENILIGRMPRNAFGRINWGKAYEDARRALEALGVSIDPTAEVRTLEVAEQQLIEITRVLERGPRILLLDEPTSAVSDNERSRLFDVIRRLKQRGHGIIYISHHLSEIPMIADRVTVLRDGLVVETLPADEADEATVIRLMVGRRLEEQFPKETVELGAPVLAVENLASGRTLKDLSFTLRRGEILGIYGLMGAGQAEIANALFGLQAVKTGSIEVGGKRADFRHSSDAIAAGLGLISRDRRQSLVPMQPVGPNLSLSWLSGKSLLSRLDLTREREEGSRYISDLRIRPASTTHKLFFFSGGNQQKVILARWMSSGARILIFDEPTRGIDVGAKAEVFAVMSRLVSEGASILMISSELNELIGMADRVLVMRSGRLSAELPREEISQQNLLRYAS

SEQ ID NO: 38532 - DNA, 1506 bp, Sinorhizobium meliloti 1021
  CDS (1)..(1506): transl_table=11
atgaccgtacttgtcagtctgtccggcatcagcaagaactttagcggagtacaggccctgaagggcgtcgacttcgacctgagggccggcgaagtccatgcgctggtcggtgagaacggcgcgggaaaatccacactgatgcgcgtgcttgccggcgaaatgaagccgacctccgggaccgtcagcattcacggcgagacgatgcagcactccggcccgcggggcgccgccggccggggtatttcggttatccatcaggaactggcgctggcgcccgacctgaccgtcgcggagaacatctttctcgggcgcctgccgcgcatcgtcaatcaccgccggctgcgcaaggcagccagcgaaatcctcgaacgtctcggcttcgacatcgaccccgccatccacgccggacgcctgacagtcgcccaccagcaggtcgtggagatcgccaaggcactctccaaccgggcgcgcatcatcgtcttcgacgagccgaccgcggtgcttgccaacaccgatgccgagcgcctgctcgcgatcatccgcgagttgcgcgcgggcggtaccggcgccgtctacatctcccaccgtctgaacgaggtcttcgacctttcagaccgcatcaccgtcatgaaggacggctcgcatgtggaaacgctggagacctccgcaacggatgtcgacgcggtgatcgcacgcatggtcgggcggcagatgtccgcgctttttccatccaaggccgggcgtgtgccgggcgaggtggtcgtccgcgtgcgcaacgtttcgcgcggccgcaaggtccgcgacgtcagtttctcggtccgtgccggcgaggtcgtcggcctcgggggtctcgtcggttccggccgtaccgaagtcgcccgcctcgtcttcggcgccgacaagatggattcgggcactgtggaactcaacggcaaaccgctccatctctcctcaccgcgcgaggccgtgcgcgcccgcatcggcctcgttccggaagaccgcaagcagcagggcgtcatcctcgatgcgccgatccggatcaacacgacgcttgccaagatccgcagcatatcccgtctcggcttcctcgacgcgggcaaggagcggcaggtcgccgtggcgcttggcgccgagatgcgcctcaaggcgtcgagcgtcgacgcgccggtttcgagtctttccggcggcaaccagcagaaagtggcgcttgccaaatggtttcacgccgattgcgacctgctcatactcgacgaaccgacgcgcggcgtcgacgtcggagcgaaaggcgaaatctacaatctgatcaatgacctcgccaaagcggggaaagcaatcctcgttatttcgtccgagcatcaggaactgttcggcatctgcgaccgcgttctcgtgatggcggaaggggctatcgtcggcgaactcaccgaaagcaagttcaccgagcagcaattgctgacgctggcaatgacccggtcggccagggaaagggatgagacaagccaatga

SEQ ID NO: 38533 - protein, 501 aa, Sinorhizobium meliloti 1021
MTVLVSLSGISKNFSGVQALKGVDFDLRAGEVHALVGENGAGKSTLMRVLAGEMKPTSGTVSIHGETMQHSGPRGAAGRGISVIHQELALAPDLTVAENIFLGRLPRIVNHRRLRKAASEILERLGFDIDPAIHAGRLTVAHQQVVEIAKALSNRARIIVFDEPTAVLANTDAERLLAIIRELRAGGTGAVYISHRLNEVFDLSDRITVMKDGSHVETLETSATDVDAVIARMVGRQMSALFPSKAGRVPGEVVVRVRNVSRGRKVRDVSFSVRAGEVVGLGGLVGSGRTEVARLVFGADKMDSGTVELNGKPLHLSSPREAVRARIGLVPEDRKQQGVILDAPIRINTTLAKIRSISRLGFLDAGKERQVAVALGAEMRLKASSVDAPVSSLSGGNQQKVALAKWFHADCDLLILDEPTRGVDVGAKGEIYNLINDLAKAGKAILVISSEHQELFGICDRVLVMAEGAIVGELTESKFTEQQLLTLAMTRSARERDETSQ

SEQ ID NO: 38534 - DNA, 1533 bp, Bacillus subtilis subsp. subtilis str. 168
  CDS (1)..(1533): transl_table=11
atggaatatgtcattgaaatgctcaatatccgcaaggcgtttccaggtatcgtcgccaatgacaatatcaatcttcaagtcaaaaaaggcgaaatacacgcgttgctcggtgaaaacggagcggggaaatcaacattgatgaatgtccttttcgggctgtatcagccggagcggggtgaaattcgggtgcgcggcgagaaggtgcacatcaacagcccgaacaaagcgaatgaccttggaattggaatggtgcaccagcactttatgcttgttgacacctttacagttgctgaaaatattattctcgggaaggagccaaagaagtttggcagaattgaccggaagcgtgctggccaagaggtgcaggacatttccgatcgatacggcctgcagatccatcctgaagcaaaagcagctgacatatcagtcggtatgcagcagcgcgcagaaatattaaaaaccctctaccgcggtgccgacattctgatttttgatgaaccgacggctgttttgacgcctcatgaaattaaggaactgatgcaaattatgaagaacctggtcaaagaagggaagtccatcatcttaatcacccataagctgaaagagattatggagatttgtgaccgcgttacggttatccgtaaaggaaaaggcatcaaaacccttgatgtccgtgatacaaaccaagacgaactcgccagtctaatggtcggccgtgaggtatcgttcaaaactgaaaagagagctgctcagccgggagcggaagtgcttgcgattgacggcataactgtaaaggatacccgcggaatagagacagtcagagatttgtctctttctgtcaaagcgggagaaatagtcggcatagcaggcgtcgacggaaacgggcaatctgagctgatcgaagcggtgacaggactccgcaaaacagattcaggaacaatcaccttaaacggaaaacagatccaaaacctgacgccaagaaaaatcactgaatccgggatcgggcatattcctcaggatcgccataaacacggtctcgtccttgattttccaatcggagagaatatcctgctgcaaagctattacaaaaagccgtattcagcattgggcgttttacataaaggcgaaatgtacaaaaaagcacgcagcctgatcactgagtacgatgtcagaacgccggatgaatatacacacgctcgggcattgtcaggcggaaaccagcaaaaagcgattatcgggcgggaaatagaccgaaatcctgatttattaattgccgcccagccgactcgcggccttgatgtcggagcgattgaatttgtccataaaaagctcattgagcagcgtgatgccgggaaagccgttcttctcctctcgtttgagcttgaagaaattatgaatctcagtgacagaatcgccgttatttttgaaggacgcattatcgccagcgttaatccgcaggaaaccactgaacaggagcttggtctcttgatggcaggaagcacgcaaaaggaagcggggaaagcaaatggttaa

SEQ ID NO: 38535 - protein, 510 aa, Bacillus subtilis subsp. subtilis str. 168
MEYVIEMLNIRKAFPGIVANDNINLQVKKGEIHALLGENGAGKSTLMNVLFGLYQPERGEIRVRGEKVHINSPNKANDLGIGMVHQHFMLVDTFTVAENIILGKEPKKFGRIDRKRAGQEVQDISDRYGLQIHPEAKAADISVGMQQRAEILKTLYRGADILIFDEPTAVLTPHEIKELMQIMKNLVKEGKSIILITHKLKEIMEICDRVTVIRKGKGIKTLDVRDTNQDELASLMVGREVSFKTEKRAAQPGAEVLAIDGITVKDTRGIETVRDLSLSVKAGEIVGIAGVDGNGQSELIEAVTGLRKTDSGTITLNGKQIQNLTPRKITESGIGHIPQDRHKHGLVLDFPIGENILLQSYYKKPYSALGVLHKGEMYKKARSLITEYDVRTPDEYTHARALSGGNQQKAIIGREIDRNPDLLIAAQPTRGLDVGAIEFVHKKLIEQRDAGKAVLLLSFELEEIMNLSDRIAVIFEGRIIASVNPQETTEQELGLLMAGSTQKEAGKANG

SEQ ID NO: 38536 - DNA, 1509 bp, Yersinia pestis CO92
  CDS (1)..(1509): transl_table=11
atgatccgtaacgagatactggcaaaaaaaccggactatctattagaagcgacgggactaaaaaaatcctttggcgatgtgatcgcgctaaacaatgctgaattctgtttaaaacggggttctatccatgcgctttgcggtgggaacggtgccggtaaatcaacatttcttggcctattaatgggatttattcagcctgatgatggggcgtttttcatcaacgggcaatactgcgaattcgactcaccgggacaagccctagccgcagggattaccattgttcaacaagagctcagtggggtacaggatctgtctgtggccgaaaatatttatctgggttctgagccaaggcgctttggtattgtcgattttcgtgcgcttaaccgccaggccgatgtgttattacacgagctgggtttcgccatttcacccaaagccaaaatgcgcagcctgagcgtagcagagcaacaacgggtggaaattgccaaagcgctgtcacatacccatgccgatatcatcattatggatgaacccacctccgcattaggtgaagaggatgcgcaaaaactgtttcagaccataaaaaaactggcctctctgggaaaaggggttatttatgtctcccaccgcttgtcagaaatatttcaaattgcagacagctacacggtatttcgagatggttgttatatttgtgaaggagagacgagtcacatcactcgcgaacaactgattgagcatattattggtggcgagattgatggtgagttctccaaatacaatactccaaccaatgtgccactctttaaagcctctggcatatgttggaaatcgaaagtgaatgatgtcagcctgacattacattgcggtgaaattttagggatttatggcttagtaggatcggggcgcagtgagtttcttaatctgctgtttggtcttgagcgtgctgatcacgggagcatccatatcggtgatgagatattactgaaacacacaccagaaaaagcaatcaacgccggtatcgcctatgtgaccgaagatcgtcaagagacaggattagtattgaaccattcggtatcggaaaatattaatatctcctcattaaacgtcattagtcgtatgagtatcattaatgaaaatgatattcagcgccgtgctgaccacacgatccgtatctttaatattaagacaccgagtcgccaacaacgagtggctaatttaagcggtggtaatcaacaaaaggtggtgttaggccgctgggcactgttagaccctaaagttttattattagatgagccaaccaggggaattgacattggggcaaaaaaagaaatttatcgctttatgtcggattttgccctcaaaggaaaaggcattgttatggtctcctccgagctttctgaaattattggcatgagcgacagaatcttggtttttaaaaaagggaaaatagtcggtgaaattacgggcactgaggcaacacaggccaaattaatgtcgatggcggtataa

SEQ ID NO: 38537 - protein, 502 aa, Yersinia pestis CO92
MIRNEILAKKPDYLLEATGLKKSFGDVIALNNAEFCLKRGSIHALCGGNGAGKSTFLGLLMGFIQPDDGAFFINGQYCEFDSPGQALAAGITIVQQELSGVQDLSVAENIYLGSEPRRFGIVDFRALNRQADVLLHELGFAISPKAKMRSLSVAEQQRVEIAKALSHTHADIIIMDEPTSALGEEDAQKLFQTIKKLASLGKGVIYVSHRLSEIFQIADSYTVFRDGCYICEGETSHITREQLIEHIIGGEIDGEFSKYNTPTNVPLFKASGICWKSKVNDVSLTLHCGEILGIYGLVGSGRSEFLNLLFGLERADHGSIHIGDEILLKHTPEKAINAGIAYVTEDRQETGLVLNHSVSENINISSLNVISRMSIINENDIQRRADHTIRIFNIKTPSRQQRVANLSGGNQQKVVLGRWALLDPKVLLLDEPTRGIDIGAKKEIYRFMSDFALKGKGIVMVSSELSEIIGMSDRILVFKKGKIVGEITGTEATQAKLMSMAV

SEQ ID NO: 38538 - DNA, 1548 bp, Yersinia pestis CO92
  CDS (1)..(1548): transl_table=11
atgtcgcaacctttattgaaaatcaccgatatggcgaaaagcttctctggtgtctgggcgctcagtaacgtacagctcaccctagagcagggtgaaatacatgcactcttgggtgagaacggcgcaggtaaatcaacactcttgaaagcactctcgggtgctcaaccccagactcacggcgaaatctggtttaacggtgaaatgctggcattggacgactcgccagtggaacgccagaacaaaggcattatcaccatctatcaagaagttaacctactgcccaacatgacggtggcagaaaacatgtttcttggtcgtgaaccgcgccgccgtcaggtatttgtcgacgaaaaagccgtcaatcaggaagcccaagcgatcctcgattacctgcaacttaacgtgtcacccaccacggcggtggcgcgcttgagtatcgcgcagcaacagatggtagagatcgcccgggcgctgaccttgaacgcgaagctcattgtcatggatgagccttcggcagcactcagcgacagcgaagtcgaaagcctgcatcgcgtggtacgggaactgaaaggccgtggtgtgagcattatctatgtcacccaccgcttgcacgaagtgttccaactctgtgaccgtttcacggtgtttcaggatgggcgttacaccggttctgatgaggttgcaggcaccaacgttgagaagattatccgcctgatggtggggcgagacgtcgtatttaaccgccgccccgccagtgagacccatcaccaagaccagcccattcgcctatctgtgcaagggctgtgtcgtgaaaaacccccgctcgacccacatggtgtggcgctaaaagacatcagctttcatgtccacgccggggaagtcttgggtatcgccgggttggtaggggcagggcgtaccgaagtggcacgttgtctgtttggggcaggggctttcacctctggcaattttgagatagacggtgtgccctatcagccacgggatccaatgttcgcgctggaacaggggatagcactggtgccggaagaccgtaaaaaagagggggcagtgcaagggctttctattcgcgacaatctgacactttcgagcctggccgggctgttacagtggcgttttttcgtcaatacccgcaaagaagatcaactgattgagacctaccgtttagcactgcaaatcaagatggtgaacagcgaacaggcggtgcgtaagctctctggctgtaaccagcagaaggtgatcttggcccgctgcatggcgctcaatccacggatcctgatcgtcgatgaaccgacacggggcattgatgtgggcacgaaatcggaagtgcatcaggtgttgtttgatatggctaaacagggcgtggcagtgatcgtcatctcctcggatttaccggaagttctcgcggtttctgaccggatcatcacgctaagcgaagggcgagtcactggagagattcacggtgatgacgccagcgaagaacggctgatgaccatgatgaccatcaatcataacgccttaaatgccgcctaa

SEQ ID NO: 38539 - protein, 515 aa, Yersinia pestis CO92
MSQPLLKITDMAKSFSGVWALSNVQLTLEQGEIHALLGENGAGKSTLLKALSGAQPQTHGEIWFNGEMLALDDSPVERQNKGIITIYQEVNLLPNMTVAENMFLGREPRRRQVFVDEKAVNQEAQAILDYLQLNVSPTTAVARLSIAQQQMVEIARALTLNAKLIVMDEPSAALSDSEVESLHRVVRELKGRGVSIIYVTHRLHEVFQLCDRFTVFQDGRYTGSDEVAGTNVEKIIRLMVGRDVVFNRRPASETHHQDQPIRLSVQGLCREKPPLDPHGVALKDISFHVHAGEVLGIAGLVGAGRTEVARCLFGAGAFTSGNFEIDGVPYQPRDPMFALEQGIALVPEDRKKEGAVQGLSIRDNLTLSSLAGLLQWRFFVNTRKEDQLIETYRLALQIKMVNSEQAVRKLSGCNQQKVILARCMALNPRILIVDEPTRGIDVGTKSEVHQVLFDMAKQGVAVIVISSDLPEVLAVSDRIITLSEGRVTGEIHGDDASEERLMTMMTINHNALNAA

SEQ ID NO: 38540 - DNA, 1515 bp, Yersinia pestis CO92; identical to SEQ ID NO: 27194
  CDS (1)..(1515): transl_table=11

SEQ ID NO: 38541 - protein, 504 aa, Yersinia pestis CO92; identical to SEQ ID NO: 27195

SEQ ID NO: 38542 - DNA, 1548 bp, Caulobacter crescentus CB15
  CDS (1)..(1548): transl_table=11
atgaccctcctggacgtcagccaggtcagcaagagctttcccggcgtgcgcgcgctcgaccaggtggacctcgtcgtcggtgtcggcgaggttcatgcgctgctgggcgagaacggggccggcaagtccaccctgatcaagatcctgtcggccgcccacgccgccgacgccggaaccgtgaccttcgccggccaggtcctggacccgcgggatgcgccgctgcgccgccagcagctcggcatcgccacgatctaccaggaattcaacctgttcccggaactgagcgtggccgagaacatgtatctgggccgcgagccgcgccgcctgggtctggtcgactggtcgcggctgcgcgccgacgcccaggccctgctgaacgatctgggcctgccgctaaatcctgacgcgccggtgcgcggcctgaccgtcgccgagcagcagatggtcgagatcgccaaggccatgaccctgaacgcgcggctgatcatcatggacgagccgaccgccgcgctcagcggccgcgaggtcgaccgcctgcacgccatcatcgccggcctgaaggcgcggtcggtgtcggtgatctacgtctcgcaccgcctgggcgaggtgaaggcgatgtgcgaccgctacaccgtcatgcgcgacggccgcttcgtggccagcggcgacgtcgccgacgtcgaggtcgccgacatggtccggctgatggtcgggcggcatgtcgagttcgagcggcgcaagcgtcggcgtccccccggcgcggtggtgctgaaggtcgagggcgtgaccccggccgcgccccgactgtcggcgcccggctatctgcgccaggtgtcgttcgcggcgaggggcggcgagatcgtcggtctggccggcttggtcggcgcgggccgcacggacctggcccggctgatcttcggcgccgatccgatcgccgccggacgcgtcctggtcgacgacaagcccctgcgcctgcgctcgccccgcgacgctatccaggccgggatcatgctggtgcccgaggaccgcaagcagcagggctgcttcctggaccactcgatccgccgcaatctgagcctgcccagcctcaaggcgctgagcgcgctgggccagtgggtcgacgagcgggccgagcgcgacctcgtcgagacctatcgccagaagctgcgcatcaagatggccgacgccgagaccgcgatcggcaagctgtcgggcggcaaccagcagaaggtcctgctgggccgggcgatggcgctgacgcccaaggtgctgatcgtcgacgagcccacgcgcgggatcgacatcggcgccaaggccgaggttcaccaggtgctcagcgacctggccgacctgggcgtagcggtcgtcgtgatctcgtcggaactggccgaggtcatggccgtcagcgatcgcatcgtcgttttccgcgagggcgtcatcgtcgccgatctcgacgcgcagaccgccaccgaagagggcctgatggcctatatggcgaccggcacggaccgggtcgccgcccctgacatggaacgcctgaccgcatga

SEQ ID NO: 38543 - protein, 515 aa, Caulobacter crescentus CB15
MTLLDVSQVSKSFPGVRALDQVDLVVGVGEVHALLGENGAGKSTLIKILSAAHAADAGTVTFAGQVLDPRDAPLRRQQLGIATIYQEFNLFPELSVAENMYLGREPRRLGLVDWSRLRADAQALLNDLGLPLNPDAPVRGLTVAEQQMVEIAKAMTLNARLIIMDEPTAALSGREVDRLHAIIAGLKARSVSVIYVSHRLGEVKAMCDRYTVMRDGRFVASGDVADVEVADMVRLMVGRHVEFERRKRRRPPGAVVLKVEGVTPAAPRLSAPGYLRQVSFAARGGEIVGLAGLVGAGRTDLARLIFGADPIAAGRVLVDDKPLRLRSPRDAIQAGIMLVPEDRKQQGCFLDHSIRRNLSLPSLKALSALGQWVDERAERDLVETYRQKLRIKMADAETAIGKLSGGNQQKVLLGRAMALTPKVLIVDEPTRGIDIGAKAEVHQVLSDLADLGVAVVVISSELAEVMAVSDRIVVFREGVIVADLDAQTATEEGLMAYMATGTDRVAAPDMERLTA

SEQ ID NO: 38544 - DNA, 1593 bp, Sinorhizobium meliloti 1021
  CDS (1)..(1593): transl_table=11
atgaacgcggctctgccttccaatgcggtcgcgccgccgccaaaccgtgctgttgccgcactcgcggcagagggccttggcaaagcctacggcccgattaccgtcctttcggacgtcacgcttgaggttcatgctggagaggttcacgccattatcggtgagaacggcgccggaaaatcgacgctgatgaagctcctttccggccatgtcgtcccaacggcgggccacttgctcctggagggcaagtcggtagagttccgaaatgcggtggaggcggagaacgccggcatcgtactcgtgcaccaggaaatcctgctcgcttcggacctcaccgttgcggaaaacctgtatttgggtcgcgaggtcggccgcggtctgctggtcaatgacaaggcgatgaacagtcgtgccgccgaactcctcgcacgggtcggttcagcggcgcggccgcgcgaccgtgtgggtgagctgccgctcgcccagcgccagctcgtgcagatcgcgcgtgcccttctcgacgagcgaaaggtcatcatcttcgacgagcctactgcggttctcgcaaacgacgaagtggcggcgctgctcgacatcgttcgcagcttgcgcgatcacggggttgcggtgctctacatctcccatcgtctcgatgaggttcaggctcttgccgaccggatcaccgtgcttcgtgacggccgcatgatcggaacctggcccgcggcaggcctcggccagcgggaaatggcggaactgatggtcgggcgagagctggacatgctctatccgcataagcggtcagccacgaccgctgctccgatcctgtcagtcaccaaccttgccatcgaccacggctcgcagaccgtctcctttagcgtcagccccggcgaagtgctgggtatcggcggcatggtcggggcgggtcgtaccgaactgatcgagggcctgatgggccttcgtccgtcagaggctgaaagcatcgtcctgaacggccgggagatcgggagccgctccgtccgtaccctaatggacgccggactggtttacctgaccgaggaccgcaagggcaaaggcctgctcctggaggagaagctcggtcctaacctcaccctgcaggcgctggatacgatcaatccgggtgtttttctggacaagcaaggtgagctttcccgccttcgaaaggcggtggctgattacgacattcgcgtgcgctcgatgcgccttgaagccagccagctttcgggcgggaaccagcagaagctacttcttgccaaggtcatgatggccgatccgtcggtgatcatcatcgacgagccgactcgcgggatcgatatcggcaacaagagccagatctatgacttcatcgacgggatggtgcgcgccggcaaagcctgcatcgtcatctcgtcggaaatgccggaactcgtaggtcttgccgaccgtgtgctggtgatgcgtgccgggaggatcgtcgctgagctacgcggcgatgaaatcaatgaggaaaatgtcgtctacgccgccacgaccggtgggtgcgcggacgtcggggaggagaaacatgaccgtagcgacagcaacactcgcaccaactaa

SEQ ID NO: 38545 - protein, 530 aa, Sinorhizobium meliloti 1021
MNAALPSNAVAPPPNRAVAALAAEGLGKAYGPITVLSDVTLEVHAGEVHAIIGENGAGKSTLMKLLSGHVVPTAGHLLLEGKSVEFRNAVEAENAGIVLVHQEILLASDLTVAENLYLGREVGRGLLVNDKAMNSRAAELLARVGSAARPRDRVGELPLAQRQLVQIARALLDERKVIIFDEPTAVLANDEVAALLDIVRSLRDHGVAVLYISHRLDEVQALADRITVLRDGRMIGTWPAAGLGQREMAELMVGRELDMLYPHKRSATTAAPILSVTNLAIDHGSQTVSFSVSPGEVLGIGGMVGAGRTELIEGLMGLRPSEAESIVLNGREIGSRSVRTLMDAGLVYLTEDRKGKGLLLEEKLGPNLTLQALDTINPGVFLDKQGELSRLRKAVADYDIRVRSMRLEASQLSGGNQQKLLLAKVMMADPSVIIIDEPTRGIDIGNKSQIYDFIDGMVRAGKACIVISSEMPELVGLADRVLVMRAGRIVAELRGDEINEENVVYAATTGGCADVGEEKHDRSDSNTRTN

SEQ ID NO: 38546 - DNA, 1512 bp, Sinorhizobium meliloti 1021
  CDS (1)..(1512): transl_table=11
atgtacgagctgaagtccctcgacaagaagtttcccggcgttcatgcgctcaaggcgatcgacttccatatcaagcgcggcgagatcgtcgggctggtgggagagaacggcgcgggaaaatccaccctcatgaaggtgatctatggcgcctaccagcccgatggcgggcagatcctcatcaacggcgatgccgtgcgcttcgcgaacccccgccaggcgatggaaaaggggatcgggatggtgtttcaggagcagtccctcatcccgaacctcacggtgatggagaacatttttctcggctacgagcagcagttcgtccgcctcggcgtcatcaactggaaggagatggccaaggccgcgaaagcacagcttgcgaaggtcaagctggacatcgatccttcgacggtcacatcgaaactgtccttcgctcagcgtcagctggtcgaactcgccaaggtcctcacactcgaagagcgggtcgacggcgatctcgtcatcctcctcgacgagcccacctcggtcctgtcgaaggacgaagtcgagcttctgttcaagctcgtgcgcgagctcgtgacccgtgcctccttcatattcgtctcgcaccgaatggacgaagtcatggagctgtcggatcggatctacgtgatgaaggacggacaggtggtcgacgtcgtcgagcggggcgggggcggagccgatgccgaatcgatccagcacaagatggtcgggcggaacgtcgacaagcaatattatcgggagcagcttcaaaagccctacgatccctcgagagtcctcgtcgaaatgtccggcatcgacctgccaggccgcacgaaggatatctcgctcaggcttcacgccggtgaggtcctgtgcctcgtcggaaccgaaggctcgggccgtgaagcgatcctgcgcgcaatctacggcatgctcagccccaccggcggacgcctgaagatcaagggacgggaggtgaggacatattcgccgcgtcaatcggtcggcctcggcgtcggatatgttccgcgcgagcgcaagatcgagggcatcgtggcgggcatgaatgtctacgagaacatgaccctctcgcagttgaagaagcattcgacggcgagcgttctgcaggtcggaaaggagcgcgcgcttgcgcgggagtggatcaggaagctctccatcaaggcccattccgagctcgccgactgcggcaacctttcaggcggcaaccagcagaaggtcgttctcgccaaatggcgctccgcgggcgccgatatcatgctcctcgatcacccgacgcgcggtctcgacatcggggcgaaggaggacgtctacgaaatgatccgcgccatgagcgatgcgggcgtcgggatcgtcctggtggccgacacgctcgaggaagcgatcggactctcccatacgatcgtcgtcgtcaaggatggcaggatccagaaacggttcgattgcgtgcctggcgcgaagccctccctctatgacctcctgcattacatgatctga

SEQ ID NO: 38547 - protein, 503 aa, Sinorhizobium meliloti 1021
MYELKSLDKKFPGVHALKAIDFHIKRGEIVGLVGENGAGKSTLMKVIYGAYQPDGGQILINGDAVRFANPRQAMEKGIGMVFQEQSLIPNLTVMENIFLGYEQQFVRLGVINWKEMAKAAKAQLAKVKLDIDPSTVTSKLSFAQRQLVELAKVLTLEERVDGDLVILLDEPTSVLSKDEVELLFKLVRELVTRASFIFVSHRMDEVMELSDRIYVMKDGQVVDVVERGGGGADAESIQHKMVGRNVDKQYYREQLQKPYDPSRVLVEMSGIDLPGRTKDISLRLHAGEVLCLVGTEGSGREAILRAIYGMLSPTGGRLKIKGREVRTYSPRQSVGLGVGYVPRERKIEGIVAGMNVYENMTLSQLKKHSTASVLQVGKERALAREWIRKLSIKAHSELADCGNLSGGNQQKVVLAKWRSAGADIMLLDHPTRGLDIGAKEDVYEMIRAMSDAGVGIVLVADTLEEAIGLSHTIVVVKDGRIQKRFDCVPGAKPSLYDLLHYMI

SEQ ID NO: 38548 - DNA, 1551 bp, Sinorhizobium meliloti 1021
  CDS (1)..(1551): transl_table=11
atgccctccgcaggggcgcggagcgatacgatgcccttcctggaagttcgcgacctggagaagcgcttcggcggtgttcgcgcgctcaagggggtgagcttcacgatcgagcgcggccgtacctaccatctgatgggcgagaacggatgcggcaagagcacgcttatcaagatcatttccggcgcccaaccggcagatggcggtgagcttacgatcaacggcaaaaaggtcgaggggctgacgccgatcggcgccctggcagccggcatcgagacggtttatcaggacctgtcgcttcttcccaatctgagcgtcgaagagaatgtcgcgctgacgcagcagctggttgcctcgaacgggagcctcgcgcggcgtctcgacctcaagggcctgcgggagacggccgtccgtgcattgaaggacgtcggactgccgacggagcccgcctttctgtcgacccccgtcgaagaactccccatcgcaacgcgccagctcatcgccattgctcgcgcgatcgcttcggatgccggtctggtcatcatggatgagccgacgaccgcactgacgcggcgcgaagtggacaacctcattcgcgtcgttcacggcctacacgccaagggcgtgtctgtccttttcgtcacgcacaagctcgacgaatgcaaggcgatcggcgggcaggcgatcatcatgcgcgacggcctgaaggttgccgaatgcgacgtcgccacccagtcgaagaccgaactcggcttctggatgacgggcaagaacctcgacgacacgcgttatcgcgtcgatacccatggtgacgagacgctgctctcggtggagcggctcgggggtgccggcttcgacgatgtcagcttcacggtttccaagggcgagatattcgggattacgggacttctcgattccgggcggaacgagcttgcgctttcgctggccggcgtggaatcggcgcggcggggctcggtcctgctcgcaggcagacgggccgatctgtcgtcacccgcctcggcgatcgaggccggcatcggctatgttccggaggaccgtctatccgaagggcttttccttggaaaatccatccgcgagaatatcgtcatggcggtcctcgaccgactgcggggagctttcggcctgctcgacagccgccgggcgaaggctctggcacagaaaaccgtcgacgatctgcaggtggcgactccggatatcgacaaccccgtcatgtccctttcaggcggcaaccagcagagggtcctgatcggccgctggctgacgatcgagccgagcctgctcatcctgcacggcccgaccgtcggcgtcgacgtcggatcgaaggacacgatattccgcatcattcagcgccttgcaggagacggcatgagcgtcgtcatcatcagcgacgacctgcccgagcttctgcagaactgcgaccgcgtgatggtgatgcgtaaaggccgggtcgccgatatctttccggccgaagggctcgaggaggacgcaatctacaagtcgatgatggccgaagacggccagggagttcaataa

SEQ ID NO: 38549 - protein, 516 aa, Sinorhizobium meliloti 1021
MPSAGARSDTMPFLEVRDLEKRFGGVRALKGVSFTIERGRTYHLMGENGCGKSTLIKIISGAQPADGGELTINGKKVEGLTPIGALAAGIETVYQDLSLLPNLSVEENVALTQQLVASNGSLARRLDLKGLRETAVRALKDVGLPTEPAFLSTPVEELPIATRQLIAIARAIASDAGLVIMDEPTTALTRREVDNLIRVVHGLHAKGVSVLFVTHKLDECKAIGGQAIIMRDGLKVAECDVATQSKTELGFWMTGKNLDDTRYRVDTHGDETLLSVERLGGAGFDDVSFTVSKGEIFGITGLLDSGRNELALSLAGVESARRGSVLLAGRRADLSSPASAIEAGIGYVPEDRLSEGLFLGKSIRENIVMAVLDRLRGAFGLLDSRRAKALAQKTVDDLQVATPDIDNPVMSLSGGNQQRVLIGRWLTIEPSLLILHGPTVGVDVGSKDTIFRIIQRLAGDGMSVVIISDDLPELLQNCDRVMVMRKGRVADIFPAEGLEEDAIYKSMMAEDGQGVQ

SEQ ID NO: 38550 - DNA, 1551 bp, Sinorhizobium meliloti 1021
  CDS (1)..(1551): transl_table=11
atgatcatgcacccagctgacgacgatgactgcgtcctgcgcctcgaagacgtgacgaaggtctattcgggtataattgcggtgcgccatgcgaacctttcgctccggcgcggcgccgtgaatgtgctcgtgggggaaaacggtgccggcaagtcgaccctgatgcggatcatcgccggcgtcgagaagccgtcactcggccgcatcctgctcgacggccagcaggtggagttccattcgccggccgacgcgcagcgccacggcatcggcatggtcttccaggagctgaatctgttcggcaatctctcggttgccgagaacatcttcgcgacgcgggagctgacccgaggcattcgcggcatcgatcatcgcgcgcaggtcgagagggctaccgggttcctcgacaggctcgatgccgggatcgatgccgagacgctcgtcgaagacctgccgatcggccagcagcagctggtggagatcgccaaggcgatctcgctcgatacccgcatccttattctggacgagccgacatcggccctttcggcggcggaggtggacgtccttttcaaggtcatccgggagctgaaggcgcaaggggtggcgatcgtctacatttctcaccggctcgaggagctgatgcggatcggcgactacatcaccgtgctcagggatggacagatcaccggccacgccatggtcaaggacatcgataccaagtggatcgtccggtcgatgatcggctcggatgcgaaggacttcgccaaatcggtcgaccaccgcctcggagaggaggcgttccgcgccgaggagatctgcctgccgcgccggaccggcgggctcgcggtcgatcatgtctcgatctcggtacgtgccggcgaggtgttgggcatctacgggctgatgggggccggccgaagcgaattcttcgaatgcgtcatgggccagcacccgcattcctcggggcgggtcttcgtcggcgggacggaggtcgacgccagcgacacgtcgggcaggatcagcgcaggattggcgctcataccggaagatcgccagcgcgagggtctcgtccaggcgctttcgatcgccagcaacctgacgcttgcgagcctcgaccgcttcgtccgcttcggcttccatattgtcggcgcgcgggagcaagcctcgatcgcggcggccatccgcgatctttccatcaaggcgcccaacccggacttcgaggtgacctcgatgtccggcggcaaccagcagaaggtcgtcatcggcaaggccctgatgacgaaaccgaaggtgctgctgatggacgaacccagccgcggaatagatgtcggcgccaaggcggatgtcttccgcaccatgcgccggcttgccggcgaggggctcgccatcctcttttccacctccgacctcgaagaggtcatggcgctctccgaccgcatcgccgtcatgagcaacggacggctggtcacggtcatcgaccgcgcggacgcgacggaagagatgatcataaaggcttcggccgagggtcataaaacgacaagggaacacgcctga

SEQ ID NO: 38551 - protein, 516 aa, Sinorhizobium meliloti 1021
MIMHPADDDDCVLRLEDVTKVYSGIIAVRHANLSLRRGAVNVLVGENGAGKSTLMRIIAGVEKPSLGRILLDGQQVEFHSPADAQRHGIGMVFQELNLFGNLSVAENIFATRELTRGIRGIDHRAQVERATGFLDRLDAGIDAETLVEDLPIGQQQLVEIAKAISLDTRILILDEPTSALSAAEVDVLFKVIRELKAQGVAIVYISHRLEELMRIGDYITVLRDGQITGHAMVKDIDTKWIVRSMIGSDAKDFAKSVDHRLGEEAFRAEEICLPRRTGGLAVDHVSISVRAGEVLGIYGLMGAGRSEFFECVMGQHPHSSGRVFVGGTEVDASDTSGRISAGLALIPEDRQREGLVQALSIASNLTLASLDRFVRFGFHIVGAREQASIAAAIRDLSIKAPNPDFEVTSMSGGNQQKVVIGKALMTKPKVLLMDEPSRGIDVGAKADVFRTMRRLAGEGLAILFSTSDLEEVMALSDRIAVMSNGRLVTVIDRADATEEMIIKASAEGHKTTREHA

SEQ ID NO: 38552 - DNA, 1530 bp, Sinorhizobium meliloti 1021
  CDS (1)..(1530): transl_table=11
atgggcctcgacagcatgcaccagtcggcaagcgcggcgagcacggacaagccgcttctgtctcttcgcaacatcaacatgaccttcggcggcgttaaagcactgaagaatgtgagcttcgaggtgcagccgggcgaggtccattgcctcgccggagagaacggctgcggcaagagcacgctcatcaaggtgatcacgggtgtctatcgccccgcggagggggcggtgatcgaatatgacggcgaaacctatccgcatatgtcgccggttacggcacaggaccgcggcattcaggtcatctggcaggatcttgcgcttttcccggaaatgaccgtcgcggaaaacatcgccttccacgaggtgctcggcggccggccgcggctggtggattacggccgtatgcgtaggatcgcggtggatgcgctgggccgcctcggcatcacgttggacgtcgacctaccgctcaaggaatatgcgatcgcccagcgtcagatcgtggcgattgcccgggcgctcgtcggtgaggcgaagctggtcttcatggacgagccgaccgcatcgctgacgcagtcggagacggaccatctgctcgaaatcgtccgcagcctctccgcctccggcgtcgcggtcgtcttcgtcagccatcggcttgccgaggtgctggagatttcaagccggatcacagtcttgcgcgacggcgcgctggtcggggtttatccggccgccggcatgacgcagtcgaaaatcaccgaactcatgaccggcaagaccttcgatcagcacgttcgcgcacgtcccagggacgatcagccggtcgtgctcgacgttcgcgggctcaccaggccaggccagtttgaggatatttcgtttaccgttcgccgcggcgaaacggtcggcataaccggcctgctcggggcagggcggaccgaagtggcgctcgccctcttcggcatgctcaagcccgcaaccgggacgatcagtatcgatggccgggaggtccgcttcggctcgaaccgcgaggcgatcagggccggcgtcgcatatctgtcggaggaccgattgtcactcggactcatccagccgcagccgatcgccgacaatctcgttatcgcctcgctgcgcaagattctctcagggggtcttctttccgaagaccgcaaacgaagtctcgtctcccggtggatcgccgatctcggcgtcaagatcggccatcaggctgacgcgatatcgacgctttccggcggcaaccagcagcgcgtggcgatcgccaaatggcttgccaccgatcccaaactgttgatcctcgattcacccacagtcggcgtcgacgtcggggcacgggccgggatctttgacatcgtcgccaagctcgctgagagcgggcttgcgattatcctgatctcggacgaggtgccggaagtctatttcaacgccgaccgtgtcctgcacatggcgcagggccgcatcgtcggaacctatgatccgcgccagtcgcggctggaagagatcgaggcggcagtttatgcgtag

SEQ ID NO: 38553 - protein, 509 aa, Sinorhizobium meliloti 1021
MGLDSMHQSASAASTDKPLLSLRNINMTFGGVKALKNVSFEVQPGEVHCLAGENGCGKSTLIKVITGVYRPAEGAVIEYDGETYPHMSPVTAQDRGIQVIWQDLALFPEMTVAENIAFHEVLGGRPRLVDYGRMRRIAVDALGRLGITLDVDLPLKEYAIAQRQIVAIARALVGEAKLVFMDEPTASLTQSETDHLLEIVRSLSASGVAVVFVSHRLAEVLEISSRITVLRDGALVGVYPAAGMTQSKITELMTGKTFDQHVRARPRDDQPVVLDVRGLTRPGQFEDISFTVRRGETVGITGLLGAGRTEVALALFGMLKPATGTISIDGREVRFGSNREAIRAGVAYLSEDRLSLGLIQPQPIADNLVIASLRKILSGGLLSEDRKRSLVSRWIADLGVKIGHQADAISTLSGGNQQRVAIAKWLATDPKLLILDSPTVGVDVGARAGIFDIVAKLAESGLAIILISDEVPEVYFNADRVLHMAQGRIVGTYDPRQSRLEEIEAAVYA

SEQ ID NO: 38554 - DNA, 1539 bp, Sinorhizobium meliloti 1021
  CDS (1)..(1539): transl_table=11
atgacgtcagagaccgtgctggagatccgcaatgtcagcaagcatttcggcgccgtcaaggcgttgacagccgtagactttcggctcgcacggggcgaagttcacgcgctttgcggcgagaacggcgccggcaagtcgacactgatgaacgtcattgccggcgtgctgcagccgtcggaaggggaagtcctcatcgaaggcgcccccgtgaagatcgcctcgcccgcggtcgcacagtcgctcggcatcgccctcgtgcatcaggagatcgcactctgccctgacgcgacgatcgcggaaaacatgttcatggcggcgacgaaccgccgtcgctcggctctgatgaactacgcccagctggagcgcgacgcgcaggccgtgatgaatcgtctggccccgatcgacgtcagccagaaggtcggcgacctgccgatctccagtcagcagctcgtcgagatcgccaaggcactgacgctcgattgccgagtgctaatcttcgacgagccgacggcggcgctgacagagaccgaagcgcaggtgctcttcggcatcatccgcgatctcaaggcgcgcggcatctcgatcatctatattagccaccgcatggcagaggtgttcagcctctgcgaccgggtgaccgtcttccgcgacgggcgctatgtcgcgacggaaatggtctcggacgtcactcctgacgatgtggtccggctgatggtcggccgcgagatcagccagctttatcccgacaagcagccttcctccgaacgcctaggcgagccgattctttcggtccgcgatctcggcggcgaacgcttccgcgacgtcagcttcgagctccgctacggcgagattctcggcgtcggtggcctgatcggctccggacggacggaaattgccgagggtatctgcgcgctgcgaccggtgacgcaaggcgaaatccggctgcatgacaaggtgcttcgtctacggcgctattccgacgcggccaaggccggcgtcgtctatctttcggaggaccggaaaggatccggcgttttcctcgatctctcgatcgcccagaacattgccgcactcgatctgaaggcattgacctctcttggcctgctcaactcccgcgaggaaagagcgctcgccgaagacctgacccgcaggcttggcgtgcggatgggcggcgtcgatatgccggtctcttcgctgtcgggcggcaatcagcagaaggtggcgatcgccaagcaattggcggtcgatccaaaggtgatcctgatggacgagccgacgcggggcatcgatgtcggcgccaaatcggaaatccaccgcctgctgcgcgagcttgcccgtgccggcatcggcattctggtgatctcgtccgaactgccggagctgatcggcctctgcgaccgcgtcctggtggtgcgcgagggccggatcgcaggcgaggtatcgggcaacgaaatgaccgaggaggtgatcatgcggcttgcatccggcatcggcccggcaaccgaaacgaacttgaaggcatccgggcatgctgcctga

SEQ ID NO: 38555 - protein, 512 aa, Sinorhizobium meliloti 1021
MTSETVLEIRNVSKHFGAVKALTAVDFRLARGEVHALCGENGAGKSTLMNVIAGVLQPSEGEVLIEGAPVKIASPAVAQSLGIALVHQEIALCPDATIAENMFMAATNRRRSALMNYAQLERDAQAVMNRLAPIDVSQKVGDLPISSQQLVEIAKALTLDCRVLIFDEPTAALTETEAQVLFGIIRDLKARGISIIYISHRMAEVFSLCDRVTVFRDGRYVATEMVSDVTPDDVVRLMVGREISQLYPDKQPSSERLGEPILSVRDLGGERFRDVSFELRYGEILGVGGLIGSGRTEIAEGICALRPVTQGEIRLHDKVLRLRRYSDAAKAGVVYLSEDRKGSGVFLDLSIAQNIAALDLKALTSLGLLNSREERALAEDLTRRLGVRMGGVDMPVSSLSGGNQQKVAIAKQLAVDPKVILMDEPTRGIDVGAKSEIHRLLRELARAGIGILVISSELPELIGLCDRVLVVREGRIAGEVSGNEMTEEVIMRLASGIGPATETNLKASGHAA

SEQ ID NO: 38556 - DNA, 1527 bp, Sinorhizobium meliloti 1021
  CDS (1)..(1527): transl_table=11
atgcaggactttctggaattccaatcgatttcaaagggctatcccggcgtccaggcgctgtcggaagtctccttctctgtccgaaagggcgccgttcacgggctgatgggcgaaaacggagcgggaaagtccaccttgatacgggtgctctccggagaccaggcggccgacaccggcgagatccgcataaacggcgagccgcagcactatcgttccgtacgcgatgccttcaacgcaggcgtcatcgtcatccatcaggaactgcagctcgtaccggagctgacggtggccgaaaacctctggctcggccgtttccccggcaaggccggcgtcatcgaccgtcgacaattgatccgcgtcgtctccgacagactcgccgaaatcggtatcgacgtcgatcctgaggcaaaggttgcgtccctgtcgatcggcgagcggcagatggtcgagatcgccaaagcggtgatgaccgacgctcgcgtgattgccttggacgagccgacctcttcgctctcatcgcgagaaagcgaaatcctcttcgccctgatcgacagattgcggtcgaatggtacggtcatcctctatgtctcgcatcggctggacgagatcttccgtctgtgcaacagcctgactgtgctgagagacggccggcttgcagcccatcatccggacatctcgaaagtcggccgcgaacagattatcgctgaaatggtcgggcgcgaaatttcgaatatctggggttggcgcgcccggacgctcggagccgcgaggcttacggtcgaacgcgtttccggcgccaacctgccccagccgatcagctttaccgtccgcgccggcgagattctcggcttctttggcctcatcggcgcgggccgcagcgaaatggcccgtttggtctatggtgccgatcgccgccggcagggcaaggttctggtggacggccttgccgtgccggcggacagcccgcggctgtcgatccgtgccggcgtcgttctgtgcccggaagacaggaagttcgatggcatcgtccaagggcgctccatcgaggagaacatggcgatctcctcccgccgtcatttctcgccattcggggttgtcgacaagggtaaggaggcggagcttgccgagcgtttcatcgcgaagctgcgggtgcgcacgccctcgcgtcaccaggacatcgtcaatctttccggcggaaaccagcagaaggtgatccttggacgctggctgtcggaagagggcgtcaaggtgcttctgatcgacgagccgacccgcggcatcgacgtcggcgcgaaatcggaaatctacgaaattctttacgagcttgcggctcaaggcatggcgatcgtcgttatctctagcgaattgccggaggttatggggattgcggaccgcattctcgtgatgtgcgagggccggatcgcggccgaaatcgaccggagcgattttgacgaacaccggattctcgcagcagcacttccggatgcctcagccacgacggccacccttcccgaacaggtaagctga

SEQ ID NO: 38557 - protein, 508 aa, Sinorhizobium meliloti 1021
MQDFLEFQSISKGYPGVQALSEVSFSVRKGAVHGLMGENGAGKSTLIRVLSGDQAADTGEIRINGEPQHYRSVRDAFNAGVIVIHQELQLVPELTVAENLWLGRFPGKAGVIDRRQLIRVVSDRLAEIGIDVDPEAKVASLSIGERQMVEIAKAVMTDARVIALDEPTSSLSSRESEILFALIDRLRSNGTVILYVSHRLDEIFRLCNSLTVLRDGRLAAHHPDISKVGREQIIAEMVGREISNIWGWRARTLGAARLTVERVSGANLPQPISFTVRAGEILGFFGLIGAGRSEMARLVYGADRRRQGKVLVDGLAVPADSPRLSIRAGVVLCPEDRKFDGIVQGRSIEENMAISSRRHFSPFGVVDKGKEAELAERFIAKLRVRTPSRHQDIVNLSGGNQQKVILGRWLSEEGVKVLLIDEPTRGIDVGAKSEIYEILYELAAQGMAIVVISSELPEVMGIADRILVMCEGRIAAEIDRSDFDEHRILAAALPDASATTATLPEQVS

SEQ ID NO: 38558 - DNA, 1494 bp, Sinorhizobium meliloti 1021
  CDS (1)..(1494): transl_table=11
atgcttctgtccatgcagggcatctgcaaatcgttcaacggcattccggcgcttcgtgcggcttctctcgaagtcggggaagccgaggtgatggcactcgtcggtcagaacggcgcgggcaagtcgaccctcatcaagatattgaccggcgcgtaccggcgcgacgagggtgcggtcgtctttgcgggagagggcgtatccttcagcatgccggcggagagccaggcccgcggcatcgcgacgatctaccaggagatcaacctcgccccccagcgctccgtcgccgagaacatctatctgtcgcgcgaaccccgccgcttcggcttgatcgaccggcgcgcgatgcgcgatggcgccgccgccgtcctgcgggccttcaatctggaaatcgacgtcgatcaacctgtcgccggcttcagcgccgctacccggcagatggtcgctatcgcgcgcgccgtgacgcagaaggcacgcctcgtcatcatggacgaaccgacctcttccctcgacgagcgggaagtcggcattcttttcgacaccataaggacgctcaagcgcggcggcgtttccgtcgtcttcatcggccatcgtctcgaggagctctaccggatttgcgacagggtcaccatcatgcgtgacggcaagaccgtggcgaccgccgcaatggcggacatgccgaagctcgcattggtgcgccatatgctgggcaaagaactcgcggccttcgaagcgatcgccaaggacgcggacgagggcgcgcagcgaccggtccggctatcggtccggaatgcgggcgctggcgttcgcgtccgggatgtgagccttacggtgcgcgaaggcgagatctccgggcttgccggcctgctcggctccgggcgaaccgaaacggccaacctgatttttggcgcggaccggctgcagcgcggcgaaattcgctacaatggcgaagcccgcgcctatcgccagcccgcggacgccattgccgacggtatcgggctcgtcgccgaggaccggaaggtcgacggtatcattcccgatatgagcatccgcgaaaacatgacgctcgcgcttctgccgaagctcgcccgcgccggcatcgtcgatcgcgcccgccaggatgaaatcgtcgagcgctacatcacggcgctcgccatcaaatgcacctcgcccgaccagcctatcaaggaactttccggcggcaatcagcagaaagtcctgctcgggcgttggctctgtaccgatcccaagcttctgattgtcgacgagccgacccgcggtatcgatatcggcgccaaatccgaaatcctgcgcctcctgcgccggctcgcagacgaaggcctcggcgtgctgatgatttcgtccgaactggaggaattgctggcggcggccgaccgggtgaccgtgctcagcgacggaacctcggttgccgtgctgccgcgcaaggaattgagcgaggccgccctctttgccgccatggcacatcaggtggaatag

SEQ ID NO: 38559 - protein, 497 aa, Sinorhizobium meliloti 1021
MLLSMQGICKSFNGIPALRAASLEVGEAEVMALVGQNGAGKSTLIKILTGAYRRDEGAVVFAGEGVSFSMPAESQARGIATIYQEINLAPQRSVAENIYLSREPRRFGLIDRRAMRDGAAAVLRAFNLEIDVDQPVAGFSAATRQMVAIARAVTQKARLVIMDEPTSSLDEREVGILFDTIRTLKRGGVSVVFIGHRLEELYRICDRVTIMRDGKTVATAAMADMPKLALVRHMLGKELAAFEAIAKDADEGAQRPVRLSVRNAGAGVRVRDVSLTVREGEISGLAGLLGSGRTETANLIFGADRLQRGEIRYNGEARAYRQPADAIADGIGLVAEDRKVDGIIPDMSIRENMTLALLPKLARAGIVDRARQDEIVERYITALAIKCTSPDQPIKELSGGNQQKVLLGRWLCTDPKLLIVDEPTRGIDIGAKSEILRLLRRLADEGLGVLMISSELEELLAAADRVTVLSDGTSVAVLPRKELSEAALFAAMAHQVE

SEQ ID NO: 38560 - DNA, 1512 bp, Sinorhizobium meliloti 1021
  CDS (1)..(1512): transl_table=11
atgcatggttccgctgcggataccattctcaagatcaccgatgtcaccaaatccttcgggcaggtcgccgccctcaaggggatgcggctcgaagtccggcgcggccgggttcatacgctgctcggcgaaaacggcgccggcaaatcgacattgatgaagattctcgccggcgtgcacggggcaacgtcaggagagatcgttctcgacgggcaggcctaccggcccgccaacccgcaggaggccgcctcgctcgggctggcgatcgtcttccaggaattgagcctctgcaacaatctgacggtcgctgagaatatcctcgccacgcgcgagccgcgccgtttcggcttcatcaacgacaaggcgctcgtcgcgaaggcgcaccggatcgtagccgacctcagacttcccatcgacgtgacggagaaggtcggcaatctctcgattgcccagcgacagctcgtcgagatcgccaaaggcctgagccatgatgccaaggtcgtcattctggacgagccgacttcctcactcagcgacagcgaggccgagatcctcttcgagatcatcggccggctgaggcagcgcggcgccgcgatcatctatatttcgcaccgcatggaagagatcatgcggctcagcgacgacatcaccgtcatcagagacggcgaatatgtctcgacgcatgcgcgcgacgaggtcaccatcgagacgctcatcgcgttgatggtcgggcgccgcatggacgaaatctacccaccgccggtgcaccatgtggcggcggacagggccccggtccttgcagtcgaccggctgacgcgcgaaggcgagtttcaggacgtgtccttcgacgtgcgcgccggtgagatcctcggcttcttcgggcttgtcggttcgggccgctcggaggtgatgaacgcgcttttcggcatgaagagcgccgcaggcacggtgcgcctcgatggcgaggtcgtgcggttccgttccccggaccaggccatcgcccgcggcgtcggtttcgtgacggagaaccggaaggaagagggcctcgtcctcggccatagcgtcgagtggaacatatccatggcggctctcgcagacttcgccggagggttgggcttcatccgcaacggcgcggaacgggccgcggcatccgaacaggtcgggaagctctcgatcaagacgaactcgctggaaacgccggcgggggcgctcagcggcggcaaccagcagaagatcgtgctcgccaagtggctgctcacgcgacccaaggtgctgatcctcgacgagccgacccgcggcgtcgacgtcggcgcgaaattcgaaatctacaagatcatccgcgagctggcggccgagggaacggcaattctgctgatctcctccgacctgcccgaagtcctgggaatgagcgaccgcgtggtcgtcatgcatgagggcgcgcccggcgccacgctcgaaggctctgccctcactccagagacgatcatggctcacgcgacaggttttcaatcatga

SEQ ID NO: 38561 - protein, 503 aa, Sinorhizobium meliloti 1021
MHGSAADTILKITDVTKSFGQVAALKGMRLEVRRGRVHTLLGENGAGKSTLMKILAGVHGATSGEIVLDGQAYRPANPQEAASLGLAIVFQELSLCNNLTVAENILATREPRRFGFINDKALVAKAHRIVADLRLPIDVTEKVGNLSIAQRQLVEIAKGLSHDAKVVILDEPTSSLSDSEAEILFEIIGRLRQRGAAIIYISHRMEEIMRLSDDITVIRDGEYVSTHARDEVTIETLIALMVGRRMDEIYPPPVHHVAADRAPVLAVDRLTREGEFQDVSFDVRAGEILGFFGLVGSGRSEVMNALFGMKSAAGTVRLDGEVVRFRSPDQAIARGVGFVTENRKEEGLVLGHSVEWNISMAALADFAGGLGFIRNGAERAAASEQVGKLSIKTNSLETPAGALSGGNQQKIVLAKWLLTRPKVLILDEPTRGVDVGAKFEIYKIIRELAAEGTAILLISSDLPEVLGMSDRVVVMHEGAPGATLEGSALTPETIMAHATGFQS

SEQ ID NO: 38562 - DNA, 1518 bp, Sinorhizobium meliloti 1021
  CDS (1)..(1518): transl_table=11
atgcagaccagcagtgacaatatcctttcggccacaaggatcgaaaagggctttcccggcacgaaggcgctcgacagggtagattttcacctgcggcgcggcgaggttcacgcgctcctcggggagaatggcgccggcaaatcgacgcttatcaaatgcctgacgggcgcctatcgccgggatggcggcagcatgctgctcgacggagccgaggccgacccgcgcgacacgttcgatgcccagaggctgggcatcgggaccgtttaccaggaagtcaacctgctgccgaaccttaccgttgccgagaacctctttctcggacggcagccccgccgcttcggcatggtggacacgcgcaccatgaatcgcaaggcgcgggaattgctcgcggaatacgaactcgatatcgacgtcacccgtgatctcgcgagctactccgtggcgattcagcaggtcgtggccatcgcccgggccgtggatctttccggcaaggtcctgattctggacgagccgaccgcaagcctcgacgcgcacgaggtggagatgctcttccgcatcgtacgccgcctcaaggaacgcgggctcggcatcatcttcatcacccacttcctggaacaggtctacgccatctccgatcgcatcaccgttctgcggaacgggcagttggtcggcacgcgcaacgcggccgatctcgaccggcgcgagctgatcgcaatgatgatcggtcgggaactggcgacggagatccattccgcccattccgacgcggtcgcgggtgagccacgctaccgtttccgaaactttggccgccgcggaaagatcgaccccttcgatctcgatgtccgcgccggcgaggtcgtcggcatggcaggcctgctcggctcggggcggacggaaaccgccgaaatcctcttcggcgcccatcgcgccgatagcggtacggccgagatcgacggccggagcgtcgatctttcctcgccgcgtgccgcaatccggcagaagttcggcttctgccccgaggaccgcaagactgccggcatcgtcggcgacctgtccgtgcgcgagaacatcgtgctcgcccttcaggcaaggcgcggctggacccgcccgatcccgcgcgcggagcagaaccggctcgcggaccactacatccgggcactcgatatccgcacggcggaccgcgagaaaccgatcaggctgctttccggcggcaatcagcaaaaggccattctggcgcgctggctcgcgactgaaccggaactgctcatcctcgacgagccgacgcgcggcatcgacgtcggggcgcatgccgaaatcatcaggctcatcgagagcctgcgcgagaagggcatgtcgctcatcgtcatctcctcggaaatagaagaactcgtcgcctacagcacgcgggtggtcgtccttcgcgaccacgcccacgtcgccgaactcgatggcgctcaattgactgcacatcggatcgtcgaagcgatcgctgcgaccaacgggagggaagcgccttga

SEQ ID NO: 38563 - protein, 505 aa, Sinorhizobium meliloti 1021
MQTSSDNILSATRIEKGFPGTKALDRVDFHLRRGEVHALLGENGAGKSTLIKCLTGAYRRDGGSMLLDGAEADPRDTFDAQRLGIGTVYQEVNLLPNLTVAENLFLGRQPRRFGMVDTRTMNRKARELLAEYELDIDVTRDLASYSVAIQQVVAIARAVDLSGKVLILDEPTASLDAHEVEMLFRIVRRLKERGLGIIFITHFLEQVYAISDRITVLRNGQLVGTRNAADLDRRELIAMMIGRELATEIHSAHSDAVAGEPRYRFRNFGRRGKIDPFDLDVRAGEVVGMAGLLGSGRTETAEILFGAHRADSGTAEIDGRSVDLSSPRAAIRQKFGFCPEDRKTAGIVGDLSVRENIVLALQARRGWTRPIPRAEQNRLADHYIRALDIRTADREKPIRLLSGGNQQKAILARWLATEPELLILDEPTRGIDVGAHAEIIRLIESLREKGMSLIVISSEIEELVAYSTRVVVLRDHAHVAELDGAQLTAHRIVEAIAATNGREAP

SEQ ID NO: 38564 - DNA, 1515 bp, Sinorhizobium meliloti 1021
  CDS (1)..(1515): transl_table=11
atggtgaccgaacttgccaatctgaaatcaatttccaagtccttcgggggcattcacgcgcttcggtccgtgaatttcgacgtgcggccgggggaggttcatgcccttctcggcgagaacggtgctggaaaatccacccttatgcgcgttctgggcggcgagattatccccagccagggagaggtcgtcattaatggaaagcggaccgagcttcgcgatcctcgagacgcacgcgcacttggcatcgtcgtgatccaccaggagcttgcccttgcccctgatctcagcgtggcagaaaacatttttctcggagagctaccgacccttatttcccgattcagcctgcgaagacgcgcaaaacagctgatcgaccgtctgggtttcgatatcgatcccgggcgccttgtcggcaccctgtccgtcgcccaccagcaggtggtcgagatcgccaaggctctttcgcaggacatcaagatcatcgtcttcgacgaaccgaccgcagtgctcggtgctcaggatgcgatgaaactgcaccagatcatccggggcctgcgcgatcgtggagtcggcatcgtctatatttcgcatcgcctcgatgaagtgttcgatatcgcggatcgaatgacagtaatgaaggatggggagacggtcggaacagtcgcgacgacggacgtcaagatcgacgatatcattcgcatgatggtcggccggccaatcgccaacatgttcccggagcgctcgcagcgcaccatcggcgccgaactgctcaacgtgaaaaaactcaatgcgggccggatggttcgcgatgtcagcttttctgtccgcgccggcgagatcgtcgggcttggaggcctgatcggatcaggccgcacggaagtcgcacgcgcgattttcggcgctgatccgctggacagcggcacgatcagcctcaaagggaaggccctcaaactcaaatcgcccagagacgcggtgaaggccggtatcgggctcgtcccggaagaccgcaaggagcacggcgtcgtcatcgacaagccgatccgcgtcaatgcaacgatggccaggatgtcgtcggtcgtgaatgccttgggcttcctcaagccagccttggagcgcaccgacgtcaccgcacttggcaagagcttgcggctcaaggcttccagtatcgatgcaccggtttccagtctgtcgggcggcaatcagcagaaggtcgtgctggcgaaatggtttcacgccggtggcgacgttatcattctggacgaacccacacgcggcgtcgatgtcggcgcgaaggccgaaatctatgctctgatcaacaagctcgccgaagacggcaaggcagttctggtgatttcctcagaacatcaggaactctttggtctttgcgatcgcgttctggcaatgggccaggggcagatccgaggcgaactgacacccagcaactactcggaagaaaatctgcttggcctgtcgatgatgggcggagccagagcgagcaaccaaggcagccaggtatga

SEQ ID NO: 38565 - protein, 504 aa, Sinorhizobium meliloti 1021
MVTELANLKSISKSFGGIHALRSVNFDVRPGEVHALLGENGAGKSTLMRVLGGEIIPSQGEVVINGKRTELRDPRDARALGIVVIHQELALAPDLSVAENIFLGELPTLISRFSLRRRAKQLIDRLGFDIDPGRLVGTLSVAHQQVVEIAKALSQDIKIIVFDEPTAVLGAQDAMKLHQIIRGLRDRGVGIVYISHRLDEVFDIADRMTVMKDGETVGTVATTDVKIDDIIRMMVGRPIANMFPERSQRTIGAELLNVKKLNAGRMVRDVSFSVRAGEIVGLGGLIGSGRTEVARAIFGADPLDSGTISLKGKALKLKSPRDAVKAGIGLVPEDRKEHGVVIDKPIRVNATMARMSSVVNALGFLKPALERTDVTALGKSLRLKASSIDAPVSSLSGGNQQKVVLAKWFHAGGDVIILDEPTRGVDVGAKAEIYALINKLAEDGKAVLVISSEHQELFGLCDRVLAMGQGQIRGELTPSNYSEENLLGLSMMGGARASNQGSQV

SEQ ID NO: 38566 - DNA, 1521 bp, Sinorhizobium meliloti 1021
  CDS (1)..(1521): transl_table=11
ttgaaatgcggggcattacgaagacgtttccgggcgtcaaggccctggacaatgtctcgttcaaggtccgcgaaggcgagatccacgcgcttgtcggggaaaacggcgccggccaagtcgaccttgatgaaggtgctgagcggagtctatccggccggcacctatgagggcgagatccattacgacggcgagcttcgccagttcagcacgatctcggacagcgaagagctcggcatcatcatcatccatcaggaactggcgctcgttccgctgctttcgatcgccgagaacatctttctcggcaacgaggtggccgaaaagggcgtgatccactggccgcagacctttgcccgcacccaggagctcctgaagaaagtgggcctgaacgagtcccccgcgacgctgatcaccgacatcggcgtcggcaagcagcagctggtggagattgccaaggcgctttcgaagaaagtccgcctgctgatcctcgacgagccgaccgcatccctcaacgaaaacgactccgacgcgcttttgaagctgctcatggagttccgcagccagggcatgacgtcaatcatcatctctcacaagctcaacgagattaagaaggttgccgaccagatcaccatcctgcgcgatggcggaacggtagagacgctcgactgtcacaaggaagacatcagcgaggaccggatcatcaacggcatggtcggccgggccatggaagaccgctatccgccgcgtgaaccgaagatcggtgacacgctgctcgaggtgaagaactggaacgtctaccatcagcatcaccgcgaccggcagttcctgcatgacgtcagcttcaaggttcgcgccggcgaggtcgtcggcatcgccgggctgatgggcgccggccgcaccgagacggcgatgagcgttttcggcaagtcctggggccacaagatcaccggcgaggtgacgatgcatggccggccggtggacgtgagcacgattcccaaggccatcaaggcaggtcttgcctatgtaacggaggaccgcaagcagctcggcctcgtgctgatcaacaacatcatgcacaacaccacgctcgccaatctgcatgcggtcgcatcgaacggcgtcatcgacgagcgcaaggaacggaaggtcgccgccgaatatcgctcgaagctccgcatccgttcccattcgatctatcaggagacggtcaacctctctggcgggaaccagcagaaggtcgtcctgtccaagtggctgttcaccaatcccgaagtcctcatactcgatgagccgacgcgcggtatcgacatcggcgcgaagtatgagatctacaccatcatcaaccagctcgcggccgagggcaaaggcatcctgatgatctcgtcggagatgccggagctgctcgggacctgcgatcgcatctatgtcatgaacgaggggcgcatggtggccgagctttccaaggaggaagcaagccaggaatcgatcatgcgcgccatcatgcgttcaggggagaaacactaa

SEQ ID NO: 38567 - protein, 506 aa, Sinorhizobium meliloti 1021
MKCGALRRRFRASRPWTMSRSRSAKARSTRLSGKTAPAKSTLMKVLSGVYPAGTYEGEIHYDGELRQFSTISDSEELGIIIIHQELALVPLLSIAENIFLGNEVAEKGVIHWPQTFARTQELLKKVGLNESPATLITDIGVGKQQLVEIAKALSKKVRLLILDEPTASLNENDSDALLKLLMEFRSQGMTSIIISHKLNEIKKVADQITILRDGGTVETLDCHKEDISEDRIINGMVGRAMEDRYPPREPKIGDTLLEVKNWNVYHQHHRDRQFLHDVSFKVRAGEVVGIAGLMGAGRTETAMSVFGKSWGHKITGEVTMHGRPVDVSTIPKAIKAGLAYVTEDRKQLGLVLINNIMHNTTLANLHAVASNGVIDERKERKVAAEYRSKLRIRSHSIYQETVNLSGGNQQKVVLSKWLFTNPEVLILDEPTRGIDIGAKYEIYTIINQLAAEGKGILMISSEMPELLGTCDRIYVMNEGRMVAELSKEEASQESIMRAIMRSGEKH

SEQ ID NO: 38568 - DNA, 1497 bp, Sinorhizobium meliloti 1021
  CDS (1)..(1497): transl_table=11
atgacggcggatttcctcgccgtacgcggcatcaggaaatcgttcggccagatcgaggttctccatggcgtggacctcgatctgccggcaggaacgattaccgcccttctgggggagaacggggccggcaagtccacattcgtgcggatcctggccggagaccacatgcccgacggcggcacgatctctgtggacggcgccgttgcctcctttcgcggtgtgggagatgcgcgcgcggcgggaatccgtttgatcgcccaggagatcgccgatgcgccgacgctctcggtggcggagaacattctgctcggtgcatggccgacgcgtgccgggctcgtcgattaccggtccatgcgcgaactggcacgacaggcgctggaaatgcttggcaccgaacttccactggaggcgaaggtcgcctctctgcggttgggcgaacggcagatcatcgagatcgcccgctccacgataggcgcctcgaaatgcatcattttcgacgaggcgaccgcggccctctcggacgcggaggcacgcaaactcttccagttgattcggcgtcttgcgggacgcggcgtcgccattctctacatcacccaccggctcgacgaagtgttcgcgcttgccgaccgggtgtgtgtcctgcgcgacggccgcgtttcccttgatagcgcggcgggcgacgtcactcaggaccaggtcatagaggcgatggtgggccgcgcggtcgcttatgcgcgacatgccgtaccgccatcgaccgacgctcctccggtgctgaaagcaaccggcctggggtctgcttccttctcagacgtttcctttgcgttacgcccgggcgagatcctgggcgtctacggtaaggtcggctcgggcgttcaggaattgtcgagttcgctggtcggtgcgcgcgcattcgacgaaggaacactgtatgtggaaggctcgccgaggcacttccggcacccggcggacgcgattgcggctggcataggccatctatcggcggatcgcgcggccgacggcctgcttcgcacgatgacgcttgcggaaaatctttcagctcccagctggggccgcctggccaggcgcggcttcgtgaaccgccgcaagctgcgccaggcctattgccgctggcatcgcacgttgcacatcaaggccgccgcttccggcgaacaactgatcacggaactgtccggcggcaaccagcagaaggttctgctaggccggtggcttgaagccggttcgaaaatcctcgtgctgagcgaaccgacacgcggcgtcgacgtcggcgcccgccaggaaatttaccgcgtgctcgccggactggctgccaagggccacgccatcgtcgtcgccacctcggattacgaggacatcacggccgttgccagccgcgcgctggtcatggtgcgcggacggatggtcgctgagatcccgtacgagcgcatttcgactgaagccctgactgaagccgcaggaggcggtgtccatgcctga

SEQ ID NO: 38569 - protein, 498 aa, Sinorhizobium meliloti 1021
MTADFLAVRGIRKSFGQIEVLHGVDLDLPAGTITALLGENGAGKSTFVRILAGDHMPDGGTISVDGAVASFRGVGDARAAGIRLIAQEIADAPTLSVAENILLGAWPTRAGLVDYRSMRELARQALEMLGTELPLEAKVASLRLGERQIIEIARSTIGASKCIIFDEATAALSDAEARKLFQLIRRLAGRGVAILYITHRLDEVFALADRVCVLRDGRVSLDSAAGDVTQDQVIEAMVGRAVAYARHAVPPSTDAPPVLKATGLGSASFSDVSFALRPGEILGVYGKVGSGVQELSSSLVGARAFDEGTLYVEGSPRHFRHPADAIAAGIGHLSADRAADGLLRTMTLAENLSAPSWGRLARRGFVNRRKLRQAYCRWHRTLHIKAAASGEQLITELSGGNQQKVLLGRWLEAGSKILVLSEPTRGVDVGARQEIYRVLAGLAAKGHAIVVATSDYEDITAVASRALVMVRGRMVAEIPYERISTEALTEAAGGGVHA

SEQ ID NO: 38570 - DNA, 1521 bp, Sinorhizobium meliloti 1021
  CDS (1)..(1521): transl_table=11
atggcagccgtgcgcgccagcggcgccgttccgaaatccgaataccttctgactgccgagggcgttcgcaaggagtttccgggtgtcgttgcgctcgacgacgtggagttcaagctgaagcgcggcaccgtgcatgcgctcatgggcgagaacggagccggcaagtcgaccttgatgaagatcctcgccgggatctattatcccgaccagggcgaggtgaaactcaggggcgccggcatccggctgaagtcgccactcgacgcactcgagaacggcatcgccatgatccatcaggaactgaacctgatgcctttcatgaccgtcgccgagaacatctggatccgccgggaacccaagaaccgtttcggtttcgtcgatcatggcgaaatgcgccgcatgacggcaaagctcttcgagcggctcaagatcgatctcgatccggagatcgaggtccgtcacctctcggtcgccaaccgccagatggtcgagatcgccaaggcggtctcctacgagtccgacgtgctgatcatggacgagcccacctcggcgctcaccgagcgcgaggtcgcgcatttattcgagatcatccgtgacctgcgctcgcagggtatcggcatcgtctacatcacccacaagatgaacgagctgttcgagatcgccgacgagttctcggtgttccgcgacggcaaatatatcggcacccacctctcgaacgaggtcacccgcgacgacatcatccgcatgatggtcggacgtgaaatcacccagatgttcccgaaggaggaggtgccgatcggcgacgtggtgctgtcggtgaagaacctgacgctcaacggcgtcttccgcgacgtctccttcgatgtacgcgccggcgagatcctcggcgttgctggcctcgtcggatccggccgctccaacgtcgccgagacgctcttcggggtcacgccggcgagctcgggcacgatcgcgatcgacgggaaagaggtcgtgatcgacagcgccaacaaggcgatccgtcaccggatggcgtttctcaccgaggatcgcaaggacaccggctgcctgctcatcctcgacattctcgaaaacatgcagatcgccgtgctgcaggacaaattcgtcaagcgcggcttcgtcagcgagagggaagtcactgccgcctgcgaggagatgagccgcaagcttcgggtcaagacgccgaacctgcaggagcgcgtcgagaatctctcgggcggcaaccagcagaaggtactgatcggccgctggctgctcaccaatccgcgcatcctgatcctcgacgagccgacgcgcggcatcgatgttggcgccaaggccgaaatccaccgcctggtgaccgaacttgcccgcaacggtgtcgcggtcatcatgatctcgtcggaaatgccggaagtgctcgggatgagcgaccggatcatggtgatgcacgagggccgggtcaccggcattctcgacagggcggaagccacccaaatcaaggtcatggagcttgcggcgcgatag

SEQ ID NO: 38571 - protein, 506 aa, Sinorhizobium meliloti 1021
MAAVRASGAVPKSEYLLTAEGVRKEFPGVVALDDVEFKLKRGTVHALMGENGAGKSTLMKILAGIYYPDQGEVKLRGAGIRLKSPLDALENGIAMIHQELNLMPFMTVAENIWIRREPKNRFGFVDHGEMRRMTAKLFERLKIDLDPEIEVRHLSVANRQMVEIAKAVSYESDVLIMDEPTSALTEREVAHLFEIIRDLRSQGIGIVYITHKMNELFEIADEFSVFRDGKYIGTHLSNEVTRDDIIRMMVGREITQMFPKEEVPIGDVVLSVKNLTLNGVFRDVSFDVRAGEILGVAGLVGSGRSNVAETLFGVTPASSGTIAIDGKEVVIDSANKAIRHRMAFLTEDRKDTGCLLILDILENMQIAVLQDKFVKRGFVSEREVTAACEEMSRKLRVKTPNLQERVENLSGGNQQKVLIGRWLLTNPRILILDEPTRGIDVGAKAEIHRLVTELARNGVAVIMISSEMPEVLGMSDRIMVMHEGRVTGILDRAEATQIKVMELAAR

SEQ ID NO: 38572 - DNA, 1527 bp, Sinorhizobium meliloti 1021
  CDS (1)..(1527): transl_table=11
atgaatccggagacggtcgacgccgcgcgcgtcgtgctggaggcacggcggatcagcaagtcgttcagcggcgtgcaggtgctcttcagtgtcaatttcgagcttcgcgccggcgaaatccacgccctgatgggcgagaacggcgccggaaagtcgacgctcgtcaagattctctcaggtttcgagcagccgtcctcgggcgaggtcctgctcgacggccagccggtaacgcttcctgctaacggtgcggccgaagcgctgggcatcgtcatcatccaccaggaattcaatcttgccgaacacctgactgttgccgaaagcctgtttctcggtcgcgaggtgacgcgtttcggcgtgctcgaccgcaagtatatgcgcgcggagacgcgccgggttctcgatctgcttggctgtcatgtggacgcgaacgcgctgatcggcagtctttccattgccgaaaagcagatggtcgagatcgccaaggccatcagccgcgacgcgcggatcgtcttcatggatgagcccacggccgttctatcccgcgaggagaccaacttccttttccggcaggtccgcaagctgcgcgaccggggcacgagcttcgtcttcgtgtcgcacaagctcgacgaagtcatcgaactgaccgaccgcgtgacggtactgcgcgacgggcagtgggtgaagactgccgcgacttcgatgctcgacggcgagtcgatcgcgcagctcatggtcggccgcgaaatgtcgagcctctttcccgccaagaaagagccgaacgtcgacgaagaggtcgtgctgcgtgtcgacgccgtctcgaccgactatgtccaggacgcccgcttcgaggtgcgcaaaggcgaaatccttggcttttcgggtatgatcggctccggccgcaccgaactcatggaggcggtcgccggcctcaggccccgcctgtcgggcgaggtgacgatccgtggagagaccgtgccctccggcgacgtgcacgcggccaaccggcgcggtcttgcctacatgaccaaggaccgcaaggcgaagggcctgctgctcaattccggcatgaccgcgaacctgaccttgcagtcgctcggccggcatgcccgcatcggctatctcagcccggcgagcgaggcggctgcgctcaaaagagcccgccgccgcttcgacatccgcgtgcgcgacggcaacgtcgtcgccaggcgcatgtccggcggcaaccagcagaagctgctgctcgccaaggtgatggaaacggaaccggacatcatcatcatcgacgagccgacacgcggcatcgacgtcggcaccaagcagcagatctatcatttcatctcggcgctcgcgcgcgacggccgctcgatcatcgtcgtctcttccgaaatgcctgaggtcatcgggctttgcaccagggtcgcggtgatgcgcgagggacgcatcgtcggcatgctcgaaggagacgagatctccgagcaggagatcatgcgctacgcagccgggctgaagaaaatggctgcggcctga

SEQ ID NO: 38573 - protein, 508 aa, Sinorhizobium meliloti 1021
MNPETVDAARVVLEARRISKSFSGVQVLFSVNFELRAGEIHALMGENGAGKSTLVKILSGFEQPSSGEVLLDGQPVTLPANGAAEALGIVIIHQEFNLAEHLTVAESLFLGREVTRFGVLDRKYMRAETRRVLDLLGCHVDANALIGSLSIAEKQMVEIAKAISRDARIVFMDEPTAVLSREETNFLFRQVRKLRDRGTSFVFVSHKLDEVIELTDRVTVLRDGQWVKTAATSMLDGESIAQLMVGREMSSLFPAKKEPNVDEEVVLRVDAVSTDYVQDARFEVRKGEILGFSGMIGSGRTELMEAVAGLRPRLSGEVTIRGETVPSGDVHAANRRGLAYMTKDRKAKGLLLNSGMTANLTLQSLGRHARIGYLSPASEAAALKRARRRFDIRVRDGNVVARRMSGGNQQKLLLAKVMETEPDIIIIDEPTRGIDVGTKQQIYHFISALARDGRSIIVVSSEMPEVIGLCTRVAVMREGRIVGMLEGDEISEQEIMRYAAGLKKMAAA

SEQ ID NO: 38574 - DNA, 1506 bp, Salmonella typhimurium LT2
  CDS (1)..(1506): transl_table=11
atggacgcattactgcaactcaaagggatcgataaagcgttccccggcgtgaaggctctctccggcgccgcgttaaacgtttatcctggccgcgttatggcgctggtgggggaaaacggcgccggaaaatccaccatgatgaaagtattaaccggcatctatacgcgagatgcgggatcgttgttatggctgggtaaagagaccacctttaatgggcctaaatcgtctcaggaagccgggatcggcattattcatcaggaactgaacctgatcccgcagttgaccattgcggaaaacatcttcctgggccgtgagtttgtgaatcgctttggcaaaatcgactggaaaaagatgtatgccgaagccgaccacctcttagccaaactcaatctgcgttttaagagcgataagctggtgggcgaactctctatcggcgatcagcaaatggtggaaatcgccaaagtgctgagcttcgaatccaaagtcatcattatggatgaaccgaccgatgcgctgaccgacactgaaaccgactctctgttccgcgttatccgcgaattaaaatcgcaggggcgcggcattgtctatatctcccaccgtatgaaagagatcttcgaaatttgcgatgacgtgacggtcttccgcgatgggcaatttatcgccgagcgtgaagtggccacgttgaccgaagattctcttatcgaaatgatggtgggacgtaagctggaagatcagtacccgcatctggataacgcgccgggtgagattcgcctcaaggtcgataatctgtgcggaccgggcgtgaatgatgtctcttttgtgctgcgaaaaggcgagattcttggcatctccggcctgatgggcgccggtcgcaccgagctgatgaaagtattgtacggcgcgatgccgcgaaccagcggttatgtgacgctcgatggacacgaagtggtgacgcgctctccgcaggacgggctggccaatggcatcgtttatatctctgaagaccgtaagcgcgatggactggtgctcggcatgtcagttaaagagaatatgtcgctgacggcgctggactatttcagccgcgctggcggaagcctgaaacacaaagatgagcagcaggcggtgggggattttatccgtctgttcaacgtcaagacgccttcaatggaacaggcgataggcctgctttccggtggtaatcagcaaaaagtggcgattgcccgcgggttgatgacgcgcccgaaagtgctcattctcgacgagccgacccgcggcgtggacgtcggcgccaagaaagagatttaccagcttatcaaccagtttaaggccgacggcctgagcatcattctggtctcatctgagatgccagaagtattaggcatgagcgatcgcatcatcgtcatgcatgaagggcatctcagcggtgaatttactcgcgagcaggccacccaggaagtgttaatggctgccgcagtgggcaagcttaatcgcgtgaatcaggagtaa

SEQ ID NO: 38575 - protein, 501 aa, Salmonella typhimurium LT2
MDALLQLKGIDKAFPGVKALSGAALNVYPGRVMALVGENGAGKSTMMKVLTGIYTRDAGSLLWLGKETTFNGPKSSQEAGIGIIHQELNLIPQLTIAENIFLGREFVNRFGKIDWKKMYAEADHLLAKLNLRFKSDKLVGELSIGDQQMVEIAKVLSFESKVIIMDEPTDALTDTETDSLFRVIRELKSQGRGIVYISHRMKEIFEICDDVTVFRDGQFIAEREVATLTEDSLIEMMVGRKLEDQYPHLDNAPGEIRLKVDNLCGPGVNDVSFVLRKGEILGISGLMGAGRTELMKVLYGAMPRTSGYVTLDGHEVVTRSPQDGLANGIVYISEDRKRDGLVLGMSVKENMSLTALDYFSRAGGSLKHKDEQQAVGDFIRLFNVKTPSMEQAIGLLSGGNQQKVAIARGLMTRPKVLILDEPTRGVDVGAKKEIYQLINQFKADGLSIILVSSEMPEVLGMSDRIIVMHEGHLSGEFTREQATQEVLMAAAVGKLNRVNQE

SEQ ID NO: 38576 - DNA, 1536 bp, Salmonella typhimurium LT2; identical to SEQ ID NO: 27210
  CDS (1)..(1536): transl_table=11

SEQ ID NO: 38577 - protein, 511 aa, Salmonella typhimurium LT2; identical to SEQ ID NO: 27211

SEQ ID NO: 38578 - DNA, 1572 bp, Ralstonia solanacearum GMI1000
  CDS (1)..(1572): transl_table=11
atgaccaccgtccctgcaccgcgcacaccgctgctgcgggcgtccgccctcagcaagcactacgccgcgcctgtgctgcgcgatgtcgatctcgacgtctacgcgggcgaggtgctggccttgaccggcgagaacggcgcgggcaagagcaccctgtccaagatcctgtgcggactggagacgccggcctccgggtcgatgtcgctggccgggcgcctgttcgcgcccgcctcgcgctgcgacgccgagaccctcggcgtgcgcatggtgctgcaagagctgaacatggtgcccacgctgacggtggccgagaacctcttcctcggcaacctgccgcgccgccggggctggatcgaccgccccgcgctgcagcgccaggcggaacaggcgctggcgcggatcggactcgacctagacccccgcctgcccgtgcaccggctcggcatcgggcaccggcagatgatcgagatcgcccgcgcgctggccagcgcctgccgggtcctggtgctcgacgagccgactgccatgctcagcgcgcacgagagcgcgaccctgttcgcccgcatcgatgcgctgcgccgcgacggcgtggccgtcgtctacatctcgcaccggctcgacgagctggcgcgcatcgccgaccgcatcgtcgtgctgcgcgacggccggctgatcaccgatgcgcccgccgccacgctcacgcaggacgcgctgatccgggccatggtcggacgcgagctggccgcggacaccggcgcagagcgcccggcccgcgcgccgcgaccgcccgataccgcgccgaccctgcgcgtgaccggcctgacccgggcacccgcggtgcacgatgtgtcgtttgccgtggcgccgggcgagatcttcggcattgccgggctggtcggcgccggacgcaccgagctgctgcggctcatcttcggggcggaccgtgcggacgccggcaccatcgagaccggaacgccgctggcgccacggcgcatccgcgcgccgggcgatgcggtgcgccatggcatcggcctgctcaccgaagaccgcaaggacgaaggcctgctgctcggcctgccgatcgccgccaacatcgccctgggcaacatgaccggcgcagcacggcgcggctggctgcagccggcgcgcgagcgggcgcaggcgcggcgccacatcgaggcgctgcgcatccgctgcgcggggccggagcaggcggtcggcgagctgtccggcggcaaccagcagaaggtggcgatcgcccgctggctggagcgcgacgccccggtgctgctgttcgacgagcccacgcgcggcgtcgacgtgggcgccaaattcgacatctacgccctgctcgaagggctggccgcgcagggcaaggccctggtggtggtctccagcgacctgcgcgagctgatgcaggtctgcgaccgcatcggcgtgatgcgcgcggggcggctgacgcagatcttccgccgcgacagctggagccgggatgccctgcttgccgccgccttcggcgaatgtcccccgccgtcctccacgtccgccccggagaccgccgatgcgttctga

SEQ ID NO: 38579 - protein, 523 aa, Ralstonia solanacearum GMI1000
MTTVPAPRTPLLRASALSKHYAAPVLRDVDLDVYAGEVLALTGENGAGKSTLSKILCGLETPASGSMSLAGRLFAPASRCDAETLGVRMVLQELNMVPTLTVAENLFLGNLPRRRGWIDRPALQRQAEQALARIGLDLDPRLPVHRLGIGHRQMIEIARALASACRVLVLDEPTAMLSAHESATLFARIDALRRDGVAVVYISHRLDELARIADRIVVLRDGRLITDAPAATLTQDALIRAMVGRELAADTGAERPARAPRPPDTAPTLRVTGLTRAPAVHDVSFAVAPGEIFGIAGLVGAGRTELLRLIFGADRADAGTIETGTPLAPRRIRAPGDAVRHGIGLLTEDRKDEGLLLGLPIAANIALGNMTGAARRGWLQPARERAQARRHIEALRIRCAGPEQAVGELSGGNQQKVAIARWLERDAPVLLFDEPTRGVDVGAKFDIYALLEGLAAQGKALVVVSSDLRELMQVCDRIGVMRAGRLTQIFRRDSWSRDALLAAAFGECPPPSSTSAPETADAF

SEQ ID NO: 38580 - DNA, 1557 bp, Ralstonia solanacearum GMI1000
  CDS (1)..(1557): transl_table=11
atgtccatagccgtgttggatcggccgatgtcccgccaggacacgccgtctgcttcgtcagtcccgtccgcctgcgactgcatgctggaagttcgtggcgtcggcaaatcctttcccggcgtggtcgcgctcgacgacgtgcggctgcgcgtgcggcgcggcaccgttcatgcgctgatgggcgagaacggtgccggcaagtccacgctgatgaagatcattgccggcgtgcatgcgccggacaggggcgagatccgcctcaagggcgagccggtcgtgctgcacggcccgctcgacgcgctcaatcgcggcattgcgatgatccatcaggaactgaacctgatgccgtacatgaccgtggccgagaacatctggattcggcgcgagcccaggaaccgctgcggcctggtcgatcacgccgaactgcgccggcgcacgcaggcgctgttcgcgcggctggcgatcgacatcgacccggaggccgaagtgcgcacgctgacggtggcaagccgccagatggtcgagatcgcgaaggccgtgtcgttcgactccgaggtgctcatcatggatgagccgacgtcggcgctgagcgatgtcgaagtccaccatctgttccgcatcattcgccagctgcgcgagcagggcaagggcatcgtctacatcacgcacaaaatggacgagctgttcgagatcgccgacgagttctcggtgttccgcgacggcaagtccatcggcacgcatgcggcgagcgacgtcacgcgcgacgacatcatccgcatgatggtcgggcgcgagatcacgcagatgtttcccaaggcggatgtgccgatcggcgacgtcgtgctgtcggtgaagaacctgtgcctccacggcgtgttccgcgacgtgagcttcgatttgcgcgcgggcgagattcttggcgtcgcgggcctggtcggctcggggcgctcgaacgtggcggaggcgctgttcggcgtcgtgccggccagcagcggcgagatccggctcgacggcgagcgggtcagcatccgcacgcccgcgcaggcgatgcggtacggcatggccttcctgaccgaagaccgcaaggacacgggctgcttcctgaacctcgacctgctcgccaacatggaagccgcggtgctgcagcgccactacatgacatgcggcttcgtgcggcgtggcgcgctgaagcaggattgcgaggccatgagccgcacgctgcgggtgaagtcgccggggctgcacgaagaaatccagaacctgtcggggggcaaccagcagaaggtgctgatcggccgctggctgctgacccacccgcggatcctgatcctggacgagccgacgcgcggcatcgatgtcggcgcgaaagccgagatccaccgtctcgtgagcgcgctggcgggcgagggcgtggcggtgctgatgatctcgtcggagatgccggaagtgctgggcatgagcgaccggatcatggtcatgcacgaaggccgcgtgaccggcatcgtcgatcgcaaggacgcgagccaggtccgggtcatggaactggcttcccgctga

SEQ ID NO: 38581 - protein, 518 aa, Ralstonia solanacearum GMI1000
MSIAVLDRPMSRQDTPSASSVPSACDCMLEVRGVGKSFPGVVALDDVRLRVRRGTVHALMGENGAGKSTLMKIIAGVHAPDRGEIRLKGEPVVLHGPLDALNRGIAMIHQELNLMPYMTVAENIWIRREPRNRCGLVDHAELRRRTQALFARLAIDIDPEAEVRTLTVASRQMVEIAKAVSFDSEVLIMDEPTSALSDVEVHHLFRIIRQLREQGKGIVYITHKMDELFEIADEFSVFRDGKSIGTHAASDVTRDDIIRMMVGREITQMFPKADVPIGDVVLSVKNLCLHGVFRDVSFDLRAGEILGVAGLVGSGRSNVAEALFGVVPASSGEIRLDGERVSIRTPAQAMRYGMAFLTEDRKDTGCFLNLDLLANMEAAVLQRHYMTCGFVRRGALKQDCEAMSRTLRVKSPGLHEEIQNLSGGNQQKVLIGRWLLTHPRILILDEPTRGIDVGAKAEIHRLVSALAGEGVAVLMISSEMPEVLGMSDRIMVMHEGRVTGIVDRKDASQVRVMELASR

SEQ ID NO: 38582 - DNA, 1536 bp, Ralstonia solanacearum GMI1000
  CDS (1)..(1536): transl_table=11
atgtcggcctttcttgagtttcgcggtatcagcaaggtgtttcccggcgtgcgcgcgctgtcggaggtgtcgttcggcatcgaatgcggccgcgtgcacggcctgctgggcgagaacggcgcgggcaagtcgacgctgctgaagatcctcggcggcgactaccagcccgatggcgggcagatcgccgtcgagggccggcccgtggcgttcccgaacgcgcgggcggcgctggcggcgggcatcgccgtcatccaccaggagctgcagacggtgcccgagctgacggtgatggacaacctgctgctcggccacctgcccagccgcggcggcttcatccgccagggcgaggcgatggcgtggacgcgcgcgcagctggcgcgcatcggcgtcgatctcgacccgaaggccaggctgaagcacctgtcgatcgggcagcgccagatggtggagatctgcaaggcgatcctgcgcgatgcgcgcgtgatcgcgctcgatgagcccaccagctcgctgtcggtgcgcgagacggacatcctgttccggctggtgaaggacctgcgcgcgcagggccgggcgctgatctacatctcgcaccgcctcgacgagatcttcgcgttatgcgacggctgcaccatcttccgcgacggtcgcaaggtggcggatttccggtcgatggccgacgtcacgcgcgagcagctcgtcgcccagatggtcggccgtcagatcgacgacatcttcggctaccggccgcgcgcgccgggcgacgtccggctgcgggtggagggcctgatgggcccgaagctggccgagccggcgagcttcgcggtgcggcgcggcgagatcgtcgggctgttcggcctggtgggcgcggggcgctcggagctggcgcggctggtgtacggcgccgaccgcaagaccgccggcaccgtcgtgcttgacggcgagccgatccgcatccgcgccgtggccgacgcgattcgccagggcatcgtgctgtgcccggaggaccgcaaggaggaaggcatcatcggctgccgctcggtgtcggagaacatcaacatcagctgccggcgcaaccggcgcccgggttggggcgggttcaacctgttcgtcgatgaccggcaggaagcgaagaccgccgaccactacatcgcccggctgcgcatcaagacgccgcatcgcgaccagcccatccgcctgctctcgggcggtaatcagcagaaggccatcctggcgcgctggctggccgaggacggcatgcgcgtgctgatcatcgacgagccgacgcgcggcatcgatgtcggcgccaagaacgagatctaccaggtgctgtacgagctggccgagcgcggtgtggcggtgctgatgatctccagcgaactgccggagatcctgggcgtggccgaccgcgtgctggtgatgagcgaaggccgcatcgccggcgagctgccgcgcgcgcaggccaccgaacacgccgtgctgaacctggccttgcggccgcggcgcgacccatgcgttgcggcccaggccgcttga

SEQ ID NO: 38583 - protein, 511 aa, Ralstonia solanacearum GMI1000
MSAFLEFRGISKVFPGVRALSEVSFGIECGRVHGLLGENGAGKSTLLKILGGDYQPDGGQIAVEGRPVAFPNARAALAAGIAVIHQELQTVPELTVMDNLLLGHLPSRGGFIRQGEAMAWTRAQLARIGVDLDPKARLKHLSIGQRQMVEICKAILRDARVIALDEPTSSLSVRETDILFRLVKDLRAQGRALIYISHRLDEIFALCDGCTIFRDGRKVADFRSMADVTREQLVAQMVGRQIDDIFGYRPRAPGDVRLRVEGLMGPKLAEPASFAVRRGEIVGLFGLVGAGRSELARLVYGADRKTAGTVVLDGEPIRIRAVADAIRQGIVLCPEDRKEEGIIGCRSVSENINISCRRNRRPGWGGFNLFVDDRQEAKTADHYIARLRIKTPHRDQPIRLLSGGNQQKAILARWLAEDGMRVLIIDEPTRGIDVGAKNEIYQVLYELAERGVAVLMISSELPEILGVADRVLVMSEGRIAGELPRAQATEHAVLNLALRPRRDPCVAAQAA

SEQ ID NO: 38584 - DNA, 1545 bp, Ralstonia solanacearum GMI1000
  CDS (1)..(1545): transl_table=11
atggacaaccgcaccctgttcgagatgcgcagcatcgtcaaggcattctccggcgtgcgcgcgctcgacggcgtcagcctggccgtgcggccgggcgagtgcgtcggcctgtgcggcgagaacggcgccggcaaatcgaccctgatgaaggtgctgtccggggtctacccctacggcacctacgagggcgagatcctgtgggacggcgccccgctgcgcgcgcattcggtgcgcgacagcgagcacgcgggcatcgtcatcatccaccaggagctgatgctggtgcagcagctctcggtggcggagaacatcttcctcggcaacgagatcaccaagccgggcgggcgcatggactacgacgccatgcaccgcaaggccgaagaactgctcgcccgcctgcgcctgaccgacgtgaacgtggccgccccggtgatgaactacggcagcggccaccagcagctgttcgagatcgccaaggcactggccaagaacgcgcgcctgctgatcctcgatgagccgacgtcgtcgctgtcggccaaggagatcgaggtgctgctgtccatcatcgaagacctcaagcgcggcggcgtggcgtgcgtctacatctcgcacaagctcgacgaggtcaagcgcgtgtgcgacaccatcaccgtcatccgcgacggcaagcacatcggcacgcgcccggccgccgagctggacatcaacggcatcatcacgatgatggtcggccgcgagatgacctcgctgttccccaaggtcgagcacaccgtgggcgacgtggtgctggaagcgcgcaacgtcacctgctgggacgtcaccaaccccaaccgcaagcgcgtcgacgacgtgagcttctcggtgcgccgcggcgagatcctcggcgtggccgggctggtgggtgcgggacgcacggagatggtgtccgcgctgttcggcgcctaccccggccgctcctccgcgcaggtgctggtcgaaggcaagcccgtcaaggtgcattcgcccgcccaggccatcgcgcacggcatctgcctggtgcccgaagaccgcaagcgccacggcatcgtgccgctgatgggcgtgggcgagaacatcacgctggccacgctggcccagtacgcgcgcgggctgcgcgtcgacaagggcgcggagctgatgaccgtcgatcgcgaaatcaagcgcctgcgcatcaagaccgccagccccgcgctgtcgatcgccagcctctcgggcggcaaccagcagaaggcggtgctgaccaagatggtgctggcgtgccccaaggtgctgatcctcgacgagcccacgcgcggcgtggacgtcggctccaagtacgacatctaccagatgatcgccgacctggccgccagcggcgtggcgatcatcatggtctcttccgaactgccggagatcctgggcatgagcgatcgtgtcctggtgatcggcgaaggcgagttgcgcggcgacttcgccaaccagggcctgacccaggaacgcatcctggctgccgccatccatgctgaaccgcggcttcgcgctgcctga

SEQ ID NO: 38585 - protein, 514 aa, Ralstonia solanacearum GMI1000
MDNRTLFEMRSIVKAFSGVRALDGVSLAVRPGECVGLCGENGAGKSTLMKVLSGVYPYGTYEGEILWDGAPLRAHSVRDSEHAGIVIIHQELMLVQQLSVAENIFLGNEITKPGGRMDYDAMHRKAEELLARLRLTDVNVAAPVMNYGSGHQQLFEIAKALAKNARLLILDEPTSSLSAKEIEVLLSIIEDLKRGGVACVYISHKLDEVKRVCDTITVIRDGKHIGTRPAAELDINGIITMMVGREMTSLFPKVEHTVGDVVLEARNVTCWDVTNPNRKRVDDVSFSVRRGEILGVAGLVGAGRTEMVSALFGAYPGRSSAQVLVEGKPVKVHSPAQAIAHGICLVPEDRKRHGIVPLMGVGENITLATLAQYARGLRVDKGAELMTVDREIKRLRIKTASPALSIASLSGGNQQKAVLTKMVLACPKVLILDEPTRGVDVGSKYDIYQMIADLAASGVAIIMVSSELPEILGMSDRVLVIGEGELRGDFANQGLTQERILAAAIHAEPRLRAA

SEQ ID NO: 38586 - DNA, 1479 bp, Agrobacterium tumefaciens str. C58
  CDS (1)..(1479): transl_table=11
atgcgcgagccggttctttcgctccgtggcatcagcaaacgctatggtccgctcgaggttctgaagtccgtcgatctcgaggtctatccgggcgaagtggtagcgttgctgggtgaaaatggcgcgggcaagtccacgctgtcaggcatcatcgccggttcccgcgaaccttcagagggtaagatgacctggcttgggcagccgtatcagccggcatcgccgcgcgaggcgatcgacaagggcatcgtcctcatccatcaggaactgaagcttctgccggagctttccatcgctgagaatgtcttcatcggccgctggcccatgaaaaacggcattgtcgaccgcgccgagatggtgcggagagcccagcagcaactggcgcgccttaacctgcatattcccgcaacgcgcaaggtggcaggcctttccaccgccaaccagcagctgattgagatcgccaaggcgctcgcgctcgacgccaaactcctcatcctcgacgagccgacggccgcacttggcggcgccgaaacgcaggcgctgttcgagcaggtgcgcaagctgcgtgccgaaggcgtgggcatcatctacatctcccaccgcatggaagagatcagacagatcaccgaccgtatcgtcgtgttgcgcgacggcgagcgggtgcatgaatttgccgacagtgcgacgccggtgcgcaccattgtcgaaagcatggtcggccgctcgctggagcgcctgttcccggcgctgcctgaaccgcaggagaaggtggtactcgaggtcaaggggctgacgggcgcgaccaatgcctttcgcgacatcagcttcggcgtccgcgccggtgaaattctcggcattgccggcctgatcggcgcgggacgaacggaattggtgcgcgccatctccggtgccgatccgacgagcgcgggtgaagtacgactggatggcgaggtgctttcgctgaaaagcccggcggatgccatcgccaagggcatcgtcatggtgccggaagaccgcaaattgcaggggctggtggtggaacacgagatcggtgaaaacctgatctatgccaatctcgaccgcgtgggcacgggctggatcacgccggctatcaagcgcgctttcacccgggacgccatcgccaaattcggggtgaagggccgtagcgaacagccggcctccgatctctccggcggcaaccagcagaaagtggtcatcgccaaatggcttgcccgcaatccgcgtgtggtggtgctggatgaaccgacgcgcggcatcgatgtcggtgcgcgggcaggcatttacgatatcattgttggcctggcgaaggacggcgtggccgtcatcgtcgtcagttccgatctggaagaggtgctgggcgtttcgaaccgtatcctcgtgctcgcgcagggaaaacaggctggcatccttaaccgcgacgaggcaaacgacgtctcggtcatggaactggcaaccatctga

SEQ ID NO: 38587 - protein, 492 aa, Agrobacterium tumefaciens str. C58
MREPVLSLRGISKRYGPLEVLKSVDLEVYPGEVVALLGENGAGKSTLSGIIAGSREPSEGKMTWLGQPYQPASPREAIDKGIVLIHQELKLLPELSIAENVFIGRWPMKNGIVDRAEMVRRAQQQLARLNLHIPATRKVAGLSTANQQLIEIAKALALDAKLLILDEPTAALGGAETQALFEQVRKLRAEGVGIIYISHRMEEIRQITDRIVVLRDGERVHEFADSATPVRTIVESMVGRSLERLFPALPEPQEKVVLEVKGLTGATNAFRDISFGVRAGEILGIAGLIGAGRTELVRAISGADPTSAGEVRLDGEVLSLKSPADAIAKGIVMVPEDRKLQGLVVEHEIGENLIYANLDRVGTGWITPAIKRAFTRDAIAKFGVKGRSEQPASDLSGGNQQKVVIAKWLARNPRVVVLDEPTRGIDVGARAGIYDIIVGLAKDGVAVIVVSSDLEEVLGVSNRILVLAQGKQAGILNRDEANDVSVMELATI

SEQ ID NO: 38588 - DNA, 1539 bp, Agrobacterium tumefaciens str. C58
  CDS (1)..(1539): transl_table=11
atggccaataccattctcgaaatgcggaacatcaccaagacgtttccgggcgtgaaagcgcttgagaacgttaacctcaaggtgaaagagggtgagatccacgcactcgtcggtgagaacggcgcggggaagtcgaccttgatgaaggtcctttccggtgtttaccccgccggcacctatgagggcgaaatccactatgaaggcgcagtcaggaattttcgcgccatcaacgacagtgaagatattggtatcatcatcattcaccaggagcttgcactcgtgccgctcctgtcgattgcggaaaacatcttccttggcaacgaagtcgcttcgaacggcgtcatcagctggcagcagaccttcaaccgtacccgcgaactcctgaagaaggtgggtctgaaggaatcgcccgagacgctgatcaccgatatcggcgtcggcaagcagcagctggtcgaaatcgccaaggcactgtcgaagagcgtgaagctgctcatcctcgacgagccgacggcttcgctcaacgaaagcgattccgaggcgctgctcaatctcctgatggaattccgcaatcagggcatgacctcgatcatcattacccacaagctgaacgaagtgcgcaaggtggccgaccagatcaccgtgctgcgcgacggcatgacggtgaagacgctcgactgtcatcaggaagaaatcagcgaggatgtcatcatccgcaacatggtgggacgcgatctggaagatcgttatccgccgcgtgatgtgccgatcggcgagaccattctcgaagtcaaaaactggaacgcctatcaccagcagcatcgcgaccgccaggttctgcacgacatcaacgtcaccgtccgcaagggcgaagtcgtcggcatcgccgggctgatgggggcaggacgcaccgagttcgcgatgagcgtgttcggcaagtcctatggccacaggatcaccggcgacgtgctgatcgacggcaagcctgtcgatgtcagcaccgtgcgcaaggcgatcgacgccggtctcgcttatgtgaccgaagaccgcaaacatctcgggctcgtgctcaacgacaacatcctgcacaataccacgctggcaaatctcgccggcgtgtcgaaggccagcatcatcgacgacatcaaggaaatgaaggtggcgagcgatttccgcacgcgtcttcgcattcggtcatcgggcatcttccaggaaacggtcaatctttcgggcggcaaccagcagaaggttgtgctctccaagtggctgttctccaaccctgatgtgctgatcctcgatgaaccgacacgcggcatcgacgttggcgcaaaatacgaaatctacaccatcatcaaccagctcgctgccgatggtaaaggcgttctgatgatctcatcggaaatgcctgaactgctcggcaattgcgaccgcatctacgtcatgaacgaaggccgcatcgtcgctgaattgccgaagggagaggcgagccaggaaagcatcatgcgcgctatcatgcgctcaggggagaagaactcatga

SEQ ID NO: 38589 - protein, 512 aa, Agrobacterium tumefaciens str. C58
MANTILEMRNITKTFPGVKALENVNLKVKEGEIHALVGENGAGKSTLMKVLSGVYPAGTYEGEIHYEGAVRNFRAINDSEDIGIIIIHQELALVPLLSIAENIFLGNEVASNGVISWQQTFNRTRELLKKVGLKESPETLITDIGVGKQQLVEIAKALSKSVKLLILDEPTASLNESDSEALLNLLMEFRNQGMTSIIITHKLNEVRKVADQITVLRDGMTVKTLDCHQEEISEDVIIRNMVGRDLEDRYPPRDVPIGETILEVKNWNAYHQQHRDRQVLHDINVTVRKGEVVGIAGLMGAGRTEFAMSVFGKSYGHRITGDVLIDGKPVDVSTVRKAIDAGLAYVTEDRKHLGLVLNDNILHNTTLANLAGVSKASIIDDIKEMKVASDFRTRLRIRSSGIFQETVNLSGGNQQKVVLSKWLFSNPDVLILDEPTRGIDVGAKYEIYTIINQLAADGKGVLMISSEMPELLGNCDRIYVMNEGRIVAELPKGEASQESIMRAIMRSGEKNS

SEQ ID NO: 38590 - DNA, 1518 bp, Agrobacterium tumefaciens str. C58
  CDS (1)..(1518): transl_table=11
atggcgcgtgcggagcgttcggtccttctgcgtctcgagaacatcagcaaggaatttccaggcgtaaaagcgctgtcgaacgttcatttcgatctgcgcagcggcgaagtgcatgccgtctgcggcgagaatggcgcgggaaaatcgacactgatgaagatcatcagcggtgtctaccagccgagtgaaggaacgatcctgcacaaaggcgagaaggtgcaatatgcatcgccgctgcaatccgaagcggccggcatcgccatcatccatcaggaactcaaccttgttccgcatctttccgttgccgagaacatttatctggcgcgtgagccgcgccggggttttctcgtggaccgcaagaaactgcgactcgatgccaaacgctgtctcgaccggctgggggtcgatatcaaccccgaccagctggtccgcagtctttccgtcgcgcaatgtcagatggtggaaatcgccaaggcgctctctcttgatgccgaagtgctgatcatggacgagccgacctcctcgctgaccgagcaggaaacccggcttctgttcaaggttatccgcgatctcaaggcctccggcgtcggtatcgtttatatttcccatcgtctcgatgagatggccgagatcgtcgatcgcgtgacgatcctgcgcgacggacgttatatctcaaccgacgatttcgcctcgatcactgttgatgacattgtcacgcgtatggtcgggcgttcgctggaagacaaattccccgaacgcacctcgcgcccgacggatgatattctcttttccgtcgaagggctgacgcgcaatggcgtgttcagtgacgtcagtttttcactgcggcgtggcgaaatcttaggttttgccggacttatgggcgcgggacgaacggaagttgcgcgggcaatcttcggggccgatccgctcgatgcgggtaagatcgttttcaacgggcgcgaactttcgatcggctcgccgcaggacgctatcgaggaaggcattgcctatctctcggaagatcgcaaaagcgatggcctcgccatcaagatgtcggtggcggccaatacgacgctcgccaatctcggcgaggtttccaaccgtttcgggctgatcgatttcaagaagcatgacgatgtggcgaagcgttacgtcgatctgctgaatatccgcactccctcgatcgatcagaccgtgcggctgctttcgggtggcaaccagcagaaaatcatcatcggcaaatggctgttccggcagtcgcgcgtgctgttcttcgacgagccgacgcgcggcatcgatgttggcgcgaagtttgcgatctacaagatcatggacgaactggccgcgcagggcatcggcgtcattctcatcagttcggaactgccggaaattctgggactgacggatcgtattgcggtgttccatcagggccgtatcaccggcgtgctcgaaaccgccaagaccaatcaagaagaaatcatgcggtatgcgtccggttacggccgggccgcgcagtga

SEQ ID NO: 38591 - protein, 505 aa, Agrobacterium tumefaciens str. C58
MARAERSVLLRLENISKEFPGVKALSNVHFDLRSGEVHAVCGENGAGKSTLMKIISGVYQPSEGTILHKGEKVQYASPLQSEAAGIAIIHQELNLVPHLSVAENIYLAREPRRGFLVDRKKLRLDAKRCLDRLGVDINPDQLVRSLSVAQCQMVEIAKALSLDAEVLIMDEPTSSLTEQETRLLFKVIRDLKASGVGIVYISHRLDEMAEIVDRVTILRDGRYISTDDFASITVDDIVTRMVGRSLEDKFPERTSRPTDDILFSVEGLTRNGVFSDVSFSLRRGEILGFAGLMGAGRTEVARAIFGADPLDAGKIVFNGRELSIGSPQDAIEEGIAYLSEDRKSDGLAIKMSVAANTTLANLGEVSNRFGLIDFKKHDDVAKRYVDLLNIRTPSIDQTVRLLSGGNQQKIIIGKWLFRQSRVLFFDEPTRGIDVGAKFAIYKIMDELAAQGIGVILISSELPEILGLTDRIAVFHQGRITGVLETAKTNQEEIMRYASGYGRAAQ

SEQ ID NO: 38592 - DNA, 1524 bp, Agrobacterium tumefaciens str. C58
  CDS (1)..(1524): transl_table=11
atggcttttgctgacgaatctccagacccgggcctgatccggacggttgggctgtcgaagtctttcggtccggtacaggtcctgaaggatatcgagattgtggtgcgggccggcgaggtccacgcgatcatcggtgagaacggtgccggcaagtcgacgctgatgaagcttctggccggcaacgagaagccgtcgggcggggaaatccgcatcgatggcgaggccgttgcgctgagtggaccggtggacgccgaacatcgcggcatcgtcctcgtgcatcaggaaatattgctggcgccggatctgacggtggcccagaacatctatctcggccgcgaattgcgccggggcccgatgatggacgaccgggccatgcgggcgggagcgcgcaaggcgatagccgatctcggcggtacgatcgatcccgatgccatcgtcggcagtctttcgattgcccagcggcaactggtacagattgcccgtgttctgctcgtgccgcatcgcgtcgtcattttcgatgagccgaccgctagcctcacgcccatcgaaaccgatgcgctgctgaacgtcatcagggacatcagggccaagggcgtggccgtgctttatatttcgcaccgcctgcctgaagtgaaggagatcgccgaccgggtgactgtccttcgtgatggccggctggtggcttcgcacacggcatcggagttgcagccggccgatatggcgcggctgatggtggggcgcgatgttgccaagctctatccggaccggcatgccggcggcgagcgcgaaccggttctgcaggtggagcatttcaccgttcccggttatgcgcaggatgccggcttcagcctgcgcaagggagaaatcctcggttttgcgggcctggtgggggcggggagaacggagctgatggaaggtgtcctcggcctgcgggccgggcgcggaaatgtccgccatctgggtcgacaggtgcatttcgcaaaagcggaagacagtctgaaggccggcatcgtttatctgagcgaagaccgcaagggcaaaggattgctgctgaccaaggatctgcgggtcaatctcacgctcgcttcgctcaacaagttcagccggctgtttcagatcgatatccgccgggaggcgcaggcgctcgacgatgcggtgcgcgatttcgacatccgcaccggccgcaaggacctgctggcgggccagctgtccggcggcaaccagcagaagctgctgctcgccaagatgatgctgctcgatccgtccatcgtcatcatcgatgagccgacgcgcggtatcgatatcggcaccaaggaacagatttaccgtttcattgccagccttgcggatgaggggcggtcgatcatcgtcgtttcctctgaaatgccggagctgatcggcatctgcgaccgtattctggtgatgcgctcgggccggatcgtcggcgaggtggcgggcgagcagatgaccgaaaacgacatcgtggcgctggcgacgggcgttcatacgcaggaattcgcctga

SEQ ID NO: 38593 - protein, 507 aa, Agrobacterium tumefaciens str. C58
MAFADESPDPGLIRTVGLSKSFGPVQVLKDIEIVVRAGEVHAIIGENGAGKSTLMKLLAGNEKPSGGEIRIDGEAVALSGPVDAEHRGIVLVHQEILLAPDLTVAQNIYLGRELRRGPMMDDRAMRAGARKAIADLGGTIDPDAIVGSLSIAQRQLVQIARVLLVPHRVVIFDEPTASLTPIETDALLNVIRDIRAKGVAVLYISHRLPEVKEIADRVTVLRDGRLVASHTASELQPADMARLMVGRDVAKLYPDRHAGGEREPVLQVEHFTVPGYAQDAGFSLRKGEILGFAGLVGAGRTELMEGVLGLRAGRGNVRHLGRQVHFAKAEDSLKAGIVYLSEDRKGKGLLLTKDLRVNLTLASLNKFSRLFQIDIRREAQALDDAVRDFDIRTGRKDLLAGQLSGGNQQKLLLAKMMLLDPSIVIIDEPTRGIDIGTKEQIYRFIASLADEGRSIIVVSSEMPELIGICDRILVMRSGRIVGEVAGEQMTENDIVALATGVHTQEFA

SEQ ID NO: 38594 - DNA, 1524 bp, Agrobacterium tumefaciens str. C58; identical to SEQ ID NO: 27214
  CDS (1)..(1524): transl_table=11

SEQ ID NO: 38595 - protein, 507 aa, Agrobacterium tumefaciens str. C58; identical to SEQ ID NO: 27215

SEQ ID NO: 38596 - DNA, 1542 bp, Agrobacterium tumefaciens str. C58
  CDS (1)..(1542): transl_table=11
atggtcgtcagtccatcgacaatggccgccgtgcgcgccagcggagccgtgccgaatgcggaatttcttctcgcggcggatggcatacgcaaggaatttccaggcgttgtggcgctcgacgatgtgcagttccacctcaagcgcggtaccgtgcatgcgctgatgggtgagaatggcgccggcaaatcgacgcttatgaagattctcgccggcatctaccagccggataacggagaaatccgcctgaagggcgcgccgatacgtctcgattccccgctcgacgcgctggaaaacggcattgccatgatccatcaggaactgaacctgatggcttatatgacggtagccgaaaatatctggattcgccgcgagccgaaaaaccggctgggcttcatcgatcatggcgaaatgtatcgccgcacggaaacgctgctggaacggttgggcatcgatctcgatccggaaacgcgtgtcggcgagctttccgtcgccagccgtcagatggtcgaaatcgccaaggcggtttcctacaattcagacgttctcatcatggatgagccgacatcggctttgacggagcgcgaggtcgagcatctcttccgcatcatccgcgatctgagggaacgaggtatcggcatcgtttacatcactcacaagatgaacgagctgttcgagatcgccgacgagttctccgttttccgcgacggcaaatatatcggcacccacgcgtccaccgatgtgacgcgtgacgacatcatccgcatgatggtaggccgagaaatcacccagatgttcccgaaggaagaggttccgatcggtgacgtagtgctgtcggtcaagaacctgaatctggacggtgtcttccatgacgtctctttcgatgtccgcgccggtgaaattctcggcgtcgcgggcctcgtcggctccggacgctccaatgtggcggaaacggtatttggcgtgacgcccgcttcctcgggtacgatttcgatcgacggcaagccggtttcgatcgacagcccgacaacggctatcagtcaccgcatggcgttcctgacggaggaccgcaaggataccgggtgcctgctcatcctcaatattctcgagaatatgcagatcgcggtgctgcaggacaaatatgtcgccaacggcttcgtgcaggaaaacgcgctgtcggaagcctgcgaagaaatgtgccgcaagctccgcgtcaagacgccgcatctttacgagcgcatcgagaacctgtcaggcggcaaccagcagaaggtactgatcggacgctggatgctgaccaagccgcgcattctcattctcgatgaaccgacgcgcggcattgatgtcggggccaaggcggaaattcacaagctggtttgcgagatggcgcgccagggcgtcgccgtcattatgatttcctccgaaatgccggaggttctgggtatgagcgaccgtgtcatggtcatgcatgaaggtcgggtgacgggtttccttgctagaagtgaagccacgcaggtgaaggtgatggatctcgcatcgcggtga

SEQ ID NO: 38597 - protein, 513 aa, Agrobacterium tumefaciens str. C58
MVVSPSTMAAVRASGAVPNAEFLLAADGIRKEFPGVVALDDVQFHLKRGTVHALMGENGAGKSTLMKILAGIYQPDNGEIRLKGAPIRLDSPLDALENGIAMIHQELNLMAYMTVAENIWIRREPKNRLGFIDHGEMYRRTETLLERLGIDLDPETRVGELSVASRQMVEIAKAVSYNSDVLIMDEPTSALTEREVEHLFRIIRDLRERGIGIVYITHKMNELFEIADEFSVFRDGKYIGTHASTDVTRDDIIRMMVGREITQMFPKEEVPIGDVVLSVKNLNLDGVFHDVSFDVRAGEILGVAGLVGSGRSNVAETVFGVTPASSGTISIDGKPVSIDSPTTAISHRMAFLTEDRKDTGCLLILNILENMQIAVLQDKYVANGFVQENALSEACEEMCRKLRVKTPHLYERIENLSGGNQQKVLIGRWMLTKPRILILDEPTRGIDVGAKAEIHKLVCEMARQGVAVIMISSEMPEVLGMSDRVMVMHEGRVTGFLARSEATQVKVMDLASR

SEQ ID NO: 38598 - DNA, 1533 bp, Agrobacterium tumefaciens str. C58
  CDS (1)..(1533): transl_table=11
atgcgtgctgaaacccaaacaataaaaatgaccgaggcttccagccccacgcccgttctggaaatgcgcggcatcagccagatattccccggcgtcaaagcgcttgatggcgtcgatatcgcactataccccggcaaggtcacggcgctgatcggcgagaacggtgcgggtaaatccacgctcgtcaaaatccttaccggcatctaccgcccgaacgagggcgaaatcctgctggatggcaaggccgtccacttccacagcgcacaggatgccatcgatgccggcgtcaccgccattcatcaggaaaccgtgctgttcgacgagctttcggtcggtgagaacatcttcctcggccatgcgccgaagggtcgtttcggcctgattgactggaagaccatcaacgagcgggccagaattctgctggaacagctcgaaagcaccatcgatcctaccatccggttgaaagatctttcgatcgcccagcgccatctggtggccatcgcccgtgcgttgtcagtcgaggcgcgcatcgtcatcatggacgaaccgacagccgcgctttcccgcaaggagatcgacgatctcttccgcatcgtcgagaacctgaagcggcagggcaaggcgatcctcttcatcagccacaagttcgatgaagtgtatgaaatcgccgagaattatgccgtattccgtgacggaaaaatggttggcgccggcacgcttgccaccaccccgcaagatgaaatcgtgcggctgatggttggccgcgacgtgacgaatgccttcccgaagcaggcggtcacccttggtccaacggttctttcggtgcgtgattattcgcaccagaccgaattccgcgatatttccctcgatcttcgcaagggtgaaattctcggcctttacgggctgatcggcgccgggcgctccgaactttgccaatcgctgttcggcatcacccgcccggcttcgggagaggtgacgctggatggccagccgctcaccatccgctcgccggaagatgcgatccgcgccgggatcgtatacgtgccggaagagcgtggccgccacgggctggcactcgatatgccgatctatcagaacatgtcgctgccatccctcacccgcacgtcgcgcaaggggtttctcactgccgccaatgaattcgcgctagcgcgcaaatatgccgcgcggctcgatctgcgcgctgccgcgctttcggtgcccgttggcacgctttcgggcggcaaccagcagaaggtggtgatcggcaagtggctggccacgaagccgaaggtcatcattctcgatgagccgaccaagggcatcgatatcggctccaaggccgccgtgcatggtttcatcagcgagcttgcggcagagggcctgtcgatcatcatgatttcatccgaacttcccgaaatcctcggcatgtccgaccgcgccatcgtcatgcgcgaaggcctgatggcgggccagttcgaacgcgccgaattttctccggaaaagctggtgcgcgctgccaccggcaatgcctga

SEQ ID NO: 38599 - protein, 510 aa, Agrobacterium tumefaciens str. C58
MRAETQTIKMTEASSPTPVLEMRGISQIFPGVKALDGVDIALYPGKVTALIGENGAGKSTLVKILTGIYRPNEGEILLDGKAVHFHSAQDAIDAGVTAIHQETVLFDELSVGENIFLGHAPKGRFGLIDWKTINERARILLEQLESTIDPTIRLKDLSIAQRHLVAIARALSVEARIVIMDEPTAALSRKEIDDLFRIVENLKRQGKAILFISHKFDEVYEIAENYAVFRDGKMVGAGTLATTPQDEIVRLMVGRDVTNAFPKQAVTLGPTVLSVRDYSHQTEFRDISLDLRKGEILGLYGLIGAGRSELCQSLFGITRPASGEVTLDGQPLTIRSPEDAIRAGIVYVPEERGRHGLALDMPIYQNMSLPSLTRTSRKGFLTAANEFALARKYAARLDLRAAALSVPVGTLSGGNQQKVVIGKWLATKPKVIILDEPTKGIDIGSKAAVHGFISELAAEGLSIIMISSELPEILGMSDRAIVMREGLMAGQFERAEFSPEKLVRAATGNA

SEQ ID NO: 38600 - DNA, 1542 bp, Agrobacterium tumefaciens str. C58
  CDS (1)..(1542): transl_table=11
atggacaagcaacccgtttttcaggcacgaaacgtcgaaaaagtatttccaggcgttcgggcgctcaagggcgtcaatctttcgctgcaacccggctcgatccacgccctgcttggggaaaacggtgccggcaaatcgaccctgatcaaggtcgtcacgggtgtccatcaccaaagcagcggccagatccttgttgatgggcaggccgtgcgtttcagcaatccgcgcgaggcgattgcccgcggcattggtgtcgtccatcaggaacgcaacctcattccgcgcttttcgattgccgagaatatccacatggaaaagctcggggcgcattatctcaaacccatcgactacgccgcgctgaaccgcgatgcgcgccgctggcttgaggcgctcaatctggaaatcgatccggcaacgccagtatcggagctttccgtcgcgcagatgcagctcgtggaaatcgccaaggcgctttccctgcaaagccgtgtgctgctcctcgacgagccgacgacatccttgacgccgagcgaaacggacaatctcttccgcattctacggcgcctgcgcgatgacggcgcaagccttgtcttcgtcagccacaagctggaagaggttctggatatctgcgaccgggtcacggttctgcgggacggcgaaaacgcctgtgaaagtcggtcgatggaaggtctcggacgtcaggatctcgtgcgcctgatgatcggacgcgccgaaagcggcggcggctggcgcaaacgcgcggtcgaacacaatccgatggtgctggaacttgagggcgtatcgaccgcgatcggtcatggcgatgtcagtctgtccgtgcgcaagggcgagatcgtcggcctttacgggctggtcggcgccgggcgcaccgaacttgcaaaatcgatcatgggcaaattcgcggtcacctctggcaacgtgcgtgtttcgggccggcccgcccgcatccgctccgttgccgaagcgatccacgactacggcgtgggttatgtcagcgaagaccgcaagggcgatggcctcattctccagcactcggttcttgccaatgcgggcgttcccatctggcgcaaactctcgaatacgttcggcgtgctttcggatgggcgcatccgggcggcggtaacgcctttcctgaaaaagctggaggtgaagacaccaagcctcagccagacggtcggcaatctgtccggcggcaaccagcaaaaaatcagtgtcgccaaatggctcgccgccgatgtcaaactgctgatcgtcgacgaaccctccgtcggcatcgacatcaagaccaaggcctatctgcatgatctgctgcgcgagctggcagataacggcaccgccattctcgtcattaccagcgacatgccggaaatggtggcgctggccgatcgcatcgtcgtgatggaccaatacagagtgaaaggcatcgtggaaaacaatggcgtctatgccgatatgagccacgacatcatgactctcatccatcactctgaagagagcgaagcccgcctccaccaggcatag

SEQ ID NO: 38601 - protein, 513 aa, Agrobacterium tumefaciens str. C58
MDKQPVFQARNVEKVFPGVRALKGVNLSLQPGSIHALLGENGAGKSTLIKVVTGVHHQSSGQILVDGQAVRFSNPREAIARGIGVVHQERNLIPRFSIAENIHMEKLGAHYLKPIDYAALNRDARRWLEALNLEIDPATPVSELSVAQMQLVEIAKALSLQSRVLLLDEPTTSLTPSETDNLFRILRRLRDDGASLVFVSHKLEEVLDICDRVTVLRDGENACESRSMEGLGRQDLVRLMIGRAESGGGWRKRAVEHNPMVLELEGVSTAIGHGDVSLSVRKGEIVGLYGLVGAGRTELAKSIMGKFAVTSGNVRVSGRPARIRSVAEAIHDYGVGYVSEDRKGDGLILQHSVLANAGVPIWRKLSNTFGVLSDGRIRAAVTPFLKKLEVKTPSLSQTVGNLSGGNQQKISVAKWLAADVKLLIVDEPSVGIDIKTKAYLHDLLRELADNGTAILVITSDMPEMVALADRIVVMDQYRVKGIVENNGVYADMSHDIMTLIHHSEESEARLHQA

SEQ ID NO: 38602 - DNA, 1521 bp, Agrobacterium tumefaciens str. C58
  CDS (1)..(1521): transl_table=11
atgggtgaggtcattctcagcatgacgaatattcacaaggcgttcgggcctgtgcgggcattgcggagtgccgcacttgaactgcagcgcggcgaaatccacgcgctcgccggtgaaaacggtgcgggcaagtcgacgctgatgcacattatcgacggcattctgcagccggatggcggtgaaatcctgctggatggcaaaccggttcgcatatcttcgccgaatgcggcgaacaggctgggcatcggtttcgtgcatcaggagatcgcgctctgcccggagatttcggtcgctgaaaacatgtacatgtcggagaccggccagagccgctcctggttcatgaattatcgcgatctggaaaaacgggcggcaacggtgctgcgggagatcggcgatatcgatcccacccaccgcgccggcgacctgtcgatttcgcagcagcagatcgtcgagatcgccaaggcgctgacgctcgattgccgtatcctgatcctcgatgagccgacggcggcgctgaccgagaccgaggcccagacacttttcaagatcatgcgtcggctggcggcgcgcggcatcgccatcatctatatctcccaccgtatggcggagattttcgaacattgcgaccgcatcacagtcatgcgcgacggttgccatatcaggacggaaaatattgccgacatttccccggaagaggtcgtcaacagcatggtgggccgggtgctcgacaagctctatccaccgaaactggcggatgacgaaaaatccaatgaggtcattctttcggttcggggactgaacgaaggaaagcgtgttttcgacgtggatttcgatctgcgtcgcggcgaaatcctagggtttgccgggctgatcggcgcgggccgcagcgagattgcgcgggccgtctgccggctggaaggaaaaccgaaaggcgaggttgtgctgcgcggccggtcgctgaagctcagggattatcgcgacagcatccgcgaggggatcgtttatctctccgaggaccgcaagggcgacggattgttcctcaacatgtccatcgccaccaatgtctcggcgctcgatattggcaggatatcgaacggcatgggtttcatccagcggcgcaaggaaatgaagcgtgccgatgagttgggacgccggctgaaactgcgggcgaacagcgtcggtgacgcggtatcgaccttgagcggcggcaaccagcagaaggtggcgctggccaagatgctgtcggtggaacccgaggtcatctttctggatgagccaacccgcggggtggatgtgggcgccaaggcggaaatccaccgtcagatccgggagctggcgcgtcaaggggttggcgtggttgtcatctcctcggagctgccggaactcatcggtgtcagcgatcgtgtgcttgtcgtgcgcgaggggcgcatcaccggcgaggtcgagggggacgacatgacggaggaaaagatcatgcagctcgcatcgatcactatcatgcagaatgcggcggaagcctga

SEQ ID NO: 38603 - protein, 506 aa, Agrobacterium tumefaciens str. C58
MGEVILSMTNIHKAFGPVRALRSAALELQRGEIHALAGENGAGKSTLMHIIDGILQPDGGEILLDGKPVRISSPNAANRLGIGFVHQEIALCPEISVAENMYMSETGQSRSWFMNYRDLEKRAATVLREIGDIDPTHRAGDLSISQQQIVEIAKALTLDCRILILDEPTAALTETEAQTLFKIMRRLAARGIAIIYISHRMAEIFEHCDRITVMRDGCHIRTENIADISPEEVVNSMVGRVLDKLYPPKLADDEKSNEVILSVRGLNEGKRVFDVDFDLRRGEILGFAGLIGAGRSEIARAVCRLEGKPKGEVVLRGRSLKLRDYRDSIREGIVYLSEDRKGDGLFLNMSIATNVSALDIGRISNGMGFIQRRKEMKRADELGRRLKLRANSVGDAVSTLSGGNQQKVALAKMLSVEPEVIFLDEPTRGVDVGAKAEIHRQIRELARQGVGVVVISSELPELIGVSDRVLVVREGRITGEVEGDDMTEEKIMQLASITIMQNAAEA

SEQ ID NO: 38604 - DNA, 1503 bp, Agrobacterium tumefaciens str. C58
  CDS (1)..(1503): transl_table=11
atgctggaactgaatgcaataagaaaaagctttggcaagatcgaagtcctgcacggcgtcgaccttgaggcgcgcgccggtgaggtgcatgcgcttctgggcgaaaacggtgccggcaagtcgactttgatgaagatcctatgcggcattttgcagccatcggagggaacgatccgcattgacggcaaggatcgccgcttcgccaattatgacgaagcgattgccgctggcgtcggcatcgtgtttcaggaattcagcctgatcccctatctcaatgccgttgaaaacatgttcctcgcccgcgaaattcgcgggccgctgcgccttttgaacaagggcgcgatgcgcaagcgcgcggccgaaatcatgggccggctggccgtggatgtgccgctcgacgtgccggtgcaccgcctgtcggttgcccagcagcaatttgtcgaaatcgccaaggcattgtcgctggatgcccgcattctcgtgctcgacgagccgaccgcgacgctcacgccctccgagacagagcacctgttcaatgtcatgcgcgagctgcgccgtcagggcgtggcgatcatcttcatttcgcatcacctcgatgaaatattcgagatctgcgaccgcatcaccgttcttcgcgatggcgagttgattggctcctgcctgacgtcggaggtcgataatgaccgtctggtggagatgatggtcggccggcgcatcgaagccagcttcccgccgaagccgcagatcgatccttccgccgcaaaggtgatcgaagtcgaagagctgcaattgaagaagggcggccctgtctcgcgcttttcgctgcgcaagggtgaaatcctcggctttgccgggctcgtcggctcgggccgcacggaaacggtgctggccatgctcggtgcgcattccgcttcgcgccgcaagatcaagcttgatggtgtggatacgcgtttgtccggccccgatgatgcgctgatgcgcggcatcggcctgctgccggaaagccgcaaggaggaggggctgatcaccagcttctcgatcctgcagaatatttcgctgaacaattatcgtaagtaccgcaaggcccactggttcctcgacctcaagaaggaactggagcacacgacgaaggccatggcgcaggtgcaggtcaaggcgcagggcccctatgcccgtgtcgacacgctgtccggcggcaaccagcagaagatcgttatcgcccgctggctgaaccatgacatgcgcgtgctgatcttcgacgagccgacacgcggcatcgacgttggcgccaaggcagaaatctattcgctgatgcgcgaatttgccgccaggggtcattcgatcatcatgatctcctcggagttgccggaagtgatcggcatgtccgacagggtctgcgtcttccgctccggcggcattgtcgccacggtcgagggcgaagacatcaattcagaaacaataatgacaaacgccaccaccgggagagttgaacatgtcgcttga

SEQ ID NO: 38605 - protein, 500 aa, Agrobacterium tumefaciens str. C58
MLELNAIRKSFGKIEVLHGVDLEARAGEVHALLGENGAGKSTLMKILCGILQPSEGTIRIDGKDRRFANYDEAIAAGVGIVFQEFSLIPYLNAVENMFLAREIRGPLRLLNKGAMRKRAAEIMGRLAVDVPLDVPVHRLSVAQQQFVEIAKALSLDARILVLDEPTATLTPSETEHLFNVMRELRRQGVAIIFISHHLDEIFEICDRITVLRDGELIGSCLTSEVDNDRLVEMMVGRRIEASFPPKPQIDPSAAKVIEVEELQLKKGGPVSRFSLRKGEILGFAGLVGSGRTETVLAMLGAHSASRRKIKLDGVDTRLSGPDDALMRGIGLLPESRKEEGLITSFSILQNISLNNYRKYRKAHWFLDLKKELEHTTKAMAQVQVKAQGPYARVDTLSGGNQQKIVIARWLNHDMRVLIFDEPTRGIDVGAKAEIYSLMREFAARGHSIIMISSELPEVIGMSDRVCVFRSGGIVATVEGEDINSETIMTNATTGRVEHVA

SEQ ID NO: 38606 - DNA, 1491 bp, Agrobacterium tumefaciens str. C58
  CDS (1)..(1491): transl_table=11
atgagcgcagaaccgctcctgtcccttaaaaatgtcaaggtcaccttcggtggcgtacgcgccctgaagggtgtttccttcgaggtcaatccgggtgaagtgcattgccttgccggcgaaaacggctgcggcaaaagcaccgtgatcaaggtcatcaccggtgtctataagccggagagcgatgcggaactctatttcgatggcaaacccatcgctgctatgaccccgacacttgcgcaatcgctgggcattcaggtgatctggcaggatctggcgctgttcgatgagatgacggtggccgaaaatatcggtttccaatatgcggtgaacggcagatttgggctggtcgacaagcgcgctatcaaaaatgccgccgaaaaggcgctggcacggctcggtgtctcgttcgatctcgacaggccgctcaaggaactgccgattgcccaacgccagatcgtggcgattgcccgtgcgctggttggcgaagcccgtctcgtttttatggatgaacccaccgcatctctgacgcagtcggagaccgattacctcatcgatatcgtccgcaacctctcggcgtcaggtgtcgctgtcgtgttcgtttcgcatcgtctggcggaagtgcttgagatatcggatcgcatcaccgttttgcgggatggatcgcttgtcggcgttttcccggtcgaaggcatgacccagtctcgcgtgaccgagttgatgaccggccgcaacttcgatagcgccgtcattgccgccgatcacgacgacaagcccgtggttctctcggtgcgaggcctgacacgggccggcgagttcgaggatgtttccttcgatctgcggcgcggggagacgttggggatcaccggtcttctcggcgcgggccgaaccgaacttgccctgacgctgttcggcatgcaccggccgcaatcgggtgaagtccttatcgatggaaagaaggtggatttccattccaaccgggatgcgatccgggttggtgtcgcctatctctccgaagaccggctgtcgctcggtctgaaccagccgcagtcgattgccgacaatctcgtcatggcctcccttgataagttgttgagtggcggtcttatctccacgtcgaaaaaggcggatgtcgtttcccgctggatttcagcgctcggcgtcaagatcggcctgccggaagatccgatccgcacgctctctggcggcaaccagcagcgcgtggcgattgccaaatggctggcgatcgggccgaaaattctcatcctcgatgcgccgaccgtgggtgtcgacgtcggcgcccgcgccggcatctttgaaatcgtccgcaagctcgccgcagagggcctgtcgatcatcgtcatctccgatgaggcgccggaagtttattttaatacagacagggtcatccacatggtcgaaggccggttccacgccacctatgatccgcgacgcctgtcgctgaccgaactggaggccgccatctatgcgtag

SEQ ID NO: 38607 - protein, 496 aa, Agrobacterium tumefaciens str. C58
MSAEPLLSLKNVKVTFGGVRALKGVSFEVNPGEVHCLAGENGCGKSTVIKVITGVYKPESDAELYFDGKPIAAMTPTLAQSLGIQVIWQDLALFDEMTVAENIGFQYAVNGRFGLVDKRAIKNAAEKALARLGVSFDLDRPLKELPIAQRQIVAIARALVGEARLVFMDEPTASLTQSETDYLIDIVRNLSASGVAVVFVSHRLAEVLEISDRITVLRDGSLVGVFPVEGMTQSRVTELMTGRNFDSAVIAADHDDKPVVLSVRGLTRAGEFEDVSFDLRRGETLGITGLLGAGRTELALTLFGMHRPQSGEVLIDGKKVDFHSNRDAIRVGVAYLSEDRLSLGLNQPQSIADNLVMASLDKLLSGGLISTSKKADVVSRWISALGVKIGLPEDPIRTLSGGNQQRVAIAKWLAIGPKILILDAPTVGVDVGARAGIFEIVRKLAAEGLSIIVISDEAPEVYFNTDRVIHMVEGRFHATYDPRRLSLTELEAAIYA

SEQ ID NO: 38608 - DNA, 1500 bp, Agrobacterium tumefaciens str. C58
  CDS (1)..(1500): transl_table=11
atgactgaaaatctgatcgagctgcgccacatcggtaagcggtttggtggcgtgaaggcgctcgacgacgtatcgctgagcattcgcccgggcgaaatccattgccttgccggtgaaaacggttccggcaaatccaccgtcatcaaaatcatgtccggggtttacacacccgaggacggtgagatcctgatcgacgggaagcctgtcggcaaactcgatccggtaaaatccgttcaccacggtattcaggtgatctatcaggatttttcgctgtttggtaacctgacggtcgccgagaacctggccatcaatacctttctgatggaaggtcgcaaaacggtcgactggcgacatgtccgtgagctggcccaaaaggcgttggaccgcctcggcgtgagcatcgatcttgatacggatgtcgaaaccctgccgacctctggaaagcagatcgtggcgattgcccgtgccgtcatggccgatgcacgcctgatcatcatggatgagccgacgaccgcgctgacgcgccatgaggttgatgccctcttcaagattgtgcgtgatattcaggcgcagggcatcgccgtgctcttcgtcagccacaaaatgcgcgagatgctcgaaatcagcgagcgcctgacagttttccgcaatggcaagaaggtggccgaagggccgatcgccgaattcgatgagccggcaatcacccgcgcgatgacggggcaggagctgaccgcccacagctacaagtgggcaccgcaggaaggtgccgatacaccggtgctggaagtccgcaacctctcggttccggcttccgtggaaaacaccgacctgacgttaaggccaggcgaaatcgtcggtatttcgggtttgatcggttcggggcgtaccgaacttgcgctggcgctgtttggcatgcgccccgattttaccggttcagtgcgcctcgcaggccgcgaggttcacccaaggaccgttcaggagggtattgcctgcggtgtcgcttatgtgccggaggatcgcctgaccgaggggctattcctgacgcaatcgatcgaacggaatatcattgtcacgtcgattgagaaattcgtccgcggtcttttcatcaatcgcaaaaaggcggacgagacgacccgcgaaatgttctcggccatgcagatcgtggcaccaggaccgcacacgccggtcaaccatttgtccggtggcaacgcacagcgcgtcgttctggctcgctggttgttgactggggccaaagtgctgatcctgaacggcccgaccgtcggcgtcgatgtcggttccaaagcacagatccacaccatcatccgcaagctggccgaaaaggaagggctggccgtgctgatgatttccgacgatgtgccggaactggtgcagaactgcaaccgcgtgctggtcatgcatcgcggccgtttcgttgacgagttgtctggagagagcatgaccgaagacgccgttaacgaccggctcaagatgctgaattga

SEQ ID NO: 38609 - protein, 499 aa, Agrobacterium tumefaciens str. C58
MTENLIELRHIGKRFGGVKALDDVSLSIRPGEIHCLAGENGSGKSTVIKIMSGVYTPEDGEILIDGKPVGKLDPVKSVHHGIQVIYQDFSLFGNLTVAENLAINTFLMEGRKTVDWRHVRELAQKALDRLGVSIDLDTDVETLPTSGKQIVAIARAVMADARLIIMDEPTTALTRHEVDALFKIVRDIQAQGIAVLFVSHKMREMLEISERLTVFRNGKKVAEGPIAEFDEPAITRAMTGQELTAHSYKWAPQEGADTPVLEVRNLSVPASVENTDLTLRPGEIVGISGLIGSGRTELALALFGMRPDFTGSVRLAGREVHPRTVQEGIACGVAYVPEDRLTEGLFLTQSIERNIIVTSIEKFVRGLFINRKKADETTREMFSAMQIVAPGPHTPVNHLSGGNAQRVVLARWLLTGAKVLILNGPTVGVDVGSKAQIHTIIRKLAEKEGLAVLMISDDVPELVQNCNRVLVMHRGRFVDELSGESMTEDAVNDRLKMLN

SEQ ID NO: 38610 - DNA, 1530 bp, Brucella melitensis 16M
  CDS (1)..(1530): transl_table=11
ttgactgttgaaatcggcggcagcgcgaactgccgccagtggaggagatacattggaatttctgctcgatgtggagggctcaggaagtcctttggcggtgttgctgccttgcgggatgggcggctgcaattgcgtaccggctcggtacatgcgctgtgcggcggcaatggcgcgggcaaatccacgtttttgaaaatcctgatgggcattcatgcccgcgatggtggacatatccgccggcgtggaaaagaggttacgtattccagccccgccgaagcgttgcaggcgggtattgcgatcatcgaacaggagctaagccccgttccccatatgaccgtggcggagaatatctatttgggcagggagccgcttcgccgtttcggtggcatcgatttcaagacgatgaacctcaatgcccagaagcttttggaccagcttgagttcaagattcgcgccaaccagttcatgatgaacctgtctgtcgcgcaggtgcagcttgtggaaatagccaaggcgctcagtcacgacgctgaagtcattttcatggacgaaccgacatcggccattggtgaaaaagaagcacagcagctttttgcagcgatagagcgtttgaaagcgagcggaaaaggcattgtctatgtctcccatcgcctgtcggaaatttttcagattgccgatagctataccgtgtttcgcgacggcagttatatcgatagcggcgatctcggtggcatcacccgtgcggaactgatccatatgatcgtcgggcgggaactgggtgaggaatatatcaagacgaatgcgcctacggaaataccgggcgtcgaggtttccggcctcagcgcgcccggcaagataaccgacatttcctttaccgcgcataagggcgagatttttggcatttacgggttgatggggtcaggccgctcggaaatattcaactgtcttttcggattggagaaagcctcccaaggaacaattcggcttgaaggcgaacccgtcaccgtccggcgccccgcggacgccatggctctggggctggcttttgtgacggaagatcgcaagctgaccggcctcaatctcggcgacagcgttcgcaacaatatatgccttgccagccttcccgagatgagtccgcatttttcaatgaatcggcgtgcggaatcggccgccagcagggagatgatcgagcgtttcaggatcaaggttgcgcacgacacgatggccgtttcgggcctttccggcggcaaccagcagaaggtcgtgctcggaaaatggttcctgcgaaagccacgcgttctgctgctcgatgaacccactcgcggtgtcgatgtgggtgcaaaacaggaaatttatcgcatcatttgcgaatttgccgcccaaggcgggaccgtcgtcatggtttcttccgagattgatgaagtcctcggcatgtctgaccgcatcatggtcatgcgtggcggacaatcggtcggcatctaccgcagggcggaaacggacgcgcagtcattggtgcatctttcgacatga

SEQ ID NO: 38611 - protein, 509 aa, Brucella melitensis 16M
MTVEIGGSANCRQWRRYIGISARCGGLRKSFGGVAALRDGRLQLRTGSVHALCGGNGAGKSTFLKILMGIHARDGGHIRRRGKEVTYSSPAEALQAGIAIIEQELSPVPHMTVAENIYLGREPLRRFGGIDFKTMNLNAQKLLDQLEFKIRANQFMMNLSVAQVQLVEIAKALSHDAEVIFMDEPTSAIGEKEAQQLFAAIERLKASGKGIVYVSHRLSEIFQIADSYTVFRDGSYIDSGDLGGITRAELIHMIVGRELGEEYIKTNAPTEIPGVEVSGLSAPGKITDISFTAHKGEIFGIYGLMGSGRSEIFNCLFGLEKASQGTIRLEGEPVTVRRPADAMALGLAFVTEDRKLTGLNLGDSVRNNICLASLPEMSPHFSMNRRAESAASREMIERFRIKVAHDTMAVSGLSGGNQQKVVLGKWFLRKPRVLLLDEPTRGVDVGAKQEIYRIICEFAAQGGTVVMVSSEIDEVLGMSDRIMVMRGGQSVGIYRRAETDAQSLVHLST

SEQ ID NO: 38612 - DNA, 1569 bp, Brucella melitensis 16M
  CDS (1)..(1569): transl_table=11
atgtggccatgcgtgcgttgccggtgcaggcgcatgactgcgccgcgtcaggctggcgagcctgctcttctggaagccgtttctctgtccaaatcctttgggccggtgcaggttctggaaaatataaatctgcgcgtcaacggtggtgaaattcacgcgatcattggtgaaaatggcgcgggtaaatccacgctcatgaaaattctggccggtaacgaacgccagacgggcggagaaatccgtattgatggcaagccggtttccttttccagcccggcagcagcagaggcacgaggcatcgtgctggtgcatcaggaaatcctgcttgcaccagacctgacagttgcgcagaacatatatctcggtcgtgaacttgggggtaagcggggacgcggactactggtcgatgatcggtcgatgcgcgagggcgcgcgcagggctatccgtgatctcggcgctgaaatagacccggatgccgtggttgcgacgctatcaattgcccaacgccagcttgtgcagattgcacgggtgctgttggtgccgcatcgcctcgtgatcttcgatgagccgacggcttcgctcacgcctttcgagacggaagcccttctgaaagtcatccgtgatattcgagccaagggcgttgcggttctctatatttcgcatcggctgccggaagtgaaggagatagccgaccgtgtgactgttctgcgtgacggcaagctggtttccagccatttggcatcctctttgcagccggctgatatggcgcggctgatggttgggcgcgatgtcgccaagctctatcccgatcgcgcaagccggtatgacagcgccgctattctggaagtagaaaacttcagtgtgccgggcttcgtgcgcaatgcaagtttttgtctgaaccgtggcgagatacttggctttgccggtctggttggtgcgggccgaacggagcttatggaaggaatcgtcggtttgcgcccagccaagggagaattgcgccatgatggtaggctggtgcacttcaacaatgcacatgacagccagcaggcgggcatcgtttatctgagcgaagaccgtaaaggcaaagggctgctcctgtcgaaagatctcggcaccaatctcaccctggcttcacttgacaggttcgtgcgcggcctccagatcgaccgcaaccgcgaacgtgcggcgttggatgaggcgatccgtgcattcgacatacgcacgggccgtaaggatatcctggccggtcagctttcaggcggcaaccagcagaaactgcttcttgccaaaatgatgatgcttaccccgtccatcatcatcatagacgagccgacgcgaggcatcgatgtcggcacgaaggagcagatttatcagttcattgccaacctggcggatgaaggaaaatccatcattgttgtatcgtccgaaatgccggaactgatcggtatttgcgaccgtatcgtggtgatgcgggaggggcaaattgccggggaggtgagcggcgcaggcatgacggaacatgaaattgtggcgctcgccaccggcgttggcgccaacgaggctgcatga

SEQ ID NO: 38613 - protein, 522 aa, Brucella melitensis 16M
MWPCVRCRCRRMTAPRQAGEPALLEAVSLSKSFGPVQVLENINLRVNGGEIHAIIGENGAGKSTLMKILAGNERQTGGEIRIDGKPVSFSSPAAAEARGIVLVHQEILLAPDLTVAQNIYLGRELGGKRGRGLLVDDRSMREGARRAIRDLGAEIDPDAVVATLSIAQRQLVQIARVLLVPHRLVIFDEPTASLTPFETEALLKVIRDIRAKGVAVLYISHRLPEVKEIADRVTVLRDGKLVSSHLASSLQPADMARLMVGRDVAKLYPDRASRYDSAAILEVENFSVPGFVRNASFCLNRGEILGFAGLVGAGRTELMEGIVGLRPAKGELRHDGRLVHFNNAHDSQQAGIVYLSEDRKGKGLLLSKDLGTNLTLASLDRFVRGLQIDRNRERAALDEAIRAFDIRTGRKDILAGQLSGGNQQKLLLAKMMMLTPSIIIIDEPTRGIDVGTKEQIYQFIANLADEGKSIIVVSSEMPELIGICDRIVVMREGQIAGEVSGAGMTEHEIVALATGVGANEAA

SEQ ID NO: 38614 - DNA, 1539 bp, Brucella melitensis 16M
  CDS (1)..(1539): transl_table=11
ttgatgtccgaatatcttttggaaatgcgaaacatcggtaaagagttcaacggcgtcaaggcgctggatggcatttacctgaaagtgcgcgcgggagaatgtgtcgggctgtgcggtgaaaacggggcgggcaagtacaccctgatgaaagtgctgtcgggtgtttatccccatggcacatggactggtgaaattttctgggaaggcaaagaacttaaagccagtggcattcgcgataccgaagctgcgggtattgtcatcatccatcaggaactgatgatggtgccacacctgtcggtcgcggagaatatcttccttggttgcgagccaaccacaggcggtttcattgattatgaccagatgaatgcacgggcagccgaactgctcgctcggctcaagataaacgatatcaatgtcgcattgccggtttatcattactcaggcggcaagcagcagttgatcgagattgcaaaggcaatcaacaaaaatgccaagcttctgatccttgacgagccaacctcggccctgaccgcttcagaaacccgggttctcatcgacctgatcaaggacttcaaaaagcagggcatggcttgcgtttacatctctcacaaactcgatgaagtggcggaaatctccgacacggtaacggttattcgtgatggcgcgcatatcgcgacacgtccgatgtccgaactgacaacgcccgatatcatcacgatgatggtcgggcgtgagatgaagaacctcttcccgcgtgaaccccatgacattggcgaggtgatgtttgaagcccgcaatataagttgctgggatgtgaccaatcctgaccgcaaggtggtcgacgatgtttcgtttgcgctaaggcgcggtgagattttgggcattgcgggccttgtgggtgccgggcgtacagaactcgtatcgagcttgtttggtgtctggccgggcgcctgtcaggggcaggtttttctggaaggcaaggaaatcaaaatccgcacgccgcgcgatgcggtgcgccaaggcatttgcatggtgccggaagatcgcaaacgcgatggcatcctgccgatcatgccagttggccacaatatgacgatctccgtgcttgatcgcttttcgctacgaggcctcatcgataaagacgcggaactcgtggcgatccagcgtgagattttgagactcaaggtcaagaccgccgatccgatgcttgccattgcctcgctatctggcggcaatcagcagaaggccgtgctttcaaagatgatgctgcctgatccgaaagtgctcattcttgatgagcccacacgcggcgtcgatgtcggcgcgaaatatgaaatttacaagctgatattcgcgctcgccaggcagggcgtatcgattttgatggtttcgtcggaaatgccggaagtccttgggatcagtgatcgtgttctcgtcattggcgagggcaaattgcgcggcgatttcccgaatgaaaatcttacacaggagaaggttcttgccgctgcaattggcaagcctgcaaccaacgcggcctag

SEQ ID NO: 38615 - protein, 512 aa, Brucella melitensis 16M
MMSEYLLEMRNIGKEFNGVKALDGIYLKVRAGECVGLCGENGAGKYTLMKVLSGVYPHGTWTGEIFWEGKELKASGIRDTEAAGIVIIHQELMMVPHLSVAENIFLGCEPTTGGFIDYDQMNARAAELLARLKINDINVALPVYHYSGGKQQLIEIAKAINKNAKLLILDEPTSALTASETRVLIDLIKDFKKQGMACVYISHKLDEVAEISDTVTVIRDGAHIATRPMSELTTPDIITMMVGREMKNLFPREPHDIGEVMFEARNISCWDVTNPDRKVVDDVSFALRRGEILGIAGLVGAGRTELVSSLFGVWPGACQGQVFLEGKEIKIRTPRDAVRQGICMVPEDRKRDGILPIMPVGHNMTISVLDRFSLRGLIDKDAELVAIQREILRLKVKTADPMLAIASLSGGNQQKAVLSKMMLPDPKVLILDEPTRGVDVGAKYEIYKLIFALARQGVSILMVSSEMPEVLGISDRVLVIGEGKLRGDFPNENLTQEKVLAAAIGKPATNAA

SEQ ID NO: 38616 - DNA, 1755 bp, Brucella melitensis 16M
  CDS (1)..(1755): transl_table=11
atgcagcccaactggcttggtgcattctccgtctatgcagccgtacaggcccttgaaggcaaggatattccaaagtcgatcaaggttccgcttcctgtcatcgatgccagcaatgtcgatacttatcttgcgccgcgcggacaagtttcctgccgacggttatgtctattcggactacgaccgggccctgttcgacaagttgctggggcagcaagcgcccccatgcaggtttcatccaggcctgtcgtggacgcgccggctccgtggctcgaagcgcgcaacgtgttcaaggggtttttcggcaacccggtgctgaagggggtcagcatcgccttgcggcccggccgcgtgcacgcactgcttggagaaaacggtgcgggcaagtccacactcatcaatctgctgtccggcgccttgccgccggacagcgggaatattgtgctggaaggtgcagctctttccagattgaacccggcgcaagcgcggaaagcgggcattgctgtcattcagcaggaacttagtctgacgccggaattgtcgattgcagaaaatatcgggcttggcgcctatccgcgccgtttcggcctgatcgactacaaggcccttcacggggaagccttggccgtttgtaaacgtgtcggcctgaccgaaccgctcgaaactccggtcggcacactgtcgctcgggcgcaggcagatggtcgagattgccaaggcgcttttccgcaaaccgcgggtgctcatccttgatgagccgacatcatcgctatctgcgcatgaggcgggcgtattatcatcgctggttctcaaattgcgcgatgagggcgtcgcacttctctatatctctcacaggctcaacgaaattcgctcgctctgttctcatgtgaccgtgctcaaagacggtgtcgtgaccgcagatcagtcattatcaaattcggacccggaggagctagttcgcctgatggtcgggcgtgatactggcgaccttttccccgcttggcgaaccagtgccaccggcgaaaaacggattcatattcgcggcatgagcgcgggtatggcgcagaatgtcgatatggatgccaatgcgggcgagatcatcggtatcggcggtctggttgggcaaggacaggaagattttctgctgggtctctatggtgcgctgccgaccgcagcccgtgaagcgatagtgtgcggaaataacggcctgttcaaatcggttggcgcggcaaacgcggctggccttgcctatgtcccggcggatcggaagcgggaagggctcgtgctgccgcattccattgcgtcaaacctgctcctgccgtcacttgatcgatatacgcggcacggtttgcgcaacacggcaaacgagcagcgtgtcgttgccaaacttgccgaacggctgacgatcaggggagatactgcgcgcccggttcaggcgctgtccggcggcaatcagcaaaaggttgcgcttgccaaatggcttccgctggaacctacaatcctgttgctgaacgatccaacccgcggcgtcgatatcgaaaccaagcgtgaaatctacctgatgctgcgccggtttgccgatgaaggaaagctcgttgtcctgctgagttccgacacgccggagcttgtgcatttgtgtgaccgcgtcatggttttccgcgagggccgcatggtcgcgaccctgaaacacggggatctgtcggaagaggcaattgtaggggctgccatgggcctgaaatcgtcgagaaaggcagcctga

SEQ ID NO: 38617 - protein, 584 aa, Brucella melitensis 16M
MQPNWLGAFSVYAAVQALEGKDIPKSIKVPLPVIDASNVDTYLAPRGQVSCRRLCLFGLRPGPVRQVAGAASAPMQVSSRPVVDAPAPWLEARNVFKGFFGNPVLKGVSIALRPGRVHALLGENGAGKSTLINLLSGALPPDSGNIVLEGAALSRLNPAQARKAGIAVIQQELSLTPELSIAENIGLGAYPRRFGLIDYKALHGEALAVCKRVGLTEPLETPVGTLSLGRRQMVEIAKALFRKPRVLILDEPTSSLSAHEAGVLSSLVLKLRDEGVALLYISHRLNEIRSLCSHVTVLKDGVVTADQSLSNSDPEELVRLMVGRDTGDLFPAWRTSATGEKRIHIRGMSAGMAQNVDMDANAGEIIGIGGLVGQGQEDFLLGLYGALPTAAREAIVCGNNGLFKSVGAANAAGLAYVPADRKREGLVLPHSIASNLLLPSLDRYTRHGLRNTANEQRVVAKLAERLTIRGDTARPVQALSGGNQQKVALAKWLPLEPTILLLNDPTRGVDIETKREIYLMLRRFADEGKLVVLLSSDTPELVHLCDRVMVFREGRMVATLKHGDLSEEAIVGAAMGLKSSRKAA

SEQ ID NO: 38618 - DNA, 1590 bp, Brucella melitensis 16M
  CDS (1)..(1590): transl_table=11
atgaacctagccaatcctgtctcgctggacgagcgtggggcactgccggatactttcggaaagcctcttcttgaaatgcgtgggatcaacaagtccttcggtgtcgtgaaggcgctgagcgatgtgaacttcaccgtcatgccgggcgaaatacatgcctttgtgggtgaaaacggcgcgggaaaatccacgctgatgaaggtgctttcgggtgtttatccccatggaagctatgaaggcgcgatctattacgacggggaagagcggcagtttcgggatattaacgattccgaggcgctcggcatcgtcatcattcatcaggaattggccctcattccgctgatgtcgattgccgagaatatttttctcgtcaatcctccggcaagccggggtgtcatcgaccgctccgccgtgcacaagcggacgcgggagctattgaaaaaggtcggtctggcggaaacgcccgatacgctcatcaccgatatcggcattggcaagcagcagcttgttgaaatcgccaaggcgctttccaagcgtgtgcggctgttgatcctcgatgaaccaacagcaagcctcaacgaaaatgacagtgcggcgcttctggcgctgctgcgcgagtttcgcgcgcagggcatcacctcgatcctcatttcgcacaagctcaatgaaatccgcgaagtggccgacaagattaccgttctgcgcgacggcaaggcggttgcgacacttgattgccatgcgggcgaagtggaggaagacgatatcatccgcaagatggtggaccgcgatctggagagccgttatcccaagcgcgatcccaagatcggcaatgtcatcttcgaggtcgataactggtcggtctatcatccgctgcatcccgatcggcattcggtcaagaacgtgtcattcaaggtgcgggcgggcgagatcgtcggcattgccggattgatgggagcggggcgcacggaattcgccatgagcctgtttggccgttcatggggcacgaatatcactggcgaggcgcgcatcaatggcaagacggtggatatttccaccgtggcgcgggcaatcaaggcgggccttgcctatgttaccgaggatcgcaagaagcttggcctggttcttggccagaatatttcgcgcaatatctcgctggcgcacttacgcggcgtgagcccgaaaggcattatcgacgatatccgggaaatgaagatcgcgaattcctatcgcgaccagatgcgtattcgctgtcacaatgtctatcaggaaaccggcacgctttcgggcggcaaccagcagaaggtggtgctgtcgaaatggcttttcactggccccgacgtgctgatcctggacgagccgacacgcggtatcgatgttggcgcgaaatatgacatttacacaatcatcaattcactggcggaaagcggcaagggcgttgtcgtcatttcttcggaaatgccggagctgatcggcatttgcgaccgcatcgtcgtcatgcatgagggcgccttcgtcggcgaagtggcaggcgaggaagcaacgcaggaaaacatcatgcgcgccatcatgcgaaacacgggaaaagggtaa

SEQ ID NO: 38619 - protein, 529 aa, Brucella melitensis 16M
MNLANPVSLDERGALPDTFGKPLLEMRGINKSFGVVKALSDVNFTVMPGEIHAFVGENGAGKSTLMKVLSGVYPHGSYEGAIYYDGEERQFRDINDSEALGIVIIHQELALIPLMSIAENIFLVNPPASRGVIDRSAVHKRTRELLKKVGLAETPDTLITDIGIGKQQLVEIAKALSKRVRLLILDEPTASLNENDSAALLALLREFRAQGITSILISHKLNEIREVADKITVLRDGKAVATLDCHAGEVEEDDIIRKMVDRDLESRYPKRDPKIGNVIFEVDNWSVYHPLHPDRHSVKNVSFKVRAGEIVGIAGLMGAGRTEFAMSLFGRSWGTNITGEARINGKTVDISTVARAIKAGLAYVTEDRKKLGLVLGQNISRNISLAHLRGVSPKGIIDDIREMKIANSYRDQMRIRCHNVYQETGTLSGGNQQKVVLSKWLFTGPDVLILDEPTRGIDVGAKYDIYTIINSLAESGKGVVVISSEMPELIGICDRIVVMHEGAFVGEVAGEEATQENIMRAIMRNTGKG

SEQ ID NO: 38620 - DNA, 1545 bp, Brucella melitensis 16M
  CDS (1)..(1545): transl_table=11
atgagcctggctgcgaaaatcgaaggcaaaaacggcgatgtcgttcttgccgcgcagaatgtggccaagtcctatggccgcatccatgcgctgaaaggcgtgaatttcgagattcgccgggggcaggtcacgacgcttttcggtgaaaacggtgcgggcaagtccacgctgatgaaagtgctttccggcgtgatccagccgactttgggcacgatcatcctcgatggcaagccggtgacgttcaattcatccaccgaagcgcgcgaccatggcatctcgatcatccatcaggaattaagcctcgcgcccaacatgaatgtgcgcgacaacatcttcatggggcgcgaaatccgcaccgccaccggcgtcgattttgccgaggaagagcggctgacgcgcgaactcatgaaggaactggaagaagatatcgatccgctgacgccggttgaggaattgcgtctcggccagcagcaggtcgttgagatcgcccgtgcgctttcggtcaattcgcgcattctcatcatggatgagccgacttcggcgctcagtgcttcggaagtcgaggttctgttcaaggtgatccgcgacctgacggcgcgcggtgtcgccatcgtctatatttcgcatcatctggaagaggcgctccagatcaccaatcatgcggtggtgctgcgcgacggcaccatgacggcctgtgcgccgcgtgaggaaatcgatctggaatggatcgtgcgcaatatggtcggtgaaaacttcgacctcggttctcctcccactggctatgaatggggcgatgtcgcgctttcggtcgaagacctgaccgttcccgaccccagtggcagtggcttctcgctggtggaccgcatgtcgctcaatgtgcgggcgggcgaaatcgtctgcatctatggtctcatgggtgcgggccgcacggaattgctggaatcggttgccggtcgcttgaaatcgagaggcgggcgtattctcctcaaagggcaggatatttccggcctcaccatcgctgagcgcatcgaaaagggccttgtgctggtgccggaagatcgccagcgcgacggtctcgtccagacgatgacggtcggcaagaacctgtcgcttgccagcattgcggaaatgaccagggggatattcacctcgcgcaagcgcgaaaagcggatcgtcgatcagtcgatcaggaatgtgcacatcaagaccgatggcggcgaggcggcaatcggttcgctttcgggcggcaatcagcagaaagtcgtaattggcaagatgctggcgaccgaaccggatgtgatcctgctcgatgagccgagccgcggcatcgacatcggcgcaaaggcggaagtgttcaagcttctggccgaaaaggcgaagcaggggctggccgtggtctacaccacctcggaagtcggcgaatgcctcagcatcgcgcaccgcatcatcgtcatgcaccgtggacgcatctccgccgaattcggatcggacgtgtccaaggaaaagatcatgaccgcctcgggcgaagccatggtcggtcattaa

SEQ ID NO: 38621 - protein, 514 aa, Brucella melitensis 16M
MSLAAKIEGKNGDVVLAAQNVAKSYGRIHALKGVNFEIRRGQVTTLFGENGAGKSTLMKVLSGVIQPTLGTIILDGKPVTFNSSTEARDHGISIIHQELSLAPNMNVRDNIFMGREIRTATGVDFAEEERLTRELMKELEEDIDPLTPVEELRLGQQQVVEIARALSVNSRILIMDEPTSALSASEVEVLFKVIRDLTARGVAIVYISHHLEEALQITNHAVVLRDGTMTACAPREEIDLEWIVRNMVGENFDLGSPPTGYEWGDVALSVEDLTVPDPSGSGFSLVDRMSLNVRAGEIVCIYGLMGAGRTELLESVAGRLKSRGGRILLKGQDISGLTIAERIEKGLVLVPEDRQRDGLVQTMTVGKNLSLASIAEMTRGIFTSRKREKRIVDQSIRNVHIKTDGGEAAIGSLSGGNQQKVVIGKMLATEPDVILLDEPSRGIDIGAKAEVFKLLAEKAKQGLAVVYTTSEVGECLSIAHRIIVMHRGRISAEFGSDVSKEKIMTASGEAMVGH

SEQ ID NO: 38622 - DNA, 1548 bp, Clostridium perfringens str. 13
  CDS (1)..(1548): transl_table=11
atgaaagactcttcaaacctgttagaaatgagaaatatctctaaagaattcccaggggttaaagctttagataatgtaacattaaaagtaaaaaaaggttctgtacatgctttaatgggagaaaatggtgctggtaaatcaaccttaatgaaatgtctatttggtatatatcaccctaattcaggagaaatttttatttctggccaaaaggtacaatttaaaaattcaaaacatgccctagataatggagtatctatggttcaccaagagttaaatcaagttagagaaagaaatgttatggataatctttggcttggtagatatcctaaaaaagggctttttatagatgaaaagaaaatgtatgatgaaacagaaaaaatctttaaggatctagatataaatgttaatcctcgtgataaggtttctacactatctgtttctcaaatgcaaatggttgaaatagcaaaggctgtttcgtataactctaaaataatagtaatggacgagcctacttcctctttaacagaaaaagaagtaagtcacctatttaaaataataaataaacttagaaagcaaggaataagtataatttatatctctcataagatggaagaaatcttagagatctctgatgaagttaccataatgagagatggtaaatggattgctactgaaaaagcttcagatcttactatggatttaataataaaacttatggttggacgtgaacttactgatagattccctaaaaaggatcatattcctaaagaaactactttagaagtaaataatcttagtgatgcaaaaaatgaattaaagaatgtttcctttaaacttagaaagggagaaattttaggaattgcaggtcttgttggtgctaaaagaactgaaaccttagaaaccttatttggccttagagaaaagggctctggagatattattttacatggcaaaaaagttgataacagtaagccttttaaggctatgcaaaatggttttgcccttgttactgaagaaagaagacaaactggaatctttggaaaattacctatagattttaattctataatagctaatatagatagttataaaacatcaacaggtcttttagcaaatgaaagaatctctaaagatactcaatgggttatagattcaatgaaagtaaaaactccaagtcaaaaaactctaatcggtagcctatctggtggtaatcaacaaaagatagtaattggaaaatggcttcttagaaaacctgaaatactacttctagatgagcctactagaggtatagatgttggtgctaaattcgaaatataccaacttataaatgaacttgctaaagaagacaaaggaataattatggtttcttctgaaatgcctgaacttttaggtgtatgtgacagaatactagtcatgagtaatggtagggtttctggcatagttaatgctaatgagactacccaagaggaaattatgcatctatctgcaaaatatctatcagtaacaggaggagttaacaatgcaaaccaaatcaaagaaaaagtttaa

SEQ ID NO: 38623 - protein, 515 aa, Clostridium perfringens str. 13
MKDSSNLLEMRNISKEFPGVKALDNVTLKVKKGSVHALMGENGAGKSTLMKCLFGIYHPNSGEIFISGQKVQFKNSKHALDNGVSMVHQELNQVRERNVMDNLWLGRYPKKGLFIDEKKMYDETEKIFKDLDINVNPRDKVSTLSVSQMQMVEIAKAVSYNSKIIVMDEPTSSLTEKEVSHLFKIINKLRKQGISIIYISHKMEEILEISDEVTIMRDGKWIATEKASDLTMDLIIKLMVGRELTDRFPKKDHIPKETTLEVNNLSDAKNELKNVSFKLRKGEILGIAGLVGAKRTETLETLFGLREKGSGDIILHGKKVDNSKPFKAMQNGFALVTEERRQTGIFGKLPIDFNSIIANIDSYKTSTGLLANERISKDTQWVIDSMKVKTPSQKTLIGSLSGGNQQKIVIGKWLLRKPEILLLDEPTRGIDVGAKFEIYQLINELAKEDKGIIMVSSEMPELLGVCDRILVMSNGRVSGIVNANETTQEEIMHLSAKYLSVTGGVNNANQIKEKV

SEQ ID NO: 38624 - DNA, 1506 bp, Clostridium perfringens str. 13
  CDS (1)..(1506): transl_table=11
atgggtgaaagaacaccaatgctaaaaatggtaggtgtatcaaaatcctttccaggagtcaaagctttagataatgttagcttaatggcttatggtggagaagttactgctttaatgggagaaaatggagcagggaaatcaactttaatgaaaatactaagtggagtatataaaaaagatgaaggtaagatattcattgaaggaagggaagtagaagtaaagggaattaaatcagcagaagaagctggtataacaataattcaccaagaacttagtgttttaaataacttaactatttcagaaaatatatttttaggtaatgaaaaacatagtaaatttacaggaagaataaataaaaaattattagatgaaagaagcaaaatgttcttagaacaaattggttgtgatatagatccaaatagattagttagtactcttaatgtaggtgaaaagcaaatgatagaaatagcaaaagccttaactaagaatgcgagaataattattatggacgagcctactacagccttaactgatgtagagactgaaaacctttttaaagtaatagagaatttaagaaaaaagggaatagcaataatatacatatcacatagaatggaagaaatatttaaaatatgtcatagagtagaagtattaagagatggtaaatatgcaggaagtgcagaaataaaagacatagataatgataagcttatagcaatgatggttggaagaaccatagaggatcaatttccatacagagatgttaaaaaaggagatttagctttagaagttaaaaatcttagctgtaaggaaggagttaaaggagcttcatttactctgagaaagggagaaatattaggaattgcaggtcttatgggatcaggcagaacagagcttgcaaaaacaatatttggagaatataaaagaacaagtggtgaaatttctttaaatggaagtcctattaatataaattgcataagtgacgcaataaataatggtatatgttatctttcagaggatagaaaaaaagaaggctgtattttaggaatgtctgttggagaaaatatgaccttatgtaacttaaagaaatatgagaataagtttaaatctcttgataaaaaagaagaagcaaaggatatagagtactatattaagaagataaacataaaaactccaaataaggagcagtttattaagaatttaagtggaggtaatcaacagaaggttatacttgctaaatggcttatgctatctccagaagtattaataattgacgagccaactagaggaatagacgtaggtgcaaagaaagaaatttatgaacttttaaatgaacttaaagctagtggaaaagccataataatgatttcttcagacttaccagaggttttaggaattagtgatagaattatggttatgagtgaaggaagaatctctggagaattaaatagagatgaagcaaatcaagaaagtataatgaaattagccgttggaataaacaattag

SEQ ID NO: 38625 - protein, 501 aa, Clostridium perfringens str. 13
MGERTPMLKMVGVSKSFPGVKALDNVSLMAYGGEVTALMGENGAGKSTLMKILSGVYKKDEGKIFIEGREVEVKGIKSAEEAGITIIHQELSVLNNLTISENIFLGNEKHSKFTGRINKKLLDERSKMFLEQIGCDIDPNRLVSTLNVGEKQMIEIAKALTKNARIIIMDEPTTALTDVETENLFKVIENLRKKGIAIIYISHRMEEIFKICHRVEVLRDGKYAGSAEIKDIDNDKLIAMMVGRTIEDQFPYRDVKKGDLALEVKNLSCKEGVKGASFTLRKGEILGIAGLMGSGRTELAKTIFGEYKRTSGEISLNGSPININCISDAINNGICYLSEDRKKEGCILGMSVGENMTLCNLKKYENKFKSLDKKEEAKDIEYYIKKINIKTPNKEQFIKNLSGGNQQKVILAKWLMLSPEVLIIDEPTRGIDVGAKKEIYELLNELKASGKAIIMISSDLPEVLGISDRIMVMSEGRISGELNRDEANQESIMKLAVGINN

SEQ ID NO: 38626 - DNA, 1575 bp, Corynebacterium glutamicum ATCC 13032
  CDS (1)..(1575): transl_table=11
atggtgaactctgaacaagcgcttcatcagcatgatcctgcaccaatccttcagttggataaagtctccaagtcgtttggcccagtcaacgtcattaatcaagtgagcatcgatgttcgccctggcagggtgcttgcgctgttgggtgaaaatggtgcgggtaaatctacgctgatcaagatgatgtcgggtgtgtatcagcctgatggcgggcagattttggtggatggaaagcccacgactttgcctgatacgaaaactgctgagtcttttggcatcgctacgattcaccaggaattgaatctggtgcccacgatgacggtggcggaaaacgtcatgctgggccgcactcctcggaagtggggtttggtcaatttcaaacatttgcgcaggcaggcacaggcggcgctggatctcatcggcgtggatgtggatctgaatgctcaggtgggttctttaggaatcgctaggcagcagatggtggagatcgccaaggcgttgtccatgaatgcgcggatattgattttggatgagcccactgcagcgttgactggtcgtgaaattgatcagttattcaaagtggtggatcagctgaaagaaaaaggcgtggccatggtgtttatttcgcaccacttggatgagatcgcgcgcatcggcgataccgtctctgtgctgcgtgatggccagttcatcgcggagctgccagcggatactgatgaagatgagctggtgcggctgatggtgggtcgtagcattgaaaaccagtatccgcgtagtgcgccagagatcgggcagccactgttggaggtgaaaaacctcaacgcggagggccggttcacggatatttccttgactgttcgcgctggtgaagtcgtaggccttgccggtcttgtgggtgctggtcgcacggaagtggttcgctcgattgctggcgtggacaaagttgattccggtgaggtgatcgttgctggcaagaaattgcgcggcggcgatatttccgaggctattaaaaacggcatcgggcacattccggaagatcgaaaagcccagggcctggtgctggggtcgtctgtggaggacaacctgggattggcgactttggcgtcgacagcccgcgcaggtttggtcgatcgatcaggacagcacaaacgagccgccgaggtcgcggaaaaactccgcatccggatggcaagcctcaaacaaccgattagcgatttatcgggcggcaatcagcaaaaggccgtgttcggccgctgggtgcttgccgggtcaaacgtgctgcttctcgacgaaccgacccgtggcgttgacgtcggcgcgaaggtggaaatttacaacatcattaatgagatgacggaaaaaggtggcgctgtgctcatggtgtcatcggagcttcccgaagtcttgggcatggctgatcgcattttggtcatgtctggtggacgcatcgcaggcgaactgccagcgaagggaacaacccaggacgatgtcatggctctagctgtttcccaggtggatgattccatcaccgaggaagctgctgcagaaatcgaaaacacaaaggaggaccgttga

SEQ ID NO: 38627 - protein, 524 aa, Corynebacterium glutamicum ATCC 13032
MVNSEQALHQHDPAPILQLDKVSKSFGPVNVINQVSIDVRPGRVLALLGENGAGKSTLIKMMSGVYQPDGGQILVDGKPTTLPDTKTAESFGIATIHQELNLVPTMTVAENVMLGRTPRKWGLVNFKHLRRQAQAALDLIGVDVDLNAQVGSLGIARQQMVEIAKALSMNARILILDEPTAALTGREIDQLFKVVDQLKEKGVAMVFISHHLDEIARIGDTVSVLRDGQFIAELPADTDEDELVRLMVGRSIENQYPRSAPEIGQPLLEVKNLNAEGRFTDISLTVRAGEVVGLAGLVGAGRTEVVRSIAGVDKVDSGEVIVAGKKLRGGDISEAIKNGIGHIPEDRKAQGLVLGSSVEDNLGLATLASTARAGLVDRSGQHKRAAEVAEKLRIRMASLKQPISDLSGGNQQKAVFGRWVLAGSNVLLLDEPTRGVDVGAKVEIYNIINEMTEKGGAVLMVSSELPEVLGMADRILVMSGGRIAGELPAKGTTQDDVMALAVSQVDDSITEEAAAEIENTKEDR

SEQ ID NO: 38628 - DNA, 1503 bp, Fusobacterium nucleatum subsp. nucleatum ATCC 25586
  CDS (1)..(1503): transl_table=11
atggaaaatctaaaatatgtattagaaatggaaaatatttccaaagagtttcctggagtaaaagcactagatgatgttcaattaaaactaaaacctggaactgtccatgctctaatgggagaaaatggagctggaaaatcaacattaatgaaatgtttatttggaatttatgaaaaaaatagtgggaaaattttattagatggagtagaagttaatttcaaatctacaaaagaagccttagaaaatggtgtttctatggttcaccaagaattaaaccaagttttacaaagaaatgtacttgataatatttggcttggtagatatccaatgaaaggattttttgtagatgaaaagaaaatgtataatgatacaattaacatctttaaagatttagatattaaagtagatcctagaaaaaaagtggctgatttacctattgctgaaagacaaatgatagaaatagctaaagcagtatcatataaatcaaaagtaatagttatggacgaacctacttcttcgttaacagaaaaggaagttgatcatttatttagaattatcaaaaaattaaaagaaagtggagttgggattatttatatttctcataaaatggaagaaataaaaatgatttctgatgaaattactattttaagagatggtaaatggatatcaactaatgatgtttcaaaaatttcaactgaacaaattataagtatgatggtaggtagagatttaactgaacgtttccctaaaaaagataataaagctaaggaaatgatattagaagttaagaatttaactgctttaaatcaaccttctatacaagatgtaagttttgaactttataaaggagaaatcttaggaatagctggacttgttggttctaaaagaacagaaatagttgaaactatttttggaatgagaccaaaaaaacatggtgaaattattttaaatggtaaaactgtaaaaaataaaagtccagaagatgctataaaaaatggttttgccttagtaacagaagaacgtagaagtacaggaatattttcaatgttagatgtagcatttaactctgttatctctaacttagatagatataaaaataaatttagacttcttaaaaataaagatatagagaaagatacaaaatggatagtagatagtatgagagtaaaaactccttcatactctaccaaaatcggaagtctttctggtggaaatcaacaaaaagtaattattggaagatggctactaactgaaccagaagttcttatgcttgatgaacctactagaggtattgatgttttagcaaaatatgaaatttatcaattaatgatagatcttgctaaaaaagataaaggaattataatgatttcttctgaaatgcctgaacttttaggagtaacagatagaatacttgttatgagtaatggtagagttgcaggaattgttaaaacatctgaaactaatcaagaagaaataatggaactatcagctaaatatctataa

SEQ ID NO: 38629 - protein, 500 aa, Fusobacterium nucleatum subsp. nucleatum ATCC 25586
MENLKYVLEMENISKEFPGVKALDDVQLKLKPGTVHALMGENGAGKSTLMKCLFGIYEKNSGKILLDGVEVNFKSTKEALENGVSMVHQELNQVLQRNVLDNIWLGRYPMKGFFVDEKKMYNDTINIFKDLDIKVDPRKKVADLPIAERQMIEIAKAVSYKSKVIVMDEPTSSLTEKEVDHLFRIIKKLKESGVGIIYISHKMEEIKMISDEITILRDGKWISTNDVSKISTEQIISMMVGRDLTERFPKKDNKAKEMILEVKNLTALNQPSIQDVSFELYKGEILGIAGLVGSKRTEIVETIFGMRPKKHGEIILNGKTVKNKSPEDAIKNGFALVTEERRSTGIFSMLDVAFNSVISNLDRYKNKFRLLKNKDIEKDTKWIVDSMRVKTPSYSTKIGSLSGGNQQKVIIGRWLLTEPEVLMLDEPTRGIDVLAKYEIYQLMIDLAKKDKGIIMISSEMPELLGVTDRILVMSNGRVAGIVKTSETNQEEIMELSAKYL

SEQ ID NO: 38630 - DNA, 1491 bp, Thermoanaerobacter tengcongensis MB4
  CDS (1)..(1491): transl_table=11
ttggaacctattttacagatgaaaggtattagtaagaaatttggcaatgtcaaagtattggataatgttgatttaactttatatagaggtcgcgtattagcactattaggtgagaatggtgctggaaaatcaacactaatgaaaattttgtgcggaatttatgaaaaagatgagggaagcatttatttaaaagggaaaaaagtgaatatacgaaatgttagagatgcagaaaaatatggaattgcgatgattcatcaagaacttaatttagttccttctttaagtgttgctgaaaatattttcttagggagagagtatgtgagaacttttaattctattgattggaagaaaataaaacaagaaagtgctaagatccttcatgaattagggatggatctaaatgtggataggttggttaaacacctaagcgttggcgaacaacaaatggtagaaatagcaaggagccttttaatgaatgcagagatattagtgatggatgaacctactgctgcattaacagaaggagagacgagaagattatttgaggtaataaaaaggcttagaaaagaagggaagtctatcatttatatttctcataggatgaatgaaatttttgagatttgcgatgactatattgttttaagagatgggtgccttatttctcaaggggaaattagtgaagttacacgtgatgatttagtaaagatgatggtgggtagggagttaaaagagcattttccttacgagtgttcttctccaggagaagaaatattacgcgtagaaaatttgactgtaaaaggtatgtttgaaaaagtttcttttgttgtgaaaaagggagaagtagttggttttgcggggctaataggtgcaggcagaacggaggtagcaaagacaatttttggcttttataaaaaaacatcgggtaaaatttatttgggaggagaagaagtaaaaataaacagccctagggatgctattgaaaaagggataatgtatttatcagaagacagaagaaatgaaggattaattataaagcatactttgaaagagaatatgactctttcggctttgaaaaaaatttctgactatataggaactattaatttttcaaaagagaggtctatagtaaatgaaatgattcaaaaattgaatataaaatcgttttctcctaatcaaaaaatatttagattaagtggtgggaatcaacaaaaagtagcgattgctaaatgcttgttgacaaatcccaagttaattattctcgatgaaccaacgcgaggtatcgatgtaggagcaaaaaatgaaatatataaattaatcaatgatttaaaaagacagggcattggtataattttaatatcttcggaattacctgaagttttaaatataagtgatagaattatagtaatgcatgaagggaaaataacaggagaaatttctcgcgaagaagctacagaagaaaaagttatgttaaaagctgtaggaggggaataa

SEQ ID NO: 38631 - protein, 496 aa, Thermoanaerobacter tengcongensis MB4
MEPILQMKGISKKFGNVKVLDNVDLTLYRGRVLALLGENGAGKSTLMKILCGIYEKDEGSIYLKGKKVNIRNVRDAEKYGIAMIHQELNLVPSLSVAENIFLGREYVRTFNSIDWKKIKQESAKILHELGMDLNVDRLVKHLSVGEQQMVEIARSLLMNAEILVMDEPTAALTEGETRRLFEVIKRLRKEGKSIIYISHRMNEIFEICDDYIVLRDGCLISQGEISEVTRDDLVKMMVGRELKEHFPYECSSPGEEILRVENLTVKGMFEKVSFVVKKGEVVGFAGLIGAGRTEVAKTIFGFYKKTSGKIYLGGEEVKINSPRDAIEKGIMYLSEDRRNEGLIIKHTLKENMTLSALKKISDYIGTINFSKERSIVNEMIQKLNIKSFSPNQKIFRLSGGNQQKVAIAKCLLTNPKLIILDEPTRGIDVGAKNEIYKLINDLKRQGIGIILISSELPEVLNISDRIIVMHEGKITGEISREEATEEKVMLKAVGGE

SEQ ID NO: 38632 - DNA, 1524 bp, Thermoanaerobacter tengcongensis MB4; identical to SEQ ID NO: 27224
  CDS (1)..(1524): transl_table=11

SEQ ID NO: 38633 - protein, 507 aa, Thermoanaerobacter tengcongensis MB4; identical to SEQ ID NO: 27225

SEQ ID NO: 38634 - DNA, 1506 bp, Thermoanaerobacter tengcongensis MB4
  CDS (1)..(1506): transl_table=11
atgggagaagtattgattaggatggaaaatataagcaaagaatttccaggcgttaaagcattaaaaaatgtaaattttgaaattaaaaaaggagaagtacatgctttagtaggagaaaatggcgccggtaaatcaactttaattaaaattttgtcaggtgtttattcaaaagattctggtaagatatattttgatggacgagaggttgaaatcaattccccaaaagaagcgcagcaactaggtatcagtgtgattcaccaagagttaaatttgtgtttacatttaacagtagcccagaatatattcttgggaagggagttcgtaaaaaatggtgtaatagatgaaaaaaagcaaaatgaagaggcaaaaaaaatattggaaaaattaaatgtaaatatagatccagctgagtatgtaaaaaatctttccgtttcgcgacaacaaatggtagaaatagccaaagcaatttctatggaagcaaaagttattataatggatgaaccgacatctgctatttcagaaaaagaaactgaagaactatttaaagtgattggagaactgaaaaagcaagggaaatctataatatatatttctcatcgccttgaggagctcaataggattgtagatagagttacagttctgcgagatggcgaacatataataacagctaatttccgggatttaacgatagatgatattatacgctatatggtaggaagaaaactagaagaaaaatatcctagagtatatgtaaatcgaggtaaaaaaatactagaggttcatggcctatcacaggggactcgattaaaagatatttcttttgatttatatgaaggagaaattttggggtttgctgggttggtgggagcaggaagaacagaggtggctagggcaatttttggagctgataaatttgataaaggtgagatattaattaatggcaaaaaagtagagattaattcacctatagatgcaataaaaaacggattagcctatgttccagaagatagaaagttgacaggacttgctttgaatctttctgtattagctaatattaccttagctaccatggataatgtagtaaatatgcttagcgtgataaattctgttaaagaaagaaagataggagaaaaaataatacgcgatttaaaaataaaaacaccgtctctttttcaaagagttcaaaatttaagtggagggaaccaacaaaaggttattgttggtagatggttgttaagagaaccgcaaatctacatttttgatgagccaacgagggggattgatgtaggtgcaaagattgaaatttataatattttgaataatttaaagcaagaaggaaaaggaattatagttatatcttccgaattaccagaaataatgggaattacagatagggtagtagtaatgtgcgagggaagaataactgcaattcttgaaactagtaaaactacacaagaggaaataatgtattatgcgacactatataaaaaagaaaggagtaattaa

SEQ ID NO: 38635 - protein, 501 aa, Thermoanaerobacter tengcongensis MB4
MGEVLIRMENISKEFPGVKALKNVNFEIKKGEVHALVGENGAGKSTLIKILSGVYSKDSGKIYFDGREVEINSPKEAQQLGISVIHQELNLCLHLTVAQNIFLGREFVKNGVIDEKKQNEEAKKILEKLNVNIDPAEYVKNLSVSRQQMVEIAKAISMEAKVIIMDEPTSAISEKETEELFKVIGELKKQGKSIIYISHRLEELNRIVDRVTVLRDGEHIITANFRDLTIDDIIRYMVGRKLEEKYPRVYVNRGKKILEVHGLSQGTRLKDISFDLYEGEILGFAGLVGAGRTEVARAIFGADKFDKGEILINGKKVEINSPIDAIKNGLAYVPEDRKLTGLALNLSVLANITLATMDNVVNMLSVINSVKERKIGEKIIRDLKIKTPSLFQRVQNLSGGNQQKVIVGRWLLREPQIYIFDEPTRGIDVGAKIEIYNILNNLKQEGKGIIVISSELPEIMGITDRVVVMCEGRITAILETSKTTQEEIMYYATLYKKERSN

SEQ ID NO: 38636 - DNA, 1578 bp, Streptomyces coelicolor A3(2)
  CDS (1)..(1578): transl_table=11
atggcgggacccgtcctggaaatgcgctcgatcgtcaagacctttcccggtgtcaaagcgctgtcggacgtcacgctcaccgttcgccagggcgaggtccacgccatctgcggggagaacggcgccggcaagtcgaccctgatgaaggtcctctccggagtccacccgcacggcagttacgagggagacgtcctcttcgagggcgagacctgccggttcaaggacatccgggcgagcgagcagcacggcatcgtgatcatccaccaggagctggccctggtgccgtacctgtcgatcgcggagaacatcttcctcggcaacgagcacgccaagcacggactgatcaactggaacgacaccctcaggcacgccaccgaactgctgcgccgggtcggtctcgacgagcacccggagacccgcgtcgccgacatcggcgtgggcaagcagcagctggtggagatcgccaaggcgctgtcgaagaaggtgaagctgctcatcctcgacgagcccacggcggcgctcaacgacgaggacagcggcaaactcctcgacctgatccttcagttgaaggagcagggcatcacctcgatcatcatctcgcacaagctgaacgagatccgccgggtcgccgactcggtcacgatcatccgcgacgggcgctccatcgagacgctcgacgtgaaggcggcggagacgaccgaggaccggatcatcagcgggatggtcggccgcgacctggagaaccgcttcccggagcggaccccgcaccagcccgaggagggcacggccccggccctggagatccgcaactggaccgtgcaccaccccatcgaccagcagcgcaaggtcgtcgacgacgtctcgatcgaggtgcggcgcggcgagatcgtcggcatcgccggactcatgggcgccgggcgcaccgagctggcgatgagcgtcttcggccgcacctacggccggcacgcgggcggcacggtcctcagggacggccacgagatccgcacgaagaccgtcccggaggcggtcgggcacgggatcgcctacgtcaccgaggaccgcaagcactacggcctcaacctcatcgacaccatcaaccggaacatctcgctcaccgcgctgggcaaggtctccaagcggggcgtggtcgacgagcacggtgagcggcaggtcgccgaggactaccgcaagtcgatgaacatcaaggcgccgaccgtcttcgagccggtcggcaagctgtccggcggcaaccagcagaaggtcgtcctgagcaagtggatcttcgcgggtcccgaggtgctgatcctggacgagcccacccgcggcatcgacgtgggcgccaagtacgagatctacacggtcatcgaccgcctggcggccgagggcaaggcggtcgtgttcatctcctccgagctgccggaactgctcggcatgtgcgaccgcatctacacgatggccgcgggtcggctgacgggtgagttctcgcgggccgaggcttcgcaggaagcgctgatgcggcagatgacgaaggacaagcaggaccagaagtcccggaaggacgaagaggtaagccgatga

SEQ ID NO: 38637 - protein, 525 aa, Streptomyces coelicolor A3(2)
MAGPVLEMRSIVKTFPGVKALSDVTLTVRQGEVHAICGENGAGKSTLMKVLSGVHPHGSYEGDVLFEGETCRFKDIRASEQHGIVIIHQELALVPYLSIAENIFLGNEHAKHGLINWNDTLRHATELLRRVGLDEHPETRVADIGVGKQQLVEIAKALSKKVKLLILDEPTAALNDEDSGKLLDLILQLKEQGITSIIISHKLNEIRRVADSVTIIRDGRSIETLDVKAAETTEDRIISGMVGRDLENRFPERTPHQPEEGTAPALEIRNWTVHHPIDQQRKVVDDVSIEVRRGEIVGIAGLMGAGRTELAMSVFGRTYGRHAGGTVLRDGHEIRTKTVPEAVGHGIAYVTEDRKHYGLNLIDTINRNISLTALGKVSKRGVVDEHGERQVAEDYRKSMNIKAPTVFEPVGKLSGGNQQKVVLSKWIFAGPEVLILDEPTRGIDVGAKYEIYTVIDRLAAEGKAVVFISSELPELLGMCDRIYTMAAGRLTGEFSRAEASQEALMRQMTKDKQDQKSRKDEEVSR

SEQ ID NO: 38638 - DNA, 1554 bp, Streptomyces coelicolor A3(2)
  CDS (1)..(1554): transl_table=11
gtgagcagccgcagtccggacgagttgctgcgcatcgagggcatccgcaagaccttccccggcgtggtcgcgctcgacagcgtcgacttcgacctgcgccggggcgaggtgcacgtgctcctcggtgagaacggcgcgggcaagagcaccctcatcaagatgctctccggcgcctacacgcccgacgccgggcggatcctggccggtggcgaggaggtgcgcatccacggtgcgcaggactccgagcgcctcgggatcgccaccatctaccaggagttcaacctggtccccgacctgacggtggccgagaacatcttcctggggcgccagccccgccggctcggcatgatcgaccggaagcggatggacgccgacgcggaggtgctgctgaagcgggtgggggtcaacgtgtctccccgtgcgcgggtgcgtgaactcggcatcgcgcggctccagatggtcgagatcgccaaggcgctcagcctcgacgcgcgcgtgctcatcatggacgagccgaccgccgtactgacctccgaggaggtcgacaagctgttcgccatcgtgcggcggctgcgcgaggacggcgtcgggatcgtcttcatcacccaccacctggaggagatcgccgcgctcggcgaccgggtcaccgtcatccgggacggccggagcgtcgggcaggtgcccgcctccacgcccgaggacgagctggtccggctcatggtggggcggtcgatcgagcagcagtacccgcgcgagcggaccgacgccggtgaggcgctgctcaaggtggaggggctgacgagggacggtgtcttccacgacgtcggcttcgaggtgcgggccggtgaggtcgtcggcatcgcggggctggtcggggccgggcggacggaggtggtgcgggcggtgttcggcgccgatccgtacgacgccgggaccgtgcacgtcgccggtgcgccgctgcggcggcacgacgtgaacgccgccatggccgccgggatcgggctggtgcccgaggaccgcaaggggcaggggctcgtcctcgacgcctccgtcgaggagaacctcgggctcgtcacgctccggtccaccgcccgcgccgggctcgtcgacctcaaggggcagcacacggcggccgagcggatcgccggacagctcggcgtgcggatggccgggctcggccagcacgtgcgcacgctgtccggcggcaaccagcagaaggtcgtcatcggcaagtggctgctggcgaacaccaaggtgctgatcctcgacgagccgacgcgcggcatcgacgtcggcgccaaggtcgagatctaccagctcatcaacgaactgacggccgccggtgccgccgtgctcatgatctccagcgatctgccggaggtgctcggcatgagcgaccgcgtggtcgtcatggcgcaggggcgcgtcgcgggtgaactcaccgccgaacaggccacccaggacgccgtgatggcgctcgccgtcagtacgcacaccggcaactccccgcacagcggcggaacggatggaacggaggcctcccgtggccactga

SEQ ID NO: 38639 - protein, 517 aa, Streptomyces coelicolor A3(2)
MSSRSPDELLRIEGIRKTFPGVVALDSVDFDLRRGEVHVLLGENGAGKSTLIKMLSGAYTPDAGRILAGGEEVRIHGAQDSERLGIATIYQEFNLVPDLTVAENIFLGRQPRRLGMIDRKRMDADAEVLLKRVGVNVSPRARVRELGIARLQMVEIAKALSLDARVLIMDEPTAVLTSEEVDKLFAIVRRLREDGVGIVFITHHLEEIAALGDRVTVIRDGRSVGQVPASTPEDELVRLMVGRSIEQQYPRERTDAGEALLKVEGLTRDGVFHDVGFEVRAGEVVGIAGLVGAGRTEVVRAVFGADPYDAGTVHVAGAPLRRHDVNAAMAAGIGLVPEDRKGQGLVLDASVEENLGLVTLRSTARAGLVDLKGQHTAAERIAGQLGVRMAGLGQHVRTLSGGNQQKVVIGKWLLANTKVLILDEPTRGIDVGAKVEIYQLINELTAAGAAVLMISSDLPEVLGMSDRVVVMAQGRVAGELTAEQATQDAVMALAVSTHTGNSPHSGGTDGTEASRGH

SEQ ID NO: 38640 - DNA, 1518 bp, Streptomyces coelicolor A3(2)
  CDS (1)..(1518): transl_table=11
atggcaccagaaccaccgctgctcagcatgtccggcatcaccaagtcgttccccggagtccgggccctcgacggcgtcgacctcgacgtccaggccggtgaggtgcactgcctcctcggccagaacggcgccggaaagtccaccctcatcaaggtgctggccggcgcccaccagcccgacaccggcaccatccgctggcgcggcgaggaggtcaccctgcgctcgcccatcgcggccatgcgtctgggcatcgccaccatctaccaggaactcgacctggtcgagcacctgtcggtcgccgagaacgtccacctcggtcacgagccgaccgccgccggcttcgtcgtacggggcagggcggccaaggcgtccacggccgcgctgctcaagcggctcgggcaccccgaggtcgacccggggcggctggtcggggagctgtcggcggcgcagcagcagatcgtgtccatggcacgggcgctgtcgcacgacgtacggctgatcgtgatggacgagccgtccgccgcgctcgatccggacgaggtcgacaacctcttccgcatcgtcgccgacctcaccgccgacggagtcgccgtcgtctacatctcgcaccgcctggaggagatccgccgcatcggcgaccgggtcaccgtcctcaaggacggccgcgcggtggccggcgggctgcccgccgagtcgacgccgaccagcgaggtggtggcgctgatgaccggccgcaacgtcgagtacgtcttcccggagaggcccgccgcaccgcccacgggcgaacccgtactgagcgtcaagggactgtcccgggccggggagttcgaccggctcgacctggaggtgcgccccggggagatcgtcggcctcgcggggctggtcggctccggccgctccgagatcctggagacggtctacggcgcccggaaggcgagcaccggtcaggtcctcgtcgacgggcggccgctcaggcccggcagcgtgcgcgccgcggtccgcgccgggctggggctcgcccccgaggaacgcaaggcccaggccctgctgatgctggagtccgtcacccgcaacgtgtcggtctccgccatgtcccgcttctcgcgcggcggctggatcgaccgcggcgccgaactcggcgcggcgcacaaggcgacccgcgagctgtcgctgcggcccgacaatcccgccgtgcccgtgcgcaccctgtccggcggcaaccagcagaaggcggtcctcgcccgctggctgctccgcggctgccgggtcctgctgctcgacgaacccacccgcggcgtcgacgtcggcgcccgcgccgagctgtacgccgtcatccggcgcctcgccgacgagggcctcgccgtcctgctggtctccagcgaggtgcccgaggtgctgggcctcgccgaccgcgtactggtgctgcgcgagggccgcgtcgtgcacgaggcccccgcccgcgaactcgacgaacaccgcgtactcgacctcgtgatggaaggaagcccggcgtcatga

SEQ ID NO: 38641 - protein, 505 aa, Streptomyces coelicolor A3(2)
MAPEPPLLSMSGITKSFPGVRALDGVDLDVQAGEVHCLLGQNGAGKSTLIKVLAGAHQPDTGTIRWRGEEVTLRSPIAAMRLGIATIYQELDLVEHLSVAENVHLGHEPTAAGFVVRGRAAKASTAALLKRLGHPEVDPGRLVGELSAAQQQIVSMARALSHDVRLIVMDEPSAALDPDEVDNLFRIVADLTADGVAVVYISHRLEEIRRIGDRVTVLKDGRAVAGGLPAESTPTSEVVALMTGRNVEYVFPERPAAPPTGEPVLSVKGLSRAGEFDRLDLEVRPGEIVGLAGLVGSGRSEILETVYGARKASTGQVLVDGRPLRPGSVRAAVRAGLGLAPEERKAQALLMLESVTRNVSVSAMSRFSRGGWIDRGAELGAAHKATRELSLRPDNPAVPVRTLSGGNQQKAVLARWLLRGCRVLLLDEPTRGVDVGARAELYAVIRRLADEGLAVLLVSSEVPEVLGLADRVLVLREGRVVHEAPARELDEHRVLDLVMEGSPAS

SEQ ID NO: 38642 - DNA, 1530 bp, Rhizobium etli
  CDS (1)..(1530): transl_table=11
atgagcacgcttgtcgagatggtcggcatcaacaaatcgtttggtttcacgaaagtcctttcggacgttcgcttttccctggaacgtggctccgtgcacgctctgatgggggaaaacggcgcggggaagtccaccctgatgcgtattctggcgggggtatatcagccgggcgcaggaagtgttcggctccgcggggaggaagtcaatttccgttcccctaaggaggcacggttggcgggagtgtcgacggtgtttcaggagtttaccctgatccccaatctcaccgttgctgagaacatgttcctgggccacgaacctcgtcgcattgacggttcgatcgatagcgtcgaggtagtgaaacgcgctcgcgctttgctggctgacgtatttccacagctcgacgcaaccgcgatcgtcgagacactgactgtcgcgcagcagcaggcagtagagatcgcgaagggacttacgtcgaacgcggacgtattcatcttcgacgagccaacggcggcgttgaactcgaccgatgtcgcgcatcttttcaaggttatccgcgaccttaaggctcaacataaggctgtcgtctacatctctcatcgcatgaatgaagtcttcgaactatgcgacaccatcaccgtcatgaaagatggcgcttgggtaaggactgcaagagcgcaggacttcaacttgcaaacgctggtagcgacaatggttggtcgcgaacttcagaacttctttccgccgcgctcgcaggccaccggagcggcaatgctggaggtttcggacttgcgcctcgacgacagcagctcgacagtcactttcgttgtcagaaaaggtgaaatcatcgggctggcagggctcgaaggacagggccagcgagagataatgcgtgccattgtgggcgttgaatcgccaaaggccatcgccgtgtggcgtgccggccccgacaacagcatgcacgtggtgaatgtagggtcagggttcgctcgcgcggtcgcatcaggaatcggttttatccctgaggacaggaagcaggaagggctgttcctgcgcctgcctatctacgacaacatcgcgctgggaaaacagctcaatcggaatatggcaagcgttgcgtggcgatcggtgtcgagggtccgcgaggtgatcaagtcgttacgagttgcggccgccgatcccaatgcgcccgtaggtaaactctcgggcgggaatcagcagaaggtgctgctgggccgctggttgctctccggagtggacatcctcgttattgaggagcccacgcgcggcgtcgacgtcggtgcaaaggcagagatttacagattgctgcgggacttcagtgatcgtggcggtgcggtcgtggtttcgtcgcgcgagcacgctgagcttatagggctctgcgacagcattttggtcgttcatgacaggaagatcgtcgggcagatgtccgcagagggggcgaccgaggaaagaatcctcgagactgcgctgggggcgagtgcgtcaccggatccccgtgctgcggtgcattga

SEQ ID NO: 38643 - protein, 509 aa, Rhizobium etli
MSTLVEMVGINKSFGFTKVLSDVRFSLERGSVHALMGENGAGKSTLMRILAGVYQPGAGSVRLRGEEVNFRSPKEARLAGVSTVFQEFTLIPNLTVAENMFLGHEPRRIDGSIDSVEVVKRARALLADVFPQLDATAIVETLTVAQQQAVEIAKGLTSNADVFIFDEPTAALNSTDVAHLFKVIRDLKAQHKAVVYISHRMNEVFELCDTITVMKDGAWVRTARAQDFNLQTLVATMVGRELQNFFPPRSQATGAAMLEVSDLRLDDSSSTVTFVVRKGEIIGLAGLEGQGQREIMRAIVGVESPKAIAVWRAGPDNSMHVVNVGSGFARAVASGIGFIPEDRKQEGLFLRLPIYDNIALGKQLNRNMASVAWRSVSRVREVIKSLRVAAADPNAPVGKLSGGNQQKVLLGRWLLSGVDILVIEEPTRGVDVGAKAEIYRLLRDFSDRGGAVVVSSREHAELIGLCDSILVVHDRKIVGQMSAEGATEERILETALGASASPDPRAAVH

SEQ ID NO: 38644 - DNA, 1491 bp, Yersinia pestis KIM
  CDS (1)..(1491): transl_table=11
atggaaatattgttagaagtccgtggcttatctgttgagtttcctggtgttaaggcattggactccgtagatttttctctgcaacgcggtgaggttgttgcgttattaggagagaatggcgcaggaaaatcgacattaataaaagcattaaccggggtttataaacgatccgctggtgaggtgctgttggacggcaaggctgtgtgccccattgataccgcagatgcccaactcatggggattggtactgtctatcaagaggtcaacttactgccgaacatatctgttgctgcgaatttatttattggccgtgagccgctacgttgggggctaattgatcacaataaaatgaaccagcaagcagcaaaattgctgacgggttatggtttaacgttagatgttcagcagcctttggctaatttctctattgcaatacaacagattgtagcaatcgcccgcgccgttgacctttccgcgaaggtgctgattctggatgagcctacagcaagtttagatgctaaagaagtcagtatgttactggatatcttgtgccagctacgggaccagggtatcggtatggtttttgtgacccattttctcgatcaggtttatcgaatcagtgatcgcattacagttttgcgaaatggcaagctcgtcggtaccaaaactgtggcagaacttccccggattgagctagtgcaaatgatgctggggcatagttttgatgaacaattactgaaacgtggtgaacacagtattacgaataagaatccattggttgagtttaaaaactatggccgacggggtgtggtagagaattttgatttgtctgtatctcccggtgaaattgtcgggttggccgggttattaggttcaggacggactgaaacagcacagctaatttttggcataacgacacctgatacgggggaagccaaaatacaaggcaaaccggttaaaattagaacaccacgtaaggcatcaaaatttggttttggctactgcccagaagatcgcaaaacagagggtattgttggtgcggcaaccgtaagggaaaacatcattttagccttacaagcgcagcgtgggtggctgaggcccctttctatgcgtgagcagacacaaattgcagacgattttatccagcaactgggtattcgtaccccaagccctgaacagcaaattcaatatctctccggtggaaaccaacaaaaagtattacttgcccgctggcttgccacgaaaccccgatttttaattttagatgaaccgactcgtggtatcgatgtaggtgctcacgccgaaattattcggttgatcgaaaagttgtgtgatgaagggttggcgctgttaattatctcttccgaattagaagaattggcgggttacgctgatcggatcatcgttcttcgtgatcgtcggcatgttgctcaactcgaccacgatgaaatttccgttcctgccattatgcaggcgatcgcggtgcaataa

SEQ ID NO: 38645 - protein, 496 aa, Yersinia pestis KIM
MEILLEVRGLSVEFPGVKALDSVDFSLQRGEVVALLGENGAGKSTLIKALTGVYKRSAGEVLLDGKAVCPIDTADAQLMGIGTVYQEVNLLPNISVAANLFIGREPLRWGLIDHNKMNQQAAKLLTGYGLTLDVQQPLANFSIAIQQIVAIARAVDLSAKVLILDEPTASLDAKEVSMLLDILCQLRDQGIGMVFVTHFLDQVYRISDRITVLRNGKLVGTKTVAELPRIELVQMMLGHSFDEQLLKRGEHSITNKNPLVEFKNYGRRGVVENFDLSVSPGEIVGLAGLLGSGRTETAQLIFGITTPDTGEAKIQGKPVKIRTPRKASKFGFGYCPEDRKTEGIVGAATVRENIILALQAQRGWLRPLSMREQTQIADDFIQQLGIRTPSPEQQIQYLSGGNQQKVLLARWLATKPRFLILDEPTRGIDVGAHAEIIRLIEKLCDEGLALLIISSELEELAGYADRIIVLRDRRHVAQLDHDEISVPAIMQAIAVQ

SEQ ID NO: 38646 - DNA, 1515 bp, Yersinia pestis KIM; identical to SEQ ID NO: 27230
  CDS (1)..(1515): transl_table=11

SEQ ID NO: 38647 - protein, 504 aa, Yersinia pestis KIM; identical to SEQ ID NO: 27231

SEQ ID NO: 38648 - DNA, 1524 bp, Yersinia pestis KIM
  CDS (1)..(1524): transl_table=11
atgaaccacagacctgacattgtcatgcgtgctgaggacatttcaatgcgttttcctggcacattggcgctcgatagcgtcaattacactgtttatcgcggcaaagttaacgtcattattggcgaaaacggggccggtaaatcaacgctgatgaaaattctggccggggtgcagcagcaaacctccgggcaaatttacctaaacgggcagaaggtcagcattgccaatactcgtgaggcggcagcgctgggcattggcatggtgcatcaggaactgaatttatcggaaaacctcaatgtggcggaaaatatttttcttggccgcgaaatccagcacggcttgaaaccgatcaatcaggcagcgcaggaacgggttactgaacaactgatggtgcgtcttgatcaggtcatttcaccacaagagaaggtgtcaaacctgaaagtgggccaacaacagttgattgaaattgccaaggcactggcggagcaggccgatatcctgattctggatgagccgacctcggccctcagtaaaacggaggtggatgttctgttccgtgtgatccgtgaactcactcggcaaggggtttccatcgtttatatttctcaccgattggaagagttaatggcgattggcgactacatcactattttacgcgatgggcgctttcaggctgaagccgcagtaaaagacattgatgtgccgtggattgtgcgtgaaatgctgggtagcgatccggtttccagcttccttcgtccggggcgtacctttggtgaaccaatgatggaggtggaagatgtcaccctcatcaatgaatccggtaataccgtggttaatcatgtctcattgcacgtccgggcaggcgagattgtcggtatttatggcctgatgggggcgggccgtaccgaattgttcgaatgtttactgggcacgcaacaaaactatcttggcaccgttcgcctcaatggcacggtcatgaatgccaaaacctccaccgcagagcgtatccgctttgggatgagcctggtgccggaagatcgtaaaaaagccgggattttccctgcttcatcggtcgcctgtaatttgaccatctccagcttatggcgtcggctgaaacaccgttttgctatctggcaggagagtgaagtgcaagtggtggcagcgactatcggtgagctgtcgatcaaagtttcttcacctgatgtcgaaattcaggcactcagcgggggcaatcaacaaaaagtggtcattggccgctcgttactgacccgcccgaacattttgctactggatgaaccgacgcgtggcattgatgttggcgcaaaagcggatgtgtttgaaatgatggtgaaactctctgagcaggggatcggcattctgttttccacctccgacctaaaagaaattatggcggtatccgaccgcattctggtgatgtcgaacggcaaactgacggcaaatttatcccgtcaatcggccagtgaatcggcattggttacagcaagcgcacaagggtttgaatga

SEQ ID NO: 38649 - protein, 507 aa, Yersinia pestis KIM
MNHRPDIVMRAEDISMRFPGTLALDSVNYTVYRGKVNVIIGENGAGKSTLMKILAGVQQQTSGQIYLNGQKVSIANTREAAALGIGMVHQELNLSENLNVAENIFLGREIQHGLKPINQAAQERVTEQLMVRLDQVISPQEKVSNLKVGQQQLIEIAKALAEQADILILDEPTSALSKTEVDVLFRVIRELTRQGVSIVYISHRLEELMAIGDYITILRDGRFQAEAAVKDIDVPWIVREMLGSDPVSSFLRPGRTFGEPMMEVEDVTLINESGNTVVNHVSLHVRAGEIVGIYGLMGAGRTELFECLLGTQQNYLGTVRLNGTVMNAKTSTAERIRFGMSLVPEDRKKAGIFPASSVACNLTISSLWRRLKHRFAIWQESEVQVVAATIGELSIKVSSPDVEIQALSGGNQQKVVIGRSLLTRPNILLLDEPTRGIDVGAKADVFEMMVKLSEQGIGILFSTSDLKEIMAVSDRILVMSNGKLTANLSRQSASESALVTASAQGFE

SEQ ID NO: 38650 - DNA, 1491 bp, Yersinia pestis KIM
  CDS (1)..(1491): transl_table=11
atgacgcctttattagagttaaagcagataaaaaaatcttttccgggtgttaaagcactggatggaattgatctcaccattcaacgcggagaggttcatgcgttgctgggggagaatggggcaggcaaatctacactggttaaaataatgtgtggtatttatcagccagattctggggggatttttctggaaggtcaacgctgtcgctttgcgaattatcgtgatgccattgatgcgggtattgggattatttttcaagagttctccctgatcccctatatgaatacgattgataatatttttcttaatcgagaaataaagaatcgttgggggttattagatcgccgtgaaatgcggcgcaaggcccgcgctattttcaagcgcctgacggtggatattgatcttgattgccccgtggaacaactcagtgtggcgcaacagcagtttgtcgagatagccaaagctctgtcgttggatgcgcgcattctggtcttggacgaacccacggcgacgctgacaccgggtgaagccgaacatttattcagcatcatgcacgatctgaaattgctcggtgtcggtatggtgtttatttcgcatcatctggacgaaattttcacgatttgtgaccagatcacggtgctgcgtgatggcgcttatattcagacactgccggctgccgagactaatgtcgaagagctggttaagctgatggtcgggcgcaaaatcgagaataccttcccggtgaaatcgcatccggtagacacctcggtgcgggtgctggaggcgacggttcagcacacaaaacatgtgatggaaaacagcttccatctgtataaaggcgaaatattggggtttgccgggttggtggggtcaggccgtactgagctgatgtccgcactgatcggtgcgcgctcctgctatcaaaagagtgtcagcctcaatggtcagcccaccgtgctacgtaatccagcgcaggcgttggatcacggtattggtctgttaccggaaagccgtaaaaccgaagggctggtcttgccgttttccgtcgcccaaaacattacgcttaatcggcatgaaaaacgcggcaaaatcttcgttaatgcaggtaaagagcacgatatcgtgcagcgattaattcgcgcggttggcgtaaagacaccggatgccgatacggctgtgagtaccttgagcggtggcaatcaacaaaaagtggtaattgcccgctggcttaacaacgattgcgacattcttattttcgatgaacctacacggggtatcgacgtgggggccaagtctgaaatttatcaattaatgcaacaactgacgcagaaaggcatatctatcatcatgatttcatccgaattaccggaaattattggcgtttgtgatcgcgtcctggttttccgtggtgggcacattgttgccgaactggcgggtgatgaaattgaatctaataacatcatgcttcacgcaacagggagtgcattatga

SEQ ID NO: 38651 - protein, 496 aa, Yersinia pestis KIM
MTPLLELKQIKKSFPGVKALDGIDLTIQRGEVHALLGENGAGKSTLVKIMCGIYQPDSGGIFLEGQRCRFANYRDAIDAGIGIIFQEFSLIPYMNTIDNIFLNREIKNRWGLLDRREMRRKARAIFKRLTVDIDLDCPVEQLSVAQQQFVEIAKALSLDARILVLDEPTATLTPGEAEHLFSIMHDLKLLGVGMVFISHHLDEIFTICDQITVLRDGAYIQTLPAAETNVEELVKLMVGRKIENTFPVKSHPVDTSVRVLEATVQHTKHVMENSFHLYKGEILGFAGLVGSGRTELMSALIGARSCYQKSVSLNGQPTVLRNPAQALDHGIGLLPESRKTEGLVLPFSVAQNITLNRHEKRGKIFVNAGKEHDIVQRLIRAVGVKTPDADTAVSTLSGGNQQKVVIARWLNNDCDILIFDEPTRGIDVGAKSEIYQLMQQLTQKGISIIMISSELPEIIGVCDRVLVFRGGHIVAELAGDEIESNNIMLHATGSAL

SEQ ID NO: 38652 - DNA, 1539 bp, Yersinia pestis KIM
  CDS (1)..(1539): transl_table=11
ttgtttttggttcgttcatatgaggcattcatgatccgtaacgagatactggcaaaaaaaccggactatctattagaagcgacgggactaaaaaaatcctttggcgatgtgatcgcgctaaacaatgctgaattctgtttaaaacggggttctatccatgcgctttgcggtgggaacggtgccggtaaatcaacatttcttggcctattaatgggatttattcagcctgatgatggggcgtttttcatcaacgggcaatactgcgaattcgactcaccgggacaagccctagccgcagggattaccattgttcaacaagagctcagtggggtacaggatctgtctgtggccgaaaatatttatctgggttctgagccaaggcgctttggtattgtcgattttcgtgcgcttaaccgccaggccgatgtgttattacacgagctgggtttcgccatttcacccaaagccaaaatgcgcagcctgagcgtagcagagcaacaacgggtggaaattgccaaagcgctgtcacatacccatgccgatatcatcattatggatgaacccacctccgcattaggtgaagaggatgcgcaaaaactgtttcagaccataaaaaaactggcctctctgggaaaaggggttatttatgtctcccaccgcttgtcagaaatatttcaaattgcagacagctacacggtatttcgagatggttgttatatttgtgaaggagagacgagtcacatcactcgcgaacaactgattgagcatattattggtggcgagattgatggtgagttctccaaatacaatactccaaccaatgtgccactctttaaagcctctggcatatgttggaaatcgaaagtgaatgatgtcagcctgacattacattgcggtgaaattttagggatttatggcttagtaggatcggggcgcagtgagtttcttaatctgctgtttggtcttgagcgtgctgatcacgggagcatccatatcggtgatgagatattactgaaacacacaccagaaaaagcaatcaacgccggtatcgcctatgtgaccgaagatcgtcaagagacaggattagtattgaaccattcggtatcggaaaatattaatatatcctcattaaacgtcattagtcgtatgagtatcattaatgaaaatgatattcagcgccgtgctgaccacacgatccgtatctttaatattaagacaccgagtcgccaacaacgagtggctaatttaagcggtggtaatcaacaaaaggtggtgttaggccgctgggcactgttagaccctaaagttttattattagatgagccaaccaggggaattgacattggggcaaaaaaagaaatttatcgctttatgtcggattttgccctcaaaggaaaaggcattgttatggtctcctccgagctttctgaaattattggcatgagcgacagaatcttggtttttaaaaaagggaaaatagtcggtgaaattacgggcactgaggcaacacaggccaaattaatgtcgatggcggtataa

SEQ ID NO: 38653 - protein, 512 aa, Yersinia pestis KIM
MFLVRSYEAFMIRNEILAKKPDYLLEATGLKKSFGDVIALNNAEFCLKRGSIHALCGGNGAGKSTFLGLLMGFIQPDDGAFFINGQYCEFDSPGQALAAGITIVQQELSGVQDLSVAENIYLGSEPRRFGIVDFRALNRQADVLLHELGFAISPKAKMRSLSVAEQQRVEIAKALSHTHADIIIMDEPTSALGEEDAQKLFQTIKKLASLGKGVIYVSHRLSEIFQIADSYTVFRDGCYICEGETSHITREQLIEHIIGGEIDGEFSKYNTPTNVPLFKASGICWKSKVNDVSLTLHCGEILGIYGLVGSGRSEFLNLLFGLERADHGSIHIGDEILLKHTPEKAINAGIAYVTEDRQETGLVLNHSVSENINISSLNVISRMSIINENDIQRRADHTIRIFNIKTPSRQQRVANLSGGNQQKVVLGRWALLDPKVLLLDEPTRGIDIGAKKEIYRFMSDFALKGKGIVMVSSELSEIIGMSDRILVFKKGKIVGEITGTEATQAKLMSMAV

SEQ ID NO: 38654 - DNA, 1500 bp, Yersinia pestis KIM
  CDS (1)..(1500): transl_table=11
gtggatcagtacgctattgaagtcatacaggtgacgaaaagcttcggggggattcacgcgctgaagtcaattaatctgcaaattcgcaccggtagcattcatgccattatcggcgagaatggtgccgggaaatcgacattaatgaagatcctgtcggggatttacaccaaagacagcgggcgcattatgatccacggagaggagaaaaattttacttcaccgatccacagtaaagaaagccgtattggcattatttatcaggaactggcgttatcgccggatctgacggtagcagagaatatttttctcgacgatcttggttttggcaccggcatgatcaactggaagcgtttgaatgaaaaagccagcctcatcctgaatgaactgggatttcaaatcgatccccgcgccagagtgggggatctgagcgttgcctatcaacagatggtcgaaatcgctaagtcgctggccaaagatgtcaacattctgatccttgatgaaccttcagcagtactgtcaggtaaagaggtcgcgatattgtttacccagctacgcaagttaaaggcacgcggggtgaccatcatttatatttcacatcggctggaggaattgatggttattgctgatgtgatcaccgtcattaaagatggcgagaccgtcaagaccttagatccccagtcctgtagcgaagacgaaattatcaccagcatggtagggcgcaaactggaaagcctctatcccgagaaaaatgtgccaggtaatgaggtggtcttggaggtcaaagccctctcaacccgtgcgctgctgcatggtattaatctgacattgcataaaggcgagatcgtcggtttagcgggcttggtcggggcagggcgtagcgaggtcgcacgttgtctctttggcattgacaagatagcggggggaacggtgtccaaggccggtacgcctattcagattaatcacccgtcacaggcgatgtcccatgggattggtctggtgcctgaaagccgtaaggagcagggggcgattttggtacgcccaatccgcgaaaatatgacgttatcgaatctgaaggcggttagcggctggatgggttttattcgtcgtcgtcaggagcgagagaccagccagaagctacaacaaaaactggccatcaaactggggtcggttgaggatcccatcgccagcttaagtggtggtaatcagcaaaaagtggtcatcgctaaatggttgaacacggattgccatattttgatcttggatgaacctacccgcggtgttgatgtgggagccaaggctgaaatttataacatcattcaccaattggccgaacgcggttattccattttagtgatctcatcggagatggttgaagtgattaatctttgtcatcgcatttatgtgatgagtgaagggcgcattaccaaagagctgcaacacgatgagatttcagaagaaaatatcatgcgctatgccattcccaagcgcgagacaatatga

SEQ ID NO: 38655 - protein, 499 aa, Yersinia pestis KIM
MDQYAIEVIQVTKSFGGIHALKSINLQIRTGSIHAIIGENGAGKSTLMKILSGIYTKDSGRIMIHGEEKNFTSPIHSKESRIGIIYQELALSPDLTVAENIFLDDLGFGTGMINWKRLNEKASLILNELGFQIDPRARVGDLSVAYQQMVEIAKSLAKDVNILILDEPSAVLSGKEVAILFTQLRKLKARGVTIIYISHRLEELMVIADVITVIKDGETVKTLDPQSCSEDEIITSMVGRKLESLYPEKNVPGNEVVLEVKALSTRALLHGINLTLHKGEIVGLAGLVGAGRSEVARCLFGIDKIAGGTVSKAGTPIQINHPSQAMSHGIGLVPESRKEQGAILVRPIRENMTLSNLKAVSGWMGFIRRRQERETSQKLQQKLAIKLGSVEDPIASLSGGNQQKVVIAKWLNTDCHILILDEPTRGVDVGAKAEIYNIIHQLAERGYSILVISSEMVEVINLCHRIYVMSEGRITKELQHDEISEENIMRYAIPKRETI

SEQ ID NO: 38656 - DNA, 1524 bp, Yersinia pestis KIM
  CDS (1)..(1524): transl_table=11
atgaataaagtccccctcttggagatgcgtaatattaccaagtcgtttggcaaatttcaggcgcttaaaggtgtcgatttgacggtgttttccggcgagatccacgcgctgatgggcgaaaacggggcggggaaaagtaccctgatgaagatcctcgctggcgcatataccaccaccagcggcgagatccttattgagggtaggccttggtccatcaaaggcccaaaagatgcgctgaatgcaggtattagtttgatttaccaagagatgcagcttgcgcctaatctgaccgttgcggaaaacattttccttggcagcgagctttcccggggagggctggtgcagcgtaaagagatggtgatgcaaactcaggcggttatcgaccgcctcggcgctcagtttaaagccagcgatttagtgatggggcttactatcgccgaacaacagcaggtcgagattgctcgtgcacttcatcgtaacagccgcattttagtgatggatgaacccacagcggcgctttctactcgtgaaacgcatcgcctattcgaacttattttgcggctgcgcgatgaggggatggccattatctacatcagccatcgtatggcggaagtgtatgaactttctgaccgtgtgagcgtactgcgcgacgggcaatacgtcggcagcctgatgcgcgccaacctcaacgccaacgaactggtgcgcatgatggtggggcgtccgcttagcgatctgttcaataaagaacgggatattccactcggtcatttacgccttaaggttcatcacctgacggatggtgccaaagtgcaggcggtgagtttacaggtccgttccggtgaaatcgttgggttagcggggctggtgggtgcagggcgttcggagctggcgcaactgatttttggcgtgcgcaaagccaccggaggaacgatagagatagatggcgtaccgttggtcattcactcccctcgtgaagccattcgccacggtattggttttctgaccgagaaccgcaaagagcaagggctgtttttggaactggccgcgcaggacaacatcactatggcaaccctggagcgggacgcctgttacggcctgctcgatcgcaaaaaagcccgtgccatttcagacgacgccatcaatcggttgaacatacgtgtacctcatgcgcaggtgcgtgccggaggcttgtccgggggtaaccagcaaaagctgctgatttcccgttgggtagcgattagcccacgcattcttatccttgatgagccaacacgtggagtggacgtcggcgctaaaagcgagatttaccgcatcatgagccagatggcgcgcgagggggtggcgattttgatgatttccagtgagttgcccgaggtggtagggatgagcgaccgggtgtacgtgatgcatgaaggacgtattgcaggggaactacatcaccctgatatcacgcaggaaaatattatgacgctggcaactggcgtgaccgaggaccataaaaaagaggtttaccatgactaa

SEQ ID NO: 38657 - protein, 507 aa, Yersinia pestis KIM
MNKVPLLEMRNITKSFGKFQALKGVDLTVFSGEIHALMGENGAGKSTLMKILAGAYTTTSGEILIEGRPWSIKGPKDALNAGISLIYQEMQLAPNLTVAENIFLGSELSRGGLVQRKEMVMQTQAVIDRLGAQFKASDLVMGLTIAEQQQVEIARALHRNSRILVMDEPTAALSTRETHRLFELILRLRDEGMAIIYISHRMAEVYELSDRVSVLRDGQYVGSLMRANLNANELVRMMVGRPLSDLFNKERDIPLGHLRLKVHHLTDGAKVQAVSLQVRSGEIVGLAGLVGAGRSELAQLIFGVRKATGGTIEIDGVPLVIHSPREAIRHGIGFLTENRKEQGLFLELAAQDNITMATLERDACYGLLDRKKARAISDDAINRLNIRVPHAQVRAGGLSGGNQQKLLISRWVAISPRILILDEPTRGVDVGAKSEIYRIMSQMAREGVAILMISSELPEVVGMSDRVYVMHEGRIAGELHHPDITQENIMTLATGVTEDHKKEVYHD

SEQ ID NO: 38658 - DNA, 1479 bp, Streptococcus agalactiae 2603V/R
  CDS (1)..(1479): transl_table=11
atgaaaattgacatgaggaatatctccaaatccttcggtactaataaagttctagaaaagattgatttggaattacaatctggtcaaatacacgcgcttatgggtgaaaatggtgcgggtaaatcaaccttaatgaacattctaacaggactttttccagcaagtacaggaactatttatattgatggcgaggaacgaactttttcaaaccctcaagaagcagaggaatttggtattagttttattcaccaagagatgaatacttggccggaaatgactgtcttggaaaatctctttcttggacgtgaaatcaagacaacttttggcttactcaatcaaaaattaatgagacaaaaagcacttgaaacttttaaaagattaggtgtgactattcccctagacatcccgattggtaacttgtctgttggacaacaacaaatgattgaaatcgccaaaagtctcctaaaccaactctctattttggtaatggatgaaccgactgctgctttaacagatcgtgaaactgaaaatcttttccgagttatccgaggtttgaaacaagaaggagtgggcgttgtctatatctcccatcgaatggaggaaatttttaaaatcactgacttcgtaaccgtcatgagagatggtgtcattgtagatacaaaagaaacatcactcacaaattctgacgaattggttaaaaaaatggttggccgaaaattggaagattactatcctgaaaaacattctgaaattgggcctgttgcttttgaagttagtaacctctgtggagataatttcgaggacgtttccttttatgtccgtaaaggcgagattcttggattttctggattaatgggagctgggcgtactgaagttatgcgaactatctttggaattgataaaaagaagtctggtaaggtgaaaattgatgaccaagaaatcactattactaccccaagccaagctatcaagcagggcattggttttttgaccgaaaatagaaaagatgaaggtctcatcctagacttcaatatcaaggacaatatgactctccctagcactaaagattttagcaaacatggtttctttgatgaaaaaacaagcacaacatttgtgcaacaattgattaatcgtctctacattaaatcagggagaccagatttagaggttggaaatctttctggaggtaaccaacaaaaggtcgttctcgctaaatggattggtattgctcctaaagtcttaattcttgatgagccaacgcgtggtgttgatgtcggtgctaaacgagagatttaccaattaatgaatgaactagcagacagaggtgttccaattgtcatggtatcatcagacttacctgaaattctaggtgttagtgaccgcatcatggtaatgcacgaaggtcgaatcagtggagaactcagtcgaaaagaagctgaccaagaaaaagttatgcaactagccacaggaggtaagtaa

SEQ ID NO: 38659 - protein, 492 aa, Streptococcus agalactiae 2603V/R
MKIDMRNISKSFGTNKVLEKIDLELQSGQIHALMGENGAGKSTLMNILTGLFPASTGTIYIDGEERTFSNPQEAEEFGISFIHQEMNTWPEMTVLENLFLGREIKTTFGLLNQKLMRQKALETFKRLGVTIPLDIPIGNLSVGQQQMIEIAKSLLNQLSILVMDEPTAALTDRETENLFRVIRGLKQEGVGVVYISHRMEEIFKITDFVTVMRDGVIVDTKETSLTNSDELVKKMVGRKLEDYYPEKHSEIGPVAFEVSNLCGDNFEDVSFYVRKGEILGFSGLMGAGRTEVMRTIFGIDKKKSGKVKIDDQEITITTPSQAIKQGIGFLTENRKDEGLILDFNIKDNMTLPSTKDFSKHGFFDEKTSTTFVQQLINRLYIKSGRPDLEVGNLSGGNQQKVVLAKWIGIAPKVLILDEPTRGVDVGAKREIYQLMNELADRGVPIVMVSSDLPEILGVSDRIMVMHEGRISGELSRKEADQEKVMQLATGGK

SEQ ID NO: 38660 - DNA, 1491 bp, Oceanobacillus iheyensis HTE831
  CDS (1)..(1491): transl_table=11
atgaagattgtcatggaaaatattcataaatcttttggctccaataacgtgcttgaaggtgtagatttttcacttgaaccaggagagattcatgcattaatgggggagaacggtgccggaaagtctacattaatgaatattcttactggtctattcccttcaaatcaaggttcaataacgatagatggcgtaaaaactcaatataaagattctaaggaatcggagcaagcaggaattgcatttattcgacaagagttaaatattttgccacagatgacagtattagagaatttatttattggtaaagaaatgactaattcatttggatttttacgagaaaaagtaatgaaggaaaaagctgaagaggtatttagtagattagacttttcaattccatttgacaaagaagcaggcgaatgctctgttggggaacaacaactaattgaaattgcaaaagcgctgatgttagatgccaaaattattatcatggatgaaccaactgctgctctaacggatagagaaatcgataagttatttgaaattatgaaagagcttacacaacaaggtgttgcattggtttatatttcgcatcgtatggaagaaatttttgcgatttgtgatcgaattacagtaatgcgagatgggatatcggtcaagacttcgtggattaaagatacaaattataacgagattgtaaaacaaatggtaggaagagaattggatgaacgttacccagaacgaacgccaacatttggtaagcccgtattacaagtaaacaattttagtcgtaaaggttattttaacgatataaaattctccgtaagagaaggagaaatacttggtgtatccggactgatgggtgctggccgtacagagattatgcgagccatatttggaatagatgaagtagatcaaggagaaatactgcttgatggaaagaaacttaccattaaagatccgacagatgcgatgaaagcaggattggcatttattacagaaaatcggaaagatgaaggacttgttttagacttttcgattagagagaatattggattgtcgaatttaaacagtttctctaataagggatttatcaaaggtaaagacgaaaaagattttgttgagcttatgataaagcggttacaaattaaaacacagacccaagagctgcctgtaggaaacttatctggaggaaatcagcaaaaggttgttatagcaaaatgggtaggcacatctcctagagtattgatcatggacgagcctaccagaggaatagatgttggtgcaaagcgagaaatttatcagttaatgaatgaattaacagagagaggcttagctatcataatgatttcttctgatttgcctgaagtactcggaatgagtgaccgaataatggttatccacgaaggagagatttcaggagaattagttagagaagaggcgacgcaagaaaaaataatgacatatgctacaggagggaatggacatgaataa

SEQ ID NO: 38661 - protein, 496 aa, Oceanobacillus iheyensis HTE831
MKIVMENIHKSFGSNNVLEGVDFSLEPGEIHALMGENGAGKSTLMNILTGLFPSNQGSITIDGVKTQYKDSKESEQAGIAFIRQELNILPQMTVLENLFIGKEMTNSFGFLREKVMKEKAEEVFSRLDFSIPFDKEAGECSVGEQQLIEIAKALMLDAKIIIMDEPTAALTDREIDKLFEIMKELTQQGVALVYISHRMEEIFAICDRITVMRDGISVKTSWIKDTNYNEIVKQMVGRELDERYPERTPTFGKPVLQVNNFSRKGYFNDIKFSVREGEILGVSGLMGAGRTEIMRAIFGIDEVDQGEILLDGKKLTIKDPTDAMKAGLAFITENRKDEGLVLDFSIRENIGLSNLNSFSNKGFIKGKDEKDFVELMIKRLQIKTQTQELPVGNLSGGNQQKVVIAKWVGTSPRVLIMDEPTRGIDVGAKREIYQLMNELTERGLAIIMISSDLPEVLGMSDRIMVIHEGEISGELVREEATQEKIMTYATGGNGHE

SEQ ID NO: 38662 - DNA, 1542 bp, Bifidobacterium longum NCC2705; identical to SEQ ID NO: 27234
  CDS (1)..(1542): transl_table=11

SEQ ID NO: 38663 - protein, 513 aa, Bifidobacterium longum NCC2705; identical to SEQ ID NO: 27235

SEQ ID NO: 38664 - DNA, 1554 bp, Bifidobacterium longum NCC2705
  CDS (1)..(1554): transl_table=11
atgtcatcaaatgacaccatcttgacgatggaaaacatcacgaagacgttcggtccggtcaaagccctcaccgatgtgaatctttccgtcgatcgcggcgagatccacgccatctgcggcgagaacggtgcaggcaaatcgaccctgatgaacgtgctttcgggtgtgtacccatacggtagctattccggcaaaatcacctttgatggcaaggaatgcaaataccatactattaatgattccgaggccgacggcatcgtaatcattcatcaggaactggcgttgagcccgttcctgtccattgcggagaacctcttcatcggcaacgagcaggccaagggtggcgtgatcgactgggacaagacccgcgccgaggcgaagaagctgctcgatcgtgtgggacttcccgaagacccggataccagggttatggacatcggcgtcggcaagcagcagctcgtcgaaatcgccaaggcattgtccaaggacgtgaagctgctcatcctcgatgagccgaccgctgcactgaacgatgaggattccgcccacctgcttgacctggttcgtcagctacgtgacgagcagggcgtgaccagcatcatcatcactcataaactcaacgaggtcgccgccatcgccgacaatgtcaccatcattcgagacggttcgaccgtcggtgtgatgtacgtgacgccggagacgccgctcgaccaggaagaactcatccgcaagatggtgggtcgtccgctgcacaacctgtacccgaaccacccctccaataccccgggcgaggaatacctgcgcgtcgaggattggaccgtgcatcatccgctcgacgcggagcgcgtgatcgtagaccatgcgaacatcaacgtgcacgccggcgagatcgtcggtctggcgggtctgatgggtgcgggtcgtaccgaaatggccatgtccatcttcggccactcttacggttccaacatctccggcaaggtgttcgtcaagggcaaggaagtcaagatgcccaacgtgcagtccgcgattgacgcaggtctcgcctacgccaccgaggatcgtaagggcaacggtctgaacctgctgcagaacatccgagagaacgcatccctggcctccctgaccaagatcagcaagggcggggttgtggacgacaaccttgagcgcaaggaagtcgaacagtaccgcaaggacttcaacatcaagtgtcatgacatcgatgtgaatgtctccaccctctccggtggtaaccagcagaaagtgctgctcgccaagtgggttatctcgcagccggacatcctcatcctcgatgagccgacccgaggcatcgacgtcggcgccaagtatgagatctacgaaatcatcgataagcttgccgatgcaggcaaggccgtcatcgtgatttcctccgagctgcctgagctcatcggtatctgcgaccgcatttacacggtgtcctacggtgtcgtcaccgacaatgtcgagaagaatggatttacccaggaatacctgatgaagggtatgaccaaggaaagggaggtggcagcctga

SEQ ID NO: 38665 - protein, 517 aa, Bifidobacterium longum NCC2705
MSSNDTILTMENITKTFGPVKALTDVNLSVDRGEIHAICGENGAGKSTLMNVLSGVYPYGSYSGKITFDGKECKYHTINDSEADGIVIIHQELALSPFLSIAENLFIGNEQAKGGVIDWDKTRAEAKKLLDRVGLPEDPDTRVMDIGVGKQQLVEIAKALSKDVKLLILDEPTAALNDEDSAHLLDLVRQLRDEQGVTSIIITHKLNEVAAIADNVTIIRDGSTVGVMYVTPETPLDQEELIRKMVGRPLHNLYPNHPSNTPGEEYLRVEDWTVHHPLDAERVIVDHANINVHAGEIVGLAGLMGAGRTEMAMSIFGHSYGSNISGKVFVKGKEVKMPNVQSAIDAGLAYATEDRKGNGLNLLQNIRENASLASLTKISKGGVVDDNLERKEVEQYRKDFNIKCHDIDVNVSTLSGGNQQKVLLAKWVISQPDILILDEPTRGIDVGAKYEIYEIIDKLADAGKAVIVISSELPELIGICDRIYTVSYGVVTDNVEKNGFTQEYLMKGMTKEREVAA

SEQ ID NO: 38666 - DNA, 1536 bp, Brucella suis 1330
  CDS (1)..(1536): transl_table=11
atgactgcgccgcgtcaggctggcgagcctgctcttctggaagccgtttctctgtccaaatcctttgggccggtgcaggttctggaaaatataaatctgcgcgtcaacggtggtgaaattcacgcgatcattggtgaaaatggcgcgggtaaatccacgctcatgaaaattctggccggtaacgaacgccagacgggcagagaaatccgtattgatggcaagccggtttccttttccagcccggcagcagcagaggcacgaggcatcgtgctggtgcatcaggaaatcctgcttgcaccagacctgacagttgcgcagaacatatatctcggtcgtgaacttgggggtaagcggggacgcggactactggtcgatgatcggtcgatgcgcgagggcgcgcgcagggctatccgtgatctcggcgctgaaatagacccggatgccgtggttgcgacgctatcaattgcccaacgccagcttgtgcagattgcacgggtgctgttggtgccgcatcgcctcgtgatcttcgatgagccgacggcttcgctcacgcctttcgagacggaagcccttctgaaagtcatccgtgatattcgagccaagggcgttgcggttctctatatttcgcatcggctgccggaagtgaaggagatagccgaccgtgtgactgttctgcgtgacggcaagctggtttccagccatttggcatcctctttgcagccggctgatatggcgcggctgatggttgggcgcgatgtcgccaagctctatcccgatcgcgcaagccggtatgacagcgccgctattctggaagtagaaaacttcagtgtgccgggcttcgtgcgcaatgcaagtttttgtctgaaccgtggcgagatacttggctttgccggtctggttggtgcgggccgaacggagcttatggaaggaatcgtcggtttgcgcccagccaagggagaattgcgccatgatggtaggctggtgcacttcaacaatgcacatgacagccagcaggcgggcatcgtttatctgagcgaagaccgtaaaggcaaagggctgctcctgtcgaaagatctcggcaccaatctcaccctggcttcacttgacaggttcgtgcgcggcctccagatcgaccgcaaccgcgaacgtgcggcgttggatgaggcgatccgtgcattcgacatacgcacgggccgtaaggatatcctggccggtcagctttcaggcggcaaccagcagaaactgcttcttgccaaaatgatgatgcttaccccgtccatcatcatcatagacgagccgacgcgaggcatccatgtcggcacgaaggagcagatttatcagttcattgccaacctggcggatgaaggaaaatccatcattgttgtatcgtccgaaatgccggaactgatcggtatttgcgaccgtatcgtggtgatgcgggaggggcaaattgccggggaggtgagcggcgcaggcatgacggaacatgaaattgtggcgctcgccaccggcgttggcgccaacgaggctgcatga

SEQ ID NO: 38667 - protein, 511 aa, Brucella suis 1330
MTAPRQAGEPALLEAVSLSKSFGPVQVLENINLRVNGGEIHAIIGENGAGKSTLMKILAGNERQTGREIRIDGKPVSFSSPAAAEARGIVLVHQEILLAPDLTVAQNIYLGRELGGKRGRGLLVDDRSMREGARRAIRDLGAEIDPDAVVATLSIAQRQLVQIARVLLVPHRLVIFDEPTASLTPFETEALLKVIRDIRAKGVAVLYISHRLPEVKEIADRVTVLRDGKLVSSHLASSLQPADMARLMVGRDVAKLYPDRASRYDSAAILEVENFSVPGFVRNASFCLNRGEILGFAGLVGAGRTELMEGIVGLRPAKGELRHDGRLVHFNNAHDSQQAGIVYLSEDRKGKGLLLSKDLGTNLTLASLDRFVRGLQIDRNRERAALDEAIRAFDIRTGRKDILAGQLSGGNQQKLLLAKMMMLTPSIIIIDEPTRGIHVGTKEQIYQFIANLADEGKSIIVVSSEMPELIGICDRIVVMREGQIAGEVSGAGMTEHEIVALATGVGANEAA

SEQ ID NO: 38668 - DNA, 1461 bp, Brucella suis 1330
  CDS (1)..(1461): transl_table=11
gtggaggggctcaagaagtcctttggcggtgttgctgccttgcgggatgggcggctgcaattgcgtaccggctcggtacatgcgctgtgcggcggcaatggcgcgggcaaatccacgtttttgaaaatcctgatgggcattcatgcccgcgatggtggacatatccgccggcgtggaaaagaggttacgtattccagccccgccgaagcgttgcaggcgggtatcgcgatcatcgaacaggagctaagccccgttccccatatgaccgtggcggagaatatctatttgggcagggagccgcttcgccgtttcggtggcatcgatttcaagacgatgaacctcaatgcccagaagcttttggaccagcttgagttcaagattcgcgccaaccagttcatgatgaacctgtctgtcgcgcaggtgcagcttgtggaaatagccaaggcgctcagtcacgacgctgaagtcattttcatggacgaaccgacatcggccattggtgaaaaagaagcacagcagctttttgcagcgatagagcgtttgaaagcgagcggaaaaggcattgtctatgtctcccatcgcctgtcggaaattttccagattgccgatagctataccgtgtttcgcgacggcagttatatcgatagcggcgatctcggtggcatcacccgtgcggaactgatccatatgatcgtcgggcgggaactgggtgaggaatatatcaagacgaatgcgcctacggaaataccgggcgtcgaggtttccggcctcagcgcgcccggcaagataaccgacatttcctttaccgcgcataagggcgagatttttggcatttacgggttgatggggtcaggccgctcggaaatattcaactgtcttttcggattggagaaagcctcccaaggaacaattcggcttgaaggcgaacccgtcaccgtccggcgccccgcggacgccgtggctctggggctggcttttgtgacggaagatcgcaagctgaccggcctcaatctcggcgacagcgttcgcaacaatatatgccttgccagccttcccgagatgagtccgcatttttcaatgaatcggcgtgcggaatcggccgccagcagggagatgatcgagcgtttcaggatcaaggttgcgcacgacacgatggccgtttcgggcctttccggcggcaaccagcagaaggtcgtgctcggaaaatggttcctgcgaaagccacgcgttctgctgctcgatgaacccactcgcggtgtcgatgtgggtgcaaaacaggaaatttatcgcatcatttgcgaatttgccgcccaaggcgggaccgtcgtcatggtttcttccgagattgatgaagtcctcggcatgtctgaccgcatcatggtcatgcgtggcggacaatcggtcggcatctaccgcagggcggaaacggacgcgcagtcattggtgcatctttcgacatga

SEQ ID NO: 38669 - protein, 486 aa, Brucella suis 1330
MEGLKKSFGGVAALRDGRLQLRTGSVHALCGGNGAGKSTFLKILMGIHARDGGHIRRRGKEVTYSSPAEALQAGIAIIEQELSPVPHMTVAENIYLGREPLRRFGGIDFKTMNLNAQKLLDQLEFKIRANQFMMNLSVAQVQLVEIAKALSHDAEVIFMDEPTSAIGEKEAQQLFAAIERLKASGKGIVYVSHRLSEIFQIADSYTVFRDGSYIDSGDLGGITRAELIHMIVGRELGEEYIKTNAPTEIPGVEVSGLSAPGKITDISFTAHKGEIFGIYGLMGSGRSEIFNCLFGLEKASQGTIRLEGEPVTVRRPADAVALGLAFVTEDRKLTGLNLGDSVRNNICLASLPEMSPHFSMNRRAESAASREMIERFRIKVAHDTMAVSGLSGGNQQKVVLGKWFLRKPRVLLLDEPTRGVDVGAKQEIYRIICEFAAQGGTVVMVSSEIDEVLGMSDRIMVMRGGQSVGIYRRAETDAQSLVHLST

SEQ ID NO: 38670 - DNA, 1545 bp, Brucella suis 1330
  CDS (1)..(1545): transl_table=11
atgagcctggctgcgaaaatcgaaggcaaaaacggcgatgtcgttcttgccgcgcagaatgtggccaagtcctatggccgcatccatgcgctaaaaggcgtgaatttcgagattcgccgggggcaggtcacgacgcttttcggtgaaaacggtgcgggcaagtccacgctgatgaaagtgctttccggcgtgatccagccgactttgggcacgatcatcctcgatggcaagccggtgacgttcaattcatccaccgaagcgcgcgaccatggcatctcgatcatccatcaggaattaagcctcgcgcccaacatgaatgtgcgcgacaacatcttcatggggcgcgaaatccgcaccgccaccggcgtcgattttgccgaggaagagcggctgacgcgcgaactcatgaaggaactggaagaagatatcgatccgctgacgccggttgaggaattgcgtctcggccagcagcaggtcgttgagatcgcccgtgcgctttcggtcaattcgcgcattctcatcatggatgagccgacttcggcgctcagtgcttcggaagtcgaggttctgttcaaggtgatccgcgatctgacggcgcgcggtgtcgccatcgtctatatttcgcatcatctggaagaggcgctccagatcaccaatcatgcggtggtgctgcgcgacggcaccatgacggcctatgcgccgcgtgaggaaatcgatctggaatggatcgtgcgcaatatggtcggtgaaaacttcgacctcggttctcctcccactggttatgaatggggcgatgtcgcgctttcggtcgaagacctgaccgttcccgaccccagcggcagtggcttctcgctggtggaccgcatgtcgctcaatgtgcgggcgggcgaaatcgtctgcatctatggtctcatgggtgcgggccgcacggaattgctggaatcggttgccggtcgcttgaaatcgagcggcgggcgtattctcctcaaagggcaggatatttccggcctcaccatcgctgagcgcatcgaaaagggccttgtgctggtgccggaagatcgccagcgcgacggtctcgtccagacgatgacggtcggcaagaacctgtcgcttgccagcattgcggaaatgaccagggggatattcacctcgcgcaagcgcgaaaagcagatcgtcgatcagtcgatcaggaatgtgcacatcaagaccgatggcggcgaggcggcaatcggttcgctttcgggcggcaatcagcagaaagtcgtaattggcaagatgctggcgaccgaaccggatgtgatcctgctcgatgagccgagccgcggcatcgacatcggcgcaaaggcggaagtgttcaagcttctggccgaaaaggcgaagcaggggctggccgtggtctacaccacctcggaagtcggcgaatgcctcagcatcgcgcaccgcatcatcgtcatgcaccgtggacgcatctccgccgaattcggatcagacgtgtccaaggaaaagatcatggccgcctcgggcgaagccatggtcggtcattaa

SEQ ID NO: 38671 - protein, 514 aa, Brucella suis 1330
MSLAAKIEGKNGDVVLAAQNVAKSYGRIHALKGVNFEIRRGQVTTLFGENGAGKSTLMKVLSGVIQPTLGTIILDGKPVTFNSSTEARDHGISIIHQELSLAPNMNVRDNIFMGREIRTATGVDFAEEERLTRELMKELEEDIDPLTPVEELRLGQQQVVEIARALSVNSRILIMDEPTSALSASEVEVLFKVIRDLTARGVAIVYISHHLEEALQITNHAVVLRDGTMTAYAPREEIDLEWIVRNMVGENFDLGSPPTGYEWGDVALSVEDLTVPDPSGSGFSLVDRMSLNVRAGEIVCIYGLMGAGRTELLESVAGRLKSSGGRILLKGQDISGLTIAERIEKGLVLVPEDRQRDGLVQTMTVGKNLSLASIAEMTRGIFTSRKREKQIVDQSIRNVHIKTDGGEAAIGSLSGGNQQKVVIGKMLATEPDVILLDEPSRGIDIGAKAEVFKLLAEKAKQGLAVVYTTSEVGECLSIAHRIIVMHRGRISAEFGSDVSKEKIMAASGEAMVGH

SEQ ID NO: 38672 - DNA, 1509 bp, Brucella suis 1330
  CDS (1)..(1509): transl_table=11
gtggacgcgccggctccgctgctcgaagcgcgcaacgtgttcaaggggtttttcggcaacccggtgctgaagggggtcagcatcgccttgcggcccggccgcgtgcacgcactgcttggagaaaacggtgcgggcaagtccacactcatcaatctgctgtccggcgccttgccgccggacagcgggaatattgtgctggaaggtgcagctctttccagattgaacccggcgcaagcgcggaaagcgggcattgctgtcattcagcaggaacttagtctgacgccggaattgtcgattgcagaaaatatcgggcttggcgcctatccgcgccgtttcggcctgatcgactacaaggcccttcacggggaagccttggccgtttgtaaacgtgtcggcctgaccgaaccgctcgaaactccggtcggcacactgtcgctcgggcgcaggcagatggtcgagattgccaaggcgcttttccgcaaaccgcgggtgctcatccttgatgagccgacatcatcgctatctgcgcatgaggcgggcgtattatcatcgctggttctcaaattgcgcgatgagggcgtcgcacttctctatatctctcacaggctcaacgaaattcgctcgctctgttctcatgtgaccgtgctcaaagacggtgtcgtgaccgcagatcagtcattatcaaattcggacccggaggagctagttcgcctgatggtcgggcgtgatactggcgaccttttccccgcttggcgaaccagtgccaccggcgaaaaacggattcatattcgcggcatgagcgcgggtatggtgcagaatgtcgatatggatgccaatgcgggcgagatcatcggtatcggcggtctggttgggcaaggacaggaagattttctgctgggtctctatggtgcgctgccgaccgcagcccgtgaagcgatagtgtgcggaaataacggcctgttcaaatcggttggcgcggcaaacgcggctggccttgcctatgtcccggcggatcggaagcgggaagggctcgtgctgccgcattccattgcgtcaaacctgctcctgccgtcacttgatcgatatacgcggcacggtttgcgcaacacggcaaacgagcagcgtgtcgttgccaaacttgccgaacggctgacgatcaggggagatactgcgcgcccggttcaggcgctgtccggcggcaatcagcaaaaggttgcgcttgccaaatggcttccgctggaacctacaatcctgttgctgaacgatccaacccgcggcgtcgatatcgaaaccaagcgtgaaatctacctgatgctgcgccggtttgccgatgaaggaaagctcgttgtcctgctgagttccgacacgccggagcttgtgcatttgtgtgaccgcgtcatggttttccgcgagggccgcatggtcgcgaccctgaaacacggggatctgtcggaagaggcaattgtaggggctgccatgggcctgaaatcgtcgagaaaggcagcctga

SEQ ID NO: 38673 - protein, 502 aa, Brucella suis 1330
MDAPAPLLEARNVFKGFFGNPVLKGVSIALRPGRVHALLGENGAGKSTLINLLSGALPPDSGNIVLEGAALSRLNPAQARKAGIAVIQQELSLTPELSIAENIGLGAYPRRFGLIDYKALHGEALAVCKRVGLTEPLETPVGTLSLGRRQMVEIAKALFRKPRVLILDEPTSSLSAHEAGVLSSLVLKLRDEGVALLYISHRLNEIRSLCSHVTVLKDGVVTADQSLSNSDPEELVRLMVGRDTGDLFPAWRTSATGEKRIHIRGMSAGMVQNVDMDANAGEIIGIGGLVGQGQEDFLLGLYGALPTAAREAIVCGNNGLFKSVGAANAAGLAYVPADRKREGLVLPHSIASNLLLPSLDRYTRHGLRNTANEQRVVAKLAERLTIRGDTARPVQALSGGNQQKVALAKWLPLEPTILLLNDPTRGVDIETKREIYLMLRRFADEGKLVVLLSSDTPELVHLCDRVMVFREGRMVATLKHGDLSEEAIVGAAMGLKSSRKAA

SEQ ID NO: 38674 - DNA, 1536 bp, Brucella suis 1330
  CDS (1)..(1536): transl_table=11
atgtccgaatatcttttggaaatgcgaaacatcggtaaagagttcaacggcgtcaaggcgctggatggcatttacctgaaagtgcgcgcgggagaatgtgtcgagctgtgcggtgaaaacggggcgggcaagtccaccctgatgaaagtgccgtcgggtgtttatccccatggcacatggactggtgaaattttctgggaaggcaaagaacttaaagccagtggcattcgcgataccgaagctgcgggtattgtcatcatccatcaggaactgatgatggtgccacacctgtcggtcgcggagaatatcttccttggttgcgagccaaccacaggcggtttcattgattatgaccagatgaatgcacgggcagccgaactgctcgctcggctcaagataaacgatatcaatgtcgcattgccggtttatcattactcaggcggcaagcagcagttgatcgagattgcaaaggcaatcaacaaaaatgccaagcttctgatccttgacgagccaacctcggccctgaccgcttcagaaacccgggttctcatcgacctgatcaaggacttcaaaaagcagggcatggcttgcgtttacatctctcacaaactcgatgaagtggcggaaatctccgacacggtaacggttattcgtgatggcgcgcatatcgcgacacgtccgatgtccgaactgacaacgcccgatatcatcacgatgatggtcgggcgtgagatgaagaacctcttcccgcgtgaaccccatgacattggcgaggtgatgtttgaagcccgcaatataagttgctgggatgtgaccaatcctggccgcaaggtggtcgacgatgtttcgtttgcgctaaggcgcggtgagattttgggcattgcgggccttgtgggtgccgggcgtacagaactcgtatcgagcttgtttggtgtctggccgggcgcctgtcaggggcaggtttttctggaaggcaaggaaatcaaaatccgcacgccgcgcgatgcggtgcgccaaggcatttgcatggtgccggaagatcacaaacgcgatggcatcctgccgatcatgccagttggccacaatatgacgatctccgtgcttgatcgcttttcgctacgaggcctcatcgataaagacgcggaactcgtggcgatccagcgtgagattttgagactcaaggtcaagaccgccgatccgatgcttgccattgcctcgctatctggcggcaatcagcagaaggccgtgctttcaaagatgatgctgcctgatccgaaagtgctcattcttgatgagcccacacgcggcgtcgatgtcggcgcgaaatatgaaatttacaagctgatattcgcgctcgccaggcagggcgtatcgattttgatggtttcgtcggaaatgccggaagtccttgggatcagtgatcgtgttctcgtcattggcgagggcaaattgcgcggcgatttcccgaatgaaaatcttacacaggagaaggttcttgccgctgcaattggcaagcctgcaaccaacgcggcctag

SEQ ID NO: 38675 - protein, 511 aa, Brucella suis 1330
MSEYLLEMRNIGKEFNGVKALDGIYLKVRAGECVELCGENGAGKSTLMKVPSGVYPHGTWTGEIFWEGKELKASGIRDTEAAGIVIIHQELMMVPHLSVAENIFLGCEPTTGGFIDYDQMNARAAELLARLKINDINVALPVYHYSGGKQQLIEIAKAINKNAKLLILDEPTSALTASETRVLIDLIKDFKKQGMACVYISHKLDEVAEISDTVTVIRDGAHIATRPMSELTTPDIITMMVGREMKNLFPREPHDIGEVMFEARNISCWDVTNPGRKVVDDVSFALRRGEILGIAGLVGAGRTELVSSLFGVWPGACQGQVFLEGKEIKIRTPRDAVRQGICMVPEDHKRDGILPIMPVGHNMTISVLDRFSLRGLIDKDAELVAIQREILRLKVKTADPMLAIASLSGGNQQKAVLSKMMLPDPKVLILDEPTRGVDVGAKYEIYKLIFALARQGVSILMVSSEMPEVLGISDRVLVIGEGKLRGDFPNENLTQEKVLAAAIGKPATNAA

SEQ ID NO: 38676 - DNA, 1512 bp, Shigella flexneri 2a str. 301; identical to SEQ ID NO: 27240
  CDS (1)..(1512): transl_table=11

SEQ ID NO: 38677 - protein, 503 aa, Shigella flexneri 2a str. 301; identical to SEQ ID NO: 27241

SEQ ID NO: 38678 - DNA, 1542 bp, Shigella flexneri 2a str. 301
  CDS (1)..(1542): transl_table=11
atgccttatctacttgaaatgaagaacattaccaaaaccttcggcagtgtgaaggcgattgataacgtcagcttgcggttgaatgctggcgaaatcgtctcactctgtggggaaaatgggtctggtaaatcaacgctgatgaaagtgctgtgtggtatttatccccatggctcctacgaaggcgaaattatttttgcgggagaagagattcaggcgagtcacatccgcgataccgaacgcaaaggtatcgccatcattcaccaggaattggccctggtgaaagaattgaccgtgctggaaaatatcttcctgggtaacgaaataacccacaatggcattatggattatgacctgatgacgctacgctatcagaagctgctcgcacaggtcagtttatccatttcacctgatacccgcgttggcgatttagggcttgggcaacaacaactggttgaaattgccaaggcacttaataaacaggtgcgcttgttaattctcgatgaaccgacagcctcattaactgagcaggaaacgtcggttttactggatattattcgcgatctacaacagcacggtatcgcctgtatttatatttcgcacaaactcaacgaagtcaaagcgatttccgatacgatttgcgttattcgcgacggacagcacattggtacgcgtgatgctgccggaatgagtgaagacgatattatcaccatgatggtcgagcgagagttaaccgcgatttaccctaatgaaccacataccaccggagatgaaatattacgtattgaacatctgacggcatggcatccggtcaatcgtcatattaaacgagttaatgatgtctcgttttccctgaaacgtggcgaaatactgggtattgccggactcgttggtgccggacgtaccgagaccattcagtgcctgtttggcgtgtggcccggacaatgggaaggaaaaatttatattgatggcaaacaggtagatattcgtaactgtcagcaagccatcacccaggggattgcgatggtacccgaagacagaaagcgcgacggcatcgttccggtaatggcggttggtaaaaatattaccctcgccgcactcaataaatttaccggtggcattagccagcttgatgacgcggcagagcaaaaatgtattctggaatcaattcagcaactcaaagttaaaacgtcgtcccccgaccttgctattggacgtttgagcggcggcaatcagcaaaaagcgatcctcgcccgctgtctgttacttaacccgcgcatcctcattcttgatgaacctaccaggggtattgatattggcgcgaaatatgagatctacaaattaattaaccaactcgtccagcagggtattgccgttattgtcatctcttccgaattacctgaagtgctcggccttagcgatcgtgtactggtgatgcatgaagggaaactaaaagccaacctgataaatcataacctgactcaggagcaggtgatggaagccgcattgaggagcgaacatcatgtcgaaaagcaatccgtctga

SEQ ID NO: 38679 - protein, 513 aa, Shigella flexneri 2a str. 301
MPYLLEMKNITKTFGSVKAIDNVSLRLNAGEIVSLCGENGSGKSTLMKVLCGIYPHGSYEGEIIFAGEEIQASHIRDTERKGIAIIHQELALVKELTVLENIFLGNEITHNGIMDYDLMTLRYQKLLAQVSLSISPDTRVGDLGLGQQQLVEIAKALNKQVRLLILDEPTASLTEQETSVLLDIIRDLQQHGIACIYISHKLNEVKAISDTICVIRDGQHIGTRDAAGMSEDDIITMMVERELTAIYPNEPHTTGDEILRIEHLTAWHPVNRHIKRVNDVSFSLKRGEILGIAGLVGAGRTETIQCLFGVWPGQWEGKIYIDGKQVDIRNCQQAITQGIAMVPEDRKRDGIVPVMAVGKNITLAALNKFTGGISQLDDAAEQKCILESIQQLKVKTSSPDLAIGRLSGGNQQKAILARCLLLNPRILILDEPTRGIDIGAKYEIYKLINQLVQQGIAVIVISSELPEVLGLSDRVLVMHEGKLKANLINHNLTQEQVMEAALRSEHHVEKQSV

SEQ ID NO: 38680 - DNA, 1503 bp, Shigella flexneri 2a str. 301
  CDS (1)..(1503): transl_table=11
atgacgaccgaccaacaccaggagatcctccgcaccgaaggattaagtaaatttttccccggcgtcaaagcgttagacaacgttgatttcagcctgcgccgtggcgaaatcatggcgctgcttggtgaaaacggggcgggaaaatcaacgctaatcaaagcattaactggtgtataccacgccgatcgcggcaccatctggctggaaggccagactatctcaccgaaaaataccgcccatgcacaacaactcggtatcggcaccgtctatcaggaagtcaacctgctacccaatatgtcggttgctgataatctattcataggtcgcgaacccaaacgtttcggccttctacgccgtaaagagatggaaaagcgcgccaccgaactgatggcatcttacggtttctccctcgacgtgcgcgaaccgcttaaccgtttttcggtggcgatgcagcaaatcgtcgccatttgccgggctatcgatctctccgccaaagtgctgatcctcgatgaacccaccgccagcctcgacacccaggaaatggagctattatttggcctgatgcgtcagttgcgcgatcgcggcgtcagcctgatctttgtcactcactttctcgatcaggtctatcaggtcagcgatcggatcaccgtcttacgcaacggcagtttcgtaggctgtcgggaaacgcgcgagctaccgcagatcgaactggtaaaaatgatgctggggcgcgagctggatacccacgcgctacagcgtgccgggcgaacattgttgagcgacaaacccgttgccgcgttcaaaaattacggcaaaaaaggaacgatagcaccgtttgatctcgaagtgcgccccggcgagatcgtcggtctggctggcttgctgggatccggacgtaccgaaaccgccgaagtgatcttcggtatcaaacctgctgacagcggcacggcgttgatcaaaggcaaaccgcaaaccctgcgatcgccacatcaggcttcagtactgggcatcggattctgcccggaagacaggaaaaccgatggcatcatcgccgccgcctcggtgcgggaaaatatcatcctcgctctccaggcccagcgcggctggctacgacccatttcccgcaaagagcagcaagagattgccgaacgctttatccgccagcttggcattcgcacaccttcaactgaacaaccgattgaatttctctccggtggcaatcagcaaaaagtgctgctttcacgttggctactgacccgaccgcaatttctgatccttgatgagctaacccgtggcattgatgttggtgcccacgccgagatcatccgcctgattgaaacgctgtgtgctgacggtctggcgctgctggtgatctcctccgaactggaagagctggtgggctatgccgaccgggtgatcatcatgcgcgatcgcaaacaggtggcggagatcccgctggcacagctttccgttccggcgatcatgaacgccattgcggcgtaa

SEQ ID NO: 38681 - protein, 500 aa, Shigella flexneri 2a str. 301
MTTDQHQEILRTEGLSKFFPGVKALDNVDFSLRRGEIMALLGENGAGKSTLIKALTGVYHADRGTIWLEGQTISPKNTAHAQQLGIGTVYQEVNLLPNMSVADNLFIGREPKRFGLLRRKEMEKRATELMASYGFSLDVREPLNRFSVAMQQIVAICRAIDLSAKVLILDEPTASLDTQEMELLFGLMRQLRDRGVSLIFVTHFLDQVYQVSDRITVLRNGSFVGCRETRELPQIELVKMMLGRELDTHALQRAGRTLLSDKPVAAFKNYGKKGTIAPFDLEVRPGEIVGLAGLLGSGRTETAEVIFGIKPADSGTALIKGKPQTLRSPHQASVLGIGFCPEDRKTDGIIAAASVRENIILALQAQRGWLRPISRKEQQEIAERFIRQLGIRTPSTEQPIEFLSGGNQQKVLLSRWLLTRPQFLILDELTRGIDVGAHAEIIRLIETLCADGLALLVISSELEELVGYADRVIIMRDRKQVAEIPLAQLSVPAIMNAIAA

SEQ ID NO: 38682 - DNA, 1518 bp, Streptomyces coelicolor A3(2)
  CDS (1)..(1518): transl_table=11
atgacccacccgtccgacacgggttcggccccggttctggcgctcagggacgtctccaagtccttcggcgcggtccgtgcgctgcgggacgtctccctggagctgttccccggcgaggtgcacgccctcgccggtgagaacggcgccggaaagtcgaccctcatcaagacgctggccggagtgcaccggccggacgccggccacgtgctgctcgacggcgcaccggtcgtgttccacggtcccggcgacgcccgcgacgccggcatcgccgtgatctaccaggagcccaccctcttccccgacctgtcgatcgccgagaacatcttcatgggccgccagccgcgccgcgccctcggccgcatcgaccacaaggcgacccacgacgccaccgccgcactcatgctgcgcctcggcgtcgaactcgaccccgaccggcccgcgcgcggtctgtccatcgcggaccagcagatcgtggagatcgccaaggccctctccttcgacgcccgcgtcctgatcatggacgagccgaccgccgccctcaccggcagcgaggtggcccggctcttcggcgtggtgcgcaccctgcgcgaccagggcgccgcggtgctgttcatctcccaccgcctggaggagatcttccacatctgcgcgcgggtgaccaccctgcgcgacggcgcctggatcgccagcgagcccctggagggcatgaccgaggacgacctggtgcgccgcatggtcggccgcgacctcgacgagctgtaccccaagcaggaggtcacccccggcgagagggccctcagcgtgcgcaggctgacccgcgagggcgtcttcaccgacgtctccttcgaggtgcggcgcggtgagatcgtcgcgctggccggactggtcggcgccgggcgcaccgaggtcgcccgcgccgtcttcggcgtcgaccgctgggacgcgggcgaagtggaggtggacgggaagccgctcgtcaacggcgcgccctccaccgcgatggccgccggtctcgccctcgtcccggaggaccgccgcgcccaggggctggtgatggacatgtccatcgaacgcaacatcgggctcaccggcctgcggacgaccgtgaaggccggcctcgtggaccgcggcgccgagcgcagccgttccctggactgggcggtcaagctccaggtcaagtacgcccgcatcgccgacaccgtcgccaccctgtccggcggcaaccagcagaaggtcgtcctcgccaagtggctggccaccggccccaaggtgctgatcgtggacgagcccacccgcggcatcgacgtcggcaccaaggcggaggtgcaccggctcctctcgcagctcgccgccgacggcgtggccgtcctgatgatctcctccgacctgcccgaggtgctcggcatggccgaccgcgtcctggtgatgcacgagggccgactgaccgccgagatatcccgcaccgacgccaccgaggagaccgtgatggccgcagcgacggggagggccgccgcatga

SEQ ID NO: 38683 - protein, 505 aa, Streptomyces coelicolor A3(2)
MTHPSDTGSAPVLALRDVSKSFGAVRALRDVSLELFPGEVHALAGENGAGKSTLIKTLAGVHRPDAGHVLLDGAPVVFHGPGDARDAGIAVIYQEPTLFPDLSIAENIFMGRQPRRALGRIDHKATHDATAALMLRLGVELDPDRPARGLSIADQQIVEIAKALSFDARVLIMDEPTAALTGSEVARLFGVVRTLRDQGAAVLFISHRLEEIFHICARVTTLRDGAWIASEPLEGMTEDDLVRRMVGRDLDELYPKQEVTPGERALSVRRLTREGVFTDVSFEVRRGEIVALAGLVGAGRTEVARAVFGVDRWDAGEVEVDGKPLVNGAPSTAMAAGLALVPEDRRAQGLVMDMSIERNIGLTGLRTTVKAGLVDRGAERSRSLDWAVKLQVKYARIADTVATLSGGNQQKVVLAKWLATGPKVLIVDEPTRGIDVGTKAEVHRLLSQLAADGVAVLMISSDLPEVLGMADRVLVMHEGRLTAEISRTDATEETVMAAATGRAAA

SEQ ID NO: 38684 - DNA, 1479 bp, Streptococcus agalactiae NEM316
  CDS (1)..(1479): transl_table=11
atgaaaattgacatgaggaatatctccaaatccttcggtactaataaagttctagagaagattgatttggaattacaatctggtcaaatacacgcgcttatgggtgaaaatggtgcgggtaaatcaaccttaatgaacattctaacaggactttttccagcaagtacaggaactatttatattgatggcgaggaacgaactttttcaaaccctcaagaagcagaggaatttggcattagttttattcaccaagagatgaatacttggccggaaatgactgtcttggaaaatctctttcttggacgtgaaatcaagacaacttttggcttactcaatcaaaaattaatgagacaaaaagcacttgaagcttttaaaagattaggtgtgactattcccctagacatcccgattggtaacttgtctgttggacaacaacaaatgattgaaatcgccaaaagtctcctaaaccaactctctattttggtaatggatgaaccgactgctgctttaacagatcgtgaaactgaaaatcttttccgagttatccgaagtttaaaacaagaaggagtgggcattgtctatatctcccatcgaatggaggaaatttttaaaatcactgacttcgtaaccgtcatgagagatggtgtcattgtagatacaaaagaaacatcactcacaaattctgacgaattggttaaaaaaatggttggccgaaaattggaagattactatcctgaaaaacattctgaaattgggcctgttgcttttgaagttagtaacctctgtggagataatttcgaggacgtttccttttatgtccgtaaaggcgagattcttggattttctggattaatgggagctgggcgtactgaagttatgcgaactatctttggaattgataaaaagaagtctggtaaggtgaaaattgataaccaagaaatcactattactagcccaagtcaagctatcaagcagggcattggttttttgaccgaaaatagaaaagatgaaggtctcatcctagacttcaatatcaaggacaatatgactctccctagcactaaagattttagcaaacatggtttctttgatgaaaaaacaagaacaacatttgtgcaacaattgattaatcgcctctacattaaatcagggagaccagatttagaggttggaaatctttctggaggtaaccaacaaaaggtcgttctcgctaaatggattggtattgctcctaaagtcttaattcttgatgagccaacacgtggtgttgatgtcggagctaaacgagagatttaccaattaatgaatgaactagcagacagaggtgttccaattgtcatggtatcatcagacttacctgaaattctaggtgttagtgaccgcatcatggtaatgcacgaaggtcgaatcagtggagaactcagtcgaaaagaagctgaccaagaaaaagttatgcaactagccacaggaggtaagtaa

SEQ ID NO: 38685 - protein, 492 aa, Streptococcus agalactiae NEM316
MKIDMRNISKSFGTNKVLEKIDLELQSGQIHALMGENGAGKSTLMNILTGLFPASTGTIYIDGEERTFSNPQEAEEFGISFIHQEMNTWPEMTVLENLFLGREIKTTFGLLNQKLMRQKALEAFKRLGVTIPLDIPIGNLSVGQQQMIEIAKSLLNQLSILVMDEPTAALTDRETENLFRVIRSLKQEGVGIVYISHRMEEIFKITDFVTVMRDGVIVDTKETSLTNSDELVKKMVGRKLEDYYPEKHSEIGPVAFEVSNLCGDNFEDVSFYVRKGEILGFSGLMGAGRTEVMRTIFGIDKKKSGKVKIDNQEITITSPSQAIKQGIGFLTENRKDEGLILDFNIKDNMTLPSTKDFSKHGFFDEKTRTTFVQQLINRLYIKSGRPDLEVGNLSGGNQQKVVLAKWIGIAPKVLILDEPTRGVDVGAKREIYQLMNELADRGVPIVMVSSDLPEILGVSDRIMVMHEGRISGELSRKEADQEKVMQLATGGK

SEQ ID NO: 38686 - DNA, 1575 bp, Pseudomonas putida KT2440
  CDS (1)..(1575): transl_table=11
atgctgccaggagaatcggccatgcctgcattggccaatgaagtggtgcttgccgccagcggcctgggcaagacctatgcccagcccgtactcggcgaggtcagcctgagcctgcgcgcgggcgaagtgctggccctgaccggcgagaacggcgcaggcaagagtacgttgtccaagcttatcagcggcctggaggtgcccaccaccggtcacatgacctaccgcggccaggcctacgcgcccggcagccgcggcgaggccgaacgccttggggtgcgcatggtcatgcaggagctgaacctgctgccgacgctgaccgtggcggaaaacctgtttctcgacaacctgcccagccgcttcggctggatcagccacaagcgtttgcgccagctggcaacggctgccatggctcgggtcgggctcgacgccattgacccggacacccctgtcggcgaactgggcatcggccatcagcaaatggtcgagattgcccgcaacctgatcggtgactgccatgtgctgatcctggacgagcccactgccatgctcactgcgcgcgaggtggcgttgctgttcacccagatcgagcgcctgcgcgcccgcggcgtggccatcgtctatatctcgcatcgcctggaagagttgcagcgcgtggcccaacgcatcgttgtgctgcgcgatggcaagctggtgtgcgacgagccgatccagcgctacagcagcgccgagctggtcaacctgatggtcggccgcgagctgggcgagcatatcgacctgggtcgacggcagttgggtgcaccgctgctcaaggtcgacaaactgtgccgtggcgacaaggtgcgcgaggtgtcgttcgaagtcagggcaggggagatttttggcatctccggcctgatcggcgccggccgtaccgagctgctgcgcctgatctacggtgccgatcgcgccgacagcggcggtatcgcgctcggccagccgccacaggcggtcagcatcgactcgcccaaggctgcagtgcgtgccggtatcgcgctgataaccgaagaccgcaaaggcgagggcctgctgttgacgcagtcgatcagcgccaacattgcgttgggcaacctgggcgcggtatcgcgcgccggtgtgctcgatagcgaagcggaaaaggccttggccgaacgccagatccaggccatgcgcattcgcagtgctggcgcgcagcaagtggtgggcgagctgtctggcggtaaccagcagaaggtggtgatcggccgctggctggagcgcgattgccaggtgctgctgttcgacgaacccacgcgtggcatcgatgtgggcgccaagttcgacatttatggcctgctggccgagctggcgcgccaaggcaaggccttggtggtggtgtccagtgacctgcgcgaactgatgctgatttgcgaccgcatcgccgtgctgtccgctggccgcctgatcgacaccttcgcgcgtgatcattggagccaggaccagttgcttgccgccgccttcgccggttatcagaaacgtgacgcgctgctgcatgatgcagcccccaggatggatgcatga

SEQ ID NO: 38687 - protein, 524 aa, Pseudomonas putida KT2440
MLPGESAMPALANEVVLAASGLGKTYAQPVLGEVSLSLRAGEVLALTGENGAGKSTLSKLISGLEVPTTGHMTYRGQAYAPGSRGEAERLGVRMVMQELNLLPTLTVAENLFLDNLPSRFGWISHKRLRQLATAAMARVGLDAIDPDTPVGELGIGHQQMVEIARNLIGDCHVLILDEPTAMLTAREVALLFTQIERLRARGVAIVYISHRLEELQRVAQRIVVLRDGKLVCDEPIQRYSSAELVNLMVGRELGEHIDLGRRQLGAPLLKVDKLCRGDKVREVSFEVRAGEIFGISGLIGAGRTELLRLIYGADRADSGGIALGQPPQAVSIDSPKAAVRAGIALITEDRKGEGLLLTQSISANIALGNLGAVSRAGVLDSEAEKALAERQIQAMRIRSAGAQQVVGELSGGNQQKVVIGRWLERDCQVLLFDEPTRGIDVGAKFDIYGLLAELARQGKALVVVSSDLRELMLICDRIAVLSAGRLIDTFARDHWSQDQLLAAAFAGYQKRDALLHDAAPRMDA

SEQ ID NO: 38688 - DNA, 1539 bp, Pseudomonas putida KT2440
  CDS (1)..(1539): transl_table=11
atgagtacgccggtgctggagctgcgtggcattgtcaagaccttcggtgccacccgggcgctcgacggcgccagcctgcgggtggcggcgggcagcgtgcacggtctggtgggcgagaacggcgccggcaagtctacgctgatcaaggtgctggccggcatccaccgcccggacgccggcagcctgctgctcgacggccagccgcacgggcatttcagcccgcgccaggtggagcgcctgggcattggcttcatccaccaggaacgcttgttgccggcccgtttcaccgtgggtgaagccttgttcttcggccatgaacggcgattcgggcccttgctcgatcgccgctctcagcagcgcgaggccgcgcgtctgctggacgactacttcggcctgcgactgccggcgaatgcgctgatcggtgaactgagcagcgccgagcaacagatggtgcagatcgtccgcgcgctgctgatcaaaccgcgtgtgctggtgttcgacgaacccagcgtggccctggtgcagcgtgaggtggagcgtttgctgcggatcgtccagcgcctgcgtgacgatggcctggcgatcgtctacatctcccattacctgcaggaaatcgaggccctgtgcgaccgcgtgacggtactgcgcaacggtcgcgatgtcgctgaagtctccccgcgcaacacgtcgctggagcagatcacccgcctgatggtcaaccgcgaagtcggcgagctgtaccccaaggtagcggtgcctgccggtgcgctgttgctcgacgtgcgcgggctggggcgggcacgggcctaccagggcatcgacctgcaggtgcgccgtggcgagatcgtcggcctcaccgggctggtgggctcgggcgccaaggagttgctacgcagcctgttcggcctggcgccaccggacagcggcgaggtgcgcctggacgggcaaccgttgtccttgcgcagtccgcgcgaggctgtcgcccagggcgtcgcgctgatgcccgaggagcgccgtcggcaaggcgtggcgcttgatctgagcgtgcaggagaacaccaccctggcggcactgtcgcgcttcgtccgcctggggctgctgtcgccggcgcgcgagcggcataccaccctggagctgatcgagcgcctgaggatcaaggcccatggcgcgcatgccaaggtgcgtcagctcagcggcggcaatcagcaaaaggtggcgctggccaagtggttcgcgcggtgttccagcctgtacctgctggacgagcccagcgttggcatcgatgttggcgccaaggtggagatctatcggctgatcggtgaactggtgaaggagggcgccggggtgctgatcctctcgtccgacctgccggagttgatcggcctctgcgaccgcattcatgtcatgcaccgcggcgccatcgccgcacgtttcgccgctggcgaggcgaacagtgaccgcctgctggcggtggctaccggcgcgcaacgcgcgcagaacgaggaacgacctttctatgcctatgccattgctatctga

SEQ ID NO: 38689 - protein, 512 aa, Pseudomonas putida KT2440
MSTPVLELRGIVKTFGATRALDGASLRVAAGSVHGLVGENGAGKSTLIKVLAGIHRPDAGSLLLDGQPHGHFSPRQVERLGIGFIHQERLLPARFTVGEALFFGHERRFGPLLDRRSQQREAARLLDDYFGLRLPANALIGELSSAEQQMVQIVRALLIKPRVLVFDEPSVALVQREVERLLRIVQRLRDDGLAIVYISHYLQEIEALCDRVTVLRNGRDVAEVSPRNTSLEQITRLMVNREVGELYPKVAVPAGALLLDVRGLGRARAYQGIDLQVRRGEIVGLTGLVGSGAKELLRSLFGLAPPDSGEVRLDGQPLSLRSPREAVAQGVALMPEERRRQGVALDLSVQENTTLAALSRFVRLGLLSPARERHTTLELIERLRIKAHGAHAKVRQLSGGNQQKVALAKWFARCSSLYLLDEPSVGIDVGAKVEIYRLIGELVKEGAGVLILSSDLPELIGLCDRIHVMHRGAIAARFAAGEANSDRLLAVATGAQRAQNEERPFYAYAIAI

SEQ ID NO: 38690 - DNA, 1521 bp, Escherichia coli CFT073
  CDS (1)..(1521): transl_table=11
atggtcagctcaacgactccgtcttccggggaatacttgttggaaatgagcggtatcaacaagtcttttcctggtgttaaggcacttgataacgttaacttaaaagtccgaccacattctatccatgcattaatgggggaaaatggtgcgggaaaatcaacattattaaaatgcctgtttggtatttatcaaaaagactctggcaccattttattccagggtaaagagatcgatttccattccgccaaagaagcactggaaaatggtatttcgatggtacatcaggagttaaacctggtattacaacgttcggtgatggacaacatgtggctggggcgatatcccaccaaaggcatgtttgtcgatcaggacaaaatgtaccgcgaaaccaaagcgatttttgatgaactggatattgatatcgatccgcgtgcgcgcgtcggtacattatctgtttcgcaaatgcagatgatcgaaatcgccaaagcgttttcctataacgcgaaaattgtgattatggatgaaccgacttcttcgttaaccgaaaaagaggtcaatcatctgttcactattattcgtaaattaaaagagcgcggctgcggtattgtttatatctcgcataaaatggaagaaatcttccagttatgtgatgaagttaccgtattgcgcgacggtcagtggatcgctaccgaaccgctggcaggactgacgatggacaagatcatcgccatgatggttgggcgttctcttaaccagcgtttccctgacaaagaaaacaagccgggcgaagtgattctggaagtgcgtaacctgacgtcgctgcgccagccgtcgatacgcgatgtctcgtttgatctgcataaaggggagattctcggtatagccggtctggtgggagcgaaacgtaccgatattgttgagacgttatttggtattcgcgagaaatcggctggcaccattacgttgcacggcaaaaagatcaataaccataatgccaacgaagccataaaccacggatttgcactggtaactgaagagcgccgctcaacgggaatttatgcctatctggatattggctttaactcgttaatttccaatatccgcaactataaaaataaagttggtttactggataactcgcggatgaaaagcgatacccagtgggtgattgattcgatgcgggtaaaaacaccggggcatcggacgcaaattggttcgctctccggtggtaatcagcaaaaagtgattattggtcgctggctgttaacgcaaccagaaatattaatgctcgatgaaccgacgcgcggtattgatgttggggctaagtttgagatttatcagttaattgccgaactggcgaagaaaggcaaggggattattattatctcctccgaaatgccagagttgttagggataacagaccgtattctggttatgagcaatggtctcgtttccggaattgtcgatacaaaaacaacaacgcaaagcgaaattctgcgtcttgcgtctttgcacctttaa

SEQ ID NO: 38691 - protein, 506 aa, Escherichia coli CFT073
MVSSTTPSSGEYLLEMSGINKSFPGVKALDNVNLKVRPHSIHALMGENGAGKSTLLKCLFGIYQKDSGTILFQGKEIDFHSAKEALENGISMVHQELNLVLQRSVMDNMWLGRYPTKGMFVDQDKMYRETKAIFDELDIDIDPRARVGTLSVSQMQMIEIAKAFSYNAKIVIMDEPTSSLTEKEVNHLFTIIRKLKERGCGIVYISHKMEEIFQLCDEVTVLRDGQWIATEPLAGLTMDKIIAMMVGRSLNQRFPDKENKPGEVILEVRNLTSLRQPSIRDVSFDLHKGEILGIAGLVGAKRTDIVETLFGIREKSAGTITLHGKKINNHNANEAINHGFALVTEERRSTGIYAYLDIGFNSLISNIRNYKNKVGLLDNSRMKSDTQWVIDSMRVKTPGHRTQIGSLSGGNQQKVIIGRWLLTQPEILMLDEPTRGIDVGAKFEIYQLIAELAKKGKGIIIISSEMPELLGITDRILVMSNGLVSGIVDTKTTTQSEILRLASLHL

SEQ ID NO: 38692 - DNA, 1512 bp, Escherichia coli CFT073; identical to SEQ ID NO: 27256
  CDS (1)..(1512): transl_table=11

SEQ ID NO: 38693 - protein, 503 aa, Escherichia coli CFT073; identical to SEQ ID NO: 27257

SEQ ID NO: 38694 - DNA, 1527 bp, Escherichia coli CFT073
  CDS (1)..(1527): transl_table=11
ttggcgttttgttgtgacaccgaggtcattatgacggatgttattcttgatgtttcgcatattgcgaagacatttggtcatgttcaggcattaaaagatattacactctctttacgtaaagggcgggtgcatactttattaggcgagaatggtgccggtaaatcgacattaatgaaaatactggccggtgtttatccgccaacccagggaacgataacactacgtggtgaaaccatcaccattaataatccgcagcattctcgccagttagggattgcgattatttttcaggaactgagcctgagtaataatatgaccgtggcggaaaatatttatgccaataatgaaccgcgacgttttggtataattaacgataaagaaatgctcgcagattgccagaacctcctcgcggaactgggcatcccactagaccctctggaaatggtcggcaatatgtcgatggcacataggcaactggtagaaattgctaaagccttaagctatgcagcggatgtcgtgattatggatgaaccgacatcttcgctaagtgataatgaagcggagatcctgtttaacattattgaaaaattaaagcagcgaggctgtgcggttatttatatctctcatcgcatggatgaaattatgcggatttcagatgatatttcggtgatccgcgacggtgagtatatcgctacgcatgaaaagaaaaacagtgatatccagcacttgattgcccaaatggttggtcgggaaatgaaaaatatttggccagcacgtcttggggaaaaaccggatgaaaatgttcctgcaaaactggaagtaaaaaatctttcccatccttcgctttttaaagaggtcagtttcgctgtgcgtccgggggaagtcctcggattttttggcctggtgggggccgggcgttccgatgtgatgaaggcgctatttggcctcgtttcgtatcacgggactgtgttgattgatggtaaggaagtcaggatcgctaatccccaggctattgatcatggcattgcttttgtgaccgaaaaccgcaaggaagaagggttagtgctgatgcacgacatcaatatgaacacgcaccatgtggcgtttcaatataacgcttcgcggatgggactcatcaatcaccgacaagaagaggcgaagacgctgcaatcaattgccagaatgaacactaaagtgagttctgtgcatcaggcagtgggagcactgagcggcggtaatcaacagaaaatcgtgttatcgaagtggctggagaaaactccgcgtattttattgctcgatgaaccaacgcgcggagtggatgtcggcgcaaaatttgaaatctataacgtgatacgtcaactggctgcggcagggacagcaattattctggtgtcctctgaactgccagaagtcatggcacttagcgatcgtctggtggtaatgcgtaataaaacgattgccgatatttattcatgtgaaaatttaacgcagacacaggtaatgaccgctgcaacaggagtacgttaa

SEQ ID NO: 38695 - protein, 508 aa, Escherichia coli CFT073
MAFCCDTEVIMTDVILDVSHIAKTFGHVQALKDITLSLRKGRVHTLLGENGAGKSTLMKILAGVYPPTQGTITLRGETITINNPQHSRQLGIAIIFQELSLSNNMTVAENIYANNEPRRFGIINDKEMLADCQNLLAELGIPLDPLEMVGNMSMAHRQLVEIAKALSYAADVVIMDEPTSSLSDNEAEILFNIIEKLKQRGCAVIYISHRMDEIMRISDDISVIRDGEYIATHEKKNSDIQHLIAQMVGREMKNIWPARLGEKPDENVPAKLEVKNLSHPSLFKEVSFAVRPGEVLGFFGLVGAGRSDVMKALFGLVSYHGTVLIDGKEVRIANPQAIDHGIAFVTENRKEEGLVLMHDINMNTHHVAFQYNASRMGLINHRQEEAKTLQSIARMNTKVSSVHQAVGALSGGNQQKIVLSKWLEKTPRILLLDEPTRGVDVGAKFEIYNVIRQLAAAGTAIILVSSELPEVMALSDRLVVMRNKTIADIYSCENLTQTQVMTAATGVR

SEQ ID NO: 38696 - DNA, 1578 bp, Escherichia coli CFT073; identical to SEQ ID NO: 27260
  CDS (1)..(1578): transl_table=11

SEQ ID NO: 38697 - protein, 525 aa, Escherichia coli CFT073; identical to SEQ ID NO: 27261

SEQ ID NO: 38698 - DNA, 1533 bp, Escherichia coli CFT073
  CDS (1)..(1533): transl_table=11
atggccacgccatatatatcgatggcggggatcggcaagtcctttggtccggttcacgcattaaagtcggttaatttaacggtttatcctggtgaaatacatgcattactaggagaaaatggtgcgggtaaatctacgctaatgaaagtgttatccgggatacatgagccgaccaaaggcaccattaccattaataacattaactataacaaactggatcataaattagcggcacaactcggtatcgggattatttatcaggaactcagcgttattgatgaattaaccgtactggaaaatttatatattggtcgtcatctgacgaaaaaaatctgtggcgtcaatattatcgactggcgagaaatgcgtgtccgcgccgccatgatgttattacgcgtgggcttgaaagttgatttagatgagaaagtggcgaatttatctatcagccacaagcagatgctggaaattgccaaaacgctgatgctcgacgccaaagtcatcatcatggatgaacccacctcctcactcaccaataaagaggtggactatctgtttctgatcatgaatcagttgcgtaaggagggtacggccatcgtctatatctcgcataaattggcggaaattcgccgtatttgcgaccgctatacggtgatgaaagacggcagcagcgtttgcagcggcatggtgagcgatgtgtcaaatgacgatatcgtccgtctgatggtaggccgcgaattgcaaaaccgttttaacgcgatgaaggagaatgtcagcaaccttgcgcacgatacggtttttgaggtgcgcaacgtcaccagccgtgacagaaaaaaggtccgggatatctcatttagcgtctgccggggagaaatattaggctttgccggactggtcggttccggacgtactgaactgatgaactgcctgtttggcgttgataaacgcgctggcggagaaatccgtcttaatggcaaagatatctctccacgttctcccctggatgccgtgaaaaaagggatggcttacatcactgaaagccgccgggataacggctttttccccaacttttctatcgctcagaacatagctatcagccgcagtctgaaagacggcggctataaaggcgcgatggggttgtttcatgaagttgacgagcaacgtaccgctgaagcccagcgcgaactgctggcgctgaaatgtcattcggtaaaccagaacatcactgaactctccggcggtaaccagcagaaagtcctgatctccaaatggctgtgctgtcacccggaagtgatcattttcgatgaacctacccgtggcatcgacgttggcgcgaaagccgaaatttacaaagtgatgcgccaactggcggacgacggaaaagtcatcctgatggtgtcatctgaactacctgaaattatcaccgtctgcgaccgcatcgccgtgttctgcgaaggacgactgacgcaaatcctgaccaatcgcgatgacatgagcgaagaggagattatggcatgggctttaccacacgagtaa

SEQ ID NO: 38699 - protein, 510 aa, Escherichia coli CFT073
MATPYISMAGIGKSFGPVHALKSVNLTVYPGEIHALLGENGAGKSTLMKVLSGIHEPTKGTITINNINYNKLDHKLAAQLGIGIIYQELSVIDELTVLENLYIGRHLTKKICGVNIIDWREMRVRAAMMLLRVGLKVDLDEKVANLSISHKQMLEIAKTLMLDAKVIIMDEPTSSLTNKEVDYLFLIMNQLRKEGTAIVYISHKLAEIRRICDRYTVMKDGSSVCSGMVSDVSNDDIVRLMVGRELQNRFNAMKENVSNLAHDTVFEVRNVTSRDRKKVRDISFSVCRGEILGFAGLVGSGRTELMNCLFGVDKRAGGEIRLNGKDISPRSPLDAVKKGMAYITESRRDNGFFPNFSIAQNIAISRSLKDGGYKGAMGLFHEVDEQRTAEAQRELLALKCHSVNQNITELSGGNQQKVLISKWLCCHPEVIIFDEPTRGIDVGAKAEIYKVMRQLADDGKVILMVSSELPEIITVCDRIAVFCEGRLTQILTNRDDMSEEEIMAWALPHE

SEQ ID NO: 38700 - DNA, 1503 bp, Escherichia coli CFT073
  CDS (1)..(1503): transl_table=11
atgacgaccgaccaacaccaggaaatcctccgcaccgaaggattaagtaaatttttccccggtgtcaaagcgttagacaacgttgatttcagcctgcgccgtggtgaaatcatggcgctgctcggtgaaaacggggcgggaaaatcgacgctcatcaaagcattaaccggtgtataccacgccgatcgcggcaccatctggctggaaggccaggctatctcaccgaaaaacaccgcccacgcacaacaactcggcatcggcaccgtctatcaggaagtcaacctgctacccaatatgtcggtcgctgataatctattcataggtcgcgaacccaaacgtttcggccttctacgccgtaaagagatggaaaagcgctccaccgaactgatggcatcttacggtttctccctcgacgtgcgcgaaccgctcaaccgcttttcagtcgcgatgcagcaaatcgtcgccatttgccgggctatcgatctctccgccaaagtgctgatcctcgatgaacccaccgccagtctcgacactcaggaagtagagttactgtttggcctgatgcgtcaacttcgcgatcgcggcgtcagcctgatcttcgtcactcattttctcgatcaggtttatcaggttagcgatcggatcaccgtcttacgcaacggcagttttgtgggctgtcgggaaacccgcgagctaccgcagatcgaactggtaaaaatgatgctggggcgtgagctggacacccacgcgcttcagcgtgccgggagaacattgctgagcgacaaacctgttgccgcgttcaagaattacggcaaaaaaggaacgatcgcgccgtttgatctcgaagtgcgccccggcgagatcgtcggtctggcaggcttgctgggatcaggacgtaccgaaaccgccgaagtgatcttcggtatcaaacctgctgacagcggcactgcgttgatcaaaggcaaaccgcaaacgctacgctcgccacatcaggcttcggttcttggcattggcttctgcccggaagacaggaaaaccgatggcatcatcgctgccgcctcggtgcgggaaaatatcatccttgctctccaggcccagcgcggctggctacgacctatttcccgtaaagaacagcaagagattgccgaacgctttatccgccagcttggcattcgcacaccttcaactgaacaaccgattgaatttctctccggcggcaatcagcaaaaagtgttgctttcacgttggctactgacccgaccgcaatttctgatcctcgacgagccaacgcgcggaattgatgttggtgcccacgccgagatcatccgcctgattgaaacgctgtgcgccgatgggctggcgctgctggtgatctcctccgagctggaagagctggtgggctatgccgatcgggtgattatcatgcgcgatcgcaaacaggtggcggagatcccgctggcagagctttccgttccggcgatcatgaacgccattgcggcgtaa

SEQ ID NO: 38701 - protein, 500 aa, Escherichia coli CFT073
MTTDQHQEILRTEGLSKFFPGVKALDNVDFSLRRGEIMALLGENGAGKSTLIKALTGVYHADRGTIWLEGQAISPKNTAHAQQLGIGTVYQEVNLLPNMSVADNLFIGREPKRFGLLRRKEMEKRSTELMASYGFSLDVREPLNRFSVAMQQIVAICRAIDLSAKVLILDEPTASLDTQEVELLFGLMRQLRDRGVSLIFVTHFLDQVYQVSDRITVLRNGSFVGCRETRELPQIELVKMMLGRELDTHALQRAGRTLLSDKPVAAFKNYGKKGTIAPFDLEVRPGEIVGLAGLLGSGRTETAEVIFGIKPADSGTALIKGKPQTLRSPHQASVLGIGFCPEDRKTDGIIAAASVRENIILALQAQRGWLRPISRKEQQEIAERFIRQLGIRTPSTEQPIEFLSGGNQQKVLLSRWLLTRPQFLILDEPTRGIDVGAHAEIIRLIETLCADGLALLVISSELEELVGYADRVIIMRDRKQVAEIPLAELSVPAIMNAIAA

SEQ ID NO: 38702 - DNA, 1506 bp, Vibrio vulnificus CMCP6
  CDS (1)..(1506): transl_table=11
atgaaccaagcgattttacagctcagtgaaattgaaaaagcatttcctggcgtgaaggcgttagataaggcctcgctcaatgtctacccaggaagagtgatggctttaatgggagaaaatggagcaggaaaatccaccttgatgaaagtgcttaccggtatctattcacgagacgcaggtgagatagtttatcaaggtcaatcagcgcagttcaaagggccaagagattcacaacaagctggtatcagcattattcaccaagaactaaaccttattcgtgaactgaccatcgcagagaacatttttcttggtcgagagattacctcggcgtttgggcgtattgattggccccaaatgtacgcggaagcggacaaactgctcgcgcgcttgaaagtgaagcacagctcaaagacgttacttggtcagttaagtctgggtgagcagcagatggtggaaatcgctaaagcgctctcttttgagtccaaagtcatcatcatggatgaaccaacagacgccttgacggacaccgaaacagaggcgctgttttcggttattcgagagctgagagagcaggggtgtggcattgtttacatctcccaccgtttgaaagagatcttcgaaatttgtgatgacatcacggtgttgcgcgatggcaaatttatcggtcagtgcgaagtcgtgcaaacagacgaagatggcttaattgagatgatggttgggcgcaagcttgaagagcaatacccaagaattgacgtggtgcacggtcaaacctgtttagaagtgattggtctgacggggtctggcgtacacgatgtcagttttaccttaaaacgaggtgaaattttgggtatttcaggtctgatgggcgcaggtcgaacagagctgatgaaagtgatttatggtgctttgccgagtgagagaggcgtgatcaatcttgataatcgcaccattaatccgataagcccacaagatggtttggcaaatggcattgcttacatttcagaagaccgcaaaggcgacggcctcgtccttggcctttcggtgaaagaaaacatgtcactttgtgcgcttgataagctaagcaaaggtgtgcaaatccaacatcaagatgaagtggttgctgtggatgactttatccaacttttcaacatcaaaacgccatctcgcgagcaaattattggcaatctttctggcggaaaccagcaaaaagtggccattgcaaaagggttgatgaccaaaccgaaagttttgatcctagacgaaccgactcggggtgtagacgtcggcgcgaagaaagaaatttaccagttaatcaacaaattcaaagccgaagggatgagcatcattctggtctcatctgaaatgccagaagtgctcggcatgagcgatcgcatcttagtgatgcatgaaggtcgcattactggtgagtttgaagcaaaacacgccgatcaggaaaaactgatggcctgtgccgtcggcaaaaaagtatctgaggaagcagcatga

SEQ ID NO: 38703 - protein, 501 aa, Vibrio vulnificus CMCP6
MNQAILQLSEIEKAFPGVKALDKASLNVYPGRVMALMGENGAGKSTLMKVLTGIYSRDAGEIVYQGQSAQFKGPRDSQQAGISIIHQELNLIRELTIAENIFLGREITSAFGRIDWPQMYAEADKLLARLKVKHSSKTLLGQLSLGEQQMVEIAKALSFESKVIIMDEPTDALTDTETEALFSVIRELREQGCGIVYISHRLKEIFEICDDITVLRDGKFIGQCEVVQTDEDGLIEMMVGRKLEEQYPRIDVVHGQTCLEVIGLTGSGVHDVSFTLKRGEILGISGLMGAGRTELMKVIYGALPSERGVINLDNRTINPISPQDGLANGIAYISEDRKGDGLVLGLSVKENMSLCALDKLSKGVQIQHQDEVVAVDDFIQLFNIKTPSREQIIGNLSGGNQQKVAIAKGLMTKPKVLILDEPTRGVDVGAKKEIYQLINKFKAEGMSIILVSSEMPEVLGMSDRILVMHEGRITGEFEAKHADQEKLMACAVGKKVSEEAA

SEQ ID NO: 38704 - DNA, 1389 bp, Vibrio vulnificus CMCP6
  CDS (1)..(1389): transl_table=11
atgggagaaaatggggctggcaaatcaacactattaaaatgtctattcggtatttacgagaagaatgaaggaaatattctctttctcggtaaggaagtgaatttcacctcatcaaaagaagcattggaatccggtgtttctatggttcaccaagaattgaaccaagtaaaacaatgctccgtcatggataatatttggctcggtcgttacccaaagaaagggttctttgttgatcacgataaaatgtatcgcgataccaaagcaatctttgccgaactggatatcgatatcgatcctaaagtcaaagtcgcgaccttatccgtgtcacaaatgcagatggttgagatcgccaaagcgttctcctatgacgccaaaatcgtcatcatggatgaacccacctcatcgctgacggaaaaagaagtcagccacctgtttaccatcatcaacaagctgaaagagaaaggctgtggcgtggtgtacatctcgcacaagatggaagaaatctttgctatctgcgatgaaatcaccattttgcgcgatggacaatgggtcgacactcgccctctcaaagggctcgatatggaccagatcatcgccatgatggttggtcgcgaattaacgcatcgcttccctgaaaaaaccaacacaccgaaagatgtgattttggaagtggaaaacctcaccgcgctcaaccaaccgtcgattcaagatgtgtcgtttgaactgaaagcgggcgaaatcttaggcgttgcgggccttgtgggttcacgcagaaccgacatcgtcgaaacgattttcggtgtacgcgaacgcagcgaagggcacattcgcttgcatggtcgtgagatgaaaaaccgcgatgcgcatgaagcgatcaacaacggttttgccctcgtgaccgaggaacgtcgctccaccggcatctacggcaacctcgacatcaccttcaatgcgttggtggccaacgtcgatgagtacaaaacccaaatgggcctactcagcgacaaaaagatgaagagtgacacgcagtgggtgattgattccatgcgcgtgaaaacgccctctcatcaaacccacatcagctctttgtcggggggtaaccagcagaaagtcatcattggccgctggctactcacgcaaccggaaatcctcatgctggatgaaccgacacgcgggatcgacgttggcgccaagtttgagatttaccaattaattctcgaattagccaagaaaaacaaaggcatcattattatttcttcggaaatgcctgaattactgggtattacagaccgaatattagtcatgagtaatggccgcgcagcgggcatcgttaataccaaagaaacttcacagaatgaaatattagaactggcttctcgctatctctag

SEQ ID NO: 38705 - protein, 462 aa, Vibrio vulnificus CMCP6
MGENGAGKSTLLKCLFGIYEKNEGNILFLGKEVNFTSSKEALESGVSMVHQELNQVKQCSVMDNIWLGRYPKKGFFVDHDKMYRDTKAIFAELDIDIDPKVKVATLSVSQMQMVEIAKAFSYDAKIVIMDEPTSSLTEKEVSHLFTIINKLKEKGCGVVYISHKMEEIFAICDEITILRDGQWVDTRPLKGLDMDQIIAMMVGRELTHRFPEKTNTPKDVILEVENLTALNQPSIQDVSFELKAGEILGVAGLVGSRRTDIVETIFGVRERSEGHIRLHGREMKNRDAHEAINNGFALVTEERRSTGIYGNLDITFNALVANVDEYKTQMGLLSDKKMKSDTQWVIDSMRVKTPSHQTHISSLSGGNQQKVIIGRWLLTQPEILMLDEPTRGIDVGAKFEIYQLILELAKKNKGIIIISSEMPELLGITDRILVMSNGRAAGIVNTKETSQNEILELASRYL

SEQ ID NO: 38706 - DNA, 1527 bp, Bradyrhizobium japonicum USDA 110
  CDS (1)..(1527): transl_table=11
atggcggaaatcctgttcgaactcgccgggatcagcaagtcctatcccggggtcatggccctcgacgatgtcagcctgcgcgtgtaccgcggcgaggtgctgggcctgatcggcgagaacggcgccggcaaatcgacgctgatgcgcgtgctgggtggcgtgatcgcgccaacccagggcgtgatccgcatcggcggcgtcgaccgcgcccgcatgacggtgagcgaggcgacgcaggccggcatcgccttcgtgcatcaggaattgaacctgttcgagaatctcgacgtcgccgcgaacgtcttcatcggacgcgagaagcttgtcggcggcccgctgaagctggtggacaatgctgagatgcgcgcccgcgtgacgccgctgctggagcggctgggtgccgatttcgctcctgacacactggtcgacaatctgtcgatcgccgagcgccagatggtggagatcgccaaggcgctttcgatcgacgcccgcgtgatcatcatggacgagccgacctccagcctgacgatttcggagaccgagcggctgctcgaggtgattgccgatctgaaggcgcacggcatcgcggtcatctatatctcgcatcggctcggcgagatcatgacctgcgccgaccgcgtcgtggtgctgcgcgacgggcgcacggtgggggagctggcgcgagacgagttgagccatgccgcaatgatccggctgatgatcggccgcgacctgaaagcgctgcatacgccgccgaaacggccgccgcagccgggtggctgcgacatcctcggcctcgtgacatcggcctttcccgatcggcagatcgatctctccgtgcggcatggcgagatcctcggactggcggggctggtgggtgccggtcgcacctcgcttgcccgcgcggccttcggcatcgatccgctgctgggtggcgagatcaggatcgacaacgcgccggtcgatgtcgcatcgccgcgggacgcgatcaggcaaggcatctatctgatgccggaggaccgcaagaaatccgggctcgtgctggagctgccgatccgggagaacgtgacgctggcaagcctgctgaattatgcccggatgtggctggtcagcggcgcggccgagcgcaaggtggcgaaggagcaggtcagacgcctctccatcaaggcgccgagcgtcgatatcgaggccgtcacgctctccggcggcaaccagcagaaagtcgtgctgggcaagtggctctccatgcagccgcgcgtgatgttcttcgacgagccgacccgcggcgtcgatgtcggtgccaagagcgagatctacgcgctgatgcgcgagctcgccgaccacggcgtcgcgatcgtgatgatctcctcggacatggaggaggtgatcggcgtttccgaccggatcgcggtgatgcatgaggggagtgtcagcggcgtgctggagcgcccgcagttcagcgaatacaacgtgttgcagctcgcaatgggccaggcgccggaaaccgtggaagcggcggcgccatga

SEQ ID NO: 38707 - protein, 508 aa, Bradyrhizobium japonicum USDA 110
MAEILFELAGISKSYPGVMALDDVSLRVYRGEVLGLIGENGAGKSTLMRVLGGVIAPTQGVIRIGGVDRARMTVSEATQAGIAFVHQELNLFENLDVAANVFIGREKLVGGPLKLVDNAEMRARVTPLLERLGADFAPDTLVDNLSIAERQMVEIAKALSIDARVIIMDEPTSSLTISETERLLEVIADLKAHGIAVIYISHRLGEIMTCADRVVVLRDGRTVGELARDELSHAAMIRLMIGRDLKALHTPPKRPPQPGGCDILGLVTSAFPDRQIDLSVRHGEILGLAGLVGAGRTSLARAAFGIDPLLGGEIRIDNAPVDVASPRDAIRQGIYLMPEDRKKSGLVLELPIRENVTLASLLNYARMWLVSGAAERKVAKEQVRRLSIKAPSVDIEAVTLSGGNQQKVVLGKWLSMQPRVMFFDEPTRGVDVGAKSEIYALMRELADHGVAIVMISSDMEEVIGVSDRIAVMHEGSVSGVLERPQFSEYNVLQLAMGQAPETVEAAAP

SEQ ID NO: 38708 - DNA, 1524 bp, Bradyrhizobium japonicum USDA 110
  CDS (1)..(1524): transl_table=11
atgagcgacgcgcttccgatcgaggtcacctcacccacgccgctgctcgagctgcgcggcatcagcaaggagtttcccggcgtcaaggcgctggatgacgtgtcctttgccgtcttccccggcgaagtccatatgctgctgggggagaacggcgccggcaagtcgagcctgatgaaggtgctgtgcggcgcctaccgcgccgatgccggcgagttctactacaagggcgagaaggtcgcgatcggctcggccgcggatgcacagaagctcggcattgccgtgatcttccaggagttctcgctggtcccccatctcgacatcgcccagaacatcttcctcggccgcgagccgaagggccgcatccccggcacgatcgaccggagcaagatcctcgccgacgccaaacgcgtgctcggcaccatcggcttcgacatcgatccctccacgatcgtggacaagctcggggtggcgcagcagcagatggtcgagatcgccaaggcgatcagccagaacgcacgcatcctcgtcatggacgagccgaccgcggcgctgtccgaccgcgagaccgagctcctgttcgcgctgatcgcgcggctgaaagccgacggcgtgtcgatcgtctatatctcgcaccgcatggcggaggtgttcgcgctcggcgatcgcatcacggtgctgcgcgacggccgccgcatcgacggcgtccgcccggccgacgtcacgccggaccagctcgtccgcatgatggtcggacgcaccgtcgacatgacctatccgcgcaatttcgccgacaagcccggcgaggtactgctgcaggtcaagggcctgagctcctcgaccgggatctccgacatcaacatcgaggtgcgccggggcgagatcgtcggcctgtgcggcctggtcggctccggccgcagcgaagtcgcgcgcgccatcttcggcgccgatcccgtcagctccggcgagatcatcttcgacggcaagaccatctccggcgagcctgatctcgccgcccgccgcggcatcgcgctgatcccggagagccgcaagagcgagggcctcgctctgctgcggtcggtgagcgacaatctggtggtgtcggcgctgcgaaaactgttcccgagcggactgttcgaccagcgttcggcgcagcgcacctccgacggcctgatccggcagctgaggatcgcgacgcccagcgcgcgccagaccgtcggcctgctctcgggcggcaaccagcagaaggtcgtgatcggcaagtggctggccgccggctcgaagctcttcatcttcgacgagccgacgcgaggcatcgacatcggcgccaagtccgagatttttgcgctgatcgaccgcctggtcgcggaaggcgccgccgcactgatgatctcgtccgagcaggtcgagatctgccatgtctgcgaccgcgcctatgtgatgcgcgagggccgcatcgcgggacacctgacgcgcaacgaactgaccgaggagaacatcgtgcgactggggatgcatcatgcgtga

SEQ ID NO: 38709 - protein, 507 aa, Bradyrhizobium japonicum USDA 110
MSDALPIEVTSPTPLLELRGISKEFPGVKALDDVSFAVFPGEVHMLLGENGAGKSSLMKVLCGAYRADAGEFYYKGEKVAIGSAADAQKLGIAVIFQEFSLVPHLDIAQNIFLGREPKGRIPGTIDRSKILADAKRVLGTIGFDIDPSTIVDKLGVAQQQMVEIAKAISQNARILVMDEPTAALSDRETELLFALIARLKADGVSIVYISHRMAEVFALGDRITVLRDGRRIDGVRPADVTPDQLVRMMVGRTVDMTYPRNFADKPGEVLLQVKGLSSSTGISDINIEVRRGEIVGLCGLVGSGRSEVARAIFGADPVSSGEIIFDGKTISGEPDLAARRGIALIPESRKSEGLALLRSVSDNLVVSALRKLFPSGLFDQRSAQRTSDGLIRQLRIATPSARQTVGLLSGGNQQKVVIGKWLAAGSKLFIFDEPTRGIDIGAKSEIFALIDRLVAEGAAALMISSEQVEICHVCDRAYVMREGRIAGHLTRNELTEENIVRLGMHHA

SEQ ID NO: 38710 - DNA, 1587 bp, Bradyrhizobium japonicum USDA 110
  CDS (1)..(1587): transl_table=11
gtgtccgcagcatcagcggacgccggtgggagtgacgtcgttatggagaacagccccgatcctgctccgccccttctggaggtgcgcgggatcagcaagagcttcggcgctgtgcgtgcgttgcaggaggtcgacttcacgcttcgcgccggcgagatccatgcgctgctcggcgagaacggcgccggcaagtccacgctgatcaaggtcgtcaccggcgtattcccgcgcgacgccggcatcgtcaggctcggcggcgaggaggtcgcgccgcgctcggccaaggccgcgcttcaggccggcatcgctacggtctaccaggaggtcaatctgctgccgaatctctcggtggcgcagaacctgtttctcgaccgccagccgatgcgcttcggcatcgtgcgcgacggcgagatgcgccgccgcgccaaagcgctgctcgcggagttcggcctcgacatcgacgtatcagcgccgctcggcagctattccgtcgccgtgcagcatgtcaccgcgattgcgcgcgccgtggatctgtccgcgcgcgtgctgatcctggacgagccgaccgcgagtctcgaccgtcacgaggtcgagatcctcttcggcatcatgcgccaactggcgaaacgcggcatcggcatcgtcttcgtcagtcatttcctcgaccaggtctacgagatctccgaccgcatcaccgtcttgcgcaacggccgcctggtcggcgaacgcgagaccgcctcgctgccgcggatcgagctgatccgcatgatgctcggccgcgaactggccgagaccaccggcgcgcgggcggcgacacgcgagcatcaggcgcgcgagatctgcgcgagcttcgagaattacggcaaatccggctatgtcgcgccgttcaatctcgagctgcgccatggcgaggtcgtcggcctcgccggcctgctcggctcgggtcgcaccgagacggcgcggctggtgttcggcgccgagcgcgccgatcgcgggcaggcgaaggttgaaggcgcgcccgtgcggctgcactcgccgcgcgacggcgtgcgccacggctttggctattgcccggaggaacgcaagaccgacggcatcgtcgccgagctcagcgtgcgcgagaacatcgtgctggcgctccaggccaaacgcgggctgcatcggccgctgtcgcgccgcgagcaggacgagatcgcgcgccgctacgtcaggatgctggacatccgtccgtccgatccggagcgcccggtgggcctgctctccggcggcaatcagcaaaaagtgctgctggcgcgctggctcgcgacctcgccgcggctgctggtgctggacgagccgacccgcggcatcgacgtcggcgcgcatgccgagatcatccgccttatccgcgacctctgcgacgacgggctctctctgctcgtgatctcctcggagctggacgagatcgtgacctattcggatcgggtcgtggtgctgcgcgaccgcgcccatatcgaggagctcgcgggcgaggcgatcgacgtcggcaacattctcgcggccatcgcggccgacggcgccgccacagcgcatgaggggcgggcatga

SEQ ID NO: 38711 - protein, 528 aa, Bradyrhizobium japonicum USDA 110
MSAASADAGGSDVVMENSPDPAPPLLEVRGISKSFGAVRALQEVDFTLRAGEIHALLGENGAGKSTLIKVVTGVFPRDAGIVRLGGEEVAPRSAKAALQAGIATVYQEVNLLPNLSVAQNLFLDRQPMRFGIVRDGEMRRRAKALLAEFGLDIDVSAPLGSYSVAVQHVTAIARAVDLSARVLILDEPTASLDRHEVEILFGIMRQLAKRGIGIVFVSHFLDQVYEISDRITVLRNGRLVGERETASLPRIELIRMMLGRELAETTGARAATREHQAREICASFENYGKSGYVAPFNLELRHGEVVGLAGLLGSGRTETARLVFGAERADRGQAKVEGAPVRLHSPRDGVRHGFGYCPEERKTDGIVAELSVRENIVLALQAKRGLHRPLSRREQDEIARRYVRMLDIRPSDPERPVGLLSGGNQQKVLLARWLATSPRLLVLDEPTRGIDVGAHAEIIRLIRDLCDDGLSLLVISSELDEIVTYSDRVVVLRDRAHIEELAGEAIDVGNILAAIAADGAATAHEGRA

SEQ ID NO: 38712 - DNA, 1701 bp, Bradyrhizobium japonicum USDA 110
  CDS (1)..(1701): transl_table=11
gtgaggggctctctccacacgggcagttacccttgcggagactccccctcacccgatcgctacgcgatcgacctctccccgcaagcggggagaggtgaagtcagcgaccaagggacaacgacgatgaccgccatgctggagatgcgcaacgtcagcaagagctttgccggcgtccaggcgctgcgcgacgtcaacttctcggttcacgccgggcagatccacgcgcttgtcggcgagaacggcgcaggcaagtccacgctgatgaaggtgctcagcggcgtctatccgcacggcagctacgagggcaccatcatcttcgagggcgaggagcgccgcttccgcgacatcaacgattccgaggcgctcggcatcatcatcatccaccaggagctggcgttgatcccgttgatgtcgatcgccgaaaacatcttcctgtcgcatccgccgtcgaaattcggcgtgatcgaccgcgacgaggtgtaccggcgcacgcgcgagctgctggcgcaggtcggcctgagggaatcgccggatacgctgatcaccgacctcggcgtcggcaagcagcagctggtcgagatcgccaaggcgctgtccaagcgggtgcggatgctgatcctggacgagccgaccgcgagcctcaacgaagccgatagtgccgcattgctcgaacgcctgatggcgttccgcgagcagggcatcggctcgatcctgatctcgcacaagctcaacgaggtggccaaggtcgccgaccacatcaccgtgctgcgcgacggccgcaccgtcgacagcatcgactgccgtgccgagccgatccaggaagaccgcatcatccgcagcatggtcaaccgcgatctcgcccatcgcttccccgagcgcagcgtgaagatcggcgagcccgtgctcgccatcgagaactggtcggtctatcaccccattcatcccgagcggcaggtcatcaagaacgtcaatttcggcgtcaagcgcggcgaggtcgtcggcatcgccgggctgatgggcgccggccgcaccgaattcgccatgagcctgttcggccgctcctggggcaccaatatcagcggctcgatccggctcgaaggcagggagatcgtgctgccgagcgtcgccgccgcgatcgacgccggccttgcctatgtcaccgaggaccgcaagcagctcgggctgatcctcgccgacgacgtccgcaagaacatcacgctcgccagcctcgaccaggtcgcgccggggagggtgatcgacgacatcgccgagctgaaggttgccagcgactacaggaaccgcatgcgcatccgctgctcggacgtctaccaggagaccggccagctctccggcggcaaccagcagaaggtggtgctgtcgaaatggctgatgaccgaccccaaggtgctgatcctggacgagccgacaaggggcatcgacgtcggtgccaaatacgagatttactgtatcatcaacgagcttgcggaggccggccgcggcgtcgtggtcatctcctcggagatgcccgagctgctcggcatctgcgaccgcatctgcgtgatgaacgacggcgctttcgtcggcgagttctccggcacggaagcgacgcaggagaagatcatgcgcgccatcatgcgcaaccagagaagcaacggaaacggcgtgcctgaggccgcggagatgggaggattgcagccatga

SEQ ID NO: 38713 - protein, 566 aa, Bradyrhizobium japonicum USDA 110
MRGSLHTGSYPCGDSPSPDRYAIDLSPQAGRGEVSDQGTTTMTAMLEMRNVSKSFAGVQALRDVNFSVHAGQIHALVGENGAGKSTLMKVLSGVYPHGSYEGTIIFEGEERRFRDINDSEALGIIIIHQELALIPLMSIAENIFLSHPPSKFGVIDRDEVYRRTRELLAQVGLRESPDTLITDLGVGKQQLVEIAKALSKRVRMLILDEPTASLNEADSAALLERLMAFREQGIGSILISHKLNEVAKVADHITVLRDGRTVDSIDCRAEPIQEDRIIRSMVNRDLAHRFPERSVKIGEPVLAIENWSVYHPIHPERQVIKNVNFGVKRGEVVGIAGLMGAGRTEFAMSLFGRSWGTNISGSIRLEGREIVLPSVAAAIDAGLAYVTEDRKQLGLILADDVRKNITLASLDQVAPGRVIDDIAELKVASDYRNRMRIRCSDVYQETGQLSGGNQQKVVLSKWLMTDPKVLILDEPTRGIDVGAKYEIYCIINELAEAGRGVVVISSEMPELLGICDRICVMNDGAFVGEFSGTEATQEKIMRAIMRNQRSNGNGVPEAAEMGGLQP

SEQ ID NO: 38714 - DNA, 1503 bp, Bradyrhizobium japonicum USDA 110
  CDS (1)..(1503): transl_table=11
atgcgagaggatcgttcgcccatcctggaactgcaaggcatcacgaagagcttcggcggcgtcgaggcgcttcgtggtgtcgacttcgcgcttcatcccggcgagatccacggtctcgtcggcgagaacggcgccgggaaaagcacgctgatgaagatcatcgccggcgtgcacaccgaattctccggccgtttcctgctcgacgggaaggagacccatttccgctcgacgcgcgacgcgcatgcggccggcatcgccatggtgcaccaggagctctctgtcgcgcccgacctcacggtcgcggagaacgtcttcctcggcaaccaaccgaccaacgccctcggtctggtgcagtggcggcgcatggcgcgcgaggccggcgagcagcttgcccgcttcggcatcgacgtcgatccgatgagccggctcggcgacctcccgatcgggctccagcagctgatcgagatcgcccgcgtgctgttctccggcgcccgcatcgtcatcctggacgagccgacctccgccctctccccgcccgaggtcgagcggctgttcgcgacgctccggcgccttcgcgaggaaggcaccgcaatcgtcttcatctcgcatttcatcgaggacatcttgctcgtgtcggacacggtgaccgtgttccgcaacggacggaagatcgcggagacagcgagcgcggcgaccagcaagggcgcgctgatcgaggccatgatcggccgcggcggcgaagcgctcgagcatagctacaccgatgatctgatgctgccgcagccgagcggcagctcggtggtgctgaaggtcgaccagctctcgctggcgcgcagcctgaaggacatctccttcgaggcgcgcgccggcgaggtgctcggcatctacggcttcatgggttgcggacagcaggagctgtcgcgcatcctgttcggcaagctgaagccggacggcggcacgctcgccgtcgagggcaaacccaagaccttcgccagcacggcggctgcgcgccgcgcgggcgtcgcgctggtgccggagagccggcgcgacatgctgtttcaccaggagccggtctacaagaacatctcgatcagcattctggatcgcatctcgtcgctgctgctcaagccggcacaggagcgcgacatcgccaggcgccaggtcgagcaattgcagatcaggccgccggtggtcggcctcgatctcggcatgctctccggcggcaaccagcagaaggtcgcgctggcgaaatggctgacctatccgccaaagctgctggtgctgtgcgagccgacccgcggcatggacgtcggcgccaagaacgacgtcatcaacatcgtccgtgacctccgcgccagggggctcgcgatcatcgtgctgtcgaccgagccggagacggtgctgtcgctggccgaccgcatcctcgtgctcaagcgcggcgcactggtgcgggaattttcgaacgagccggtcagcaaggaccgcctgctggaagcggcgtga

SEQ ID NO: 38715 - protein, 500 aa, Bradyrhizobium japonicum USDA 110
MREDRSPILELQGITKSFGGVEALRGVDFALHPGEIHGLVGENGAGKSTLMKIIAGVHTEFSGRFLLDGKETHFRSTRDAHAAGIAMVHQELSVAPDLTVAENVFLGNQPTNALGLVQWRRMAREAGEQLARFGIDVDPMSRLGDLPIGLQQLIEIARVLFSGARIVILDEPTSALSPPEVERLFATLRRLREEGTAIVFISHFIEDILLVSDTVTVFRNGRKIAETASAATSKGALIEAMIGRGGEALEHSYTDDLMLPQPSGSSVVLKVDQLSLARSLKDISFEARAGEVLGIYGFMGCGQQELSRILFGKLKPDGGTLAVEGKPKTFASTAAARRAGVALVPESRRDMLFHQEPVYKNISISILDRISSLLLKPAQERDIARRQVEQLQIRPPVVGLDLGMLSGGNQQKVALAKWLTYPPKLLVLCEPTRGMDVGAKNDVINIVRDLRARGLAIIVLSTEPETVLSLADRILVLKRGALVREFSNEPVSKDRLLEAA

SEQ ID NO: 38716 - DNA, 1524 bp, Bradyrhizobium japonicum USDA 110
  CDS (1)..(1524): transl_table=11
atgaacgatccgatcctcgagatgcgcggggtctcgaaaagcttcttcggcatcaaggcgctgcgtgccgtcgatctcaccgtctatcccggcgaaatccatgccctgatgggcgagaatggcgccggcaaatcgactctgatgaagatattgtccggcgcctaccggcccgatccgggcggagagatccgcatcgaaggcaggccggtgcggatcgaaggcccgctcggcggccgcgccgcgggcatctccatcatctatcaggagctgtctttggctcccaatctcagtgtcgcggagaatatttatctcggccgcgagatctcgcgctcgggcttgctggcgcgcggcgccatgcgccagggcgtcggccccatcctggaacggctgggcgcggacttccagccatcgacattggtggcgcatctgtcgatgggccagcgccagctcgtcgagatcgcgcgtgcgctgcacgcgaggtcgaaaatcctgatcatggacgagccgaccactgcgctgtcggccggcgagagcgaacggctgttcgcgctgatccgtcagctccgcgccgaggggctcgccatcatctacatctcgcatcgcatggacgaggtctacgcgctcggcgaccgcgtcaccgtcttgcgcgatggccgtctcgtgggctcgctcgacaagccggaaatccgggccgataccatcgtgcggctgatggtggggcgcgacgtctcctctttctacaagaaggaccatgacccggaggcggggcggggacaccctgtgctctgtgcgatcgacatgtctgacggccggcgcgtcaagggctgctcgctcaccgtgcatgccggcgaggtagtggggcttgccggcctgatcggtgccggacgcacggagcttgcgcatctcatcatcggcgcggcggcaaaaacgtcgggccgtctcgaactcgaaggccgcccgatcgacatccgcacgcccggcgaggcgctcgaggccggcatcgcctatctgacggaggacaggaaggcgctcggcctgtttctcgacatgtcatgcctggacaacatcaatctcgcggtgctcgggcgcgatgcgaagcttggctggttcctggatggtgacaaggcgcgcgagcgcgccgacagggccttcgcggggctcagcatccgcgcggccaatgtcggcgtgccggccgggggcctgtccggcggcaaccagcagaaggtgctcttgtcgcggcttctcgccatcgcgccaaagatcctgatcctcgacgagccgacgcgcggcgtcgatgtcggcgcgaagtcggagatctattcgatcatcgacaatctcgccaaggccggcacagcgatcctcgtcatctcgtccgacctgccggagatcatcggcatctgcgatcgcgtcatcgtgatgcggtcgggacacatcgcaggcgaggtcagccgaaccgagacggcgccgctcaatcaggaggatatcatggcacttgctacggggatggagcatctcgatgcctga

SEQ ID NO: 38717 - protein, 507 aa, Bradyrhizobium japonicum USDA 110
MNDPILEMRGVSKSFFGIKALRAVDLTVYPGEIHALMGENGAGKSTLMKILSGAYRPDPGGEIRIEGRPVRIEGPLGGRAAGISIIYQELSLAPNLSVAENIYLGREISRSGLLARGAMRQGVGPILERLGADFQPSTLVAHLSMGQRQLVEIARALHARSKILIMDEPTTALSAGESERLFALIRQLRAEGLAIIYISHRMDEVYALGDRVTVLRDGRLVGSLDKPEIRADTIVRLMVGRDVSSFYKKDHDPEAGRGHPVLCAIDMSDGRRVKGCSLTVHAGEVVGLAGLIGAGRTELAHLIIGAAAKTSGRLELEGRPIDIRTPGEALEAGIAYLTEDRKALGLFLDMSCLDNINLAVLGRDAKLGWFLDGDKARERADRAFAGLSIRAANVGVPAGGLSGGNQQKVLLSRLLAIAPKILILDEPTRGVDVGAKSEIYSIIDNLAKAGTAILVISSDLPEIIGICDRVIVMRSGHIAGEVSRTETAPLNQEDIMALATGMEHLDA

SEQ ID NO: 38718 - DNA, 1494 bp, Bradyrhizobium japonicum USDA 110
  CDS (1)..(1494): transl_table=11
atgcagcccattctggaaatccgcaacggaacgaagctgtttggaaggatccccgccttccaggaagtcgatttcgccgtttcgccgggagaggttcacgccattctcggcgagaacggtgccggcaagtcgacgctgacgaaggttcttgccggcgtctacaagctcacgtccggagagatgctcctgaacgggacgccggtgcatttgtcgacgcctgccgaaggcctgaagcagggtgttgtcatggtctaccaggagaccaatctcgtgccgtcgatgacggtggcgcagaacatctacctaggcgaggagaaggtgttcaataggctgcggggactctacatccaggcccgacaattcctggctggcatgggattccaggtcgatcccacggcacaggtctcgcagctcggagcggcgcaaaagcagatggtggagatcgcgcgcgccgttcatcacaaggcgaaggtgatcatctttgacgaaccgacggcgacgctcacgccggaggagaagcggcacttcttcaacctgatccggcgtcttgtggccgacaaggtcgcgatcatcttcatttcgcacgcgcttgaagaggcgatgcagttggccgatcgcattacaattctccgggacgggcggcttgtcgcatcggatgtcaaggagacgttcacgcgcgatacggtcatccaggcaatggtcggacgaaacctgaccgagacgttgcatggcgaccacggccgcccgcccaggccgtatggtgaacgggtgctcagcgtggagaatttgtcttcgggcacgatggtccgcaacacgtcattctctatcttcgcaggacaggtgacgggtgtcttcgggctgatcggcgccggtcgcaccgaaatgatgaaggtggtcgctggcgtgttgaagcgggacatcttccatggtggcgagatcaagtatcgcggcaaatcggtccgctaccgggttccgcggatggcggtccgcgagggcatcgtctacgtcacggaagaccgcaagttcgacggttttttcgagacaatgacggtggccgagaacctgcatctgggcgagctctcgcgcttctcgaacccgctgtccgtgatctcgatgacacaggcgaaggagctggcgcgacaatgggccgggcggcttcagcttcggtcgatcaatgaaaaggccagggtgatcgaactctccggcggcaaccagcagaaggtcgtcatcgcgcggtcgctcatccagaagcccaggctgatcatcttcgacgagccgacccgcggtgtcgacgtcggcgccatcgtcgagatccaccagttcatcaatagcctggctgacgacggtctcgccgtggtcgtgatctcctcctacctgcccgaggtcctggcactctcggaccgcatcctggtcgcaaagcggggcaagatcgtcgaagagatcaagacagccgaggcaaccgagcagcagatcatgtacgccgccgtccactag

SEQ ID NO: 38719 - protein, 497 aa, Bradyrhizobium japonicum USDA 110
MQPILEIRNGTKLFGRIPAFQEVDFAVSPGEVHAILGENGAGKSTLTKVLAGVYKLTSGEMLLNGTPVHLSTPAEGLKQGVVMVYQETNLVPSMTVAQNIYLGEEKVFNRLRGLYIQARQFLAGMGFQVDPTAQVSQLGAAQKQMVEIARAVHHKAKVIIFDEPTATLTPEEKRHFFNLIRRLVADKVAIIFISHALEEAMQLADRITILRDGRLVASDVKETFTRDTVIQAMVGRNLTETLHGDHGRPPRPYGERVLSVENLSSGTMVRNTSFSIFAGQVTGVFGLIGAGRTEMMKVVAGVLKRDIFHGGEIKYRGKSVRYRVPRMAVREGIVYVTEDRKFDGFFETMTVAENLHLGELSRFSNPLSVISMTQAKELARQWAGRLQLRSINEKARVIELSGGNQQKVVIARSLIQKPRLIIFDEPTRGVDVGAIVEIHQFINSLADDGLAVVVISSYLPEVLALSDRILVAKRGKIVEEIKTAEATEQQIMYAAVH

SEQ ID NO: 38720 - DNA, 1497 bp, Bradyrhizobium japonicum USDA 110
  CDS (1)..(1497): transl_table=11
atgagcgacatcatgctctcgctgcgcaaggcgacaaaactctacgccggcgttcccgccatcgacggggtcgacttcgacctgcgccgcggcgagatccacgcgctggtcggcgagaacggtgccggcaagtcgacgctcaccaaggtcatggccggcgtggtgacgctgacctcgggcgccatgacggtcgacggcgcggacgtcgcaccgaggacgccgctggaggcacgcaatctcggcatcgccatggtgtttcaggagaacagcctggtgccgaccatgacggtggcgcagaatttattcctcgggcaggagaagttctataaccgcttgcgcggaatctacatcgccgcgcagcagtttttgcaatcgctcaattttgacgtcacgccgaccgccacggtcagcggtctcggcgcggccaagaagcagatggtggaaattgcgcgcgcggttctgcaccgcgccaaggtcatcatcttcgacgagccgaccgcgtcgttgacgccggaggagaagaagtacttcttcgacctcgtccgcgacctcaggaagcgcggtgtctcgatcgtcttcatctcacatgccctggaagaggccctgctgctcgccgaccgcatcacggtcctgcgcgacggcaagcatgtcgtgaccgacgacgccgccaaattcgaccgcgccgcgatcgtacaggccatggtcggccgcgacctgtcgaacacgctctacggcgcacgcaagcgcagcgtgcggccggccggcccgcgcgtgctcacggtgcagaatttgaagatggcgccgatggtgaagaacaattcgctgtcggtgttcgcagggcagatcaccggcgtattcggcctcgtcggggccggccgcaccgagacgttcaagatcgtctccggcgtgctgaagcgcgacttcttccacggcggcgagatcctgctgcacgacaagccggtgcgctaccgggtgccggcgccggcggtcaaggccggcatcgcctatgtcaccgaggatcgcaaggtcgagggcttcttcgagacgtcctcgatcgcgcgcaacatctatctcgggcttctgtcgaagtttcccaagggccgcatgatgctgtcgcggcgggaaaccgagaccatcggcaagacctggatcgagaagctcagggttcgcgccatcggcgaccacggcaaggtggtcgagctgtccggcggcaatcagcagaaggtcgtgatcgccaaatcgctggtgcaggagcccgacctgatcatcttcgacgagccgacccgcggcgtcgacgtcggcgccatcgtcgagatccacgagctgatcaaccagctggccgacgagggcaaggccgtcgtggtcatctcgtcctatttgcccgagatcatggcgctctccgaccgcatcctggtctcacgccagggcaaggtcgtggaggaattctccgcgctggacgcgacggaagagaggatcatgtacgcggcgatccactag

SEQ ID NO: 38721 - protein, 498 aa, Bradyrhizobium japonicum USDA 110
MSDIMLSLRKATKLYAGVPAIDGVDFDLRRGEIHALVGENGAGKSTLTKVMAGVVTLTSGAMTVDGADVAPRTPLEARNLGIAMVFQENSLVPTMTVAQNLFLGQEKFYNRLRGIYIAAQQFLQSLNFDVTPTATVSGLGAAKKQMVEIARAVLHRAKVIIFDEPTASLTPEEKKYFFDLVRDLRKRGVSIVFISHALEEALLLADRITVLRDGKHVVTDDAAKFDRAAIVQAMVGRDLSNTLYGARKRSVRPAGPRVLTVQNLKMAPMVKNNSLSVFAGQITGVFGLVGAGRTETFKIVSGVLKRDFFHGGEILLHDKPVRYRVPAPAVKAGIAYVTEDRKVEGFFETSSIARNIYLGLLSKFPKGRMMLSRRETETIGKTWIEKLRVRAIGDHGKVVELSGGNQQKVVIAKSLVQEPDLIIFDEPTRGVDVGAIVEIHELINQLADEGKAVVVISSYLPEIMALSDRILVSRQGKVVEEFSALDATEERIMYAAIH

SEQ ID NO: 38722 - DNA, 1545 bp, Clostridium tetani E88
  CDS (1)..(1545): transl_table=11
atggaaaaagttgttgaaatgaagggaataacaaaggtttttcctggaaccatagctaatgaagatgtagattttgaacttaaaaaaggagaaattcatgttcttttaggagaaaatggtgcaggtaaaaccactcttatgaatatactttatggattatatcaacctgaaggtggagaaatatatataaaaggacagaaagcaaaccttaaaaatcctaaagatgcaataaaattaggggttggaatggttcatcaacattttatgttggttcataattttacagtggcggaaaatatgattttaggtcaagaacctaaaaaaggaagcctaaaaatagacatagaaaaggctaaaaaagaaactaaggaattagcagataaatatggatttaatataagtcctgatgatattgtagaagatataactgtaggtcaacaacaaaaggttgaaatattaaaagctctttatagaggagcagaaatactaatattagatgagccaacagcagtattaacacctcaagaaatagaggagttaggaaagatacttaaaaacttagtaaaagaaggaaaatctataatcttaataactcataaattaaaagaagttatgagtatgagtgacagggttacagtaataagaagaggaaaatacatagatacagtaaaaactaaagataccgacatagacggtttagcagaacttatggtaggaagaaaggtaaatttagtaatagaaaaagaagaaactaagttaggagaatctatattaaaaatagaaaatctaaaagctaaagatcaaagaggattacctgctcttaaaggagtaaatttggaattaagagaaggggagatactaggtattgcaggagtagatggaaatggtcaaacagagttaatcgaaactatagttggcttgagaaaatctacagaaggaaatatatatttaaaaggcgaaaatataacaggaaaaactactaaagaaataacagaattaggtatagcccatgtaccagaagatagacataaaagagggttggttcttggatactctttagtagaaaattctgttttaggtattcatgataaagctccttttgctaaaggtattattatggattatgataaaataagagaacattccaaaaaacttatagaaaactttgatgtaagaactcctaatgaggatgtagttgcatcatcactatctggtggtaaccaacaaaagctcatagtagcaagagaaatagaaaaagatcctgcaatgataattgcagttcagcctactagaggattggatgtaggggctatagagtatatccacaaaagattagttggagaaagagatagaggaagaggagttttattggtatccttagagttagatgaagtaatgtctttatctgatagaattgcagtaatgtatgaaggtgaaattgtagatgtattggatgcaaaggatgccacagaacaaaaacttggaattcttatggcaggaggaactttaaaaaaagaaaaagaaggaggggcaaaacttgagtaa

SEQ ID NO: 38723 - protein, 514 aa, Clostridium tetani E88
MEKVVEMKGITKVFPGTIANEDVDFELKKGEIHVLLGENGAGKTTLMNILYGLYQPEGGEIYIKGQKANLKNPKDAIKLGVGMVHQHFMLVHNFTVAENMILGQEPKKGSLKIDIEKAKKETKELADKYGFNISPDDIVEDITVGQQQKVEILKALYRGAEILILDEPTAVLTPQEIEELGKILKNLVKEGKSIILITHKLKEVMSMSDRVTVIRRGKYIDTVKTKDTDIDGLAELMVGRKVNLVIEKEETKLGESILKIENLKAKDQRGLPALKGVNLELREGEILGIAGVDGNGQTELIETIVGLRKSTEGNIYLKGENITGKTTKEITELGIAHVPEDRHKRGLVLGYSLVENSVLGIHDKAPFAKGIIMDYDKIREHSKKLIENFDVRTPNEDVVASSLSGGNQQKLIVAREIEKDPAMIIAVQPTRGLDVGAIEYIHKRLVGERDRGRGVLLVSLELDEVMSLSDRIAVMYEGEIVDVLDAKDATEQKLGILMAGGTLKKEKEGGAKLE

SEQ ID NO: 38724 - DNA, 1515 bp, Clostridium tetani E88
  CDS (1)..(1515): transl_table=11
atggtggaaaataatattatcttagaaatgaatggtatttccaaaaatttccctggtgtaaaggctttagatggagtagatttaaaagtaaaaaaaggaacagtacatgctttaatgggggagaatggagctggaaaatctacacttatgaagtgtctctttggcatatatagatcggatgatggggaaatagttttaggtgggaaaaaagtacagtttaaaaatgcaaaagatgcactagaaaatggaatttctatgattcatcaagaacttcatccagtaccacatagaagtgttatggagaatgtgtggttaggtagatttcctgtaaaaaaggtatttggattgggcattgttgaccataaaaagatgtatgaagatacaaaggatttattaggtaaattgaaaatgaatatagatccaaatacattagtttccaaattatcagtatcacaagttcaaggtttagaaattgcaaaggctgtttcttataattccaaaataatagttatggacgagccgacttcttctttaacagagaatgaggttactcatctttttaatataattagtgatttaaaaaatcaaggagtagcaattatatatatatctcataaaatggaggaaattttaaaaattgctgatgaagtaactataatgagggatggtaagtatatagggacttgggaagcagaagggcttacaacggatttgattatatcaaagatggtaggaagagatttaacaaatagatttccacctaaagaaaacaccccaggtgaagttataatgaaagtagaaaatttaacttcagctaataacaaatcctttaaagatataagttttgaactaagaaagggagaaatattaggaattggaggcttagttggagctcaaagaacagaacttgttgagtctatatttggattaaggaaaatagaaacagggaaaatatatataaatggacaagaagttaaaattaaaagtcctataaatagcaagaaatatggtattgctttgttaacagaagagaggcgctcaactggaatttttccagtattaacagtaggtgacaatactataatagcaggtttagataaatacattgatttaaaatttgttgtaaatcaaaaaagaggaatgaaagatattaaaaacagtatagaaaaacttaatataagaacaccttctcatgctactcaaataaaaaatctttctggtggaaatcaacaaaaagttattttttcaagatggttacttacagaaccagatgtattaataatggatgagcctacaagaggaatagatgtaggtgctaaatatgaaatatatagtataatatctgacctatcaaaaatgggaaagagtattataatgatatcttctgaaatgcccgaattaattggaatgtctgacagaataatgataatgtgtgatggaagattaagcggaataatagagggtgaagaagctacccaagaagaaataatgaaatatgctactcgatttatttag

SEQ ID NO: 38725 - protein, 504 aa, Clostridium tetani E88
MVENNIILEMNGISKNFPGVKALDGVDLKVKKGTVHALMGENGAGKSTLMKCLFGIYRSDDGEIVLGGKKVQFKNAKDALENGISMIHQELHPVPHRSVMENVWLGRFPVKKVFGLGIVDHKKMYEDTKDLLGKLKMNIDPNTLVSKLSVSQVQGLEIAKAVSYNSKIIVMDEPTSSLTENEVTHLFNIISDLKNQGVAIIYISHKMEEILKIADEVTIMRDGKYIGTWEAEGLTTDLIISKMVGRDLTNRFPPKENTPGEVIMKVENLTSANNKSFKDISFELRKGEILGIGGLVGAQRTELVESIFGLRKIETGKIYINGQEVKIKSPINSKKYGIALLTEERRSTGIFPVLTVGDNTIIAGLDKYIDLKFVVNQKRGMKDIKNSIEKLNIRTPSHATQIKNLSGGNQQKVIFSRWLLTEPDVLIMDEPTRGIDVGAKYEIYSIISDLSKMGKSIIMISSEMPELIGMSDRIMIMCDGRLSGIIEGEEATQEEIMKYATRFI

SEQ ID NO: 38726 - DNA, 1506 bp, Clostridium tetani E88
  CDS (1)..(1506): transl_table=11
atggaatctaacatagtactctcaatggaggacataactaaaagttttccaggagtaaaagctttaaaaaatgcaaatttagaattgagaaaaggagaagtacacgttcttctaggtgaaaatggtgctggaaaatctacactaatgaaaatattgggcggggtttatacaaaagattcaggaaagatatatctagaaggtgaagaaaccgaaatagttagtgttaatgaagccaaagcaaaagggatatcaataatattccaagagttaaacttaattgaccacttaactgttgctgaaaatatttttattggaaatgagaatttaaaaaataaaaaactaaaaattgtagactacaagaccatgaatagtaaaacagagagcatattaagagaactagatatagaagtaaaaccaaatgaattagtgaaaaatctaagtattggacaaaaacaaatgattgaaattgctaaatcagtttcttttgatgcgagaataatagttatggatgaacctacgtcatctttaactgataaggaatgtgaaaaactatttcaaattgtaaataaactaaaaaaacaaggtgttgcaatagtctatatatctcataaatttgaagagtttaaatatattgccgacagaattacaataatgagagacggagagtatgtaaaaactgtagaatttaaaaatacatcagaagatgaattagtaaaattgatgataggaagagagcttggtaatagatttagtgatgaatatattaaaaaaggagaaattatattcaaagctgaaaacatagttactaataaaatcaacaatgtttcatttgaagttagagcaggagaaatagttggactatacggtcttatgggaagtggaagaactgaaaccgcaatggctatatttggatatgataagataaagtctggcaaattatatattgaaaataaagaagtgaaaattaaacatccaaaagatgctgttagggcaggaatagcttatgtaagcgaagatagaagaaatcttggagtagtagttggttttagtgtaggtgaaaatattagtttatcaagtatggataaggtttctagtagtggagtaataagtgaaaaagaagaaaaagaagtagcaaataaatttatagaaagcttaaagataaaaactccaagcgccttacaaaaagtgaaaaacttaagtggaggtaatcaacaaaaagttgccatagcaaaatggcttcagagaaatagtaaaatttacatatttgatgaaccaacaaggggtatagatattgggtctaaggcggaaatatataaattaataaaggacttagcaaaaaaaggacatgctataatacttatatcttctgaaatgcctgaaattataggattatcagatagaatagttgtcatgagtaatagctgtgtgtctggttctattgaaaatgatatacaaaataaaaaagatgtagaagaaaaaataatgaaatatgcaataggaaagtga

SEQ ID NO: 38727 - protein, 501 aa, Clostridium tetani E88
MESNIVLSMEDITKSFPGVKALKNANLELRKGEVHVLLGENGAGKSTLMKILGGVYTKDSGKIYLEGEETEIVSVNEAKAKGISIIFQELNLIDHLTVAENIFIGNENLKNKKLKIVDYKTMNSKTESILRELDIEVKPNELVKNLSIGQKQMIEIAKSVSFDARIIVMDEPTSSLTDKECEKLFQIVNKLKKQGVAIVYISHKFEEFKYIADRITIMRDGEYVKTVEFKNTSEDELVKLMIGRELGNRFSDEYIKKGEIIFKAENIVTNKINNVSFEVRAGEIVGLYGLMGSGRTETAMAIFGYDKIKSGKLYIENKEVKIKHPKDAVRAGIAYVSEDRRNLGVVVGFSVGENISLSSMDKVSSSGVISEKEEKEVANKFIESLKIKTPSALQKVKNLSGGNQQKVAIAKWLQRNSKIYIFDEPTRGIDIGSKAEIYKLIKDLAKKGHAIILISSEMPEIIGLSDRIVVMSNSCVSGSIENDIQNKKDVEEKIMKYAIGK

SEQ ID NO: 38728 - DNA, 1518 bp, Clostridium tetani E88; identical to SEQ ID NO: 27266
  CDS (1)..(1518): transl_table=11

SEQ ID NO: 38729 - protein, 505 aa, Clostridium tetani E88; identical to SEQ ID NO: 27267

SEQ ID NO: 38730 - DNA, 1557 bp, Tropheryma whipplei str. Twist; identical to SEQ ID NO: 27272
  CDS (1)..(1557): transl_table=11

SEQ ID NO: 38731 - protein, 518 aa, Tropheryma whipplei str. Twist; identical to SEQ ID NO: 27273

SEQ ID NO: 38732 - DNA, 1557 bp, Tropheryma whipplei TW08/27; identical to SEQ ID NO: 27276
  CDS (1)..(1557): transl_table=11

SEQ ID NO: 38733 - protein, 518 aa, Tropheryma whipplei TW08/27; identical to SEQ ID NO: 27277

SEQ ID NO: 38734 - DNA, 1554 bp, Pseudomonas syringae pv. tomato str. DC3000
  CDS (1)..(1554): transl_table=11
atgtcagcgtctgctcagacagctgttctttcggtcagtggcatcggcaaaacctacgctcaacccgtgctcggtgacgtcgacctgacgttgatgcgtggcgaagtgctggccctgaccggggaaaacggtgccggtaaaagcaccttgtcgaaaatcattggcggcctggtcacgccgactaccgggcgcatggagtttcaggggcagccttatgaacctgcgagccgcacccaggctgaaaagctcgggattcgcatggtcatgcaggaactcaacctgctgccgaccctgaccgtcgccgaaaacctgtttcttgacgatctgccgcgtcgcgcgggctggatcgatcgcaagcgtctgcgtgaaaacgcaatcaaagccatggcccaagtcgggctggatgccatcgaccctgacacactggtgggcgagctgggtattggccatcagcagatggttgaaatagcccgcaatctggtcggcgactgccacgtgctgatcctcgacgaacctaccgccatgctcacctctcgcgaagtagaaatgctgttcgagcagatcacgcgcctgcaggcgcgtggcgtttcgatcatctacatctcgcaccggcttgaagagcttgccagagtttcccagcgcatcgcagtgctgcgcgatggcaagctggtctgtgtcgagccgattgcccgctacaacagcgagcaactggtgacgctgatggttggccgcgaactgggcgagcacatggacatgggcgctcggcagattggcgaagtggccctgtcggtcaaggggctcagtcgtaccggcaaggttcaggatgtttcgttcgatgtgcgacggggtgaaatctttggcatctccgggctgattggtgccggacgaaccgaattgctgcgcctgatctacggcgcggacatcgccgacagcggcgcaatcgaagtgggccagccattgcaggccgtcaccattcgctcgccggccgacgctgtggcgcatggcattgcgctgatcaccgaagaccgcaaaagcgaaggtctgctgatgtcgcaatccatcagcgccaacatcgcattgggcaacatgcattccatctcccgcgctggcatggtcaatgccgacgaggagttgaagctggcgcaacggcaagtggccgccatgcgcattcgcagttcaagtcccacccaactggtgtccgagctgtccggcggcaatcaacagaaggtcgtgatcggtcgctggctggaacgtgattgcccggtgatgctattcgatgagcctactcgaggcattgacgtcggagccaagttcgatatctacacgctgctggccgagttgacccgtcagggcagggcgctggtggtggtgtccagtgatctgcgcgaactgatgctgatctgtgaccgtatcggcgtgctgtctgccggtcgcctgatcgatacgttcgagcgtgacagctggactcaggaccaattgcttgccgcagccttcgccggttatcagaaacgtaacgcgctgctcaacgacgcagcgcccaggaacgactcatga

SEQ ID NO: 38735 - protein, 517 aa, Pseudomonas syringae pv. tomato str. DC3000
MSASAQTAVLSVSGIGKTYAQPVLGDVDLTLMRGEVLALTGENGAGKSTLSKIIGGLVTPTTGRMEFQGQPYEPASRTQAEKLGIRMVMQELNLLPTLTVAENLFLDDLPRRAGWIDRKRLRENAIKAMAQVGLDAIDPDTLVGELGIGHQQMVEIARNLVGDCHVLILDEPTAMLTSREVEMLFEQITRLQARGVSIIYISHRLEELARVSQRIAVLRDGKLVCVEPIARYNSEQLVTLMVGRELGEHMDMGARQIGEVALSVKGLSRTGKVQDVSFDVRRGEIFGISGLIGAGRTELLRLIYGADIADSGAIEVGQPLQAVTIRSPADAVAHGIALITEDRKSEGLLMSQSISANIALGNMHSISRAGMVNADEELKLAQRQVAAMRIRSSSPTQLVSELSGGNQQKVVIGRWLERDCPVMLFDEPTRGIDVGAKFDIYTLLAELTRQGRALVVVSSDLRELMLICDRIGVLSAGRLIDTFERDSWTQDQLLAAAFAGYQKRNALLNDAAPRNDS

SEQ ID NO: 38736 - DNA, 1530 bp, Pseudomonas syringae pv. tomato str. DC3000
  CDS (1)..(1530): transl_table=11
atgcacgctgttctggataacccgacgccctacaacccagaggtcaccgctgcggcggtgctgtgcctgcgcaacatcggcaagtcctacggcccggtgcaggtgctttcgcagatcaacgtcgatgtgcggccgggcgaagtgctcgccctgctcggcgaaaacggcgcaggcaaatcgaccctgtcgtcgattatcgcgggcctggtgcagcctgaggcgggaggctccatgagctggcttggcgaggattacgcgcctgcctcgccgggcgcggcgctgggtgccggtatcggcctgattcatcaggaaatccgcctgctggcgcagttgtcgattgccgagaacatctttgtcgggcggctgccgatgcgccacggcaaggttgaccgcgactacatgctggcgcaggcgcaaaaacagctggaacgcctcggcctgaatgtgccggcttcgcgcaaggtcgagggtttgagcgtcgccgcgcagcaactggtcgagatcgccaaagccctgaccctgaacgcacgcctgctgattctcgacgaacccacggcggcccttggcggtgaagaaaccgagctgctgtttcagcaggtcgagcgcctcaaggccgaaggcgtgtcgttcatttacattagccatcgtctggaggaaatcgcgcggatcgccgaccgtattctggtcctgcgcgacggccgacagatcgcgctgcacgccacggctcaagtgccggtgcgtgaactggtcgagcagatggtcgggcgtagccttgaacgtatcttccctgccctgcaagcaccgcaggagcgggtgatgctgcaggtcaaagacctcacctgccgcgagttcgccttgcacggtatctacttcagcgtacgcgccggtgaagtgttcggcatcgccggagtggtcggcgcaggccgtaccgagctgatccgggtaattgccggtgcggcccaggatattcagggccacatgcaactggatggcgaaaccgttcacctgcgctcgccctcgcaagccattcaagcgggcgtggtgctggtaccggaagaccgcaaacaacagggcgtggtggtcgagcatcggattgaagacaatctggtctacggcaacaccgacctgctacacagcggtaactgggtgttgccaaaaggcctgcacgaattcgctcgcaacgctatttcgcgcctcggcgtaaaaggtgcgcccgagcagcgcatcgacagcctgtccggtggcaaccagcagaaagtcatcatcgccaaatggctggcccgtaaccccaaggtgttcattctcgacgagccgacccgaggcatcgacgtcggtgcgcgggcggcgatctacgaggtgatcgccgagctggcagccaccggcatggccgtgatcgtggtcagttccgacctcgacgaagtgctgggcctgtcgcaccgggtcatggtcatgagccgtggcaggcagatgggcatccttgaacgtggcgaggcgacaccggtgtcagtcatggaaatggccaccgcctga

SEQ ID NO: 38737 - protein, 509 aa, Pseudomonas syringae pv. tomato str. DC3000
MHAVLDNPTPYNPEVTAAAVLCLRNIGKSYGPVQVLSQINVDVRPGEVLALLGENGAGKSTLSSIIAGLVQPEAGGSMSWLGEDYAPASPGAALGAGIGLIHQEIRLLAQLSIAENIFVGRLPMRHGKVDRDYMLAQAQKQLERLGLNVPASRKVEGLSVAAQQLVEIAKALTLNARLLILDEPTAALGGEETELLFQQVERLKAEGVSFIYISHRLEEIARIADRILVLRDGRQIALHATAQVPVRELVEQMVGRSLERIFPALQAPQERVMLQVKDLTCREFALHGIYFSVRAGEVFGIAGVVGAGRTELIRVIAGAAQDIQGHMQLDGETVHLRSPSQAIQAGVVLVPEDRKQQGVVVEHRIEDNLVYGNTDLLHSGNWVLPKGLHEFARNAISRLGVKGAPEQRIDSLSGGNQQKVIIAKWLARNPKVFILDEPTRGIDVGARAAIYEVIAELAATGMAVIVVSSDLDEVLGLSHRVMVMSRGRQMGILERGEATPVSVMEMATA

SEQ ID NO: 38738 - DNA, 1524 bp, Pseudomonas syringae pv. tomato str. DC3000
  CDS (1)..(1524): transl_table=11
atgcaacaggctatcgagcaaacagccacaggcggtgccttgcgcttcaatggcatctgcaaggtatttcccggcgtcaaggcgctttcggacatcagcttcgaggcccgccctggcagtgtccatgcgctgatgggggagaacggcgcaggcaaatccacgctgctgaagattctgggcggctcttatcagcccaacagcggcaccctgcagatcggtgagcacagctatcaattcaaatccaccgccgagagtatcgcggcgggtgtggcggtgattcatcaggagctgcatctggtgccggaaatgaccgtcgccgagaacctgctgctcgggcacatgcctaatcgtttcggcttgatcaatcgtggcgccatgtaccgtcgagccggtgagctgctcaaaggtctggccgacgagatcgacccgcgcacgcgcttgggcgacctgtcgctgggccagcggcaactggtggaaatcgccaaggccatgtcgcgcaacgctcatgtcatcgcgttcgacgaacccaccagcagcctgtcggcgcgcgagatcgaccgtttgatggcgatcatcgtgcggctgcgggatgaggggcgggtgattctgtatgtgtcgcatcgtatggaagaaatcttccgggtctgcgatgccgtgaccgtcttcaaggacgggcgctttgtcaaaaccttcgagcagatggctgatctggaccacgaccggctggtgacttgcatggtcggtcgcgatattcaggacatctacaactatcgtccacgtcagcatcaggggccgagcctgcgggtcaccggtctgttggggctgggcttgcaggagccagtgagtttcgccgtgcagaaaggcgaggtgctgggctttttcggtctggtgggcgcaggtcgtaccgagctgtttcgcattctttccgggctgacgcgcagtaccgccggcagcctgcaactggacggtcagccgctgactttgaagtcgccacgtgatgccattgcggccggggtgctgctctgcccggaagaccgcaagaaagaaggcatcgtgccgctgtccagcgtcgcggagaacatcaacatcggtgcgcggccccggcatgtgaatcttggctgcctgatccagggcggctgggagcgggacaacgcgcgtgctcagatcaagtcgatgaacgtcaagacgccatcgcccgagcaacagatcatgtttctgtccggcggtaatcagcaaaaagccattctcggtcgctggctgtcgatgccgatgaaagtcctgctgctggacgagccgacccgcgggatcgatgtcggagccaaatccgagatctacgagatcattcacacattggccgccgatggcattgccgtgatcgtggtgtccagcgacctgatggaagtcatgggcatttccgatcgtattctggtgatgagtgaaggcgccattaccggtgaactcaaccgcgacgaggctgacgagtcgcgacttctgcaattggctctgccacgcacgcgcggctaa

SEQ ID NO: 38739 - protein, 507 aa, Pseudomonas syringae pv. tomato str. DC3000
MQQAIEQTATGGALRFNGICKVFPGVKALSDISFEARPGSVHALMGENGAGKSTLLKILGGSYQPNSGTLQIGEHSYQFKSTAESIAAGVAVIHQELHLVPEMTVAENLLLGHMPNRFGLINRGAMYRRAGELLKGLADEIDPRTRLGDLSLGQRQLVEIAKAMSRNAHVIAFDEPTSSLSAREIDRLMAIIVRLRDEGRVILYVSHRMEEIFRVCDAVTVFKDGRFVKTFEQMADLDHDRLVTCMVGRDIQDIYNYRPRQHQGPSLRVTGLLGLGLQEPVSFAVQKGEVLGFFGLVGAGRTELFRILSGLTRSTAGSLQLDGQPLTLKSPRDAIAAGVLLCPEDRKKEGIVPLSSVAENINIGARPRHVNLGCLIQGGWERDNARAQIKSMNVKTPSPEQQIMFLSGGNQQKAILGRWLSMPMKVLLLDEPTRGIDVGAKSEIYEIIHTLAADGIAVIVVSSDLMEVMGISDRILVMSEGAITGELNRDEADESRLLQLALPRTRG

SEQ ID NO: 38740 - DNA, 1569 bp, Pseudomonas syringae pv. tomato str. DC3000
  CDS (1)..(1569): transl_table=11
atggtttcagcgactttgcaggttcaatcagtacctgccttgcacctgagcggcatcagcaaacgtttcggcgcaacccaggcgcttgacggggtcaacctgcaggtggcgtcgggaacgattcatgggctggtcggcgaaaacggcgcgggcaaatcgacgctgatcaaggtgttggccggcattcaccgcgccgacgctggcagcctgagcatcaatggccagcgtttcgagggccacacgccgcgccaggtcgaagcggccggagtgcatttcattcatcaggaacggctgctgccgggcagtttcacggtcggcgaagcgctgtttttcggtcaggaaatcaaacgtggcctgtttgtcgaccggcgcgctcaggatcgtgaggcggctcggttgctggaggattactttgccatgcgtttgccacaaggcgcgctggtacgtgatctggacagcgcgcagcggcagatactacagatcacccgcgcgctgctggccaaacccggagtgctggtattcgacgagccgagtgtgtcgctggtcaagcaagaggtggaccggttgctggccatcgtgcggcgtttgcgcgatgaagggctgaccattgtgtacatctcgcattatttgcaggaaatagaatcgctctgcgatcaggtcaccgtgctgcgcaacgggcgcgatgtggcggtggttgatcccgcgctcaccagcaccgcgcagatcgcccggctgatggtcaatcgtgacgttggcgagcagtatttccgggctcaaagtgtgcccggtgcacctgtgttgcagttgaatgcgctgggggcagggcgcgtgtatgacggcatcgacctgagtgtgcgacgtggcgaagtggtcggcctgaccgggctggtgggttcgggcgccaaagagctgctgaaaagcctgttcgggctgctcaagccggagcgcggtgagttgctgttgaacggccagcccttgcagctgaaatcgccccgcgatgcagtgcgtaacggcattgcgctggtccccgaagagcgccgcacccacggtgtggcgccagtgctttcagtgctggaaaacatcaccatggccagcctcgggcgcttcagccactgggggttgcttgatgcctctgctcaggctcgggaaagcgagcggttgatcaccgaactggcgatcaagacccctggccccgacgcagcagtgcaactgctcagtggtggcaatcagcaaaaggtggctttggccaagtggctgagtcggcattcgtcgctgtacctgctggacgagcccagcgtgggcgtcgacatcggtgccaaggtggaaatctaccggttgattgcccggcttgccgagggtggcgcagccgtagtggtgctgtcctcggatttgccggaactgatcggcatcacccatcgcatcgtggtcttgcaccgaggccgcattgccggcgaattcgcttcccggaccaccgacagcgaccagttgctggcctgcgccaccggtgccagtgaaagcgatgaacaggtcgaaccgattattgaggaggccaggcatgtccgcgcttga

SEQ ID NO: 38741 - protein, 522 aa, Pseudomonas syringae pv. tomato str. DC3000
MVSATLQVQSVPALHLSGISKRFGATQALDGVNLQVASGTIHGLVGENGAGKSTLIKVLAGIHRADAGSLSINGQRFEGHTPRQVEAAGVHFIHQERLLPGSFTVGEALFFGQEIKRGLFVDRRAQDREAARLLEDYFAMRLPQGALVRDLDSAQRQILQITRALLAKPGVLVFDEPSVSLVKQEVDRLLAIVRRLRDEGLTIVYISHYLQEIESLCDQVTVLRNGRDVAVVDPALTSTAQIARLMVNRDVGEQYFRAQSVPGAPVLQLNALGAGRVYDGIDLSVRRGEVVGLTGLVGSGAKELLKSLFGLLKPERGELLLNGQPLQLKSPRDAVRNGIALVPEERRTHGVAPVLSVLENITMASLGRFSHWGLLDASAQARESERLITELAIKTPGPDAAVQLLSGGNQQKVALAKWLSRHSSLYLLDEPSVGVDIGAKVEIYRLIARLAEGGAAVVVLSSDLPELIGITHRIVVLHRGRIAGEFASRTTDSDQLLACATGASESDEQVEPIIEEARHVRA

SEQ ID NO: 38742 - DNA, 1587 bp, Pseudomonas syringae pv. tomato str. DC3000
  CDS (1)..(1587): transl_table=11
atgtccgactacctgctgcaaatgaacggcatcgtcaaaacctttgacggtgtcaaagcgctcaacggcatcgatatcaaggtacgccccggtgaatgcgtcggcctttgcggcgaaaacggcgcgggcaaatccaccttgatgaaagtgctctcggcggtctatccctacggcacctgggaaggcgagattctctgggacggcaaccctctcaaggcgcagtccatcagcgaaaccgaagccgccggaatcgtcatcattcatcaggaactgactctggtccccgacctgtcagtggccgaaaacatcttcatgggccacgaactgaccctgcgcggcgggcgcatgaactacccggcgatgatccaccgtgccgaaaccctgatgcgtgagctcaaagtgcctgacatgaacgtggcgctgccggtttcgcagtacggcggtggccatcagcaattggtggaaatcgccaaggcgctgaacaaacaggcacgactgttgatcctcgatgagccctcctcggccctgacccgctcggagattgaggtcctgctgggcatcattcacgacctcaaggccaaaggcgtggcctgcgtatacatctcgcacaaactcgatgaagtggcggccgtgtgcgacaccatttcggtgatccgcgatggcaagcacattgctactaccgctatggctgaaatggacatcccgaagatcatcacccagatggtcgggcgtgaaatgagcaacctctaccctaccgacgcgcatgacatcggcgaggtgattttcgaggcgcgcaacatcacctgctacgacgtcgacaaccccaaacgcaaacgggtggacgacatttcgtttgtcctcaagcgcggggaaatcctcggcatcgccgggctggtgggcgctggtcgcacagagctggtctcggcgctgtttggtgcttatccaggtcgctacagcggtgaggtctggctggacggccagccggtcgatacccgcacaccgctcaaatcaatccgcgccggcctgtgtatggtcccggaagaccgcaagcgccagggcatcatccccgacatgggcgtcggccagaacatcaccctcgccgtcctcgacaactactcgaaaatgacccgcatcgacgcagaagccgaattgggcagcattgaccgggaaatttcgcgcatgcacctcaagacggccagcccgtttctgccgatcaccagtctttccggcggcaaccagcagaaagccgtgctggccaagatgctcttgaccaggccccgcgtgctgattctcgatgagccgacgcgcggggtcgatgtgggtgccaagtacgagatctacaagctgatgggtgcgttggcggccgagggcgtggcgatcatcatggtgtcctcggagctggccgaagtgctgggggtttccgaccgcgtgctggtcattggtgagggccgcttgtgcggcgattttatcaaccatgaactcactcaggagcaggtgcttgccgccgcactcagccaccccggcgaccctgacagtaatgaccctgccaacaataatcataacgacaacgaccggaagaccacgtag

SEQ ID NO: 38743 - protein, 528 aa, Pseudomonas syringae pv. tomato str. DC3000
MSDYLLQMNGIVKTFDGVKALNGIDIKVRPGECVGLCGENGAGKSTLMKVLSAVYPYGTWEGEILWDGNPLKAQSISETEAAGIVIIHQELTLVPDLSVAENIFMGHELTLRGGRMNYPAMIHRAETLMRELKVPDMNVALPVSQYGGGHQQLVEIAKALNKQARLLILDEPSSALTRSEIEVLLGIIHDLKAKGVACVYISHKLDEVAAVCDTISVIRDGKHIATTAMAEMDIPKIITQMVGREMSNLYPTDAHDIGEVIFEARNITCYDVDNPKRKRVDDISFVLKRGEILGIAGLVGAGRTELVSALFGAYPGRYSGEVWLDGQPVDTRTPLKSIRAGLCMVPEDRKRQGIIPDMGVGQNITLAVLDNYSKMTRIDAEAELGSIDREISRMHLKTASPFLPITSLSGGNQQKAVLAKMLLTRPRVLILDEPTRGVDVGAKYEIYKLMGALAAEGVAIIMVSSELAEVLGVSDRVLVIGEGRLCGDFINHELTQEQVLAAALSHPGDPDSNDPANNNHNDNDRKTT

SEQ ID NO: 38744 - DNA, 1578 bp, Pseudomonas syringae pv. tomato str. DC3000
  CDS (1)..(1578): transl_table=11
atgtccggttccgctactgccagccctcccgcaaaacccgatctgccgtccagtgatggtgctggcctcacgccagatgctcagtgcccctatctgctggaaatcagccatatcagcaaaggcttccctggcgttatcgcgctcgacgatgtccagctgcgcctgcgtcccggcagtgtgctggcgctgatgggcgagaacggggcagggaagtcaacgttgatgaaaatcatcgccgggatctaccagcccgataccggcgaaattcgcttgcgcggcaagccgatcagctttaccaccccgctttcagcccttcaggcgggtatcgccatgatccatcaggaactgaacctgatgcccttcatgagcatcgccgagaatatctggatcggccgcgagcagctcaatggcctgcacatggtcgaccaccgggaaatgcaccgctgtacggcgcaattgctggagcgtctgcgcatcaagcttgatcccgaagagctggtgggcaacctgagcattgccgaacggcagatggtggagatcgccaaagccgtttcctacgattcggacgtgctgatcatggacgagcccacctcggccattaccgagactgaagtggagcacctgttttcaatcattgccgacctgcgctcgcagggcaaaggcatcatctacatcacccacaagatgaatgaagtgttcaagatcgccgacgaagtggcggtgtttcgtgatggcacctacattggcctgcagcgcgccgaaagcatggatggcgacagcctgatctcgatgatggtcggtcgcgagttgacccaattattcccgcagcgcgaaaagcctgcgggcgatgtcctgctttctgtcagtgacctgagcctgaaaggcattttccagcaggtctccttcgacctgcgggccggtgaggttctgggcattgccgggctgatgggttcggggcgcaccaatgtggccgagaccctgttcgggatcactcccagcgacagtggcgagatccgtttcgatggcaagacggtacgcattggcgacccgcatcaggccatcgaactggggtttgcgctgctgaccgaagaccgcaagctgaccggcctgtttccgtgcctgtcggtcatggaaaacatggaaatggccgtcttggccaattatgcgggtagtggcttcgtgcagcagaaagcattgcgggcgctgtgcgaagacatgtgcaagaagctgcgggtgaaaactccttcgctggagcagtgcatcgacacgctgtccggtggcaaccagcagaaagccctgttggcgcgctggttgatgaccaatcccagggtcttgattctcgacgagccgacgcgcggcatcgacgtcggtgccaaggcggaaatttatcggctgatctcgctgctggccagcgaaggcatggccgtcatcatgatctcttcggagctgccggaagtgctgggcatgagcgatcgggtcatggtcatgcacgaaggcgaaatgatggggattctcgaccgtagcgaagcgacccaggaaaaagtcatgcatctggcctccggccaccgggttcattga

SEQ ID NO: 38745 - protein, 525 aa, Pseudomonas syringae pv. tomato str. DC3000
MSGSATASPPAKPDLPSSDGAGLTPDAQCPYLLEISHISKGFPGVIALDDVQLRLRPGSVLALMGENGAGKSTLMKIIAGIYQPDTGEIRLRGKPISFTTPLSALQAGIAMIHQELNLMPFMSIAENIWIGREQLNGLHMVDHREMHRCTAQLLERLRIKLDPEELVGNLSIAERQMVEIAKAVSYDSDVLIMDEPTSAITETEVEHLFSIIADLRSQGKGIIYITHKMNEVFKIADEVAVFRDGTYIGLQRAESMDGDSLISMMVGRELTQLFPQREKPAGDVLLSVSDLSLKGIFQQVSFDLRAGEVLGIAGLMGSGRTNVAETLFGITPSDSGEIRFDGKTVRIGDPHQAIELGFALLTEDRKLTGLFPCLSVMENMEMAVLANYAGSGFVQQKALRALCEDMCKKLRVKTPSLEQCIDTLSGGNQQKALLARWLMTNPRVLILDEPTRGIDVGAKAEIYRLISLLASEGMAVIMISSELPEVLGMSDRVMVMHEGEMMGILDRSEATQEKVMHLASGHRVH

SEQ ID NO: 38746 - DNA, 1506 bp, Vibrio parahaemolyticus RIMD 2210633
  CDS (1)..(1506): transl_table=11
atgactcaagccattctacaactgagcgaaatcgaaaaagcgttcccaggtgtaaaggcgctagataaagcgagcctgaatgtatacccaggtcgtgttatggcgctcatgggcgaaaatggggcaggcaagtcaactttgatgaaagtgctgaccggtatttaccatatggatgcgggtagcattcagtatcaggggcaacctgctgcgtttaaaggtccgcgagattctcaagaagcgggtatcagcattattcaccaagagttgaacttaatccctgaactgacaatcgctgagaacatttttctcggtcgtgaatttaccggttctatggggcgcattcagtggagcaaaatgtacgcggaagcggacagacttctacaacgtttgaacgtgaaacacagctcgaaaaccttgcttggtgatctaagtttgggtgagcaacaaatggtagaaattgccaaagcgctctcgtttgaatcgaaagtcatcatcatggatgaaccaaccgatgcgcttactgatacagaaaccgaatctctgttcaaagtgattaatgagcttcgtgagcaaggctgcggcattgtatatatctcacaccgcctgaaagaaatctttgaaatctgtgacgacattaccgtgcttcgtgacggtaaatttatcggtgaatgccgagtagcagacacggatgaagacggcttaatcgaaatgatggttggccgtaaattagaggagcaatacccacgtattgatgtgaagcacggcgagacatgccttgaagtggttggcttgacgggctctggcgttcacgatgtgagcttcacgcttaaacgcggtgagattttgggtatctctggtttgatgggcgcaggccgtaccgagttaatgaaagtgatttacggcgcgctaccaagcgagcatggcgttatcaatctcgataacaaaaccattaatccggttagcccgcaagatggcttggcaaatggcatcgcttacatctcggaagaccgcaaaggggatggtctggttctgggtttatccgtgaaagagaacatgtctctgtgtgcattggataagctaaccaaaggcgtacaaatccagcacggcgaagaagtcatcgcagtggaagatttcatcaagttattcaacattaaaacaccaactcgcgaccaaattattggcaacctttctggtggtaaccaacagaaagtggcgattgcgaaagggttaatgaccaaacctaaagttctgattttggatgaaccaacgcgtggtgttgacgttggtgctaagaaagaaatctaccaactcatcaacaaatttaaagccgacggcatgagcatcatcttggtttcttctgagatgccagaagtgctaggcatgagcgatcgcattcttgtgatgcatgaaggtcgcataactggcgaatttgatgcgaaagacgccgaccaagaaaaattactcgcctgtgccgtaggcaaaaagatcaatgaggaagcagcatga

SEQ ID NO: 38747 - protein, 501 aa, Vibrio parahaemolyticus RIMD 2210633
MTQAILQLSEIEKAFPGVKALDKASLNVYPGRVMALMGENGAGKSTLMKVLTGIYHMDAGSIQYQGQPAAFKGPRDSQEAGISIIHQELNLIPELTIAENIFLGREFTGSMGRIQWSKMYAEADRLLQRLNVKHSSKTLLGDLSLGEQQMVEIAKALSFESKVIIMDEPTDALTDTETESLFKVINELREQGCGIVYISHRLKEIFEICDDITVLRDGKFIGECRVADTDEDGLIEMMVGRKLEEQYPRIDVKHGETCLEVVGLTGSGVHDVSFTLKRGEILGISGLMGAGRTELMKVIYGALPSEHGVINLDNKTINPVSPQDGLANGIAYISEDRKGDGLVLGLSVKENMSLCALDKLTKGVQIQHGEEVIAVEDFIKLFNIKTPTRDQIIGNLSGGNQQKVAIAKGLMTKPKVLILDEPTRGVDVGAKKEIYQLINKFKADGMSIILVSSEMPEVLGMSDRILVMHEGRITGEFDAKDADQEKLLACAVGKKINEEAA

SEQ ID NO: 38748 - DNA, 1521 bp, Vibrio parahaemolyticus RIMD 2210633
  CDS (1)..(1521): transl_table=11
atgatcatgataaattccccttcttaccttgagttttgcaacatatcgaagcatttcccaggagttaaggcattgagcaacattagttttcgcgccaacaaaggcagtattcatgcgctaatgggtgaaaacggtgcaggtaaatcaacgttgcttaaaactctcagtggcttacaccaacctactgaaggcgagttggtcgtcgatggtaaagctttggtgttcaactcagcgactgatgcgcttgagcaaggtatcgccattatttaccaagagctgaacttggtacctgagcttagtgtggcagaaaacatctacctaggtcagttgccaacaaaaggtggcagtgtagatgtggaaacattgaacgcccgagcgcgagaacagctaaaacgtttgggggaggattttgatccttctcgcccacttaaagagttttctatcggccagtggcaaatggtggaaattgccaaagcactaagccgcaatgctcagattatcgcgtttgatgaaccaaccagcagtttgtctcaacgcgagattcaaaacttattcaaagttattcgcgaattgcgcgatgacggcaaaatcattctgtacgtttcccatcgtatggaagagatcttcgatttgtgcgatgccattaccatcttcaaagatgggacacatgtacaaacatttgacgacatgaccgacttaacccatgaaaaattggttgagctgatggtcggtcgtgaaatcaacgatatctacaactaccgttcgcgttctctcggcgaaagtggcctacgcattgaaaaccttgaaggaaaagggttaacccaaccagtctcactcgatattcgtcaaggtgaaattctgggtctgtttggtttagttggggcagggcgaacagaactaacccgtctcattttcggcgcggaaaaagcgcaagccggacaaatttacattcatgggcagcccatcagtgtcagaagtccacaagatgcgattcgcgcaggcattacgttatgcccagaagaccgtaaagcggacgctatcgttcctattctctcggtggaagagaacaccaacatcagtgctcgtccatggaatttgaaattgggcggtttgatcgatttcaaatgggaaagagacaacgcagagcagcaacgtaaggctttgaacgttaaaaccgcctcattacaacaggctatagggcagttgtctggtggtaaccaacaaaaagtgattctaggtcgctggctctccaccgatatgagtgtgattttgttggacgagccaacacgaggcattgacgttggtgcgaaatcagagatctacgaactgattttcaatcttgctgagcgcggtgtcactgtgctggtggtgtcgagtgatttgccagaagttcttggtatatccgatcgcgtaatggtgatgaaagaaggtgcggtaacaggtgaactacagcgccatgagtttaaagaacaaactgctttgagtttagccatgctaggcaacaaccaagctgctgcataa

SEQ ID NO: 38749 - protein, 506 aa, Vibrio parahaemolyticus RIMD 2210633
MIMINSPSYLEFCNISKHFPGVKALSNISFRANKGSIHALMGENGAGKSTLLKTLSGLHQPTEGELVVDGKALVFNSATDALEQGIAIIYQELNLVPELSVAENIYLGQLPTKGGSVDVETLNARAREQLKRLGEDFDPSRPLKEFSIGQWQMVEIAKALSRNAQIIAFDEPTSSLSQREIQNLFKVIRELRDDGKIILYVSHRMEEIFDLCDAITIFKDGTHVQTFDDMTDLTHEKLVELMVGREINDIYNYRSRSLGESGLRIENLEGKGLTQPVSLDIRQGEILGLFGLVGAGRTELTRLIFGAEKAQAGQIYIHGQPISVRSPQDAIRAGITLCPEDRKADAIVPILSVEENTNISARPWNLKLGGLIDFKWERDNAEQQRKALNVKTASLQQAIGQLSGGNQQKVILGRWLSTDMSVILLDEPTRGIDVGAKSEIYELIFNLAERGVTVLVVSSDLPEVLGISDRVMVMKEGAVTGELQRHEFKEQTALSLAMLGNNQAAA

SEQ ID NO: 38750 - DNA, 1536 bp, Salmonella enterica subsp. enterica serovar Typhi Ty2; identical to SEQ ID NO: 27288
  CDS (1)..(1536): transl_table=11

SEQ ID NO: 38751 - protein, 511 aa, Salmonella enterica subsp. enterica serovar Typhi Ty2 [sequence omitted]

SEQ ID NO: 38752 - DNA, 1506 bp, Salmonella enterica subsp. enterica serovar Typhi Ty2
  CDS (1)..(1506): transl_table=11
atggacgcattactgcaactcaaagggatcgataaagcgttccccggcgtgaaggctctctccggcgccgcgttaaacgtttatcctggccgcgttatggcgctggtgggggaaaacggcgccggaaaatccaccatgatgaaagtattaaccggcatctatacgcgagatgcgggatcgttgttatggctgggtaaagagaccacctttaatgggcctaaatcgtctcaggaagccgggatcggcattattcatcaggaactgaacctgattccgcagttgaccattgcggaaaacatcttcctgggccgtgagtttgtgaatcgctttggtaaaatcgactggaaaaagatgtatgccgaagccgaccacctcttagccaaactcaatctgcgctttaagagcgataagctggtgggcgaactctctatcggcgatcagcaaatggtggaaatcgccaaagtgctgagcttcgaatccaaagtcatcattatggatgaaccgaccgatgcgctgaccgacactgaaaccgactctctgttccgcgttatccgcgaattaaaatcgcaggggcgcggcattgtctatatctctcaccgtatgaaagagattttcgaaatttgcgatgacgtgacggtcttccgcgatgggcaatttatcgccgagcgtgaagtggccacgttgaccgaagattctcttatcgaaatgatggtgggacgtaagctggaagatcagtacccgcatctggataacgcgccgggtgagattcgcctgaaggtcgataatctgtgcggaccgggcgtgaacgatgtctcttttgtgctgcgaaaaggcgagattcttggcatctccggcctgatgggcaccggtcgcactgagctgatgaaagtattgtacggcgcgatgccgcgaaccagcggttacgtgacgctcgagggacacgaagtggtgacgcgttctccgcaggacgggctggccaatggcatcgtttatatctctgaagaccgtaagcgcgatggactggtgctcggcatgtcagttaaagagaatatgtcgctgactgcgctggattatttcagtcgcgctggcggaagcctgaaacacaaagatgagcagcaggcggtgggggattttatccgtctgttcaacgtcaagacgccgtcaatggaacaggcgataggcctgctttctggcggtaatcagcaaaaagtggcgattgcccgcgggttgatgacgcgcccgaaagtgctcattctcgacgagccgacccgcggcgtggacgtcggcgccaagaaagagatttaccagcttatcaaccagtttaaggccgacggcctgagcatcattctggtctcatctgagatgccagaagtattaggcatgagcgatcgcatcatcgtcatgcatgaagggcatctcagcggtgaatttactcgcgagcaggccacccaggaagtgttaatggctgccgcagtgggcaagcttaatcgcgtgaatcaggagtaa

SEQ ID NO: 38753 - protein, 501 aa, Salmonella enterica subsp. enterica serovar Typhi Ty2
MDALLQLKGIDKAFPGVKALSGAALNVYPGRVMALVGENGAGKSTMMKVLTGIYTRDAGSLLWLGKETTFNGPKSSQEAGIGIIHQELNLIPQLTIAENIFLGREFVNRFGKIDWKKMYAEADHLLAKLNLRFKSDKLVGELSIGDQQMVEIAKVLSFESKVIIMDEPTDALTDTETDSLFRVIRELKSQGRGIVYISHRMKEIFEICDDVTVFRDGQFIAEREVATLTEDSLIEMMVGRKLEDQYPHLDNAPGEIRLKVDNLCGPGVNDVSFVLRKGEILGISGLMGTGRTELMKVLYGAMPRTSGYVTLEGHEVVTRSPQDGLANGIVYISEDRKRDGLVLGMSVKENMSLTALDYFSRAGGSLKHKDEQQAVGDFIRLFNVKTPSMEQAIGLLSGGNQQKVAIARGLMTRPKVLILDEPTRGVDVGAKKEIYQLINQFKADGLSIILVSSEMPEVLGMSDRIIVMHEGHLSGEFTREQATQEVLMAAAVGKLNRVNQE

SEQ ID NO: 38754 - DNA, 1569 bp, Enterococcus faecalis V583
  CDS (1)..(1569): transl_table=11
ttgtctcaagaagaaaacgtaattgagatgcgtaaaatcaccaaagaatttgggacgttcaaagccaacgaccaaattgatttacaagtaaaacctggtgaaatccacgcactgctaggtgaaaatggtgcaggcaagtcgaccttgatgaatatcttatcagggctattggaaccgacctcaggtgagatttatatgaatggcgaaaaagtcaacattacaagtcctactgcagccaatcgtttaggaatcggaatggtccatcagcattttatgttagttgaagcctttactgtgactgaaaatattatcttaggtagtgaacctacccatggcggtattttagaccggaaaaaagcgaaaaaagagattgaagaagtgtctaagcaatacgggttggatgtaaatcccaatgcctatattcgcgatatttctgtgggtatgcaacaacgggttgaaattttaaagaccttatatcgtggtgcgaacgttttaatttttgacgaaccaaccgcagtattaacgccacaagaaattgatgaattaatgattattttgaaagaactaaccgatgaaggcaaatcgatcattttaattacacataagttagatgaaattaaaaaagtggcggaccgttgtacggttattcgccgggggcaaagtattggcaccgtcaatgtgaaagacgtttcttcgcaacagttagccgatatgatggtgggtcgttctgtttccttcaaaacagagaaaaaaccagcgcaaccgaaagaaacaattttatcaattaaagatttagtagtgaaagaaagccgcggcttagatgcagtgaaaaatcttagcttagatgtccgagcaggggaagttgttggaattgcggggattgatggcaatggacaaacagaattaatccaagccttagcaggattaaccaaagtcgaaaacgggtccattcatttgaatgaaaaagagattactaatcgcaaacctcgggaaattacggaaatgggtgtcgcccacgttcctgaagaccgacataaatatggcttggtattagagatgacattggctgaaaatattggcctacaaacgtattaccaaaaaccatacagttcaacaggtattttaaactatcgaatgattaacaaacatgcccgtgaattaattgaagaatatgatgtacggactcctaatgaattagtaccagctcgggcgctttcaggtgggaatcagcaaaaagcgattattgcccgagaagtggaccgcgatccagatttgttgattgtttctcaaccaacacgcggtttagatgtcggagctattgaatacattcatcgtcgactaattgaacaaagagataaaaataaagctgttttattagtaagttttgaattagatgaaattttaaacgtttctgatcgtatcgctgttattcatgcgggggaaattgtcggaattgttgatccgaaagaaacgacagaaaatgaattgggcttgttaatggctggctactcattggaagaagcccgtgctgagttatcaaaagtagaggcaggtgaaactgttgaataa

SEQ ID NO: 38755 - protein, 522 aa, Enterococcus faecalis V583
MSQEENVIEMRKITKEFGTFKANDQIDLQVKPGEIHALLGENGAGKSTLMNILSGLLEPTSGEIYMNGEKVNITSPTAANRLGIGMVHQHFMLVEAFTVTENIILGSEPTHGGILDRKKAKKEIEEVSKQYGLDVNPNAYIRDISVGMQQRVEILKTLYRGANVLIFDEPTAVLTPQEIDELMIILKELTDEGKSIILITHKLDEIKKVADRCTVIRRGQSIGTVNVKDVSSQQLADMMVGRSVSFKTEKKPAQPKETILSIKDLVVKESRGLDAVKNLSLDVRAGEVVGIAGIDGNGQTELIQALAGLTKVENGSIHLNEKEITNRKPREITEMGVAHVPEDRHKYGLVLEMTLAENIGLQTYYQKPYSSTGILNYRMINKHARELIEEYDVRTPNELVPARALSGGNQQKAIIAREVDRDPDLLIVSQPTRGLDVGAIEYIHRRLIEQRDKNKAVLLVSFELDEILNVSDRIAVIHAGEIVGIVDPKETTENELGLLMAGYSLEEARAELSKVEAGETVE

SEQ ID NO: 38756 - DNA, 1569 bp, Streptomyces avermitilis MA-4680
  CDS (1)..(1569): transl_table=11
gtgaccgcgtcacccgtatccgctgaagtcctcgccgtacgaggactgaccaaacgcttccccggcgtcaccgcactcgacgacgtcgacttctccgtacgcgcgggggaggtgcacgcgctcgtcggcgagaacggcgcgggcaagtccaccctcatcaaggtcctcaccggcgtccaccgggccgacgagggcggggtgttccaccggggcgagcccgtcgctttcggcacaccactggaagcgcagcacgccggtatctcgacgatctaccaggaagtcaacctcatcccgctgatgagcgtggcccgcaacctctttctcggccgcgagccccgcacccgcctcggactgatcgacttccgccgcatgcacacggaggcccaccaggtcctcaccgcgtacggggtcgacgtcgatgtccgccgaccgctgcgccaactcggcgtcggagcacagcagatggtcgccctggcccgcgcggtggccgtcgacgcgagcgtcgtcgtcatggacgaaccgacatcgtcgctggaaccacgcgaggtccacaccctcttcggcgtcatccgccgcctgcgcgaccagggcatcgccgtggtctatgtcagccaccgcatggaggagctgtacgccgtctgcgacagcgtcaccgtgctgcgcgacggccaccatgtgcacaccggcccgctcgccggcaccgaccgtctcaccctggtctcgtacatgctgggacgcgacctcggcgaggtgcgcagcgagggcacgaccaagttctccggtacgcacgacacgggcggtgagccggtgctgcgcgccgaaaacctcacccggccccaccaactgcgcgctgtctccctggaaatacaccccggtgaagtactcggcctcggtggattgctgggttccggccgcagcgagaccgccaaagccgtcgccggcgcgctggcactcgccgacggccgtgtcaccgtcgccggtgtcccggtacgcaccggctccaccgtcgcggccatccgcgccggcatcagtctcctgcccgaggaccgcaagtccgaaggcatcgtgccggggctgtcggtgcgggagaacatcgccctggccgccctgccccagctctcccgctacggcctggtcgccgagtcccgcatggacgccgtcgtcgacaccttcatgaagcggctgcgcatcaaggcgtccagtccgcaccagaaggtcggcgaactctccggcggcaaccagcagaaggtgctgctcgcccgctggctcgcgatgaaccccaaggtgcttcttctggacgagccgacccgcggcatcgacatcggtgccaaggccgaggtgcagcagctcatcgacgaactcgccgaggacggcctgggcgtcctgctcatctcgtccgacatcgaggaactgatcgaaggctccgaccgcgtcgtcgtcctccgggacggtgcggccatcgccgaactgcgcgctgacgacgtcacggccgaccggctgatgcgggccatcgcacaagcggcggaagaagaagcgtccaccgaggaggaggccgccacccatggctga

SEQ ID NO: 38757 - protein, 522 aa, Streptomyces avermitilis MA-4680
MTASPVSAEVLAVRGLTKRFPGVTALDDVDFSVRAGEVHALVGENGAGKSTLIKVLTGVHRADEGGVFHRGEPVAFGTPLEAQHAGISTIYQEVNLIPLMSVARNLFLGREPRTRLGLIDFRRMHTEAHQVLTAYGVDVDVRRPLRQLGVGAQQMVALARAVAVDASVVVMDEPTSSLEPREVHTLFGVIRRLRDQGIAVVYVSHRMEELYAVCDSVTVLRDGHHVHTGPLAGTDRLTLVSYMLGRDLGEVRSEGTTKFSGTHDTGGEPVLRAENLTRPHQLRAVSLEIHPGEVLGLGGLLGSGRSETAKAVAGALALADGRVTVAGVPVRTGSTVAAIRAGISLLPEDRKSEGIVPGLSVRENIALAALPQLSRYGLVAESRMDAVVDTFMKRLRIKASSPHQKVGELSGGNQQKVLLARWLAMNPKVLLLDEPTRGIDIGAKAEVQQLIDELAEDGLGVLLISSDIEELIEGSDRVVVLRDGAAIAELRADDVTADRLMRAIAQAAEEEASTEEEAATHG

SEQ ID NO: 38758 - DNA, 1539 bp, Streptomyces avermitilis MA-4680
  CDS (1)..(1539): transl_table=11
atggcaccagaaccaccgctgctcaccatgtccggcatcaccaagtcgttccccggcgtccgggccctcgacggcgtcgacctcgacgttcaggccggcgaggtccactgtctgctcggccagaacggcgccggaaagtccaccctcatcaaggtcctggccggcgcccaccagcccgacgacggccgtctgtgctggcgcggcgcacccgtcacgctccgctccccgatcgccgccatgcgcctcggcatcgccaccatctaccaggaactagacctggtggagggcctgtcggtggccgagaacgtccacctcggccatgagcccacgaccgccggcttcgtcgtacgagggaaggccgcgcgagcctcgacagcggctctcctcaagcgcctcggccacccggagatcgcaccgtcgcgcctcgtcggcgacctgtcggcagcccagcagcagatcgtctccatggcgcgcgcgctctcccacgacgtccgcctcatcgtgatggacgagccgtccgcggccctcgatcccgacgaggtcgacaacctcttccgcatcgtcggcgacctcaccgcggacggcgtcgccgtcgtccacatctcgcaccgcctcgaggagatccgccggatcggcgaccgggtgaccgtactgaaggacgggcgcgcggtggcgggcgggctgcccgcgaaatccacgccgacgcgcgagatcgtggcgctgatgaccggccgcgacgtggagtacgtcttcccggaccggccgcccgcccctgccccagccacctccgaccccctactcaaggtccagggcctcgccagggaaggcgagttcgagcccctcgacctcgaactgcgccccggcgagatcgtcggactggccggactggtgggttcgggacggtccgagatcctggagaccgtctacggggcccggaagccgtccgcagggcaggtcacggtggccggacgggcgctgcggcccggcagcgtacgcgccgccgtccgcgccggactcgggctcgcccccgaggagcgcaagacgcaggccctgctcctgctggagtccgtcacgcgcaatgtgtcgctctcctccatgtcccgcttcgcacacggaggttggatcgaccgcggcgccgaacgcgatgccgcgcgagccgcgacccgggaactgtcactgcgccccgaccgtccgtccgcgcccgcgcgcaccctgtccggcggcaaccagcagaaggccgtcctggcgcgctggctgctgcgcggctgccgggtgctgctcctcgacgaacccacccgcggcgtcgacgtcggcgcccgcgccgagctgtacgcggtgatccgccgcctcgccgacgagggcctcgccgtgctgctcgtgtccagcgaggtacccgaggtgctcggcctcgccgaccgggtgctggtgctgcgcgagggccgcgtcgtacaccgggcgcccgcccgtgaactcgacgaacaccgcgtcctcgacctggtcatggaaggaagccccgtggaaggaaccccggcgtcatga

SEQ ID NO: 38759 - protein, 512 aa, Streptomyces avermitilis MA-4680
MAPEPPLLTMSGITKSFPGVRALDGVDLDVQAGEVHCLLGQNGAGKSTLIKVLAGAHQPDDGRLCWRGAPVTLRSPIAAMRLGIATIYQELDLVEGLSVAENVHLGHEPTTAGFVVRGKAARASTAALLKRLGHPEIAPSRLVGDLSAAQQQIVSMARALSHDVRLIVMDEPSAALDPDEVDNLFRIVGDLTADGVAVVHISHRLEEIRRIGDRVTVLKDGRAVAGGLPAKSTPTREIVALMTGRDVEYVFPDRPPAPAPATSDPLLKVQGLAREGEFEPLDLELRPGEIVGLAGLVGSGRSEILETVYGARKPSAGQVTVAGRALRPGSVRAAVRAGLGLAPEERKTQALLLLESVTRNVSLSSMSRFAHGGWIDRGAERDAARAATRELSLRPDRPSAPARTLSGGNQQKAVLARWLLRGCRVLLLDEPTRGVDVGARAELYAVIRRLADEGLAVLLVSSEVPEVLGLADRVLVLREGRVVHRAPARELDEHRVLDLVMEGSPVEGTPAS

SEQ ID NO: 38760 - DNA, 1569 bp, Streptomyces avermitilis MA-4680
  CDS (1)..(1569): transl_table=11
gtgagcaacgcggacgagttgctgcgcatcgaaggcatacgcaagacgttccccggcgtcgtcgcgctcgacggcgtggacttcgatctgcgccgcggcgaggtgcacgtactgctcggcgagaacggcgcgggcaagagcaccctcatcaagatgctgtcgggtgcctaccggcccgacggcgggcgcgtcctcgtcgagggcgaggaggtgcgtatccatggggcgcaggactccgaggcgctcggcatcgccaccatctaccaggagttcaatctcgttcccgatctgacggtcgccgagaacatcttcctggggcggcagccgcgccgcctcggtctgatcgaccggaagaagatggaggcggacgccgccgaactgctggcgcgggtcggcgtccaggtgtcgccacgcgcgcgggtgcgtgaactcggtatcgcacgccttcagatggtcgagatcgcgaaggcgctgagcctgaacgcccgtgtcctgatcatggacgagccgaccgccgtgctcacctccgaagaggtggagaagctgttcgccatcgtgcgccagctgcgcgaggacggcgtcgggatcgtcttcatcacgcaccatctcgaggagatcgccgccctcggggatcgcgtcaccgtcatccgggacgggaagagcgtcggacaggtgcccgcatccaccagcgaggacgaactcgtacgcctcatggtgggacgctcgatcgaacagcagtatccgcgcgaacggccggactccggggccgcgctgctcagcgtcgaggggctcacccgggacggcgtcttccacgacgtgagcttcgaggtgcgggccggtgaggtcgtcggcgtcgcggggctcgtcggggcgggccgtacggaggtcgtacgggccgtcttcggggccgatccctacgaccgggggtccgtgcaggtcgcgggcgcgcgggtgccgcggcacgacgtcagcgcggcgatgagcgccggcatcggcctcgtacccgaggaccgcaagggtcaggggctcgtcctcgacgcctccgtcgaggagaacctcgggctcgtgaccatgcgggcggccacccgtggcgggctcgtcgacctcaaggggcagcgggacgccgccgcccgggtcgccggacagctgggcgtgcggatggccgggctcggccaacatgtgcgcacgctctccggcggcaaccagcagaaggtcgtcatcggcaagtggctgctcgcggacaccaaggtgctgatcctcgacgagccgacgcgcggtatcgacgtcggcgccaaggtcgagatctaccagctgatcaacgagctgacggccgcgggcgccgccgtcctgatgatctccagcgatctgcccgaggtgctcggcatgagtgaccgggtgctggtgatggcccagggccggatcgcgggcgagctcggggccgacgaggcgacccaggactccgtgatggcactcgccgtcagtacgaaccaatacaagccagataagtcagataagccagacgcgagtgcaggcaagacagaccagaaggaggccccccgtggccactga

SEQ ID NO: 38761 - protein, 522 aa, Streptomyces avermitilis MA-4680
MSNADELLRIEGIRKTFPGVVALDGVDFDLRRGEVHVLLGENGAGKSTLIKMLSGAYRPDGGRVLVEGEEVRIHGAQDSEALGIATIYQEFNLVPDLTVAENIFLGRQPRRLGLIDRKKMEADAAELLARVGVQVSPRARVRELGIARLQMVEIAKALSLNARVLIMDEPTAVLTSEEVEKLFAIVRQLREDGVGIVFITHHLEEIAALGDRVTVIRDGKSVGQVPASTSEDELVRLMVGRSIEQQYPRERPDSGAALLSVEGLTRDGVFHDVSFEVRAGEVVGVAGLVGAGRTEVVRAVFGADPYDRGSVQVAGARVPRHDVSAAMSAGIGLVPEDRKGQGLVLDASVEENLGLVTMRAATRGGLVDLKGQRDAAARVAGQLGVRMAGLGQHVRTLSGGNQQKVVIGKWLLADTKVLILDEPTRGIDVGAKVEIYQLINELTAAGAAVLMISSDLPEVLGMSDRVLVMAQGRIAGELGADEATQDSVMALAVSTNQYKPDKSDKPDASAGKTDQKEAPRGH

SEQ ID NO: 38762 - DNA, 1542 bp, Streptomyces avermitilis MA-4680; identical to SEQ ID NO: 27298
  CDS (1)..(1542): transl_table=11

SEQ ID NO: 38763 - protein, 513 aa, Streptomyces avermitilis MA-4680; identical to SEQ ID NO: 27299

SEQ ID NO: 38764 - DNA, 1530 bp, Streptomyces avermitilis MA-4680
  CDS (1)..(1530): transl_table=11
atgaccccgccgccgagtgacgctcccccggcggccgtcgaactccgcgggatcaccaagcgtttccccggcaccctcgccaacgacgccgtcgacctgacggtccgccgcggcgagatccacgccctgatgggcgagaacggcgcgggcaagtccaccctgatgtcggtcctgtacggcatggagcggcccgacgccggttcgatccggatcgacgggcgcgaggtgtccttcgccgatcccggtgccgcgatggccgccgggctcggcatggtgcaccagagcttcaagctgttcgactcgctgacggtcgccgagaacgtcgtgtacgccgccgagccgcgccgcttcggtctggtggaccggtccgcggcccgtcggcgggtgcgcgaactcgccgaggtgcacggcctcgccgtggacccggacgcccgcgtcggtgagctgccggtcggtctgcgccagcgggtggagatcctgaagctgctgcaccgcggcgcccggacgctcatcctcgacgagccgaccgcggtgctcacgcccgccgaggccgacgcgctgttcgcggtgctcaagtcgctggccgccgagggccgtacggtcatcctggtcacgcacaagctgcgcgaggtcctcgaaggcagcgaccgtgtgacggtgctgcgggacggcagggtcgtcgcccggctgcgcaccgccgggaccacggccgacgagatcgcggccgcgatgaccggccgcgcggtggaactggaccgcgtccacgcgccgggcacaccggccgacgtggtcctgggcgtgcgggggctcaccacggacgccgtgcgcgaggtcgaactgacggtccgcgcgggcgagatcgtcggtatcgcgggcgtcgccggcaacgggcagagcgagctggtcgaggcactggccgggctgcggccgaccgccgccgggcaggtcacgctgcggggcgaggacatcacgcacgcctcggcgaccgagcggcgcgccaggggcctcgcgtatgtgcccgaggaccggcacgcggtcggcaccgcgcccgccgcgtccgtcgcggacaacctcgcgatggggcaccaccgaacgtcgctgtcgtcccggggactgctgtcagccgcggccgtccgcgcccacgcgctggggctcgtcgagcgcttcggtatcaaggcggccacccccgaggtgcccgcgtccgccctgtccggcggcaatctccagaagctgctgatcggccgcgagctcgcccacgaggcaccgctgctgctggtcgaacagcccacgcgcggcgtcgacatcggcgccgtccagaacatccacgaccagctgatcgcctaccgcgacgccggtcacgccgtactcctggtctcggccgagctgagcgagatccgcgggctcgccgaccgggtgctcgtcatgtacgagggccgggtgacggcgacgtacccgaaggacgaggcggacgagcggacgctggggctcgcgatggcgggagccgccgcaccggcagaggtcggagactga

SEQ ID NO: 38765 - protein, 509 aa, Streptomyces avermitilis MA-4680
MTPPPSDAPPAAVELRGITKRFPGTLANDAVDLTVRRGEIHALMGENGAGKSTLMSVLYGMERPDAGSIRIDGREVSFADPGAAMAAGLGMVHQSFKLFDSLTVAENVVYAAEPRRFGLVDRSAARRRVRELAEVHGLAVDPDARVGELPVGLRQRVEILKLLHRGARTLILDEPTAVLTPAEADALFAVLKSLAAEGRTVILVTHKLREVLEGSDRVTVLRDGRVVARLRTAGTTADEIAAAMTGRAVELDRVHAPGTPADVVLGVRGLTTDAVREVELTVRAGEIVGIAGVAGNGQSELVEALAGLRPTAAGQVTLRGEDITHASATERRARGLAYVPEDRHAVGTAPAASVADNLAMGHHRTSLSSRGLLSAAAVRAHALGLVERFGIKAATPEVPASALSGGNLQKLLIGRELAHEAPLLLVEQPTRGVDIGAVQNIHDQLIAYRDAGHAVLLVSAELSEIRGLADRVLVMYEGRVTATYPKDEADERTLGLAMAGAAAPAEVGD

SEQ ID NO: 38766 - DNA, 1518 bp, Streptomyces avermitilis MA-4680
  CDS (1)..(1518): transl_table=11
atgacccacccgtccgacacgggtccggcccccgtgctggcgctcgaggacatctccaagtccttcggcgccgtgcgcgccctgcgggacgtctccctcgagctgttccccggcgaggtgcacgcgctcgccggtgagaacggcgcggggaagtcgaccctcatcaagacgctcgccggggtgcaccgaccggacgccggccaggtgctgctcgacggccggccgaccgtcttccacggtcccgccgacgcccgggacgcgggcatcgccgtgatctaccaggaaccgacgctcttccccgacctgtcgatcgccgagaacatctacatgggccgccggccccgccgctccttcggccgtatcgatcacaaggccacccgggccgcgaccgccgcgctgatgcggcgcctcggcgtcgaactcgaccccgaacgccccgcgcgcggactgtccatcgccgatcagcagatcgtcgagatcgccaaggcgctctccttcgacgcccgggtcctgatcatggacgagccgaccgcggccctgaccggcagcgaggtggcgcgtctgttcggtgtcgtccgcacgctgcgcgagcagggcgcggcggtgctgttcatctcgcaccgcctggaggagatcttccagatctgccaacgggtcaccaccctgcgcgacggtgccctgatctccagcgaaccgctggacggcatgacggaggacgacctcgtacggcggatggtcggccgcgacctcgacgagctgtaccccaagcaggaggtgcgggcgggcgaggtggcgatgagcgtgcgccgcctcaccagggagggcgtcttcaccgacgtctccttcgacgtccggcgcggcgagatcgtcggcctggccgggctcgtcggcgcgggacgcacggaggtggcacgggccgtcttcggcatcgaccgctgggacgcgggcgaggtcgaggtcgagggacgcaggctgacgaacggagccccgtccacggccatggccgccgggctcgccctcgtccccgaggaccggcgcgcccaggggctggtgatgaacatgtccatcgagcggaacatcgggctcaccggactgcggactaccgtccgggccgggctcgtggaccggggcgccgagcgcagccgctccctcgactgggccgccaagctccaggtcaagtacgcgcgcatcgccgacgccgtctccacgctgtccggcggcaaccagcagaaggtggtcctcgccaagtggctcgccaccggtcccagggtgctgatcgtcgacgagccgacccgcggtatcgacgtcggtacgaaggccgaggtgcaccggctgctctccgcactggccgcggacggagtggccgtcctgatgatctcctccgatctgcccgagatcctcggcatggccgatcgcgtgctcgtgatgcacgagggccgcgtcaccgccgagatcccgcgctccgaagccaccgaggaatccgtgatggccgcggccaccgggagggccgccgcatga

SEQ ID NO: 38767 - protein, 505 aa, Streptomyces avermitilis MA-4680
MTHPSDTGPAPVLALEDISKSFGAVRALRDVSLELFPGEVHALAGENGAGKSTLIKTLAGVHRPDAGQVLLDGRPTVFHGPADARDAGIAVIYQEPTLFPDLSIAENIYMGRRPRRSFGRIDHKATRAATAALMRRLGVELDPERPARGLSIADQQIVEIAKALSFDARVLIMDEPTAALTGSEVARLFGVVRTLREQGAAVLFISHRLEEIFQICQRVTTLRDGALISSEPLDGMTEDDLVRRMVGRDLDELYPKQEVRAGEVAMSVRRLTREGVFTDVSFDVRRGEIVGLAGLVGAGRTEVARAVFGIDRWDAGEVEVEGRRLTNGAPSTAMAAGLALVPEDRRAQGLVMNMSIERNIGLTGLRTTVRAGLVDRGAERSRSLDWAAKLQVKYARIADAVSTLSGGNQQKVVLAKWLATGPRVLIVDEPTRGIDVGTKAEVHRLLSALAADGVAVLMISSDLPEILGMADRVLVMHEGRVTAEIPRSEATEESVMAAATGRAAA

SEQ ID NO: 38768 - DNA, 1491 bp, Bacillus cereus ATCC 14579
  CDS (1)..(1491): transl_table=11
atgggaatgcatattgaaatgaaaaacatttcaaaggcgttcaatggcaatcctgttttgaagaatgcacagtttatgattgaaacaggagaagtccatgcattgatgggggaaaatggagcgggtaaatcaacgctcatgaagattttaacaggtgtatacaaaaaagatggtgggacaatcaagattgatgggcaagagcgcacctttaaaaatgcgaaagaagctgaagagtacggcatcgcatttatacatcaagaactaaacatattgccgaatttaacagtagctgaaaatatgtttctcggtaaagagttaatgtatgggaaaacaggtattttacgcactcgacaaatgaacgcgattgcgcagcagcaactagcagagctagggctgcatgtaagaggcgctatgttagcagaggaattatcggttggacaacagcaaattatcgaaattgcgaaagcattaatgacaaacgcgagcgttattattatggatgaacctactgcggcactgacggatcgtgaaatcgaaacgctctttacagtaatcaataagttacgtaaagaaggtgtttcattcgtgtacatttcgcatcgtatggaagagattttctcaatatgtgatgctattacgattttgcgtgatggagaatacgtgggaaagagattaattccagaaacatcatttgatgaagtagtgagtatgatggtggggcgcagcattggtgaacgttacccagagcgaaatagtcaaattggtgatgtcatttttgaaatgcgtaatggaacgaagaaagggaaatttgaaaatgtttcgtttcaagtgaggaaaggtgaaatccttggtgtagctggtttgatgggggctggtcgcactgatattatgaaagcgatatttggttatgaacctttagactctggacaaatttttataaatggacaagaagtaaagattgatagtccaatagatgcaattagacaaagaattgctttcattacagaagatagaaagtctgaaggattagtgttagatttttcaattcgagaaaatttagctttaccgaatttagaaaatctttcaaagggaagtgttctaagcaatgagctagaacaacagtttacagaggatatgatgaagcttcttaatgtgaaagcatctagcggggagcaggcagtgaaatctctttctggtggaaatcagcaaaagattgtaatcgcaaaatggctaggcattcatccacaattactcattttagatgagccaacaagaggtgttgatgttggagcgaaaaaagaaatttactctattatgaataagcttacagagcaaggcgatgccgttattatggtatcatctgagcttccggaagttttagggatgagtgatcgagttcttgttattcatgaaggaaaagtcggcggaattttagggaaagatgaggcatcacaagagtctattatggcactagctacagggggagagtaa

SEQ ID NO: 38769 - protein, 496 aa, Bacillus cereus ATCC 14579
MGMHIEMKNISKAFNGNPVLKNAQFMIETGEVHALMGENGAGKSTLMKILTGVYKKDGGTIKIDGQERTFKNAKEAEEYGIAFIHQELNILPNLTVAENMFLGKELMYGKTGILRTRQMNAIAQQQLAELGLHVRGAMLAEELSVGQQQIIEIAKALMTNASVIIMDEPTAALTDREIETLFTVINKLRKEGVSFVYISHRMEEIFSICDAITILRDGEYVGKRLIPETSFDEVVSMMVGRSIGERYPERNSQIGDVIFEMRNGTKKGKFENVSFQVRKGEILGVAGLMGAGRTDIMKAIFGYEPLDSGQIFINGQEVKIDSPIDAIRQRIAFITEDRKSEGLVLDFSIRENLALPNLENLSKGSVLSNELEQQFTEDMMKLLNVKASSGEQAVKSLSGGNQQKIVIAKWLGIHPQLLILDEPTRGVDVGAKKEIYSIMNKLTEQGDAVIMVSSELPEVLGMSDRVLVIHEGKVGGILGKDEASQESIMALATGGE

SEQ ID NO: 38770 - DNA, 1536 bp, Rhodopirellula baltica SH 1
  CDS (1)..(1536): transl_table=11
atgattgtctccgatgacgtggtgtttgaggccaaacagatttcgaagctgtttccaggcgtgaaagcgttggacggcgttgacctgacgttgcgagcggggaggctcaccacgttgctcggcgagaatggcgctggcaaatcaacgttgatgaaaatattggcgggagtgcaaccgcccgacgaaggcgagttgttggtgcagggtgaaccggttcatttcaccagcccacgcgacgcgcaggatcacggcatcgcgatgatccatcaagaactgagtttggtgcccgatctgaccgtcgccgaaaacattttccttggccgtgagccgctgcgtttcgaaacgctgattgactacaccgaactgaaccgtcaagcaaacgaatggttgaaacgtttggaactcgacgtgtcgccaacgacgcccgtccggcgactgcgagtcggtcaacaacagttggttgagattgctcgcgcgttggctggcaacgttcgaatcctgatcatggatgagcccacctccgcaatcaccgaacgcgagacggaggttctgttccgatgcattgcggatctaaagaaacagggtgtcgcgatcgtctatatcactcaccgcttggaagaactcgaacagattgctgacgacattgtcgtgatgcgtgatggttgcttgatcggcacggccgagtttggtgagctcagccacgacgcaatggttcgaatgatggttggacgagatgtgaaaatcctttccaagcagtcttcctccaacaatcagccggttcttcgtgccgaagggatctcgctcagccatccaacacggcccggcgactacctcgtgcacgaagttgacatgcacgtttgcaaaggcgaagtgctgggcatctttggattgatgggggccggtcgcacggaattgctggagtgtttgttcggactgcacccgacggcgtcgaccgggcaggtgagcatgcacgatcgaagtgttcgattgagaaaccccgccgatgcaatttctcatggtttggcgttggtccccgaggaccgaaagcaggatggtttggtgttgtcgatgtccgtcggtgaaaacgcgagcctggcgagcctcaaacacgctgaacggtttggcttcatcgatcgtgggcgggaacgcgagcacactcggcgtttcgtggaacgttttcgcgtgaagacaccgtcgctgcgtgaaaagatcatcaacttgagtggtggcaaccagcagaaagtgatcttggcgaaatggttggcgactgggcctgccgtgctgatgctcgacgagcccactcgcgggatcgatatccatgccaagaacgagatctattcgctcatcaatgaactgaccgctgacggattggcggtgatcatggtttcatcggaattgcccgaggtgatggcggtttccgatcggattttggtgatgtgcgaagggcgtgcaacccaatcgttcgaccgttctgaggccacggaggaaaatattctgcaagcggctttaccgagaaggaactcgattccatgttag

SEQ ID NO: 38771 - protein, 511 aa, Rhodopirellula baltica SH 1
MIVSDDVVFEAKQISKLFPGVKALDGVDLTLRAGRLTTLLGENGAGKSTLMKILAGVQPPDEGELLVQGEPVHFTSPRDAQDHGIAMIHQELSLVPDLTVAENIFLGREPLRFETLIDYTELNRQANEWLKRLELDVSPTTPVRRLRVGQQQLVEIARALAGNVRILIMDEPTSAITERETEVLFRCIADLKKQGVAIVYITHRLEELEQIADDIVVMRDGCLIGTAEFGELSHDAMVRMMVGRDVKILSKQSSSNNQPVLRAEGISLSHPTRPGDYLVHEVDMHVCKGEVLGIFGLMGAGRTELLECLFGLHPTASTGQVSMHDRSVRLRNPADAISHGLALVPEDRKQDGLVLSMSVGENASLASLKHAERFGFIDRGREREHTRRFVERFRVKTPSLREKIINLSGGNQQKVILAKWLATGPAVLMLDEPTRGIDIHAKNEIYSLINELTADGLAVIMVSSELPEVMAVSDRILVMCEGRATQSFDRSEATEENILQAALPRRNSIPC

SEQ ID NO: 38772 - DNA, 1569 bp, Rhodopirellula baltica SH 1
  CDS (1)..(1569): transl_table=11
atgaaggtcgctctttcggttcgaggcctgacgaagtcttacggcaacgtcacggtgctgaacgacgtctccatcgattttcatgccgggcatctacacgctttgcttggtgccaatggtgctgggaaaagcacgctgtgcaaaatcatcagtggattgatcccagcgaccggtgggcagatgtctctggacgccagtgactatcagcccggcagcaaacaggatgcggaggcgagtggagttcagatcgttcaacaagaattgaatttgattgaaacgttgtcggtcgcggaaaaccttcgcctggcgtctcttcccaaccggttcggcgttttacgaatgagcgagctgcatcgttccgcacgtcaaatattggatcggtttggtctgcccgatgtcgatacacgcacgattgtcggcagcttgggggtcggcaaacaacagatgatcgaaatcgcggcggcgctagcccgtgacgctcgcgttttgattttggatgaaccaacggccgctctttccggaagtgaatccgaagagctgtttgcacatctcacccagatgcgcaagcaaggtgtcgcgatcatttacatctcgcaccgactcgaagaagttcagcaactgtccgacgaagtcagcgtgctgcgtgatgggcgactggttacaaccgaacccatcgcaaagatcaatcgcgaaaagatggttgcttggatgagttccgaggaagaagcccgaggcggttcaaatcacacagcggccacctttgaaagtcatcgtcgaggcgaggtgggattgtcggtgcagggtatctcgtgcgggatggtcgacaacgtttcgtttgatgttcatcgaggagaacgattgggaatcgcaggattggtggggtccggaagaacggaattgttgcgagcgatctttggtgccgacgtggccgattctggacatgtgcggttggcggatggcgaggcggttcgcttcacccaccccagtcaggccgttgaagctggtttcgcaatggtgaccgaagatcgcaagcaaaatgggttgttgttgactcagccgattcgaaccaacacatcgttggccgcactcgccagcaaattttcagccaaaggatggatacgacaaacggcggaggttgaatcggccagtgcgatccacgcctcgctcgaaactcggtgccaatccttggagcaacctgtcggcacgctcagcggtggcaatcaacaaaaggtcgcggtggccaagtggttgacgcgtggtgccgaggtctacctgttcgatgaaccgtctcgcgggattgatgtggccgctcgcgcaagactttatgaactgtttgaggaattggccaaacaaggcaagacgatcgtgattgtgagcagtgatttggaagagttgtttgaaacgtgcgatgcaatcgcagtcatgtccgccggcagaatggtgacaaagttcgaacgagacgacttcagcgaagattcgattttggaagcttccttcgcggggcaagaatcgaagcggaccaccgcggagtcggatgacagatggcagaacgaagaggcgacaccatga

SEQ ID NO: 38773 - protein, 522 aa, Rhodopirellula baltica SH 1
MKVALSVRGLTKSYGNVTVLNDVSIDFHAGHLHALLGANGAGKSTLCKIISGLIPATGGQMSLDASDYQPGSKQDAEASGVQIVQQELNLIETLSVAENLRLASLPNRFGVLRMSELHRSARQILDRFGLPDVDTRTIVGSLGVGKQQMIEIAAALARDARVLILDEPTAALSGSESEELFAHLTQMRKQGVAIIYISHRLEEVQQLSDEVSVLRDGRLVTTEPIAKINREKMVAWMSSEEEARGGSNHTAATFESHRRGEVGLSVQGISCGMVDNVSFDVHRGERLGIAGLVGSGRTELLRAIFGADVADSGHVRLADGEAVRFTHPSQAVEAGFAMVTEDRKQNGLLLTQPIRTNTSLAALASKFSAKGWIRQTAEVESASAIHASLETRCQSLEQPVGTLSGGNQQKVAVAKWLTRGAEVYLFDEPSRGIDVAARARLYELFEELAKQGKTIVIVSSDLEELFETCDAIAVMSAGRMVTKFERDDFSEDSILEASFAGQESKRTTAESDDRWQNEEATP

SEQ ID NO: 38774 - DNA, 1524 bp, Rhodopirellula baltica SH 1
  CDS (1)..(1524): transl_table=11
gtgatccagccacaggcggacaaccccgatcaaccctctcgcttgcggttgtcgggaatcagtaaacggtttggctccacccaagctttgtcgaatgtttcgatggaagtggaaggtggccaagccatcgcggttatcggtgaaaacggtgccggcaaaagtactttgatgaaggtgctggccgggatcgtctcgccggaccagggtcaaattgaattggacggtcaagtcctttcctggtccggaccgcgcgacgcgattgatgccgggatcgcgttgattcatcaagagctgaacctgcacgacaacctgagcgttgccgagaatttgtttctcggccgtgagccctcccgatttggtttgctcgatcgggcggagttacgacgcacggcgtcatcatggctggatcgagttggtttgtcggtgtccccggatgcgcccgtcgggccacttcccattgcgtccaagcaattgatcgagatcgcgcgagctttgtcgaccgatgcacgcgtggtcatcatggacgaaccgaccagcagtctgagcgaagaggaatcgctgcggttgttcgagttgatcgaacggcttcgcgaagaaggtgttgcgattctctatatctcgcaccgcttgcacgaaatcattcgcttggccgatcgagtggaagtgctgcgggatggtgagcatgtcgaaacgttgacgaaaggcaatatcacgcatgattcgatggttcgtgcgatggtggggcgtgatctgacgcgtcgttctcacgaaaccgcgaaagagtgtcttgagcctcgactgaccgtgtcgggtttgagggtcggatcccgcgccgcacctccggttgatttgcaggtgctcggtggcgaagtggtcgccttggttggattggtcggtgcagggcgaaccgagatcgtagaaacgatcttcggcgtccgcgaacggttcggtggcgagatcttgattgactccgagccgctcaaaggcggtgtcgactccgcgatcgcagccggattggcgttggtaccggaagaccgcaagcggactgggctgttgatccaatcgagtgttcgtgacaacgcgaccattgtttcgatgacgcgggacggagtgtttcgcaatcgcaaaacggaacgtgcgacggccgcagaattgatcgaccggctgcgagtgaagactgcttcgcaagaaattgagattgcttctttgtccggtggaaaccagcaaaaggtggccttggcgaagtggttggccggtgacgtgaaggtcttgatgctcgatgagccaacacgaggcgtcgacattggcgcaaaatctgagatctacgaagtgatcgatcagttggcgagccaaggcatgggtgtgttggtggtcagcagtgaaatggaagaagtctttgcgatcgccgatcgggtgattgtcatttccgatggttgtgtcgcgggtgaattgacaagatcggaattgaccgaagaggcgatcatgcgtctcgcggtggcaaagggcgaacctgcccaaggttga

SEQ ID NO: 38775 - protein, 507 aa, Rhodopirellula baltica SH 1
MIQPQADNPDQPSRLRLSGISKRFGSTQALSNVSMEVEGGQAIAVIGENGAGKSTLMKVLAGIVSPDQGQIELDGQVLSWSGPRDAIDAGIALIHQELNLHDNLSVAENLFLGREPSRFGLLDRAELRRTASSWLDRVGLSVSPDAPVGPLPIASKQLIEIARALSTDARVVIMDEPTSSLSEEESLRLFELIERLREEGVAILYISHRLHEIIRLADRVEVLRDGEHVETLTKGNITHDSMVRAMVGRDLTRRSHETAKECLEPRLTVSGLRVGSRAAPPVDLQVLGGEVVALVGLVGAGRTEIVETIFGVRERFGGEILIDSEPLKGGVDSAIAAGLALVPEDRKRTGLLIQSSVRDNATIVSMTRDGVFRNRKTERATAAELIDRLRVKTASQEIEIASLSGGNQQKVALAKWLAGDVKVLMLDEPTRGVDIGAKSEIYEVIDQLASQGMGVLVVSSEMEEVFAIADRVIVISDGCVAGELTRSELTEEAIMRLAVAKGEPAQG

SEQ ID NO: 38776 - DNA, 1668 bp, Rhodopirellula baltica SH 1
  CDS (1)..(1668): transl_table=11
ttgcagccaagacccattggatctgcttcgcggagccggcgtcgacatgacccagcccgaagcggtgaagacgactttggatcacttcgccagtctctccaagcaactcgacgaactgctgtgaccgacgccacccatcgtctggaactgaccggaattcgcaaacactttggatcgaccaaggcgctcgacggcgtcgatttggtcgtcggtcctggcgaagtgcatgcgatcatcggcgaaaacggggctggcaagagcaccttgatgaaggtcttgtccggtgctcatcgcccagacgccggtcgaatccaaatcgatggggaagaggttgatctgagcaacccgcgagcctcccaggccgcgggtatcgcgatgatttatcaggagctgaacctggctcctgatttgtcggtcgcggacaacatcaccttgggcgacgaaccgtctcgatggggcggacgcggaggtggttggctggatcgtggtcggcaacatgcgatcgccaaggaagctttgaagcggttgcactgcgaagacattgatccggcgcaacccgttcgcaaattgtcgatcgctcagcagcaaatggtcgagatcgctcgcgcggttgtggccgatcgcaagctgaaactgttgatcttggacgaacctaccagcagcctgacccaggtcgacaccgagaacctgttcgcggtgatcgagcgactgaaatccgaaggcgtcagcgtgctgtacatcagccactttctggaagagtgtcagtcggtcggtgatcgcttcaccgtccttcgagatggcgtgacagcaggctcaggcagcttgactgaaaacgacccggattggatgccgatggattccatcgtgcagatgatggttggtcgtgagatctcgcaactctatcccgacctcgaccatgttcgtggcgaacccgtgttgcaactcgaagatgttcgcgggtcacgtttgcctaccgatgtttcattgacgctgcaccgaggcgagatcttggggctcgccggattgatcggcgcgggacggacggaaacgattcgagccctgtttgggctggatcgattggcgtctggcaaagtcgtcgtgatgggtcgcgaagatgcgcggcgggatccgcagaagagttggattcgagacgcgatgggtttggtgtccgaggatcgcaagaacgaaggtttgttcttggaacgcagtctgaccgagaacctgacgctgactcgaaccgagccctaccgacgaggcccgttccttcgtcgatcggaaatgaagaaggcgaccgagcattggatgaaagaattggcggttcgggcgagcgacccggaccaggcgatcggtgagctatccggtggtaatcaacagaagatcgcattggctcgtttgctgcatcatgattgcgagatcttgttgcttgatgagcccactcgcggcatcgacatcggcagcaaacgcacgatctatcaaacgattggtgagctggcggcggagggcaaagcgatcttgttgatcagcagttacttgcccgagttgctcggcgtctgcgattcaattggcgtgattcaccaaggccgcttgaccagcatccgtcccgccagcgaatggaccgaacacagtctgctgaccgaagcgctgggcgccgcggcaacatccgagtga

SEQ ID NO: 38777 - protein, 555 aa, Rhodopirellula baltica SH 1
MQPRPIGSASRSRRRHDPARSGEDDFGSLRQSLQATRRTAVTDATHRLELTGIRKHFGSTKALDGVDLVVGPGEVHAIIGENGAGKSTLMKVLSGAHRPDAGRIQIDGEEVDLSNPRASQAAGIAMIYQELNLAPDLSVADNITLGDEPSRWGGRGGGWLDRGRQHAIAKEALKRLHCEDIDPAQPVRKLSIAQQQMVEIARAVVADRKLKLLILDEPTSSLTQVDTENLFAVIERLKSEGVSVLYISHFLEECQSVGDRFTVLRDGVTAGSGSLTENDPDWMPMDSIVQMMVGREISQLYPDLDHVRGEPVLQLEDVRGSRLPTDVSLTLHRGEILGLAGLIGAGRTETIRALFGLDRLASGKVVVMGREDARRDPQKSWIRDAMGLVSEDRKNEGLFLERSLTENLTLTRTEPYRRGPFLRRSEMKKATEHWMKELAVRASDPDQAIGELSGGNQQKIALARLLHHDCEILLLDEPTRGIDIGSKRTIYQTIGELAAEGKAILLISSYLPELLGVCDSIGVIHQGRLTSIRPASEWTEHSLLTEALGAAATSE

SEQ ID NO: 38778 - DNA, 1554 bp, Bordetella bronchiseptica RB50
  CDS (1)..(1554): transl_table=11
atgatgcattccgaaggcgccgccagcgcggcgccctccccccagccgccgccgctgttgcgcttgcggcagatcagcaagcgcttcggcgccacccaggcgctggacgatgtgtccgtatcgttcgaggccggcaaggtgcactgcctgctgggcgagaacggcgcgggcaaatcgaccataggcaagatcgtcgccgggctgtttgcgccggacagcggcgcgctgctgctcgacggccacgaagtgcgcctggccgacgccagcgaggcgcgccggcgcggcatcgccgtcgtgtaccaggagctgtcgctggcgccggacctgtcggtgcgcgccaacctgtgcctgggcgccgaggccgggcgccggccctggtcgcccttgcggcgcggcgccgagaccgcgcaagtcggcgccgtgctggcgcggctggggctggacctggacatggaagcgccggtgcgccagctgcccgccggcgtgcagcagctggtggagatcgccaagtcgctgatgagcagcccgcgcatcgtgatcttcgacgagccgaccgccatgctgggcgcggccgagaagcagcgcttcttcgaggtggtgcgcggcctgcgcgccgacggcatcgcctgcatcctggtcacccaccacatggacgacgtcgaagcggtgggcgattgcgtcaccatcatgcgcaatggccggcgcgtcgactcgttcgacctgcacgccggcatcaccagcgacgcggtgctggagaaactgaccggacgccgcgaagtgctggcggccgccgccgaggcgccgcgccggctcggcgccacccggctgcgcatcgcgctgccggccggcggcgggctggccggcatcgaagcgcgcgccggcgaggtggtgggcttctatggcgtgctgggctgcggcgcgggcgaactgatgtacggcctggtgggcctggacggaccgccgcgcgccgactactacctggacgacgccccttatcggccgcgcaatccggccgcggccttgcgccagggcgtggggctgctgccggccggccgccagagccacggcgtgctgaccggccgctcgatccgcgagaacctgatgctgacccagctcgaccgcgtcagccgctggcaatgcatcgatccggcccgcgaggccgcctgggcgcgcgaacagctcgaacgcgccggcgtcaagcacggcgaccccgccgacccgatcgaaagcctgagcggcggcaaccagcaaaaggccttgctggcccgcgccctgggcgcggcgcgccggctgttgctgctgcacgaacccacggccggcgtggacatcctggccaagcagcacatccacgaactggtgcgcgcggcggccgcgcaggggttgaccgtcgtggtgctgtccagcgacctgcccgaggtgatcgccctgtgcgacaccgtctacaccttcttccacggcgcggccgtcgcgcgctacgcgcagcccggcccggattgccaaccccacatcctcgccgatgtcctcggccaacgggagtcccagcatgctcactaa

SEQ ID NO: 38779 - protein, 517 aa, Bordetella bronchiseptica RB50
MMHSEGAASAAPSPQPPPLLRLRQISKRFGATQALDDVSVSFEAGKVHCLLGENGAGKSTIGKIVAGLFAPDSGALLLDGHEVRLADASEARRRGIAVVYQELSLAPDLSVRANLCLGAEAGRRPWSPLRRGAETAQVGAVLARLGLDLDMEAPVRQLPAGVQQLVEIAKSLMSSPRIVIFDEPTAMLGAAEKQRFFEVVRGLRADGIACILVTHHMDDVEAVGDCVTIMRNGRRVDSFDLHAGITSDAVLEKLTGRREVLAAAAEAPRRLGATRLRIALPAGGGLAGIEARAGEVVGFYGVLGCGAGELMYGLVGLDGPPRADYYLDDAPYRPRNPAAALRQGVGLLPAGRQSHGVLTGRSIRENLMLTQLDRVSRWQCIDPAREAAWAREQLERAGVKHGDPADPIESLSGGNQQKALLARALGAARRLLLLHEPTAGVDILAKQHIHELVRAAAAQGLTVVVLSSDLPEVIALCDTVYTFFHGAAVARYAQPGPDCQPHILADVLGQRESQHAH

SEQ ID NO: 38780 - DNA, 1509 bp, Chromobacterium violaceum ATCC 12472
  CDS (1)..(1509): transl_table=11
atgcaagtgaccatgcgcggcatcagcaaggctttcgggccggtcaaggtgctggagaacgtggagttcacgctgcgcggcggcgagatccacgcgctgatgggcgagaacggcgccggcaagtccacgctgatgaagatactcagcggcgtgcaccgcgccgacgccggcgagatcctgctggacggccgcaaggccgaactgaggagcaccgaggcggcggaagcggccggcatcgccatcatccaccaggaattgaacctgattccgcagctgtcggtgatggagaacctgtttctcggccgcgagccgtcccgcttcggcatcatcgactacgcggcgatgcggcgcgaggcgcgggcgcagctggaggcgctgggcgccggcggcatcgatccggacgccgaggccggcagcctgtccatcggccagcagcagatggtggagatcgccaaggcgctggcgctgaacgcccgcgtgctgatcatggacgagccgacggcggcgctcaccgagcgcgagatcgaccggctgttcgagctgatggcccagctgagggaaaacggcgcggccatcgtctacgtctcgcaccggatggaagagatcttccgcgtctgcgaccgcatcagcgtgctgcgcgatggctgcttcgtcggcgagcgcgaaatcgcccgcaccgatttcgacgaagtggtgcggatgatggtggggcgcgagatcggcgaccgctatccgaagcgcgaggccgcgccgggcgaggtgaggctgaaggtggagaacctggccgacgagaacatgatcgccggcatcggcttcgaggtgcgcgccggcgaggtgctgggcatcgccgggctgatgggctcgggacgcagcgacatcctgaagacgctgttcggcgccaagcgccgcaccgccggccgcgtcgagctggacggtaaggaattgaaagtggccgcgccgggcgacgccatcgccgccggcctgggcttcgtgcccgaagaccgcaaaagcaaggggctggtgctgggcatgtcgctgcgcgaaaacgcgaccctggtgcatctggaccagtacgcccggctgggcgtggtcagcgccgccgaggaaaagcgggcggtggacggcttgatcgctcagctgcgcatccgcgcccgcgacgccgagctcgacgtcaagtcgctgtccggcggcaaccagcagaaagtggtgttcgccaaatggctggcgaatccgcccaaggtgctgctgctggacgagccgacgcgcggcgtcgacgtcggcggcaaggccgagatctaccacatcgtcaaccagctggccgccgccggcaccgccatcgtgatggtgtcgtccgagctgccggaagtgctggcgctgagcaaccgcatcctggtgctgcacgaaggccgccaggccggcatcttcgacgccgccggctgcagccaggaaaccctgatggccgccgcgaccggcggcgccgttcactccgaaaccaggaagcaagcatga

SEQ ID NO: 38781 - protein, 502 aa, Chromobacterium violaceum ATCC 12472
MQVTMRGISKAFGPVKVLENVEFTLRGGEIHALMGENGAGKSTLMKILSGVHRADAGEILLDGRKAELRSTEAAEAAGIAIIHQELNLIPQLSVMENLFLGREPSRFGIIDYAAMRREARAQLEALGAGGIDPDAEAGSLSIGQQQMVEIAKALALNARVLIMDEPTAALTEREIDRLFELMAQLRENGAAIVYVSHRMEEIFRVCDRISVLRDGCFVGEREIARTDFDEVVRMMVGREIGDRYPKREAAPGEVRLKVENLADENMIAGIGFEVRAGEVLGIAGLMGSGRSDILKTLFGAKRRTAGRVELDGKELKVAAPGDAIAAGLGFVPEDRKSKGLVLGMSLRENATLVHLDQYARLGVVSAAEEKRAVDGLIAQLRIRARDAELDVKSLSGGNQQKVVFAKWLANPPKVLLLDEPTRGVDVGGKAEIYHIVNQLAAAGTAIVMVSSELPEVLALSNRILVLHEGRQAGIFDAAGCSQETLMAAATGGAVHSETRKQA

SEQ ID NO: 38782 - DNA, 1488 bp, Gloeobacter violaceus PCC 7421
  CDS (1)..(1488): transl_table=11
atgcctctccttgctctcgaaaagatcacccgccgcttcgggccggtcacggtgctcgacggggtggatttcaccgtcgaggcgggggaggtgcacgcattggtcggtgaaaacggcgccggtaaatcgacgctgatgaaaattctctcgggcgcccttgctcccgacgcgggtaccgtccgctggcagggtgccgccgtccggttcgattcgccccgcgccgcccgcgccgccggcatcgccatgatccaccaggaactggcgctggtgccggcgttgtcggtggccgaaaatatctgcctgggggaggcgcagagctggtggcggccggtggactataggaacttcgaaaattcggcccgcgcggtactggagcggttgggccaaccgatcgacccgcgcacgccggtcggacggcttaatttgcccgaacagcagatggtcgagaccgcccgcgccctcaggcaaaaggcgcgcctgcttatcctcgatgaacccacggccagcctgagcgcccagcagagcgagcagctgtttgccgtgctcaggcggattcgcacggagggcacggcaattatctacatctcccaccgcctggaggaaatctttgccctttgcgatcgggtgacgattctgcgcaacggcaggcgcgtccactgcgctgcggtgggcgaactgtcgatggcggcggtggtgcgccacatggtgggccgcaccctcgaacccaccggcaccccggccgcttcgcaaaccggccgacccgtcctcaccgtgcacaatctgtgctgcggccggctcaggaatttgcacctggaactgcgcgcaggtgaggtggtggggctgatgggggtggccggggcgggccgctcccggttggtgcgcacgctgttcggtgcccaaaggcccgaggcgggagagattgtgctggatggacgaccggtggtctggcgctcgccccgcgacgccatcgcccgcggcatcggcctgttgggggaggaccgcaagcgccacagcctgctgcccgagcgctgcgtgcgcgaaaatatggccctggtgagcctgctcggccgcgcccgctggggagtcgtcgagcagtaccgcgagcggagtgcctgccgcgcactgggggggcaactgcgcctggcgccgcgcacccaggagatggccatccgcgccctgagcggcggcaaccagcaaaaggcgctattggggcgctggctgctcgccgggtgccgggtgctgctgctcgacgaaccgacccgcggcgtcgatgtcgaggccaaagccgagatctacggactcattcgcgccctcgccgcgggcggcaccgccgtgctggtggtctcttcggatctgcccgaattgaccttgctggccgagcgcctgctggtgctccagggcgggcgcatcgtgggcgagcagcggcctccctacgaccctcgggcgctgttggcccaggcgttgggggtggcagccgaggacggctga

SEQ ID NO: 38783 - protein, 495 aa, Gloeobacter violaceus PCC 7421
MPLLALEKITRRFGPVTVLDGVDFTVEAGEVHALVGENGAGKSTLMKILSGALAPDAGTVRWQGAAVRFDSPRAARAAGIAMIHQELALVPALSVAENICLGEAQSWWRPVDYRNFENSARAVLERLGQPIDPRTPVGRLNLPEQQMVETARALRQKARLLILDEPTASLSAQQSEQLFAVLRRIRTEGTAIIYISHRLEEIFALCDRVTILRNGRRVHCAAVGELSMAAVVRHMVGRTLEPTGTPAASQTGRPVLTVHNLCCGRLRNLHLELRAGEVVGLMGVAGAGRSRLVRTLFGAQRPEAGEIVLDGRPVVWRSPRDAIARGIGLLGEDRKRHSLLPERCVRENMALVSLLGRARWGVVEQYRERSACRALGGQLRLAPRTQEMAIRALSGGNQQKALLGRWLLAGCRVLLLDEPTRGVDVEAKAEIYGLIRALAAGGTAVLVVSSDLPELTLLAERLLVLQGGRIVGEQRPPYDPRALLAQALGVAAEDG

SEQ ID NO: 38784 - DNA, 1506 bp, Photorhabdus luminescens subsp. laumondii TTO1
  CDS (1)..(1506): transl_table=11
atgcagcctgtactggaactaaaaggaattagtaaatcttttcctggtgtcaaagcattatctggtgcggcattacgtgtttatccaggtaaagtgatggcactggtgggagagaatggtgcaggtaagtccacgatgatgaaagtgttgactgggatatataccagagatacaggcacagttcattatttaggaaaagaagtgattttttctggccctagatcctctcaggaagcggggatcgggattatccatcaggaattaaatcttattccccaactgactattgctgaaaatattttcctgggacgcgaatttgttaataaattcggtgcaattgactggagaaaaatgtatcaggaagccgatcgcctgttaaaaaaattgaatctgagttacagcagtcaccgtttagtcgctgaactttctatcggtgatcaacaaatggttgaaattgctaaggtgctgagttttaaatccaaagttatcattatggatgagccgacggatgcgctgactgatacagaaactgaatcattatttcgcgtaatatatgaactaaaatctcagagatgtggcattgtttatatctcccatcgtttgagagaaatttttgaaatttgcgatgatgtaacggtatttcgtgatggacaatttattggtgaaaagtcagtaaaagagctaaaagaagagactctgattgaaatgatggttgggcgaaaactggaagatcagtatcctcgcctgaatttacctcggggtaaaaaacgacttgaagttaagcagatttctggccccggtgtgacaaatgccagtttttccctttatagcggggaaattttgggtatatcagggctaatgggggctggccgcactgaattgatgaaaattatttatggtgcgttgccaaaaactcaggggcaaatcacactggatggaacccccattgtaattcgtaaccctcaggatgggttagcttgtgggattgtttatatttcagaagatcgtaaacgtgatggcttagttttgggaatgtcaatcaaagataatatgtctcttactgccttgcgttatttcagtaaccggttaggtggtcttaatcataaagaagaacagaatgcagttagtgactttattaaattgtttagtatcaagacaccttcaatgggacaagttattggtttactttctggtggtaatcagcaaaaagtagctattgcccgtggattaatgaccagaccaaaagttcttattctggatgaacctacgcgtggtgtagatgttggtgcaaaaaaagaaatttatcagttaattaatcaattcaagaaagaggggttaagcattattctcgtttcttctgaaatgccagaagtgataggaatgagtgatcgtattttggttatgtgtgaaggccagatcagtggagaattttttgctgaacaggcaactcaagaaattttgatggcagcggctgtaggcaaacaatatggagcgattcaggagtaa

SEQ ID NO: 38785 - protein, 501 aa, Photorhabdus luminescens subsp. laumondii TTO1
MQPVLELKGISKSFPGVKALSGAALRVYPGKVMALVGENGAGKSTMMKVLTGIYTRDTGTVHYLGKEVIFSGPRSSQEAGIGIIHQELNLIPQLTIAENIFLGREFVNKFGAIDWRKMYQEADRLLKKLNLSYSSHRLVAELSIGDQQMVEIAKVLSFKSKVIIMDEPTDALTDTETESLFRVIYELKSQRCGIVYISHRLREIFEICDDVTVFRDGQFIGEKSVKELKEETLIEMMVGRKLEDQYPRLNLPRGKKRLEVKQISGPGVTNASFSLYSGEILGISGLMGAGRTELMKIIYGALPKTQGQITLDGTPIVIRNPQDGLACGIVYISEDRKRDGLVLGMSIKDNMSLTALRYFSNRLGGLNHKEEQNAVSDFIKLFSIKTPSMGQVIGLLSGGNQQKVAIARGLMTRPKVLILDEPTRGVDVGAKKEIYQLINQFKKEGLSIILVSSEMPEVIGMSDRILVMCEGQISGEFFAEQATQEILMAAAVGKQYGAIQE

SEQ ID NO: 38786 - DNA, 1536 bp, Photorhabdus luminescens subsp. laumondii TTO1; identical to SEQ ID NO: 27316
  CDS (1)..(1536): transl_table=11

SEQ ID NO: 38787 - protein, 511 aa, Photorhabdus luminescens subsp. laumondii TTO1; identical to SEQ ID NO: 27317

SEQ ID NO: 38788 - DNA, 1509 bp, Vibrio vulnificus YJ016
  CDS (1)..(1509): transl_table=11
atggtaaatcaaacacatgaattcctgttggagatgacaggagtaagtaaagagtttcctggggtaaaggcattagataaggttaatttaaacgttcgccctcattctattcatgcattaatgggagaaaatggggctggcaaatcaacactattaaaatgtctatttggtatttacgagaagaatgaaggaaatattctctttctcggcaaggaagtgaatttcacctcatcaaaagaagcattggaatccggtgtttctatggttcaccaagaattgaaccaagtaaaacaatgctccgtcatggataatatttggctcggtcgttatccaaagaaagggttctttgttgatcacgataaaatgtatcgcgacaccaaagcaatctttgccgaactggatatcgatatcgatcctaaagtcaaagtcgcgaccttatccgtatcacaaatgcagatggttgagatcgccaaagcgttctcctatgacgccaaaatcgtcatcatggatgaacccacctcatcgctcacggaaaaagaagtcagccacctgtttaccatcatcaacaagctgaaagagaaaggctgtggcgtggtgtacatctcgcacaagatggaagaaatctttgctatctgcgatgaaatcaccattttgcgcgatggacaatgggtcgacactcgccctctcaaaggactcgatatggaccagatcatcgccatgatggttggccgcgagttaacgcatcgcttccctgaaaaaaccaacacaccgaaagatgtgattttggaagtggaaaacctcaccgcgctcaaccaaccgtcgattcaagatgtgtcgtttgaactgaaagcgggcgaaatcttaggcgttgcgggccttgtgggttcacgcagaaccgacatcgtcgaaacgattttcggcgtacgcgaacgcagcgaagggcacattcgcttgcatggtcgtgagatgaaaaaccgcgatgcgcatgaagcgatcaacaacggttttgccctggtgaccgaagaacgtcgctccaccggcatctacggcaacctcgacatcaccttcaatgcgttggtggccaacgtcgatgagtacaaaaccaaaatgggcctactcagcgacaaaaaaatgaagagtgacacgcagtgggtgattgattccatgcgcgtgaaaacgccctctcatcaaacccacatcagctctttgtcggggggtaaccagcagaaagtcatcattggccgctggctgctcacgcaaccggaaatcctcatgctggatgaaccgacacgcgggatcgacgttggcgccaagtttgagatttaccaattaattctcgaattagccaagaaaaacaaaggcatcattattatttcttcggaaatgccggaattactgggtattacagaccgaatattagtcatgagtaatggccgcgcagcgggcatcgttaataccaaagaaacctcacagaatgaaatattagaactggcttctcgctatctctag

SEQ ID NO: 38789 - protein, 502 aa, Vibrio vulnificus YJ016
MVNQTHEFLLEMTGVSKEFPGVKALDKVNLNVRPHSIHALMGENGAGKSTLLKCLFGIYEKNEGNILFLGKEVNFTSSKEALESGVSMVHQELNQVKQCSVMDNIWLGRYPKKGFFVDHDKMYRDTKAIFAELDIDIDPKVKVATLSVSQMQMVEIAKAFSYDAKIVIMDEPTSSLTEKEVSHLFTIINKLKEKGCGVVYISHKMEEIFAICDEITILRDGQWVDTRPLKGLDMDQIIAMMVGRELTHRFPEKTNTPKDVILEVENLTALNQPSIQDVSFELKAGEILGVAGLVGSRRTDIVETIFGVRERSEGHIRLHGREMKNRDAHEAINNGFALVTEERRSTGIYGNLDITFNALVANVDEYKTKMGLLSDKKMKSDTQWVIDSMRVKTPSHQTHISSLSGGNQQKVIIGRWLLTQPEILMLDEPTRGIDVGAKFEIYQLILELAKKNKGIIIISSEMPELLGITDRILVMSNGRAAGIVNTKETSQNEILELASRYL

SEQ ID NO: 38790 - DNA, 1485 bp, Bacillus cereus ATCC 10987
  CDS (1)..(1485): transl_table=11
atgcgtattgaaatgaaaaatatttcaaaggcgttcaatggcaatcctgttttgaagaatgcacaatttatgattgaaacaggagaagtccatgcattgatgggggaaaatggagcgggtaaatcaacgctcatgaagattttaacaggtgtatacaaaaaagatggtggaacaatcacgattgatgggcaagagcacacctttaaaaatgcgaaagaagctgaagagtacggtattgcatttatacatcaagaattgaacatattatcgaatttaacagtagctgaaaatatgtttctcggtaaagagttaatgtatggaaagacagggattttgcgtacacgtcaaatgaatgcgattgcgcagcagcaactagcggaactagggttacatgtaaaaggcgctatgttggcaggagagttatcggttggacaacagcaaattatcgaaattgcgaaagcattaatgacaaacgcgagcgttattattatggatgagcctacagcggcattaacagatcgtgaaattgaaacgttgtttactgtcattaataaattacgtaaagaaggcgtttcgttcgtgtatatctcacaccgaatggaagaaattttttcaatatgtgataccattacgattttacgtgatggggaatacgtcggaaagagatccattccggaaacatcgtttgatgaagtagtgagtatgatggtggggcgcagcattggtgaacgttacccagaacggaatagtcaagttggcgatgttatttttgaaatccgtaatggaacgaaaaaagggaagtttgaaaatgtttcgtttcaagtgagaaaaggtgaaatccttggtgtagctggcttgatgggagcttgccgtacggatattatgaaagcgatatttggatacgaacctttagattctggccaaatttttataaatgggcaagaagtaaagattgatagtccgatagatgcgattagacaaagaatcgcattcattacagaggatagaaaatctgaagggttagtgctagatttctcaattcgagaaaatttagctttaccaaatttagaaagtctttcaaagggaagtgttctaagcgacgaactagaacaacagtttacagcggacatgatgaaacttcttaatgtgaaagcatctagtggagaacaagcggtgaaatctctttctggtggaaatcagcaaaaagttgttattgcaaaatggttaggtatccacccgcagttactcattttagatgagccaacaaggggtgttgatgttggagcaaaaaaagaaatttactctattatgaataagcttaccgagcaaggagatgcagttattatggtatcatctgagcttccagaagttttagggatgagtgatcgcgttcttgttattcatgaaggaaaagtcggcggcattttagagaaagatgaggcatcacaagagtctattatggcactagctacagggggagagtaa

SEQ ID NO: 38791 - protein, 494 aa, Bacillus cereus ATCC 10987
MRIEMKNISKAFNGNPVLKNAQFMIETGEVHALMGENGAGKSTLMKILTGVYKKDGGTITIDGQEHTFKNAKEAEEYGIAFIHQELNILSNLTVAENMFLGKELMYGKTGILRTRQMNAIAQQQLAELGLHVKGAMLAGELSVGQQQIIEIAKALMTNASVIIMDEPTAALTDREIETLFTVINKLRKEGVSFVYISHRMEEIFSICDTITILRDGEYVGKRSIPETSFDEVVSMMVGRSIGERYPERNSQVGDVIFEIRNGTKKGKFENVSFQVRKGEILGVAGLMGACRTDIMKAIFGYEPLDSGQIFINGQEVKIDSPIDAIRQRIAFITEDRKSEGLVLDFSIRENLALPNLESLSKGSVLSDELEQQFTADMMKLLNVKASSGEQAVKSLSGGNQQKVVIAKWLGIHPQLLILDEPTRGVDVGAKKEIYSIMNKLTEQGDAVIMVSSELPEVLGMSDRVLVIHEGKVGGILEKDEASQESIMALATGGE

SEQ ID NO: 38792 - DNA, 1533 bp, Bacillus cereus ATCC 10987
  CDS (1)..(1533): transl_table=11
atggaatacgtaattgagatgaacaatattacaaaagtattcccaggcattgtagcgaatgatgatattacgctgcaagtaaaacagggagaaatacatgctttacttggagaaaatggtgcagggaaatccacattgatgaatgtactatttggtttgtaccaaccagaacaaggtgaaattaaaattaaaggaaaacctgtaaaaattacaaatccgaatatagcaaatgaccttggtattgggatggtccatcagcattttatgcttgttcataattttacagttacagagaatattattcttggaaatgagccgaagaaaaacgggaaaattgctgttgaagaggcggcaaaagaaattaagcaattatctgaacagtatggtttggctgttgatccacatgcgaaaattgaagatatttctgttgggatgcagcaaagggttgaaatattaaagactctttatcgtggtgctgagattttaatatttgatgagccaaccgcggtgttaactcctcaagaaattcatgagttgattcaaattatgaaaaagcttgtgcaagaggggaaatctattatccttattacacataagttgaaagaaattatggaagtttgcgatcgttgtacaattattcgtaaaggtaaggggattggtactgttgatgtagcggaaacggatgagcataaacttgcagagttaatggtcggacgtcaagtgaattttaaaacagaaaaaatagaagctaaaccaatggaagaagtactatctattgcaaacctaattgttcatgatacgcgcaagttacctgctgtaaaaggccttgacttaactgttcgtgcaggagaaatcgttgggattgcagggattgatggaaatggtcaaagtgaattaatagaggcgattactggtttacgaaaagttgagtcaggttctattgcaattaaaggaaaagaaataacgaattggcctgttcgaagaataacagaagaggggattggtcatattcctgaagaccgtcataaacacggacttgttctcgatttttctgttcgggacaatattgttttacaaacatactataaaaatccattttcaaagaaagggattttaaattttagtaaaattacagaaaaagcgaaagcacttattgaacagtttgatgtacgtacacctagtgaacaaacgttagctcgcgctctatctggtggaaaccaacaaaaggcaattattgcacgtgaggtagatcgtaatccagatttattaattgcagcacagccaacacgtggtttagatgtaggtgcgattgaatttattcataaaaaattaattgagcagagagataatggtaaggcagtattacttttatctttagagctggatgaaattttaaatgtaagtgatcgagtggctgttatatatgaagggaaaattgtagcgattgtcgatgcgaaagaaacaaatgaacaacagcttggattattaatggccggcgggacagggaaagagaaggtgaacacaaatggctaa

SEQ ID NO: 38793 - protein, 510 aa, Bacillus cereus ATCC 10987
MEYVIEMNNITKVFPGIVANDDITLQVKQGEIHALLGENGAGKSTLMNVLFGLYQPEQGEIKIKGKPVKITNPNIANDLGIGMVHQHFMLVHNFTVTENIILGNEPKKNGKIAVEEAAKEIKQLSEQYGLAVDPHAKIEDISVGMQQRVEILKTLYRGAEILIFDEPTAVLTPQEIHELIQIMKKLVQEGKSIILITHKLKEIMEVCDRCTIIRKGKGIGTVDVAETDEHKLAELMVGRQVNFKTEKIEAKPMEEVLSIANLIVHDTRKLPAVKGLDLTVRAGEIVGIAGIDGNGQSELIEAITGLRKVESGSIAIKGKEITNWPVRRITEEGIGHIPEDRHKHGLVLDFSVRDNIVLQTYYKNPFSKKGILNFSKITEKAKALIEQFDVRTPSEQTLARALSGGNQQKAIIAREVDRNPDLLIAAQPTRGLDVGAIEFIHKKLIEQRDNGKAVLLLSLELDEILNVSDRVAVIYEGKIVAIVDAKETNEQQLGLLMAGGTGKEKVNTNG

SEQ ID NO: 38794 - DNA, 1572 bp, Yersinia pestis biovar Medievalis str. 91001
  CDS (1)..(1572): transl_table=11
atgtcagcaccccattctgcgttacaagccgagttggacgccgcacagtcaccttatctggcttttcgtggcatcggaaaaagtttccccggtgttctggcgctggatgatatcagtttcacctgtcaggcgggccagatccatgcgctgatgggcgagaatggcgcggggaaatcaaccctattaaagatcctcagtggtaactacaccccgacacagggtgaaatccacattaaagggaaagccgttaactttaccaatactacggatgcgttggatgctggtgtggcgatcatttatcaggaactgcatttggtgcctgaaatgacagtggcagaaaacatctatctgggccaattacccaccaagatgggtatggttgatcgaaaattgctgcgttatgaatctcgcatacagctatcacatctggggttggacattgatcccgataccccactgaaatatctctccatcggccaatggcagatggtggaaattgccaaagcattagcccgcaatgcaaaaataatcgcctttgatgaacccaccagttcgctctctgcccgagaaattgagcaactgttccgcgtgatccgcgagttacgggccgaagggcgggtcatcttgtatgtctcccatcgaatggaagaaatttttgccctgagtgatgccattacggtgtttaaagatggccgctatgttcgtacgtttgatgatatgacccaagtgaataatgcgtcactggtgcaagctatggtagggcgtaatttaggggatatctatggttatcagccccgagagataggttctgaacgcttaacgctacaagcggtgaaggccatcggtgtggcctcgccgatcagcttgactgtacaccaaggggaaattgtggggctgtttgggttagtgggggccgggcgtagtgaactgctcaaggggctgtttggtgacaccaaactgaccagtgggaaactcttgcttgatggccaaccactgactatccgttcgccgattgacgctatttctgctgggatcatgttgtgtccagaagatcgaaaagcggatggcatcattcctgttcactcggtacaggacaatatcaatatcagtgcccgccgcaaaacattaaccgcaggctgtctgattaacaaccgctgggaagcggataatgcgttgctgcgtattcagtctctgaatattaaaacgccaggcccccaacaactcattatgaatctatccggggggaatcagcagaaagccattttaggacgctggttgtccgaggacatgaaagtgatcctgttggatgaaccgacccgtggtattgacgtcggggccaaacatgaaatctataacgtgatttatcaactggcgaaacagggcattgcggtgctgtttgcttccagtgatttgccggaagtgcttgggctggcagatcgtattgtggtgatgcgtgagggcgctatctctggtgagctagaccatgaatatgccactgaagagcaagccttaagtctggcaatgttacgcaccccgaatattgccaccaataccgcgtctgcggttgcctga

SEQ ID NO: 38795 - protein, 523 aa, Yersinia pestis biovar Medievalis str. 91001
MSAPHSALQAELDAAQSPYLAFRGIGKSFPGVLALDDISFTCQAGQIHALMGENGAGKSTLLKILSGNYTPTQGEIHIKGKAVNFTNTTDALDAGVAIIYQELHLVPEMTVAENIYLGQLPTKMGMVDRKLLRYESRIQLSHLGLDIDPDTPLKYLSIGQWQMVEIAKALARNAKIIAFDEPTSSLSAREIEQLFRVIRELRAEGRVILYVSHRMEEIFALSDAITVFKDGRYVRTFDDMTQVNNASLVQAMVGRNLGDIYGYQPREIGSERLTLQAVKAIGVASPISLTVHQGEIVGLFGLVGAGRSELLKGLFGDTKLTSGKLLLDGQPLTIRSPIDAISAGIMLCPEDRKADGIIPVHSVQDNINISARRKTLTAGCLINNRWEADNALLRIQSLNIKTPGPQQLIMNLSGGNQQKAILGRWLSEDMKVILLDEPTRGIDVGAKHEIYNVIYQLAKQGIAVLFASSDLPEVLGLADRIVVMREGAISGELDHEYATEEQALSLAMLRTPNIATNTASAVA

SEQ ID NO: 38796 - DNA, 1608 bp, Yersinia pestis biovar Medievalis str. 91001
  CDS (1)..(1608): transl_table=11
ttgtttgagcgatgtaacgtaattgttgccggagtgtggacgttttttattccacacagtagtgttcatttgtttttggttcgttcatatgaggcattcatgatccgtaacgagatactggcaaaaaaaccggactatctattagaagcgacgggactaaaaaaatcctttggcgatgtgatcgcgctaaacaatgctgaattctgtttaaaacggggttctatccatgcgctttgcggtgggaacggtgccggtaaatcaacatttcttggcctattaatgggatttattcagcctgatgatggggcgtttttcatcaacgggcaatactgcgaattcgactcaccgggacaagccctagccgcagggattaccattgttcaacaagagctcagtggggtacaggatctgtctgtggccgaaaatatttatctgggttctgagccaaggcgctttggtattgtcgattttcgtgcgcttaaccgccaggccgatgtgttattacacgagctgggtttcgccatttcacccaaagccaaaatgcgcagcctgagcgtagcagagcaacaacgggtggaaattgccaaagcgctgtcacatacccatgccgatatcatcattatggatgaacccacctccgcattaggtgaagaggatgcgcaaaaactgtttcagaccataaaaaaactggcctctctgggaaaaggggttatttatgtctcccaccgcttgtcagaaatatttcaaattgcagacagctacacggtatttcgagatggttgttatatttgtgaaggagagacgagtcacatcactcgcgaacaactgattgagcatattattggtggcgagattgatggtgagttctccaaatacaatactccaaccaatgtgccactctttaaagcctctggcatatgttggaaatcgaaagtgaatgatgtcagcctgacattacattgcggtgaaattttagggatttatggcttagtaggatcggggcgcagtgagtttcttaatctgctgtttggtcttgagcgtgctgatcacgggagcatccatatcggtgatgagatattactgaaacacacaccagaaaaagcaatcaacgccggtatcgcctatgtgaccgaagatcgtcaagagacaggattagtattgaaccattcggtatcggaaaatattaatatctcctcattaaacgtcattagtcgtatgagtatcattaatgaaaatgatattcagcgccgtgctgaccacacgatccgtatctttaatattaagacaccgagtcgccaacaacgagtggctaatttaagcggtggtaatcaacaaaaggtggtgttaggccgctgggcactgttagaccctaaagttttattattagatgagccaaccaggggaattgacattggggcaaaaaaagaaatttatcgctttatgtcggattttgccctcaaaggaaaaggcattgttatggtctcctccgagctttctgaaattattggcatgagcgacagaatcttggtttttaaaaaagggaaaatagtcggtgaaattacgggcactgaggcaacacaggccaaattaatgtcgatggcggtataa

SEQ ID NO: 38797 - protein, 535 aa, Yersinia pestis biovar Medievalis str. 91001
MFERCNVIVAGVWTFFIPHSSVHLFLVRSYEAFMIRNEILAKKPDYLLEATGLKKSFGDVIALNNAEFCLKRGSIHALCGGNGAGKSTFLGLLMGFIQPDDGAFFINGQYCEFDSPGQALAAGITIVQQELSGVQDLSVAENIYLGSEPRRFGIVDFRALNRQADVLLHELGFAISPKAKMRSLSVAEQQRVEIAKALSHTHADIIIMDEPTSALGEEDAQKLFQTIKKLASLGKGVIYVSHRLSEIFQIADSYTVFRDGCYICEGETSHITREQLIEHIIGGEIDGEFSKYNTPTNVPLFKASGICWKSKVNDVSLTLHCGEILGIYGLVGSGRSEFLNLLFGLERADHGSIHIGDEILLKHTPEKAINAGIAYVTEDRQETGLVLNHSVSENINISSLNVISRMSIINENDIQRRADHTIRIFNIKTPSRQQRVANLSGGNQQKVVLGRWALLDPKVLLLDEPTRGIDIGAKKEIYRFMSDFALKGKGIVMVSSELSEIIGMSDRILVFKKGKIVGEITGTEATQAKLMSMAV

SEQ ID NO: 38798 - DNA, 1566 bp, Mycoplasma mobile 163K
  CDS (1)..(1566): transl_table=4
atgaataaaaatgattacatttttcaatttgaaaatgtgactaaaaaatatcctggtgtaattgctttaaatgatgttagttttaacttgaaaaaagctaaaattactagtattgtaggcgaaaatggggctggtaaatcaactttgttaaaagttatttctggtgttattccctttaacaaaatagaaggcagaattatttacgaaggtaaagaaaaacattacaaaagtattaatgattcaatttctgatggaattgcaataatccatcaagaactttctatttctccatatttaccagtttatgaaaacattttcattggaaattttaaaactaaatttgggattttaaaccaaaatcaaatgattgtggaagcaaaaaaacttttagaaaaggttggcttacctaagatagatcctagaactcttgcgattaatctatcagttgctcaacaacaattagtagaaattgcaaaagctttaagtaaagaggtaaagcttttaattttagatgaacctacttcttctttaaatgataaagatagttttgaacttctgaatattatgaagaatttaaaagaaaaaagtggtattacaagcgtttttgtaagtcataaattaaatgaagtagaatatgttgcagatgaaattattgtaataagagatggaaaatttatttcccaatataacaaagaaactactaaaatttctgaagatcaattaattaaagatattgttggaagacaattatcttccaaatttccagagaaaaatcttcaaaggaaaattggagaaattgctttagaagtaaaaaactttactgttgaacaccctaaattagatgggtataatgttgtacaagatgctagttttaatgttaaaaaaggtgaaataattggaattagtggtcttgtaggatctggaagaagtgaattagctttaagtatttttggaaaacaatatggaaaagtactttcgggagaaatttttattaatggaaaaaaaatgaatataaactcccctaaaaaagcaattacaaataaattaatgtatgcaaccgaagatagaaaaggtactggattaattcaaatttttgatatcaattttaatatcaatttagctgccatgaatttaaattcaaaatttggatttttaaatttaaataaagaaattaaaaatagtaatgaattaaaaaaggaaattaaaatcaaagttccaaatattgattacaaagttgaaacactaagtggtggaaatcagcaaaaagttgttatcgctaaagctataacaacaaaatttgaaatattaattattgatgaacctacaaaaggaattgatgttgggtctaaatttgaaatttattctctacttcaagaatttgccttacaagggaaagcaatcgttattatttcttcagaaattgaagaattacttggaacaacagatagaatttatgttatgtcccaaggaaaaattaaaggtcaaataaaaacttctgatgcaactcaggaaaaaataattcaattaggaattggaaaggaaaaaaatgaaacaaaatatgtttaa

SEQ ID NO: 38799 - protein, 521 aa, Mycoplasma mobile 163K
MNKNDYIFQFENVTKKYPGVIALNDVSFNLKKAKITSIVGENGAGKSTLLKVISGVIPFNKIEGRIIYEGKEKHYKSINDSISDGIAIIHQELSISPYLPVYENIFIGNFKTKFGILNQNQMIVEAKKLLEKVGLPKIDPRTLAINLSVAQQQLVEIAKALSKEVKLLILDEPTSSLNDKDSFELLNIMKNLKEKSGITSVFVSHKLNEVEYVADEIIVIRDGKFISQYNKETTKISEDQLIKDIVGRQLSSKFPEKNLQRKIGEIALEVKNFTVEHPKLDGYNVVQDASFNVKKGEIIGISGLVGSGRSELALSIFGKQYGKVLSGEIFINGKKMNINSPKKAITNKLMYATEDRKGTGLIQIFDINFNINLAAMNLNSKFGFLNLNKEIKNSNELKKEIKIKVPNIDYKVETLSGGNQQKVVIAKAITTKFEILIIDEPTKGIDVGSKFEIYSLLQEFALQGKAIVIISSEIEELLGTTDRIYVMSQGKIKGQIKTSDATQEKIIQLGIGKEKNETKYV

SEQ ID NO: 38800 - DNA, 1386 bp, Bacillus anthracis str. 'Ames Ancestor'
  CDS (1)..(1386): transl_table=11
atgggggaaaatggagcgggtaaatcaacgctcatgaagattttaacaggtgtatacaaaagagatggtggaacgatcacgattgatggacaagaacgaacttttaaaaatgcgaaagaagctgaagaatacggtattgcatttatacatcaagaattgaacatattaccgaatttaacagtagctgaaaatatgtttctcggtaaagagttaatgtatggaaagacaggtattttacgtacgcgtcaaatgaacgcgattgcgcagcagcaactagcagagttaggattacatgtaaaaggcgctatgttggcaggagagttatcggttggacaacagcaaattatcgaaattgcgaaagcactaatgacaaacgcgagcgttattattatggatgaacctacagctgcattaacagatcgtgaaattgaaacgttgtttaccgtcattaataaattacgtaaagaaggcgtttcgttcgtttatatctcacaccgaatggaagaaatcttttcaatatgcgatgccattacgattttacgtgatggggaatacgtcggaaagagatccattccggaaacatcgtttgatgaggtagtgagtatgatggtggggcgcagcattggtgaacgttacccagaacgaaatagtcaaattggcgatgttatttttgaaatgcgtaatggaacgaaaaaagggaagtttgaaaatgtttcgtttcaagttagaaaaggtgaaatccttggtgtagctggcttgatgggagctggccgcacagatattatgaaagcaatatttggatacgaacctttagattctggccaaatttttataaatgggcaagaagtaaagattgatagcccgatagatgcgattagacaaagaatcgcattcattacagaggatagaaagtctgaaggattagtgctagatttctcaattcgagaaaatttagccttaccgaatttagaaagtctttcaaagggaagcgtcttaagtaacgaactagaacaacagtttacagcggacatgatgaaacttcttaatgtgaaagcatctagtggagagcaagctgtgaaatctctttctggtggaaatcagcaaaaggttgttattgcaaaatggttaggtattcacccgcaattactcattttagatgagccaacaaggggtgttgatgttggagcgaaaaaagaaatttactctattatgaataagcttaccgaagaaggagatgccgttattatggtatcatctgaacttccagaagttttagggatgagtgatcgcgttcttgttattcatgaaggaaaagtcggcggcattttagagaaagatgaggcatcgcaagagtctattatggcactagctacagggggagagtaa

SEQ ID NO: 38801 - protein, 461 aa, Bacillus anthracis str. 'Ames Ancestor'
MGENGAGKSTLMKILTGVYKRDGGTITIDGQERTFKNAKEAEEYGIAFIHQELNILPNLTVAENMFLGKELMYGKTGILRTRQMNAIAQQQLAELGLHVKGAMLAGELSVGQQQIIEIAKALMTNASVIIMDEPTAALTDREIETLFTVINKLRKEGVSFVYISHRMEEIFSICDAITILRDGEYVGKRSIPETSFDEVVSMMVGRSIGERYPERNSQIGDVIFEMRNGTKKGKFENVSFQVRKGEILGVAGLMGAGRTDIMKAIFGYEPLDSGQIFINGQEVKIDSPIDAIRQRIAFITEDRKSEGLVLDFSIRENLALPNLESLSKGSVLSNELEQQFTADMMKLLNVKASSGEQAVKSLSGGNQQKVVIAKWLGIHPQLLILDEPTRGVDVGAKKEIYSIMNKLTEEGDAVIMVSSELPEVLGMSDRVLVIHEGKVGGILEKDEASQESIMALATGGE

SEQ ID NO: 38802 - DNA, 1485 bp, Bacillus anthracis str. Sterne
  CDS (1)..(1485): transl_table=11
atgcgtattgaaatgaaaaatatttcaaaggcgttcaatggcaatcctgttttgaagaatgcacagtttatgattgaaacaggagaagtccatgcattgatgggggaaaatggagcgggtaaatcaacgctcatgaagattttaacaggtgtatacaaaagagatggtggaacgatcacgattgatggacaagaacgaacttttaaaaatgcgaaagaagctgaagaatacggtattgcatttatacatcaagaattgaacatattaccgaatttaacagtagctgaaaatatgtttctcggtaaagagttaatgtatggaaagacaggtattttacgtacgcgtcaaatgaacgcgattgcgcagcagcaactagcagagttaggattacatgtaaaaggcgctatgttggcaggagagttatcggttggacaacagcaaattatcgaaattgcgaaagcactaatgacaaacgcgagcgttattattatggatgaacctacagctgcattaacagatcgtgaaattgaaacgttgtttaccgtcattaataaattacgtaaagaaggcgtttcgttcgtttatatctcacaccgaatggaagaaatcttttcaatatgcgatgccattacgattttacgtgatggggaatacgtcggaaagagatccattccggaaacatcgtttgatgaggtagtgagtatgatggtggggcgcagcattggtgaacgttacccagaacgaaatagtcaaattggcgatgttatttttgaaatgcgtaatggaacgaaaaaagggaagtttgaaaatgtttcgtttcaagttagaaaaggtgaaatccttggtgtagctggcttgatgggagctggccgcacagatattatgaaagcaatatttggatacgaacctttagattctggccaaatttttataaatgggcaagaagtaaagattgatagcccgatagatgcgattagacaaagaatcgcattcattacagaggatagaaagtctgaaggattagtgctagatttctcaattcgagaaaatttagccttaccgaatttagaaagtctttcaaagggaagcgtcttaagtaacgaactagaacaacagtttacagcggacatgatgaaacttcttaatgtgaaagcatctagtggagagcaagctgtgaaatctctttctggtggaaatcagcaaaaggttgttattgcaaaatggttaggtattcacccgcaattactcattttagatgagccaacaaggggtgttgatgttggagcgaaaaaagaaatttactctattatgaataagcttaccgaagaaggagatgccgttattatggtatcatctgaacttccagaagttttagggatgagtgatcgcgttcttgttattcatgaaggaaaagtcggcggcattttagagaaagatgaggcatcgcaagagtctattatggcactagctacagggggagagtaa

SEQ ID NO: 38803 - protein, 494 aa, Bacillus anthracis str. Sterne
MRIEMKNISKAFNGNPVLKNAQFMIETGEVHALMGENGAGKSTLMKILTGVYKRDGGTITIDGQERTFKNAKEAEEYGIAFIHQELNILPNLTVAENMFLGKELMYGKTGILRTRQMNAIAQQQLAELGLHVKGAMLAGELSVGQQQIIEIAKALMTNASVIIMDEPTAALTDREIETLFTVINKLRKEGVSFVYISHRMEEIFSICDAITILRDGEYVGKRSIPETSFDEVVSMMVGRSIGERYPERNSQIGDVIFEMRNGTKKGKFENVSFQVRKGEILGVAGLMGAGRTDIMKAIFGYEPLDSGQIFINGQEVKIDSPIDAIRQRIAFITEDRKSEGLVLDFSIRENLALPNLESLSKGSVLSNELEQQFTADMMKLLNVKASSGEQAVKSLSGGNQQKVVIAKWLGIHPQLLILDEPTRGVDVGAKKEIYSIMNKLTEEGDAVIMVSSELPEVLGMSDRVLVIHEGKVGGILEKDEASQESIMALATGGE

SEQ ID NO: 38804 - DNA, 1506 bp, Erwinia carotovora subsp. atroseptica SCRI1043
  CDS (1)..(1506): transl_table=11
atgcaacctttactgcaactacaaggcatcacgaaatcttttcccggcgttaaagcactttccggtgcggcactcaatgtttatccgggaaaagtgatggcgctggtgggcgagaacggtgcgggtaagtccaccatgatgaaagtcctgaccgggatctatcgtaaagatgccggcagcatccattttttagggcaagaggtggatttcaacgggccgaaagcgtctcaggaagccggtatcggtattattcatcaggaacttaacctgattccccagctcacgattgccgagaatatcttcctcggtcgtgaatttaccaaccgcttcggtcgtatcgactggaataagatgtatgcggaagccgataaactgctgaagcgccttaatctgcgctatgacagccgccgtatggtaggggatttatcgattggcgatcagcaaatggtggaaatcgccaaggtgctgagctttgaatccaaagtcatcatcatggatgaacctaccgatgccctgacggataccgaaacggcttcgttattcagcgtgatcaacgagctgcaatctcagggatgcggcattgtctacatttcccaccgcctgaaagaaatctttgaaatctgcgatgacattactgttttccgcgatggtcagtttatcggcgaacgcccggtgagtgacttagaggaagacacgctgattgaaatgatggtgggccgcaagctggaagatcagtatccgcgctcgaataaagcgccgggagaggttcgtcttaaggtgcagaacctgtctgggccgggcgttgacagcgtcagctttaccgtacgtaaaggtgaaattctgggtgtcgcagggctgatgggcgcgggccgtaccgaactgatgaagattctctacggcgcactgccacgaacgggcggcaatgtgacgcttgatggccgcgacgtggtgacccgtaaaccgcaggatggcttggcgaacggtattgtctacatttccgaagatcgcaagcgtgatggtctggtgctgggcatgtcggtaaaagaaaacatgtcattaaccgcactgcgttatttcagccatgcgggcggtcgtctcaagcatgctgaagagcaactgacggttgccgactttatccgcctgttcaacgtcaaaacgccctcaatggagcagcctatcggcctgctttccggtggcaatcagcaaaaagtggcgattgctcgtggcctgatgacgcgccctaatgtcttgatcctcgatgaaccgacgcgtggcgttgacgtcggggcgaaaaaagaaatttatcagttaatcaatcaattcaaagaagaagggctgagcatcatattggtgtcatccgaaatgcccgaagtcttgggaatgagcgatcgcatcatcgtgatgcatgaagggcgcttgagcggtgatttcccgattgagcaagcaacccaggaagcactgatggctgcggccgttggtaagcaatacggcgcaaagcaggagtaa

SEQ ID NO: 38805 - protein, 501 aa, Erwinia carotovora subsp. atroseptica SCRI1043
MQPLLQLQGITKSFPGVKALSGAALNVYPGKVMALVGENGAGKSTMMKVLTGIYRKDAGSIHFLGQEVDFNGPKASQEAGIGIIHQELNLIPQLTIAENIFLGREFTNRFGRIDWNKMYAEADKLLKRLNLRYDSRRMVGDLSIGDQQMVEIAKVLSFESKVIIMDEPTDALTDTETASLFSVINELQSQGCGIVYISHRLKEIFEICDDITVFRDGQFIGERPVSDLEEDTLIEMMVGRKLEDQYPRSNKAPGEVRLKVQNLSGPGVDSVSFTVRKGEILGVAGLMGAGRTELMKILYGALPRTGGNVTLDGRDVVTRKPQDGLANGIVYISEDRKRDGLVLGMSVKENMSLTALRYFSHAGGRLKHAEEQLTVADFIRLFNVKTPSMEQPIGLLSGGNQQKVAIARGLMTRPNVLILDEPTRGVDVGAKKEIYQLINQFKEEGLSIILVSSEMPEVLGMSDRIIVMHEGRLSGDFPIEQATQEALMAAAVGKQYGAKQE

SEQ ID NO: 38806 - DNA, 1542 bp, Erwinia carotovora subsp. atroseptica SCRI1043
  CDS (1)..(1542): transl_table=11
atgccgcacctgttggaaatgaaaaacatcacgaaggcgtttggtgcggtgaaagccgtcgataacgtcagcctgacgctggaggctggtcaggtcttgtcgctgtgcggcgagaatggctcagggaaatccaccttaatgaaggtgttatgtgccatctatccacatggcagctatgacgggcagattatcttttccggtgatgaactgcgtgccaaccatatccgtgatacggagcaaaaaggcatcgcgattattcatcaggaactggcgctggtgaaagagatgacggtgctggagaacatgttcctaggtaatgagtggacgcgttttggcgtgatggattacgacaatatgtatctacgctgccagcgcatgttggagcaggtcaagctggccgtcgacccgaatactaaagtgggggagcttggattgggtcagcagcaactggtggaaatcgccaaggcgctgaacaagcaggtgcgtctgttggtgctggatgagccaacggcctcattgaccgaacgggaaacgggtatcctgctggaaatcattcaggatctgcgcgatcacggtatcgcctgtatctatatttctcacaagcttaacgaagttaaagcgatttccgatgtgatttgcgtgattcgtgacgggaagcatattggtacgcgtccggcggctgagctgagtgaggatcatatcattgccatgatggtagggcgggaactgacagagctttatcccaatgagccgcatgtcattggtgaagaggtgttgcgcgtggagcaccttaccgcctggcaccccgtgaatcgccacattcgtcgggtggatgatgtgtcgtttgctttgcaccgaggcgaaattctcggtattgccgggctggttgggtcagggcgtacggagacggtccagtgtctgtttggtgcctaccgcgggcgctggcagggcgacatatttattgacggtaagccggtgaccatcagcaactgccagcaggctatggcgcagggaattgcgatggtgccggaggatcgtaagaaggacggcatcgtcccggtgatgggcgtggcgcaaaatatgacgctggcggcgcttgaccaattcacggggccgctttccatgttggatgatgcccgtgagcaggacatcatccggcaatcgctagcgaatctgaaagtgaaaacctccagcccggaactggcgatcgcccgattaagcggcggtaaccagcaaaaagcggtgctagcgaaatgcctgctgctgaaccctcgtattctcatccttgatgaacccacgcgcggcatcgatatcggtgccaaatatgaaatctataagctcatcaatgcgctggtaaaacagcatattgccgtcatcgtgatttcctcagaattgcccgaggtgctggggttgagcgatcgagtattggtgatgcatcaggggcgtattaaagcagatttgatcaatcgtgatttaactcaggaacaggttatggaagctgcattgaggagtgaacatcgtgctgaaaacatcgcagtctga

SEQ ID NO: 38807 - protein, 513 aa, Erwinia carotovora subsp. atroseptica SCRI1043
MPHLLEMKNITKAFGAVKAVDNVSLTLEAGQVLSLCGENGSGKSTLMKVLCAIYPHGSYDGQIIFSGDELRANHIRDTEQKGIAIIHQELALVKEMTVLENMFLGNEWTRFGVMDYDNMYLRCQRMLEQVKLAVDPNTKVGELGLGQQQLVEIAKALNKQVRLLVLDEPTASLTERETGILLEIIQDLRDHGIACIYISHKLNEVKAISDVICVIRDGKHIGTRPAAELSEDHIIAMMVGRELTELYPNEPHVIGEEVLRVEHLTAWHPVNRHIRRVDDVSFALHRGEILGIAGLVGSGRTETVQCLFGAYRGRWQGDIFIDGKPVTISNCQQAMAQGIAMVPEDRKKDGIVPVMGVAQNMTLAALDQFTGPLSMLDDAREQDIIRQSLANLKVKTSSPELAIARLSGGNQQKAVLAKCLLLNPRILILDEPTRGIDIGAKYEIYKLINALVKQHIAVIVISSELPEVLGLSDRVLVMHQGRIKADLINRDLTQEQVMEAALRSEHRAENIAV

SEQ ID NO: 38808 - DNA, 1548 bp, Erwinia carotovora subsp. atroseptica SCRI1043
  CDS (1)..(1548): transl_table=11
atgacggaacccctactgaacatcaccaatctggcaaagagcttctctggcgtctgggcgctgagcagtgcgcaactgaccgtacagccgggagagattcatgcgctattgggagaaaacggcgcgggtaaatcgacgctattaaaggcgctggcaggggcgcagccgcagaccagcggcgatatctggtttggcggccagcagctgttaccgctcgaatcgccagttgaacgccaaaagcggggaattattactatttatcaggaattcaatctgctgccgaacatgagcgtcgcggaaaacatgttcctggggcgtgagccgcagcgcagtggattattcgtagacgcactggcggttaatcgcgaggcgaaagcggtactggattacctgaaattgaatattgcgccgacgacgcaggtggcgcgtttgagcgtggcccagcagcagatggtggaaatcgccagagcgctgacgctgaacgccaaactgattgtgatggatgagccatcggcggcgctgagcgatagcgaagttgacagcctgcatcgtgtggtgcgtgagctaaaagggcgcggtgtgagcgtggtgtatgtgacgcaccgactgcatgaagtcttccagctatgcgatcgctttaccgtatttcaggacggccgctacaccggttctggggatgtcgccagcaccaacgtgcaggaaattattcgcttgatggtcggtcgtgacgtggtgtttaaccgtcgtccgccttcagaaacgcatcatcaggataagccagttcgattggcggtaaaggggttaagccgggaaaagccgccgctggatgcgcacggcattgcgctaaaagacatcagcttccaggtgcatgccggagaagtgctcggcattgctgggctggtcggtgcagggcgcacggaaatcgcacgctgcctgtttggtgccgatgggttctctaccggtgagtttatgctggatgacgcgccttatcatccatccacgccacttcatgcgctgtcgcagggtattgctctggtgccggaagaccgcaagaaagagggcgcggtactggggttgtcaatcagggaaaacatctcgctctccaacctctcatcgctcatgcgctggcgctggtttgtgaacacccgcaaagaagacgatttgattgacgcctatcgtcaggcgttgcacatcaagatggtgaacagcgatcaggaagtgcgcaagctgtcgggcggtaaccagcaaaaggtgattcttgctcgctgtatggcgctgaaccctaaggtgttaattgtggatgaacccacgcgcggcatcgatgtcggcaccaagtccgaagtccatcaggtgctgttcgatatggcgaaacggggtgttgccgtgattgtgatttcctccgatttaccggaaatcatggcgatttccgaccgcatcatcacgctcagcgaagggcggatcagcggggaaattcatggcgatgacgctacagaagaaaaactgatgacgatgatggccatttgccacgacgcattacacgcagcataa

SEQ ID NO: 38809 - protein, 515 aa, Erwinia carotovora subsp. atroseptica SCRI1043
MTEPLLNITNLAKSFSGVWALSSAQLTVQPGEIHALLGENGAGKSTLLKALAGAQPQTSGDIWFGGQQLLPLESPVERQKRGIITIYQEFNLLPNMSVAENMFLGREPQRSGLFVDALAVNREAKAVLDYLKLNIAPTTQVARLSVAQQQMVEIARALTLNAKLIVMDEPSAALSDSEVDSLHRVVRELKGRGVSVVYVTHRLHEVFQLCDRFTVFQDGRYTGSGDVASTNVQEIIRLMVGRDVVFNRRPPSETHHQDKPVRLAVKGLSREKPPLDAHGIALKDISFQVHAGEVLGIAGLVGAGRTEIARCLFGADGFSTGEFMLDDAPYHPSTPLHALSQGIALVPEDRKKEGAVLGLSIRENISLSNLSSLMRWRWFVNTRKEDDLIDAYRQALHIKMVNSDQEVRKLSGGNQQKVILARCMALNPKVLIVDEPTRGIDVGTKSEVHQVLFDMAKRGVAVIVISSDLPEIMAISDRIITLSEGRISGEIHGDDATEEKLMTMMAICHDALHAA

SEQ ID NO: 38810 - DNA, 1554 bp, Erwinia carotovora subsp. atroseptica SCRI1043
  CDS (1)..(1554): transl_table=11
atggaacgttcagatgcggctatgcaacccgatgcggttagccgacccgaaatagtgatggcgacccgaggcatcaccatgctgtttcccggcaccaaagcgttggataacgtcgattacaacgtttaccgcggcaaggtcaacgtgattattggtgaaaacggggcgggtaaatcgacgttgatgaagattctggctggtgtgcagcagccgacgtccggccagattctgctgaatggcgaagcggtgcgcattgcggatacacgcgatgcggcggcgaaaggcatcggcatggtgcatcaggaacttaacctgtccgagaatctgagcgtggcggagaacatttttctggggcgggaactgcaaaagggtgttgcacctatcgattatctggagcaggagcggattgcggcggagctaatgtcgcgtctcgatcaggctatttcgccgcgtaccgaagtcgccagcctgaaagtcggccagcagcagttggtggaaatcgccaaggcgttggcagatcaggccgacattctgattctggacgaaccgacctccgcgctaagcaaaaccgaagtggagattctgtttcgcgtgatccgcgaactgactcgccagaatgtttccatcatctatatttcgcatcggttggaagagttgatggcgattggtgactacatcactatcctgcgtgacggctgttttcaggcggaagcggcggtcagcgacattgacgtgccgtggatcgtccgggaaatgctcggcggtgaccctgtcaccagtttcctgcattcgggtagaacgttcggtgcgccgatattggaagcggagcatctgacctgcctcaatgatgcaggacatcaggtcgttaacgatgtctcgctgatggtacgtgaaggggaaatcgtcggtatttacgggctgatgggggcaggacgcaccgaactttttgagtgtctgttgggcattcagaatgattatctgggtaagatttatctcgatagcaaaccggtgagcccgcgcctttctaccgcgcagcgcattcgtatgggaatgagtctggtgccggaagatcgcaaaaaaactggcatctttccgctctcgtcagtggcttccaatctgaccatagccagcctgtggcggcgactgaaatacggcatggcgatcttccagcgacaagagcaagaggtggttgccagcaccgttgggcggttagcaatcaaagtgtcttcacccgaggtcgaaattcaggcgctcagcggcggcaatcagcaaaaagtggtgattggccgctcgttactgaccagccctaaggtgctgttactggacgaaccgacgcgcggtattgatgtgggggccaaggccgatgtgtttgaaatgatggttgggctttccgaacagggcatcggcgtgctgttttccacctcggatctgaaagagattatggcggtatcggaccgtattttggtgatgtcgaatggcaaactgacggcgaatattgtgcgtcagtcggccagcgaatcggcattggtttcagcaagtgcacaagggttctga

SEQ ID NO: 38811 - protein, 517 aa, Erwinia carotovora subsp. atroseptica SCRI1043
MERSDAAMQPDAVSRPEIVMATRGITMLFPGTKALDNVDYNVYRGKVNVIIGENGAGKSTLMKILAGVQQPTSGQILLNGEAVRIADTRDAAAKGIGMVHQELNLSENLSVAENIFLGRELQKGVAPIDYLEQERIAAELMSRLDQAISPRTEVASLKVGQQQLVEIAKALADQADILILDEPTSALSKTEVEILFRVIRELTRQNVSIIYISHRLEELMAIGDYITILRDGCFQAEAAVSDIDVPWIVREMLGGDPVTSFLHSGRTFGAPILEAEHLTCLNDAGHQVVNDVSLMVREGEIVGIYGLMGAGRTELFECLLGIQNDYLGKIYLDSKPVSPRLSTAQRIRMGMSLVPEDRKKTGIFPLSSVASNLTIASLWRRLKYGMAIFQRQEQEVVASTVGRLAIKVSSPEVEIQALSGGNQQKVVIGRSLLTSPKVLLLDEPTRGIDVGAKADVFEMMVGLSEQGIGVLFSTSDLKEIMAVSDRILVMSNGKLTANIVRQSASESALVSASAQGF

SEQ ID NO: 38812 - DNA, 1524 bp, Erwinia carotovora subsp. atroseptica SCRI1043
  CDS (1)..(1524): transl_table=11
atgacagcacagtcaccctatttgtcgtttcatgggattggtaaagaatttcccggtgttaaggcgctttcggatatcagcttttcctgccatgccggccagatccatgcattgatgggggaaaacggggcgggcaagtcgacgctgttaaaaatcctgagcggcaactattcaccgtcagcgggcgaaatccacattcagggcaagcctgtgcagtttagtaatacgatggatgccctgaatgcgggcgttgccattatttatcaggaactgcatttggtgccagaaatgacggtcgccgagaatatctatctgggtcaattgccgcataaatacggcatggtgaactactcactgctgcgctatgaagccaaactgcaattacagcatctggggctggatatcgatcctgataccccgctgaaatacctgtctatcgggcagtggcaaatggtggaaatcgccaaagcgctggcgcgtaatgccaagattatcgcttttgatgaaccgaccagttcgctgtctgcccgtgaaatcgagcaacttttccgggtgattactgaattgcgtagtgaaggccggatcattttgtatgtttcgcaccggatggaagaaatttttgcgctgagcgatgccattaccgtgtttaaagatggtcgctacgtgtgcacgtttgacgatatgcaacaggtgaaccatgagtcgctggtacaggcgatggtagggcgtaacttggggaatatctatggttacgcgccgcgtccgcacggcgaagaccgcttgacgctgaaagacgtaaaagcgccgggcgtgaaatccacgatttccctgaacgtcaagcagggggaaattgtcgggctatttggtctggtgggggccggccgcagcgaactgatgaaagggctgtttggtgcgaccaaaatcaccagcggtcaggtgttgctggatggcaaaccgctggtggtgaattcccccatcgatgcgattcgccaaggcgtgatgctctgccctgaggatcgcaaagcggacggtatcattccggtgcactcggtgcgtgacaacatcaatatcagcgcaagacgtaagagcctgaaagccggttttattattaataatcagtgggaagcagataacgccgcgcagcgcattgacgcgttgaatatcaaaacgccgtccgatgaacagctgattatgaatctttccggcggaaatcagcagaaagtcattcttggtcgctggttgtccgaagagatgaaagtcattttgctcgatgagcccacgcgcggcatcgatgtcggcgcgaagcacgaaatttatcatgtcatctatgaactggcgaatcaggggatcgcggtgctgtttgcctccagcgatttacccgaagtgcttgggctggccgaccggattatcgtcatgcgcgaaggtgccgtctccggcgaactgctacatgctgatgccacggaacagaaggtgctcagcctagccatgttacgaatccccgatatcgaatctgcggttgcctga

SEQ ID NO: 38813 - protein, 507 aa, Erwinia carotovora subsp. atroseptica SCRI1043
MTAQSPYLSFHGIGKEFPGVKALSDISFSCHAGQIHALMGENGAGKSTLLKILSGNYSPSAGEIHIQGKPVQFSNTMDALNAGVAIIYQELHLVPEMTVAENIYLGQLPHKYGMVNYSLLRYEAKLQLQHLGLDIDPDTPLKYLSIGQWQMVEIAKALARNAKIIAFDEPTSSLSAREIEQLFRVITELRSEGRIILYVSHRMEEIFALSDAITVFKDGRYVCTFDDMQQVNHESLVQAMVGRNLGNIYGYAPRPHGEDRLTLKDVKAPGVKSTISLNVKQGEIVGLFGLVGAGRSELMKGLFGATKITSGQVLLDGKPLVVNSPIDAIRQGVMLCPEDRKADGIIPVHSVRDNINISARRKSLKAGFIINNQWEADNAAQRIDALNIKTPSDEQLIMNLSGGNQQKVILGRWLSEEMKVILLDEPTRGIDVGAKHEIYHVIYELANQGIAVLFASSDLPEVLGLADRIIVMREGAVSGELLHADATEQKVLSLAMLRIPDIESAVA

SEQ ID NO: 38814 - DNA, 1527 bp, Erwinia carotovora subsp. atroseptica SCRI1043
  CDS (1)..(1527): transl_table=11
atgctgatggaaacgacacggttgttagatattcggagcatgagcgttgaatttccaggggtgaaagcattagatcaggtggactttacgcttaatcgcggcgagatagttgctctactgggggaaaatggtgcagggaaatcaacgctaattaaggcgctgactggtgtttaccatcgctcatcgggtgacattatcctcgatggcatagcgattaatcctgttaatacggcccatgctcagtcattgggcatcggtacggtatatcaagaggttaatctattaccgaatctgtctgttgcggcaaatttatttattggccgtgaacccacacgatggggcattgttgatcaacacaaaatcctgcttcaggccgaggccctgttattgaactatgggctggctattgatgttagtcatccgcttggaaattattccattgcagtccagcaaattgtagcgattgccagagctgtcgatctttccgctaaagtcttgattctcgatgaacctaccgccagcctcgatgcaaaagaagtcgatatgctgctggatatattgcggaagctacgcgatcgtggaatcggcatgatatttgtcacgcattttctggatcaggtttaccgcattagcgacagaattaccgttttacgcaatggacggttagtcgggacattaccaactgcagagctaccgcgtattgaattagtccaaatgatgctggggcacagttttgatgaaacgttacttaaacgtggtgaacacagtgacgtctcgggtgaacccattgtgcaatttaaacattatggtcggcgtggttcgattaacgacttcgagctttccgtgcgtccgggagaaattgttggtctggctggtctgctgggatcgggcaggacagaaaccgcgcaactgatatttggcatcaacgtgcctgacgccggtgaagcgtgggttgatggtaaaaaaatcaacattcgcacgccgcgtgcagcaggaaagctgggttttggctattgcccagaggatcgcaaaactgacggcatcgtcggtgcagcaacggtacgagagaacattattctggcccttcaggcgcagcgcggctggctgaagcctatttctttacgcgagcaaacccgtatagctgaaaagtttatcagcctattggggattcgcacgcctagtgctgagcaggaaattcagtatctatcgggagggaatcagcaaaaagtactgttatcacgctggctggcaacagaaccgcgtttcttgattctagatgagccaacgagaggtattgatgtcggcgcgcatgctgaaatcattcgcctgatcgaaaaactgtgtgagcagggaatggcgttattggtgatctcctctgaactggaagagctgaccggttatgccgaccgcatcattgtgctgcgtgacaggcagcatgttgcgcatctcgaacatagcgagatctcggttgccgcagtgatgcaggccatcgcagtacaaacgggagcggctgatgacagacaataa

SEQ ID NO: 38815 - protein, 508 aa, Erwinia carotovora subsp. atroseptica SCRI1043
MLMETTRLLDIRSMSVEFPGVKALDQVDFTLNRGEIVALLGENGAGKSTLIKALTGVYHRSSGDIILDGIAINPVNTAHAQSLGIGTVYQEVNLLPNLSVAANLFIGREPTRWGIVDQHKILLQAEALLLNYGLAIDVSHPLGNYSIAVQQIVAIARAVDLSAKVLILDEPTASLDAKEVDMLLDILRKLRDRGIGMIFVTHFLDQVYRISDRITVLRNGRLVGTLPTAELPRIELVQMMLGHSFDETLLKRGEHSDVSGEPIVQFKHYGRRGSINDFELSVRPGEIVGLAGLLGSGRTETAQLIFGINVPDAGEAWVDGKKINIRTPRAAGKLGFGYCPEDRKTDGIVGAATVRENIILALQAQRGWLKPISLREQTRIAEKFISLLGIRTPSAEQEIQYLSGGNQQKVLLSRWLATEPRFLILDEPTRGIDVGAHAEIIRLIEKLCEQGMALLVISSELEELTGYADRIIVLRDRQHVAHLEHSEISVAAVMQAIAVQTGAADDRQ

SEQ ID NO: 38816 - DNA, 1506 bp, Propionibacterium acnes KPA171202
  CDS (1)..(1506): transl_table=11
gtgacaacagtacttcgactcgaccacgtcactaaggctttcggacccgtcaaggtcatccaagacgtatcggtggacgtcattcctggcagggtgcgcgtcctgctcggtgaaaacggagccggaaagaccaccctcattaagatgatgagcggcatttatcaccccgactctggttcggttgtcattgacgacacacccgttgaactgcctactgttaaggctgccgaagctcggggtatcgcgacgatccaccaggaacttaatctcgttccgcagatgtcggtggctgagaacatcatgcttggacgcacccccagccggggcgggctggtgaattggggcttgatgcgggctcaggcccgtgctgcgctggagcggattggtttagacgtctccccggaccgcctcgtcggttcgctgagtactgcccaccaacagctcgtggagatcgcgcgagctctgtcgatggatgccagggtgctcatccttgacgagcccaccgctgctctgacgcgcaaggagtctggccagctcttcgaggtgatggatgacctcaagactaagggcgtggcgatggtgttcatctcccatcacctcgacgagattccccgcgtcggtgacgacgtttcggtgttgcgcgacggcactctcgtaggggaggtaccggcccgtacctcggaacgtgagctggtcacgatgatggtcggccgcgacattgacgaccagttcccgcgccatcgcggtgaggtcggagaggtgttgctatcggttacgggactcagccgcgaaagggcatttcaagatgtcgggttcgacttgcacgccggcgaagtgttgggtctggcgggtctggtgggagccggacgcaccgaggtgctgcgcgccatcgccggagccgataaatacgactcaggcaccgtgcgtgtgcgtggtaaggagctcccgaaaggaaagatttcgcgcgcaatcgtcgacggtatcggccatgtgccggaggaacgcaaatcgcagggattagttctcgatgcttcggttaacgagaatctcggttacgcgaccatgaaatcgacctcgcacgcgggattagttgatcgctctgggcaacgtcgacgcgctcagaatgttgctgagaagctgagggtcagaatggctagcttggatcagccggtgcgcaatttgtctggtggtaatcagcagaaggttgttattggacgctggattctcgcggactcgtcaattctgttgcttgatgagctaaccaggggtgtcgacgtcggcgccaaggtcgagatctaccagcttattaatgctgttaccgatgccgggggcgccgtcctcatggtttccagcgagcttcccgaggtcatcgggatgagtgaccggatcctcgtcatgtcccatggccgagcgatggggatcctcgacgccaagacggccactgaagacgctgtcatggagctagcggtggcttccgtcgatcctgttgatgaaaaaacaggatga

SEQ ID NO: 38817 - protein, 501 aa, Propionibacterium acnes KPA171202
MTTVLRLDHVTKAFGPVKVIQDVSVDVIPGRVRVLLGENGAGKTTLIKMMSGIYHPDSGSVVIDDTPVELPTVKAAEARGIATIHQELNLVPQMSVAENIMLGRTPSRGGLVNWGLMRAQARAALERIGLDVSPDRLVGSLSTAHQQLVEIARALSMDARVLILDEPTAALTRKESGQLFEVMDDLKTKGVAMVFISHHLDEIPRVGDDVSVLRDGTLVGEVPARTSERELVTMMVGRDIDDQFPRHRGEVGEVLLSVTGLSRERAFQDVGFDLHAGEVLGLAGLVGAGRTEVLRAIAGADKYDSGTVRVRGKELPKGKISRAIVDGIGHVPEERKSQGLVLDASVNENLGYATMKSTSHAGLVDRSGQRRRAQNVAEKLRVRMASLDQPVRNLSGGNQQKVVIGRWILADSSILLLDELTRGVDVGAKVEIYQLINAVTDAGGAVLMVSSELPEVIGMSDRILVMSHGRAMGILDAKTATEDAVMELAVASVDPVDEKTG

SEQ ID NO: 38818 - DNA, 1590 bp, Propionibacterium acnes KPA171202
  CDS (1)..(1590): transl_table=11
gtgaccaccaacaccaccgtcgccccacccggtgacaatgcacccctcaaagatgggctgagcctgcgcggcgtcacgaagagattcgggaccctcacggccaacgaccacattgacctcgacatcgttcccgggcgaatccactgcttgctcggtgaaaacggtgccggcaagtcaaccctgatgaacattctgtacggcttgctgccttccgatgaagggcaggtctacatcgacggggtggagcaacacttcgataattccaagcaggccatggcggccggtattggaatggttcaccaacacttcatgctcgtcaacgtattcacggtggctgagaacattgcgttggggcgggaagaatcgaccgctggcatcctgtcgatgcgacgggctcgcgcaaaggtgcgcgaattgtctgatcgctaccactttgacgtcaatccagactcggtcatcgagaacctgccggttggcgtccagcagcgtgtcgagatcctgaagtccctagccaacgacgctcagtacctcatctttgacgaacccactgctgtgcttaccccgcaggaaatcgacgagctcatggctgttatgaagaccttgcgtgacgagggccgggccatcgttttcattacccacaagctgcgtgaggttcgcgccatcgctgacgacatcactgtggtccgacgtggccgcatcgtaggcaaggccagcgcggaccagtccgaggctgaacttgctgagatgatggtgggacgggccgtcaagctcgtcgtcgataaggacgaggctaagccgaccggttctcgcctggacatcaaggacctcaccgtggctgacgaccgcggctcagtcgttgtcgacggcgtgtcattgtccgttgcggggggtgagattctcggcgtcgccggagtgcagggtaatggtcagacggaactcgcttcctccctgcttggactcattaagccgacgtcgggaacgatccgcattgatggcaaggacaccacgggcgcggcccccgccaaggttattgaggccggactcggattcgtgcctgaggatcgtcagcgggacggttttgttggcgagttctccatcgctgagaacctcgtgctgaatcaggttggcgcgtactccaagcacggtaaccttcagctcaggcggatcgctgacaatgcacgtgaccgtgtcgaggagttcgacattcgtaccccgtcggcttcgttgccggtgtcttcattgtcgggtggtaaccagcagaaggtcgtgttggcgcgcgaactttcgcgttcgttgagtgttctggtggcttctcagcccacccgcggtgtcgacgtcggtgctatcgagttcttgcacaagcgggtagtcgaggagcgtgacaacggcacagcggtgctcatcgtctccactgagcttgacgaaatcgaggcgctatcggaccgcattgcggtgatgtaccgcggtcgcatcgtcggcatcgcgccggcgggaactccccgcgatgttctcggcctcatgatggccggattcagttatgacgaggcgtgtgacagcgtcgccaagggacacaaggaggtctcggaatga

SEQ ID NO: 38819 - protein, 529 aa, Propionibacterium acnes KPA171202
MTTNTTVAPPGDNAPLKDGLSLRGVTKRFGTLTANDHIDLDIVPGRIHCLLGENGAGKSTLMNILYGLLPSDEGQVYIDGVEQHFDNSKQAMAAGIGMVHQHFMLVNVFTVAENIALGREESTAGILSMRRARAKVRELSDRYHFDVNPDSVIENLPVGVQQRVEILKSLANDAQYLIFDEPTAVLTPQEIDELMAVMKTLRDEGRAIVFITHKLREVRAIADDITVVRRGRIVGKASADQSEAELAEMMVGRAVKLVVDKDEAKPTGSRLDIKDLTVADDRGSVVVDGVSLSVAGGEILGVAGVQGNGQTELASSLLGLIKPTSGTIRIDGKDTTGAAPAKVIEAGLGFVPEDRQRDGFVGEFSIAENLVLNQVGAYSKHGNLQLRRIADNARDRVEEFDIRTPSASLPVSSLSGGNQQKVVLARELSRSLSVLVASQPTRGVDVGAIEFLHKRVVEERDNGTAVLIVSTELDEIEALSDRIAVMYRGRIVGIAPAGTPRDVLGLMMAGFSYDEACDSVAKGHKEVSE

SEQ ID NO: 38820 - DNA, 1548 bp, Leifsonia xyli subsp. xyli str. CTCB07
  CDS (1)..(1548): transl_table=11
atgctgtcgaacgcagtcatcctgcagatgcgtgccatcaccaaggaatttcccggggtcaaagctctggaggatgtctccctgaccgtccgcgccgaagagatccacgcgatctgcggtgagaacggtgcgggcaaatccacgctgatgaaggtcctctccggcgtctacccgttcggaacctacagcggcgacatcgtctaccagagcgaaatcatgcggttcaaaaacatcaagtcctcggagcagcagggcatcgtgatcatccaccaggagctcgcgctgatccccgagctctcgatcaccgagaatatcttcctcggcaacgaaccggtccgcttcggcgtcatcgactggcgtgaggccaaatcgcgcgccgtcgaactgctcgcccgcgtcggactgagcgacgaccccgacacgcagatcaagaacatcggcgtcggcaagcagcaactcgtggagatcgccaaggcgctcaacaagcacgtcaaactgctcatcctggacgagccgaccgccgccctgaacgaggcggagtcggctcacctgctcgacttgatcgtcggcctgaagcacaagggcgtcagctccatcatcatcagccacaagctcaacgagatcgagaaagtcgccgaccagatcacgatcatccgcgacggccgcgcgatcgagaccctcgacgtgaaagcggacggcgtggacgaggaccgcatcatccgtgggatggtcggccgctcgctcgagagccgcttcccggaccgcacccccgacatcggcgaggttctcttcgaggtccgcaactgggtcgtccagcatccccaggaccccgagcgcctggtcgtgaagaactccagcttcactgtccgccgcggcgagatcgtcggcttcgcggggctcatgggcgccggtcgaaccgaactcgcgatgagcgtcttcggccgctcctacggcaccttcgtctccggtgagctctacaaggacggcaagcagattcaggttcgcaccgtctccgaagccatcgacaacggtctcgcctacgtgagcgaggaccgcaaagttctcggtctcaacctcctggacgacatcaaacagtcgatcgtctccgcgaagctcaaaaagatcgccacgcgcggtgtcgtcgacgatcaaaaggagtacgcggtcgcggaggagtaccgcaagagtctccgcatcaagacaccggatgtcgaccgcggcgtcgcgaccctctccggcggcaaccagcagaaggtcgtcctggccaagtggatgttcaccgacccggacatcctgatcctggacgagcccacgcgcggcatcgacgtcggcgctaaatacgagatctacgcgatcatccagcaactggccgcccaggggaaaggcgtcatcgtcatctcgtccgagcttcccgagctgctcggaatctccgaccgcatctacacgatcttcgagggacagatcaccgacgagctcccgattctcgaggccacgcccgaggctctcctgaaaagcatgacatccgccaagaagaaggcaacccgataa

SEQ ID NO: 38821 - protein, 515 aa, Leifsonia xyli subsp. xyli str. CTCB07
MLSNAVILQMRAITKEFPGVKALEDVSLTVRAEEIHAICGENGAGKSTLMKVLSGVYPFGTYSGDIVYQSEIMRFKNIKSSEQQGIVIIHQELALIPELSITENIFLGNEPVRFGVIDWREAKSRAVELLARVGLSDDPDTQIKNIGVGKQQLVEIAKALNKHVKLLILDEPTAALNEAESAHLLDLIVGLKHKGVSSIIISHKLNEIEKVADQITIIRDGRAIETLDVKADGVDEDRIIRGMVGRSLESRFPDRTPDIGEVLFEVRNWVVQHPQDPERLVVKNSSFTVRRGEIVGFAGLMGAGRTELAMSVFGRSYGTFVSGELYKDGKQIQVRTVSEAIDNGLAYVSEDRKVLGLNLLDDIKQSIVSAKLKKIATRGVVDDQKEYAVAEEYRKSLRIKTPDVDRGVATLSGGNQQKVVLAKWMFTDPDILILDEPTRGIDVGAKYEIYAIIQQLAAQGKGVIVISSELPELLGISDRIYTIFEGQITDELPILEATPEALLKSMTSAKKKATR

SEQ ID NO: 38822 - DNA, 1518 bp, Leifsonia xyli subsp. xyli str. CTCB07
  CDS (1)..(1518): transl_table=11
atgacacccgtcctcgaagcccgcggagtgaccaaacggttcgccggcgcgacagcgctgaacgcggtgaacttccgcctcgcccacggcgagagcctcgcgctcatgggcgagaacggcgccggcaagtcgacgctcatcaaggtgctcaccggggtctatcagcccgatgacggcgagctcctgctgaacggcgagcccacggcgttcgcccggcccctcgacgcccagcgctcggtcgtcagcaccatctaccaggaggtcactctggtgccgctgatgtcggtggcgcagaacatcttcctcgggcgcgagccccggaaccgtctgggtctcatcgacttccgccggatgaacgcggaggccgccgagctgctggcggggtacggcatccaggtcgacggccagcggccgctgcgctcgctccccctcggcatccagcagatggtggccctggcgcgcgcggtgagcatcgacgtccgggtggtcatcatggacgagcccacctcgtcgctggaggcccgcgaggtcgagacactcttccgggttatcgggatgctgcgcgcacagggcatcgcgatcgtctacgtcagccaccggatggacgagatctaccgggtgtgcgacacggtcgccgtgctgcgggacggcagagccgtccacaacggccggctcgacgcgctctcccgcatcgaactcgtctcgctcatgctcggccgctcggtcgagaagcggacgagcgccgtggcggacactgctgcgcgggcggagagcggctccgctccggtgctggtcgcgaccgatctgagccggcagcaccagatcgacggagtcgggctgtcgatccagcccggcgagatcgtgggcctcgggggcctgctcggctccggacgctcggagacactgaaggcgatggccggggtcatgcgcctggatcgcggtcgcgtggcggtggacggcaaaaccgtgcgcagcggctcgatcgccgcagccatccgcgccgggatcgtgatgctgcccaaggaccgcaaggccgagggaatcgtaccgaacctctcgatccgggacaacatcgcactggccgcgctcccgcggctctcccgcttcggcttcgtctccaagcgcaggcaggatgccgtggtcgatgtcttcatgagacgtctgcgcatcaaagcctccagcgccgatcaggcggtctcggagctctccggcggcaaccagcagaaggtgatgatcgcccgctggctggcgatgagcccgcgtgtgctgctgctggacgagccgacgcgcggcatcgacgtcggcgcgaaggccgaagtccagaggctcatcgacgagctggccggcgaaggactcgcgatcgtgctggtctcctccgagatcgaggaggtcatcgacgggtccgaccgggtgatcgtgctgcaagacggcagcgtcgcgaccgagctcaccggcgtccacgtcaacgaagaacagctgctcgccgctctcgccggcgacgccgggaaggagtcgtaa

SEQ ID NO: 38823 - protein, 505 aa, Leifsonia xyli subsp. xyli str. CTCB07
MTPVLEARGVTKRFAGATALNAVNFRLAHGESLALMGENGAGKSTLIKVLTGVYQPDDGELLLNGEPTAFARPLDAQRSVVSTIYQEVTLVPLMSVAQNIFLGREPRNRLGLIDFRRMNAEAAELLAGYGIQVDGQRPLRSLPLGIQQMVALARAVSIDVRVVIMDEPTSSLEAREVETLFRVIGMLRAQGIAIVYVSHRMDEIYRVCDTVAVLRDGRAVHNGRLDALSRIELVSLMLGRSVEKRTSAVADTAARAESGSAPVLVATDLSRQHQIDGVGLSIQPGEIVGLGGLLGSGRSETLKAMAGVMRLDRGRVAVDGKTVRSGSIAAAIRAGIVMLPKDRKAEGIVPNLSIRDNIALAALPRLSRFGFVSKRRQDAVVDVFMRRLRIKASSADQAVSELSGGNQQKVMIARWLAMSPRVLLLDEPTRGIDVGAKAEVQRLIDELAGEGLAIVLVSSEIEEVIDGSDRVIVLQDGSVATELTGVHVNEEQLLAALAGDAGKES

SEQ ID NO: 38824 - DNA, 1491 bp, Yersinia pseudotuberculosis IP 32953
  CDS (1)..(1491): transl_table=11
atggaaatattgttagaagtccgtggcttatctgttgagtttcctggtgttaaggcattggactccgtagatttttctctgcaacgcggtgaggttgttgcgttattaggagagaatggcgcaggaaaatcgacattaataaaagcattaaccggggtttataaacgatccgctggtgaggtgctgttggacggcaaggctgtgtgccccattgataccgcagatgcccaactcatggggattggtactgtctatcaagaggtcaacttactgccgaacatatctgttgctgcgaatttatttattggccgtgagccgctacgttgggggctaattgatcacaataaaatgaaccagcaagcagcaaaattgctgacgggttatggtttaacgttagatgttcagcagcctttggctaatttctctattgcaatacaacagattgtagcaatcgcccgcgccgttgacctttccgcgaaggtgctgattctggatgagcctacagcaagtttagatgctaaagaagtcagtatgttactggatatcttgtgccagctacgggaccagggtattggtatggtttttgtgacccattttctcgatcaggtttatcgaatcagtgatcgcattacagttttgcgaaatggcaagctcgtcggtaccaaaactgtggcagaacttccccggattgagctagtgcaaatgatgctggggcatagttttgatgaacaattactgaaacgtggtgaacacagtattacgaataagaatccattggttgagtttaaaaactatggccgacggggtgtggtagagaattttgatttgtctgtatctcccggtgaaattgtcgggttggccgggttattaggttcaggacggactgaaacagcacagctaatttttggcataacgacacctgatacgggggaagccaaaatacaaggcaaaccggttaaaattagaacaccacgtaaggcatcaaaatttggttttggctactgcccagaagatcgcaaaacagagggtattgttggtgcggcaaccgtaagggaaaacatcattttagccttacaagcgcagcgtgggtggctgaggcccctttctatgcgtgagcagacacaaattgcagacgattttatccagcaactgggtattcgtaccccaagccctgaacagcaaattcaatatctctccggtggaaaccaacaaaaagtattacttgcccgctggcttgccacgaaaccccgatttttaattttagatgaaccgactcgtggtatcgatgtaggtgctcacgccgaaattattcggttgatcgaaaagttgtgtgatgaagggttggcgctgttaattatctcttccgaattagaagaattggcgggttacgctgatcgggtcatcgttcttcgtgatcgtcggcatgttgctcaactcgaccacgatgaaatttccgttcctgccattatgcaggcgatcgcggtgcaataa

SEQ ID NO: 38825 - protein, 496 aa, Yersinia pseudotuberculosis IP 32953
MEILLEVRGLSVEFPGVKALDSVDFSLQRGEVVALLGENGAGKSTLIKALTGVYKRSAGEVLLDGKAVCPIDTADAQLMGIGTVYQEVNLLPNISVAANLFIGREPLRWGLIDHNKMNQQAAKLLTGYGLTLDVQQPLANFSIAIQQIVAIARAVDLSAKVLILDEPTASLDAKEVSMLLDILCQLRDQGIGMVFVTHFLDQVYRISDRITVLRNGKLVGTKTVAELPRIELVQMMLGHSFDEQLLKRGEHSITNKNPLVEFKNYGRRGVVENFDLSVSPGEIVGLAGLLGSGRTETAQLIFGITTPDTGEAKIQGKPVKIRTPRKASKFGFGYCPEDRKTEGIVGAATVRENIILALQAQRGWLRPLSMREQTQIADDFIQQLGIRTPSPEQQIQYLSGGNQQKVLLARWLATKPRFLILDEPTRGIDVGAHAEIIRLIEKLCDEGLALLIISSELEELAGYADRVIVLRDRRHVAQLDHDEISVPAIMQAIAVQ

SEQ ID NO: 38826 - DNA, 1515 bp, Yersinia pseudotuberculosis IP 32953
  CDS (1)..(1515): transl_table=11
atgactcatatttctgatgttgatagagacgtgccgcttatcacgttaaaagcgctgtccaaaagctttggcggtcatcaggcactgaaaaatatcacgttgacgttgaataaaggcgaagttcactgtctggccggggctaatggttgcggaaaaagtacgctgattaagacgattagtggcgtttatgccccagatgacggcagtgaaattatcattgatgaaaaatcttatcaccgcctgacgcctgatcgcgcacgcgctttgggcgtacaggtgatttatcaagacctttcgctgttccctaacctgacggtagccgaaaatattgccttcgaatataacttgaaaggttacttcggctggttcaacaagcagaaaatcaaacaaaaagcctgccagatcttgcatgaactggcttttagtctcgatcccgatgcgctggtacaacatttacccattgcccaacgccagcaggtggctatctgccgtgcgttggttgccgatgcgcgcttggtgattatggatgagcctacagcctctttgacgcgcaccgaagtgaatcaattattacgcacagtaaattacctgcgagataagcacattaccgtggtcttcgtcagccaccgattagatgaagtgaaagagatttcggatcgtattacggtgatccgcgatggcgaaaaagtggggacctggccagccactgagctttctaccgggcgtattaccgagttgatgaccggcctgaccctcacccacgagcagaaatcacccaatgccgaattaggcaaagtggtgctgcaactggaaaacctaagccgtaaagggcaattcgacgatatctcgtttagcctgcatcgcggcgaagtgctcggcctgtgtggtttgctgggttccgggcgaaccgaattggcccttagcctatttggcatcacccatcctgatagcggcaagattgccattgacggtaacccggtgcgcattaaagacaatacccgtgccattgagctaggtattggctatgtatctgaagatcgcctgaccctcggtgccgtattgcaacaatctatcgccgacaacatggtgctgtcgattctgcaacgcatccgtactccactttatctggttgatgacgctaaacagaacgcgctggtgcaagaatgggtgaaggatttggacatcaaaatcacggatgctgataacgcgctgtcaacgttgtcagggggcaatcagcaaaaagtggtgctggcaaaatggatcctgaccaaaccgaaagtgttaattctcgattcacctactgtgggggtcgatatcggtgccaaagacagtatttacaagctgatccatcgtctctccggggtgggtatctcggtgttgctgctctctgatgaaatccccgaagcctattacaactgcgatcgcatcctgcatatgcagcaggggcgtatcgtcaatgaactgatcccgaatcaaatgactgaacaacagctggcggaggtcatcaatggctaa

SEQ ID NO: 38827 - protein, 504 aa, Yersinia pseudotuberculosis IP 32953
MTHISDVDRDVPLITLKALSKSFGGHQALKNITLTLNKGEVHCLAGANGCGKSTLIKTISGVYAPDDGSEIIIDEKSYHRLTPDRARALGVQVIYQDLSLFPNLTVAENIAFEYNLKGYFGWFNKQKIKQKACQILHELAFSLDPDALVQHLPIAQRQQVAICRALVADARLVIMDEPTASLTRTEVNQLLRTVNYLRDKHITVVFVSHRLDEVKEISDRITVIRDGEKVGTWPATELSTGRITELMTGLTLTHEQKSPNAELGKVVLQLENLSRKGQFDDISFSLHRGEVLGLCGLLGSGRTELALSLFGITHPDSGKIAIDGNPVRIKDNTRAIELGIGYVSEDRLTLGAVLQQSIADNMVLSILQRIRTPLYLVDDAKQNALVQEWVKDLDIKITDADNALSTLSGGNQQKVVLAKWILTKPKVLILDSPTVGVDIGAKDSIYKLIHRLSGVGISVLLLSDEIPEAYYNCDRILHMQQGRIVNELIPNQMTEQQLAEVING

SEQ ID NO: 38828 - DNA, 1524 bp, Yersinia pseudotuberculosis IP 32953
  CDS (1)..(1524): transl_table=11
atgaaccacagacctgacattgtcatgcgtgctgaggacatttcaatgcgttttcctggcacattggcgctcgatagcgtcaattacactgtttatcgcggcaaagttaacgtcattattggcgaaaacggggccggtaaatcaacgctgatgaaaattctggccggggtgcagcagcaaacctccgggcaaatttacctaaacgggcagaaggtcagcattgccaatactcgtgaggcggcagcgctgggcattggcatggtgcatcaggaactgaatttatcggaaaacctcaatgtggcggaaaatatttttcttggccgcgaaatccagcacggcttgaaaccgatcaatcaggcagcgcaggaacgggttactgaacaactgatggtgcgtcttgatcaggtcatttcaccgcaagagaaggtgtcaaacctgaaagtgggccaacaacagttgattgaaattgccaaggcactggcggagcaggccgatatcctgattctggatgaaccgacctcggccctcagtaaaacggaggtggatatcctgttccgtgtgatccgcgaactcactcggcaaggggtttccatcgtttatatttcccaccgattggaagagttaatggcgattggcgactacatcactattttacgcgatgggcgctttcaggctgaagccgcagtaaaagacattgatgtgccgtggattgtgcgtgaaatgctgggtagcgatccggtttccagcttccttcgtccggggcgtacctttggtgaaccaatgatggaggtggaagatgtcaccctcatcaatgaatccggtaataccgtggttaatcatgtctcattgcacgtccgggcaggcgagattgtcggtatttatggcctgatgggggcgggccgtaccgaattgttcgaatgtttactgggcacgcaacaaaactatcttggcaccgttcgcctcaatggcacggtcatgaatgccaaaacctccaccgcagagcgtatccgccttgggatgagcttggtgccggaagatcgtaaaaaagccgggattttccctgcttcatcggtcgcctgtaatttgaccatctccagcttatggcgtcggctgaagcaccgctttgctatctggcaggagagtgaagtgcaagtggtggcagcgactatcggtgagctgtcgatcaaagtttcttcacctgatgtcgaaattcaggcactcagcgggggcaatcaacaaaaagtggtcattggccgctcgttactgacccgcccgaacattttgctgctggatgaaccgacgcgtggcattgatgttggcgcaaaagcggatgtgtttgaaatgatggtgaaactctctgagcaggggatcggcattctgttttccacctccgacctaaaagaaattatggcggtatccgaccgcattctggtgatgtcgaacggcaaactgacggcaaatttatcccgtcaatcggccagtgaatcggcattggttacagcaagcgcacaagggtttgaatga

SEQ ID NO: 38829 - protein, 507 aa, Yersinia pseudotuberculosis IP 32953
MNHRPDIVMRAEDISMRFPGTLALDSVNYTVYRGKVNVIIGENGAGKSTLMKILAGVQQQTSGQIYLNGQKVSIANTREAAALGIGMVHQELNLSENLNVAENIFLGREIQHGLKPINQAAQERVTEQLMVRLDQVISPQEKVSNLKVGQQQLIEIAKALAEQADILILDEPTSALSKTEVDILFRVIRELTRQGVSIVYISHRLEELMAIGDYITILRDGRFQAEAAVKDIDVPWIVREMLGSDPVSSFLRPGRTFGEPMMEVEDVTLINESGNTVVNHVSLHVRAGEIVGIYGLMGAGRTELFECLLGTQQNYLGTVRLNGTVMNAKTSTAERIRLGMSLVPEDRKKAGIFPASSVACNLTISSLWRRLKHRFAIWQESEVQVVAATIGELSIKVSSPDVEIQALSGGNQQKVVIGRSLLTRPNILLLDEPTRGIDVGAKADVFEMMVKLSEQGIGILFSTSDLKEIMAVSDRILVMSNGKLTANLSRQSASESALVTASAQGFE

SEQ ID NO: 38830 - DNA, 1548 bp, Yersinia pseudotuberculosis IP 32953
  CDS (1)..(1548): transl_table=11
atgtcgcaacctttattgaaaatcaccgatatggcgaaaagcttctctggtgtctgggcgctcagtaacgtacagctcaccgtagagcagggtgaaatacatgcactcttgggtgagaacggcgcaggtaaatcaacactcttgaaagcactctcgggtgctcaaccccagactcacggcgaaatctggtttaacggtgaaatgctggcattggacgactcgccagtggaacgccagaacaaaggcattatcaccatctatcaagaagttaatctactgcccaacatgacggtggcagaaaacatgtttcttggtcgtgaaccgcgccgccgtcaggtatttgtcgacgaaaaagccgtcaatcaggaagcccaagcgatcctcgattacctgcaacttaacgtgttgcccaccacggcggtggcgcgcttgagtatcgcgcagcaacagatggtagagatcgcccgggcgctgaccttgaacgcgaagctcattgtcatggatgagccttcggcagcactcagcgacagcgaagtcgaaagcctgcatcgcgtggtacgggaactgaaaggccgtggtgtgagcattatctatgtcacccaccgcttgcacgaagtgttccaactctgtgaccgtttcacggtgtttcaggatgggcgttacaccggttctgatgaggttgcaggcaccaacgttgagaagattatccgcctgatggtggggcgagacgtcgtatttaaccgccgccccgccagtgagacccatcaccaagaccagcccattcgcctatctgtgcaagggctgtgtcgtgaaaaacccccgctcgacccacatggtgtggcgctaaaagacatcagctttcatgtccacgccggggaagtcttgggtatcgccgggttggtaggggcagggcgtaccgaagtggcacgttgtctgtttggggcaggggctttcacctctggcaattttgagatagacggtgtgccctatcagccacgggatccaatgttcgcgctggaacaggggatcgcactggtgccggaagaccgtaaaaaagagggggcagtgcaagggctttctattcgcgacaatctgacactttcgagcctggccgggctgttacagtggcgttttttcgtcaatacccgcaaagaagatcaactgattgagacctaccgtttagcactgcaaatcaagatggtgaacagcgaacaggcggtgcgtaagctctctggcggtaaccagcagaaggtgatcttggcccgctgcatggcgctcaatccacggatcctgatcgtcgatgaaccgacacggggcattgatgtgggcacgaaatcggaagtgcatcaggtgttgtttgatatggctaaacagggcgtggcagtgatcgtcatctcctcggatttaccggaagttctcgcggtttctgaccgggtcatcacgctaagcgaagggcgagtcactggagagattcacggtgatgacgccagcgaagaacggctgatgaccatgatggccatcaatcataacgccttaaatgccgcctaa

SEQ ID NO: 38831 - protein, 515 aa, Yersinia pseudotuberculosis IP 32953
MSQPLLKITDMAKSFSGVWALSNVQLTVEQGEIHALLGENGAGKSTLLKALSGAQPQTHGEIWFNGEMLALDDSPVERQNKGIITIYQEVNLLPNMTVAENMFLGREPRRRQVFVDEKAVNQEAQAILDYLQLNVLPTTAVARLSIAQQQMVEIARALTLNAKLIVMDEPSAALSDSEVESLHRVVRELKGRGVSIIYVTHRLHEVFQLCDRFTVFQDGRYTGSDEVAGTNVEKIIRLMVGRDVVFNRRPASETHHQDQPIRLSVQGLCREKPPLDPHGVALKDISFHVHAGEVLGIAGLVGAGRTEVARCLFGAGAFTSGNFEIDGVPYQPRDPMFALEQGIALVPEDRKKEGAVQGLSIRDNLTLSSLAGLLQWRFFVNTRKEDQLIETYRLALQIKMVNSEQAVRKLSGGNQQKVILARCMALNPRILIVDEPTRGIDVGTKSEVHQVLFDMAKQGVAVIVISSDLPEVLAVSDRVITLSEGRVTGEIHGDDASEERLMTMMAINHNALNAA

SEQ ID NO: 38832 - DNA, 1521 bp, Yersinia pseudotuberculosis IP 32953
  CDS (1)..(1521): transl_table=11
atggccgatattaatacagcacaacctcgtgactggttactggaaatgagcaatattgataaatcatttccaggcgtgaaggcgttagataacgttaatcttaaagtccggccctattctatccatgcactgatgggcgaaaatggtgcaggtaagtcaacgctattaaaatgtctgtttggtatctataaaaaagattccggaagtattattttccagggacaagaaattgaatttaaaagttctaaagaagcattagaacagggtgtttcgatggtacatcaagaattaaacttggtgttgcaacgtacagtaatggacaacatgtggttggggcgctatccaaccaaaggtttttttgtcgatcaagacaagatgtataaagagacaaaggccatctttgatgaattagatattgatattgatccgcgcgataaagtagccacgttatcggtatctcagatgcaaatgatcgagatcgccaaggctttttcttacaatgcaaaaatcgtcattatggatgagccaacctcttcactaacagaaaaagaggtgaaccatttattcaccataatccgaaagttaaaggcgcgaggctgcggcatcgtttatatttctcacaagatggaagagatattccaactgtgcgatgaaattactattctgcgggatggtcagtggattaccacccagcctttggatggtttgacgatggatcagatcatttcaatgatggtcggtcgctctctgagccaacgttttcctgatcgcctgaacaagcccggtgaagtcattcttgaggtgaagaatctgacctcattgcgccagccctctatccgcgatgtttcctttgatttacataaaggggaaatcctggggattgcaggcttggtcggggctaaacgcacagatatcgttgaaactttatttggtatccgagaaaaagtgaccggcacgattaaattgcatggtaagaatattaataaccacagcgctaacgaagccattaaccacggttttgccttagtgactgaagagcgccgttcaaccgggatctacgcttatctcgatatcagttttaactccctgatctctaatattcgtaactacaaaaataaatttgggctgctggataacactcgcatgaaaagtgatacccagtgggttatcgatgcgatgcgggtaaaaacgccaggccatcggacaaatattggttctttgtcgggggggaatcagcagaaggttattattggccgctggttactcacgcagccagaaatattaatgttggatgagccaactcgaggtatcgatgttggcgctaagtttgaaatctatcagttaatgactgaactggcgaagaaagacaaagggattattattatctcctctgaaatgcctgagttattagggattactgacagaatactggtaatgagtaacggtcaggttgcgggcattgttgataccaagcaaaccacgcaaaatgaaatattacgccttgcatccttgcatctctaa

SEQ ID NO: 38833 - protein, 506 aa, Yersinia pseudotuberculosis IP 32953
MADINTAQPRDWLLEMSNIDKSFPGVKALDNVNLKVRPYSIHALMGENGAGKSTLLKCLFGIYKKDSGSIIFQGQEIEFKSSKEALEQGVSMVHQELNLVLQRTVMDNMWLGRYPTKGFFVDQDKMYKETKAIFDELDIDIDPRDKVATLSVSQMQMIEIAKAFSYNAKIVIMDEPTSSLTEKEVNHLFTIIRKLKARGCGIVYISHKMEEIFQLCDEITILRDGQWITTQPLDGLTMDQIISMMVGRSLSQRFPDRLNKPGEVILEVKNLTSLRQPSIRDVSFDLHKGEILGIAGLVGAKRTDIVETLFGIREKVTGTIKLHGKNINNHSANEAINHGFALVTEERRSTGIYAYLDISFNSLISNIRNYKNKFGLLDNTRMKSDTQWVIDAMRVKTPGHRTNIGSLSGGNQQKVIIGRWLLTQPEILMLDEPTRGIDVGAKFEIYQLMTELAKKDKGIIIISSEMPELLGITDRILVMSNGQVAGIVDTKQTTQNEILRLASLHL

SEQ ID NO: 38834 - DNA, 1557 bp, Yersinia pseudotuberculosis IP 32953
  CDS (1)..(1557): transl_table=11
atgtccagcattcccccctcccgccttgagatgcggaatatttctatctctttctctgggtttcatgccttgcaagaagttgattttactctagaaggtggttcaacccatgcgctaatcggtgctaatggtgcgggcaaatccaccctgatggcaatcctctccggcgctcataatcactatcgtggcgagatctttattgatggtcagccaatcgatattcactccccacggcaagccaggcagcacggtattcatgtggttcaacaagaggtggatgtcgcgttgatccccacgttgtctgtggcagagaatattatgctggatgagttggcagaccgggggcacctgttcaattggccacaactttatcgtcaggcagaagccttgcttgagcaactggaactcaagttgaatgtgcgtcaacgtttggaatcctgcacgctggcagagaagcagcaagtgctgttggcccgcgccctgtcccaccaatgtcgttttctcatactggatgaacccactgcacccctggatcaagaagagagcgcccgcttgttccgcgtcgtgcgtcgcttgcaatctgagggcatcggcattgtctttatttcgcaccgtattcatgaactgcgcgaggtgtgtgatcaactcacggtactgcgtgatggccgtcgcgtgagccatgacaccatggaaggaatgagtggtgagcagattgtagaaaaaatgctcggccatacactggaggatattttcccccctcggcgagcggcagtcagcagcaaaacactattgtcgaaaacacggttgtcgaaaacactattgccgaaaacactgttatcggtcagcggcctacatgatcagtataagttgcgcgatatctccctcacattacatcagggcgaaattttaggcattgcgggcttagccggtgccggtaaaacagaattgtgcaaagccttgtttggcgacacgcctagtacgctggagcgcggtgaattgagcggcaaagcctggcggccacgctcacccgatcgatccgtggcgcaagggctggcactggtacctgaagagcgccgcaaagaaggtatttttattgacgaaggcatcccaatgaacctgagtgttgccgccgatgacagtttttcccgttggagtctcttcagccgccgtcaggaattgagttgggctaaggaactgattgagcgcctgggtatacggacatcatccccacaacaaaaactggcccgcctctctggggggaatcagcaaaaagtggccattggtaaatggctgcgcggtgatgcacaggtgctgatttttgacgaaccgaccaaaggggtcgatatcaaagccaaacaagaccttttctctctgattgaccaattggcgcaacaagggaaaggtattatttatgcatcaggtgaattttcagaattagtcggtttatgtgatcgtatctgcgtattgtgggatggccgaattgttgccgaactgaatgctgcagaggtcgatgaagagacattattactattttcaaccggaggaacccctcagtga

SEQ ID NO: 38835 - protein, 518 aa, Yersinia pseudotuberculosis IP 32953
MSSIPPSRLEMRNISISFSGFHALQEVDFTLEGGSTHALIGANGAGKSTLMAILSGAHNHYRGEIFIDGQPIDIHSPRQARQHGIHVVQQEVDVALIPTLSVAENIMLDELADRGHLFNWPQLYRQAEALLEQLELKLNVRQRLESCTLAEKQQVLLARALSHQCRFLILDEPTAPLDQEESARLFRVVRRLQSEGIGIVFISHRIHELREVCDQLTVLRDGRRVSHDTMEGMSGEQIVEKMLGHTLEDIFPPRRAAVSSKTLLSKTRLSKTLLPKTLLSVSGLHDQYKLRDISLTLHQGEILGIAGLAGAGKTELCKALFGDTPSTLERGELSGKAWRPRSPDRSVAQGLALVPEERRKEGIFIDEGIPMNLSVAADDSFSRWSLFSRRQELSWAKELIERLGIRTSSPQQKLARLSGGNQQKVAIGKWLRGDAQVLIFDEPTKGVDIKAKQDLFSLIDQLAQQGKGIIYASGEFSELVGLCDRICVLWDGRIVAELNAAEVDEETLLLFSTGGTPQ

SEQ ID NO: 38836 - DNA, 1539 bp, Yersinia pseudotuberculosis IP 32953
  CDS (1)..(1539): transl_table=11
ttggacgccgcacagtcaccttatctggcttttcgtggcatcggaaaaagtttccccggtgttctggcgctggatgatatcagtttcacctgtcaggcgggccagatccatgcgctgatgggcgagaatggcgcggggaaatcaaccctgttaaagatcctcagtggtaactacaccccgacacagggtgaaatccacattaaagggaaagccgttaactttaccaatactacggatgcgttggatgctggtgtggcgatcatttatcaggaactgcatttggtgcctgaaatgacagtggcagaaaacatctatctgggccaattacccaccaagatgggtatggttgatcgaaaattgctgcgttatgaatctcgcatacagctatcacatctggggttggacattgatcccgataccccactgaaatatctctccatcggccaatggcagatggtggaaattgccaaagcattagcccgcaatgcaaaaataatcgcctttgatgaacccaccagttcgctctctgcccgagaaattgagcaactgttccgcgtgatccgcgagttacgggccgaagggcgggtcatcttgtatgtctcccatcgaatggaagaaatttttgccctgagtgatgccattacggtgtttaaagatggccgctatgttcgtacgtttgatgatatgacccaagtgaataatgcgtcactggtgcaagctatggtagggcgtaatttaggggatatctatggctatcagccccgagagataggttctgaacgcttaacgctacaagcggtgaaggccatcggtgtggcctcgccgatcagcttgactgtacaccaaggggaaattgtggggctgtttgggttagtgggggccgggcgtagtgaactgctcaaggggctgtttggtgacaccaaactgaccagtgggaaactcttgcttgatggccaaccactgactatccgttcgccgattgacgctatttctgctgggatcatgttgtgtccagaagatcgaaaagcggatggcattattcctgttcactcggtacaggacaatatcaatatcagtgcccgccgcaaaacattaaccgcaggctgtctgattaacaaccgctgggaagcggataatgcgttgctgcgtattcagtctctgaatattaaaacgccaggcccccaacaactcattatgaatctatccggggggaatcagcagaaagccattttaggacgctggttgtccgaggacatgaaagtgatcctgttggatgaaccgacccgtggtattgacgtcggggccaaacatgaaatctataacgtgatttatcaactggcgaaacagggcattgcggtgctgtttgcttccagtgatttgccggaagtgcttgggctggcagatcgtattgtggtgatgcgtgagggcgctatctctggtgagctagaccatgaatatgccactgaagagcaagccttaagtctggcaatgttacgcaccccgaatattgccaccaataccgcgtctgcggttgcctga

SEQ ID NO: 38837 - protein, 512 aa, Yersinia pseudotuberculosis IP 32953
MDAAQSPYLAFRGIGKSFPGVLALDDISFTCQAGQIHALMGENGAGKSTLLKILSGNYTPTQGEIHIKGKAVNFTNTTDALDAGVAIIYQELHLVPEMTVAENIYLGQLPTKMGMVDRKLLRYESRIQLSHLGLDIDPDTPLKYLSIGQWQMVEIAKALARNAKIIAFDEPTSSLSAREIEQLFRVIRELRAEGRVILYVSHRMEEIFALSDAITVFKDGRYVRTFDDMTQVNNASLVQAMVGRNLGDIYGYQPREIGSERLTLQAVKAIGVASPISLTVHQGEIVGLFGLVGAGRSELLKGLFGDTKLTSGKLLLDGQPLTIRSPIDAISAGIMLCPEDRKADGIIPVHSVQDNINISARRKTLTAGCLINNRWEADNALLRIQSLNIKTPGPQQLIMNLSGGNQQKAILGRWLSEDMKVILLDEPTRGIDVGAKHEIYNVIYQLAKQGIAVLFASSDLPEVLGLADRIVVMREGAISGELDHEYATEEQALSLAMLRTPNIATNTASAVA

SEQ ID NO: 38838 - DNA, 1539 bp, Yersinia pseudotuberculosis IP 32953
  CDS (1)..(1539): transl_table=11
atgacccaagaaacagataacgaacagcaggatgatcccaatgtcgtgttagcggcgcggaatatcagcaaaatttacggttcgacccacgccttacaaggtgtgaacttcgatattcgtcgcggtaaggtgaccacactatttggggaaaatggcgcgggaaaatcgacgttaatgaaaattctctccggtgtggtcacgccttcctccggtgatattttactcaatggtgaagtgaaaaacttcacctcgacagcccaggcgcgtcagcatgggattgccattattcatcaggagctgaatctcgcccccaacatgaatgtgcgcgataacatctttattggccgagaaatgatgactgtttcaggagtagattttgccaatgaagagcgcattacccgggatctcatgcgtgaacttgaggaagatatcgatccattgacgcgggtagaagatttgcgcttaggtcagcaacagattgtggagattgcccgtgcgctatcggttaaggcgcgtattttgattatggatgaaccaacatcagcactcagtgcctcggaagtcggcgtgctgttcagcattatccgtgacttgacccagcggggcgtttcgattgtctatatctcacatcatttggaggaagcactggaaatcaccgatcacgccgtggtattgcgcgatggggtggtgaccgccagtggccagcgcagtgatatcgatctggagtggattgttcacaatatggtgggtgaccattttgacttaggttcaccgccgcagggctacgagtttggtgatgtcgcgctggcggttgatcagctcagcgttcccggcccgagcggttatatggccgtggataacctttcattaagtgtgcgggccggggagatcatttgcatttacgggttgatgggcgcgggccgtactgaactgatggagtgcatcgccgggcggcttagcgctgagcgcggcagtatcctgctcaacaaccaagatatttcccccctcagcattgctgaccgtattgaaagcggtttggcgttggtacccgaagatcgtcaacgcgacggcttggtgcagacgatgtcagtcggggaaaacctcacactggccagtattcgcgagtttgttcgccgcttggtgctttctccccgtcgtgaacaggaattggtggttgactccattcgcaatgtgacggtgaaaacgacagggggtgaggcaacgatagggtcactatccggcgggaatcagcaaaaggtcgtgatcggcaagatactggcgacccggccaaaagtcattttattggatgaacccagccgtggcattgatattggtgccaaagcggaggttttccgtttacttgctgagagcgcccgaaaaggactggccgttatttactccacctccgaagtaggagagtgcctgagtatagcgcaccgcattgtggtgatgagtaaagggcatattaccgccatctttgattctgcggtttctaaagaacgcatcatggccgcttctggcgagtccgtgattgcctga

SEQ ID NO: 38839 - protein, 512 aa, Yersinia pseudotuberculosis IP 32953
MTQETDNEQQDDPNVVLAARNISKIYGSTHALQGVNFDIRRGKVTTLFGENGAGKSTLMKILSGVVTPSSGDILLNGEVKNFTSTAQARQHGIAIIHQELNLAPNMNVRDNIFIGREMMTVSGVDFANEERITRDLMRELEEDIDPLTRVEDLRLGQQQIVEIARALSVKARILIMDEPTSALSASEVGVLFSIIRDLTQRGVSIVYISHHLEEALEITDHAVVLRDGVVTASGQRSDIDLEWIVHNMVGDHFDLGSPPQGYEFGDVALAVDQLSVPGPSGYMAVDNLSLSVRAGEIICIYGLMGAGRTELMECIAGRLSAERGSILLNNQDISPLSIADRIESGLALVPEDRQRDGLVQTMSVGENLTLASIREFVRRLVLSPRREQELVVDSIRNVTVKTTGGEATIGSLSGGNQQKVVIGKILATRPKVILLDEPSRGIDIGAKAEVFRLLAESARKGLAVIYSTSEVGECLSIAHRIVVMSKGHITAIFDSAVSKERIMAASGESVIA

SEQ ID NO: 38840 - DNA, 1491 bp, Yersinia pseudotuberculosis IP 32953
  CDS (1)..(1491): transl_table=11
atgacgcctttattagaattaaagcagataaaaaaatcttttccgggtgttaaagcactggatggaattgatctcaccattcaacgcggagaggttcatgcgttgctgggggagaatggggcaggcaaatctacactggttaaaataatgtgtggtatttatcagccagattctggggggatttttctggaaggtcaacgctgtcgctttgcgaattatcgtgatgccattgatgcgggtattgggattatttttcaagagttctccctgatcccctatatgaatacgattgataatatttttcttaatcgagaaataaagaatcgttgggggttattagatcgccgtgaaatgcggcgcaaggcccgcgctattttcaagcgcctgacggtggatattgatcttgattgtcccgtggaacaactcagtgtggcgcaacagcagtttgtcgagatagccaaagctctgtcgttggatgcgcgcattctggtcttggacgaacccacggcgacgctgacaccaggcgaagccgaacatttatttagcatcatgcacgatctgaaattgctcggtgtcggtatggtgtttatttcacatcatctggacgaaattttcacgatttgtgaccagatcacggtgctgcgtgatggcgcttatattcagacactgccgactgccgagaccaatgtcgaagagctggttaatctgatggtcgggcgcaaaatcgagaatgccttcccggtgaaatcgcatccggtagacacctcggtgcgggtgctggaggcgacggttcagcacacaaaacacgtgatggaaaacagcttccatctgtataaaggcgaaatattggggtttgccgggttggtggggtcaggccgtactgaactgatgtccgcactgatcggtgcgcgctcctgctatcaaaagagtgtcagcctcaatggtcagcccaccgtgctacgtaatccggcgcaggcgttggatcacggtattggtctgttaccggaaagccgtaaaaccgaagggctgatcttgccgttttccgtctcccaaaacattacgcttaatcggcacgaaaaacgcggaaaaatcttcgttaatgccggtaaagagcacgatatcgtgcagcgattaatccgcgcggttggcgtaaagacaccggatgccgatacggctgtgaataccttgagcggtggcaatcaacaaaaagtggtaattgcccgctggcttaacaacgattgcgatattcttattttcgatgaacctacacggggtatcgacgtgggggccaagtctgaaatttatcaattaatgcaacaactgacgcagaaaggcatatctatcatcatgatttcatccgaattaccggaaattattggcgtttgtgatcgcgtcctggttttccgtggtgggcacattgttgccgaactggcgggtgatgaaattgaatctaataacatcatgcttcacgcaacagggagtgcattatga

SEQ ID NO: 38841 - protein, 496 aa, Yersinia pseudotuberculosis IP 32953
MTPLLELKQIKKSFPGVKALDGIDLTIQRGEVHALLGENGAGKSTLVKIMCGIYQPDSGGIFLEGQRCRFANYRDAIDAGIGIIFQEFSLIPYMNTIDNIFLNREIKNRWGLLDRREMRRKARAIFKRLTVDIDLDCPVEQLSVAQQQFVEIAKALSLDARILVLDEPTATLTPGEAEHLFSIMHDLKLLGVGMVFISHHLDEIFTICDQITVLRDGAYIQTLPTAETNVEELVNLMVGRKIENAFPVKSHPVDTSVRVLEATVQHTKHVMENSFHLYKGEILGFAGLVGSGRTELMSALIGARSCYQKSVSLNGQPTVLRNPAQALDHGIGLLPESRKTEGLILPFSVSQNITLNRHEKRGKIFVNAGKEHDIVQRLIRAVGVKTPDADTAVNTLSGGNQQKVVIARWLNNDCDILIFDEPTRGIDVGAKSEIYQLMQQLTQKGISIIMISSELPEIIGVCDRVLVFRGGHIVAELAGDEIESNNIMLHATGSAL

SEQ ID NO: 38842 - DNA, 1509 bp, Yersinia pseudotuberculosis IP 32953
  CDS (1)..(1509): transl_table=11
atgatccgtaacgagatactggcaaaaaaaccggactatctattagaagcgacgggactaaaaaaatcctttggcgatgtgatcgcgctaaacaatgctgaattctgtttaaaacggggttctatccatgcgctttgcggtgggaacggtgccggtaaatcaacatttcttggcctattaatgggatttattcagcctgatgatggagcgtttttcatcaacgggcaatactgcgaattcgactcaccgggacaagccctagccgcagggattaccattgttcaacaagagctcagtggggtacaggatctgtctgtggccgaaaatatttatctgggttctgagccaaggcgctttggtattgtcgattttcgtgcgcttaaccgccaggccgatgtgttattacacgagctgggtttcgccatttcacccaaagccaaaatgcgcagcctgagcgtagcagagcaacaacgggtggaaattgccaaagcgctgtcacatacccatgccgatatcatcattatggatgaacccacctccgcattaggtgaagaggatgcgcaaaaactgtttcagaccataaaaaaactggcctctctgggaaaaggggttatttatgtctcccaccgcttgtcagaaatatttcaaattgcagacagctacacggtatttcgagatggttgttatatttgtgaaggagagatgagtcacatcactcgcgaacaactgattgagcatattattggtggcgagattgatggtgagttctccaaatacaatactccaaccaatgtgccactctttaaagcctctggcatatgttggaaatcgaaagtgaatgatgtcagcctgacattacattgcggtgaaattttagggatttatggcttagtgggatcggggcgcagtgagtttcttaatctgctgtttggtcttgagcgtgctgatcacgggagcatccatatcggtgatgagatattactgaaacacacaccagaaaaagcaatcaacgccggtatcgcctatgtgaccgaagatcgtcaagagacaggattagtattgaaccattcggtatcggaaaatattaatatctcctcattaaacgtcattagtcgtatgagtatcattaatgaaaatgatattcagcgccgtgctgaccacacgatccgtatctttaatattaagacaccgagtcgccaacaacgagtggctaatttaagcggtggtaatcaacaaaaggtggtgttaggccgctgggcactgttagaccctaaagttttattattagatgagccaaccaagggaattgacattggggcaaaaaaagaaatttatcgctttatgtcggattttgccctcaaaggaaaaggcattgttatggtctcctccgagctttctgaaattattggcatgagcgacagaatcttggtttttaaaaaagggaaaatagtcggagaaattatgggctcggaggcaacacaggccaaattaatgtcgatggcggtataa

SEQ ID NO: 38843 - protein, 502 aa, Yersinia pseudotuberculosis IP 32953
MIRNEILAKKPDYLLEATGLKKSFGDVIALNNAEFCLKRGSIHALCGGNGAGKSTFLGLLMGFIQPDDGAFFINGQYCEFDSPGQALAAGITIVQQELSGVQDLSVAENIYLGSEPRRFGIVDFRALNRQADVLLHELGFAISPKAKMRSLSVAEQQRVEIAKALSHTHADIIIMDEPTSALGEEDAQKLFQTIKKLASLGKGVIYVSHRLSEIFQIADSYTVFRDGCYICEGEMSHITREQLIEHIIGGEIDGEFSKYNTPTNVPLFKASGICWKSKVNDVSLTLHCGEILGIYGLVGSGRSEFLNLLFGLERADHGSIHIGDEILLKHTPEKAINAGIAYVTEDRQETGLVLNHSVSENINISSLNVISRMSIINENDIQRRADHTIRIFNIKTPSRQQRVANLSGGNQQKVVLGRWALLDPKVLLLDEPTKGIDIGAKKEIYRFMSDFALKGKGIVMVSSELSEIIGMSDRILVFKKGKIVGEIMGSEATQAKLMSMAV

SEQ ID NO: 38844 - DNA, 1500 bp, Yersinia pseudotuberculosis IP 32953
  CDS (1)..(1500): transl_table=11
gtggatcagtacgctattgaagtcatacaggtgacgaaaagcttcggggggattcacgcgctgaagtcaattaatctgcaaattcgcaccggtagcattcatgccattatcggcgagaatggtgccgggaaatcgacattaatgaagatcctgtcggggatttacaccaaagacagcgggcgcattatgatccacggagaggagaaaaactttacttcaccgatccacagtaaagaaagccgtattggcattatttatcaggaactggcgttatcgccggatctgacggtagcagagaatatttttctcgacgatcttggttttggcaccggcatgatcaactggaagcgtttgaatgaaaaagccagcctcatcctgaatgaactgggatttcaaatcgatccccgcgccagagtgggggatctgagtgttgcctatcaacagatggtcgaaatcgctaagtcgctggccaaagatgtcaacattctgatccttgatgaaccttcagcagtactgtcaggtaaagaggtcgcgatattgtttacccagctacgcaagttaaaggcacgcggggtgaccatcatttatatttcacatcggctggaagaattgatggttattgctgatgtgatcaccgtcattaaagatggcgagaccgtcaagaccttagatccccagtcctgtagcgaagacgaaattatcaccagcatggtagggcgcaaactggaaagcctctatcccgagaaaaatgtgccaggtaatgaggtggtcttggaggtcaaagccctctcaacccgtgcgctgctgcatgatattaatctgacattgcataaaggcgagatcgtcggtttagcgggcttggtcggggcagggcgtagcgaggtcgcacgttgtctctttggcattgacaagatagcggggggaacggtgtccaaggccggtacgcctattcagattaatcacccgtcacaggcgatgtcccatgggattggtctggtgcctgaaagccgtaaggagcagggggcgattttggtacgcccaatccgcgaaaatatgacgttatcgaatctgaaggcggttagcggctggatgggttttattcgtcgtcgtcaggagcgagagaccagccagaagctacaacaaaaactggccatcaaactggggtcggttgaggatcccatcgccagcttaagtggtggtaatcagcaaaaagtagtcatcgctaaatggttgaacacggattgccatattttgatcttggatgaacctacccgcggtgttgatgtgggagccaaggctgaaatttataacatcattcaccaattggccgaacgcggttattccattttagtgatctcatcggagatggttgaagtgattaatctttgtcatcgcatttatgtgatgagtgaagggcgcattaccaaagagctgcaacacgatgagatttcagaagaaaatatcatgcgctatgccattcccaagcgcgagacaatatga

SEQ ID NO: 38845 - protein, 499 aa, Yersinia pseudotuberculosis IP 32953
MDQYAIEVIQVTKSFGGIHALKSINLQIRTGSIHAIIGENGAGKSTLMKILSGIYTKDSGRIMIHGEEKNFTSPIHSKESRIGIIYQELALSPDLTVAENIFLDDLGFGTGMINWKRLNEKASLILNELGFQIDPRARVGDLSVAYQQMVEIAKSLAKDVNILILDEPSAVLSGKEVAILFTQLRKLKARGVTIIYISHRLEELMVIADVITVIKDGETVKTLDPQSCSEDEIITSMVGRKLESLYPEKNVPGNEVVLEVKALSTRALLHDINLTLHKGEIVGLAGLVGAGRSEVARCLFGIDKIAGGTVSKAGTPIQINHPSQAMSHGIGLVPESRKEQGAILVRPIRENMTLSNLKAVSGWMGFIRRRQERETSQKLQQKLAIKLGSVEDPIASLSGGNQQKVVIAKWLNTDCHILILDEPTRGVDVGAKAEIYNIIHQLAERGYSILVISSEMVEVINLCHRIYVMSEGRITKELQHDEISEENIMRYAIPKRETI

SEQ ID NO: 38846 - DNA, 1524 bp, Yersinia pseudotuberculosis IP 32953
  CDS (1)..(1524): transl_table=11
atgaataaagtccccctcttggagatgcgtaatattaccaagtcgtttggcaaatttcaggcgcttaaaggtgtcgatttgacggtgttttccggcgagatccacgcgctgatgggcgaaaacggggcggggaaaagtaccctaatgaagatcctcgctggcgcatataccaccaccagcggcgagatccttattgagggtaggccttggtccatcaaaggcccaaaagatgcgctgaatgcaggtattagtttgatttaccaagagatgcagctcgcacctaacctgaccgttgcggaaaatattttccttggcagcgagctttcccggggagggctggtgcagcgtaaagagatggtgatgcagacccaggcggttatcgaccgtctcggcgctcagtttaaagccagcgatttagtgatggggcttaccatcgccgaacaacagcaggtcgagattgctcgtgcacttcatcgtaacagccgcattttggtgatggatgaacccacagcggcgctttctactcgtgaaacgcatcgcctatttgaacttattttgcggctgcgcgatgaggggatggccattatctacatcagccatcgtatggcggaagtgtatgaactttctgaccgtgtgagcgtactgcgcgacgggcaatacgtcggcagcctgatgcgcgccaacctcaacgccaacgaactggtgcgcatgatggtggggcgtccgcttagcgatctgttcaataaagaacgggatattccactcggtcatttacgccttaatgttcatcacctgacggatggtgccaaagtgcaggcggtgagtttacaggtccgttccggtgaaatcgttgggttagcggggttggtgggcgcagggcgttcggagctggcgcaactgatttttggtgtccgcaaagccaccggaggaacgatagagatagatggcgtaccgttggtcattcactcccctcgtgaagccattcgccacggtattggttttctgaccgagaaccgcaaagagcaagggctgtttttggaactggccgcgcaggacaacatcactatggcaaccctggagcgggacgcctgttacggcctgctcgatcgcaaaaaagcccgtgctatttcagacgacgccatcaatcggttgaacatacgtgtacctcatgcgcaggtgcgtgccggaggcttgtccgggggtaaccagcaaaagctgctgatttcccgttgggtagcgattagcccacgcattcttatccttgatgagccaacacgtggagtggacgtcggcgctaaaagcgagatttaccgcatcatgagccagatggcgcgcgagggggtggcgattttgatgatttccagtgagttgcccgaagtggtagggatgagcgaccgggtgtacgtgatgcatgaaggacgtattgcaggggaactacatcaccctgatatcacgcaggaaaatattatgacgctggcaactggcgtgaccgaggaccataaaaaagaggtttaccatgactaa

SEQ ID NO: 38847 - protein, 507 aa, Yersinia pseudotuberculosis IP 32953
MNKVPLLEMRNITKSFGKFQALKGVDLTVFSGEIHALMGENGAGKSTLMKILAGAYTTTSGEILIEGRPWSIKGPKDALNAGISLIYQEMQLAPNLTVAENIFLGSELSRGGLVQRKEMVMQTQAVIDRLGAQFKASDLVMGLTIAEQQQVEIARALHRNSRILVMDEPTAALSTRETHRLFELILRLRDEGMAIIYISHRMAEVYELSDRVSVLRDGQYVGSLMRANLNANELVRMMVGRPLSDLFNKERDIPLGHLRLNVHHLTDGAKVQAVSLQVRSGEIVGLAGLVGAGRSELAQLIFGVRKATGGTIEIDGVPLVIHSPREAIRHGIGFLTENRKEQGLFLELAAQDNITMATLERDACYGLLDRKKARAISDDAINRLNIRVPHAQVRAGGLSGGNQQKLLISRWVAISPRILILDEPTRGVDVGAKSEIYRIMSQMAREGVAILMISSELPEVVGMSDRVYVMHEGRIAGELHHPDITQENIMTLATGVTEDHKKEVYHD

SEQ ID NO: 38848 - DNA, 1533 bp, Yersinia pseudotuberculosis IP 32953
  CDS (1)..(1533): transl_table=11
atgccctacctactagaaatgaaagatattaccaagcagttcggcgtcgtcaaagccgtagataatatcagcctaacgctggaagcggggcaggtattatcgttgtgcggtgaaaatgggtctggaaaatccacgctaatgaaagtgctatgtggtatttatcccgtaggttcctatcagggggaaataatattttccggcgaaaccttacaggcaaaaaatatccgcgaaacagaacaaaaaggcattgcgattattcatcaagaattggcactggtgaaacaaatgtcagtgctggagaacatgttcctcggctccgaatggggccgtttcggtatcatggattacgacgccatgtatttacgctgccaacggatgctggcgcaggtcaaactggtggttgacccccatacaccggtcagtgaattgggccttgggcagcaacaattggtcgaaattgcaaaagcattaaataaacaagtgcggctgctggtactggatgaaccaacggcatcactgacagaaagtgaaactgccattttactggatattattcgtgacctgcgtaaccacggtattgcctgcatctatatttctcacaaattgaatgaagtaaaagagatatcagatcatatctgtgtgatccgcgatggtcgtcatatcggcacccgcccggcatcgaccatgagcgaggatgacattatcgccatgatggtagggcgtgagctaaaagaactctatccccacgaagcccatcacattggcgaggagattctacgggttgaaaacctctgtgcctggcatccggtgaatcggcatattcgccgggtcgatgatgtttctttctcattgaaacgcggtgaaattctcgggatcgccggtttggtcggttcagggcggacggaaacggttcagtgcctgtttggggtatatccgggccgctggcagggcgatatctttattaaagggcaagccgcgactattcggacgtgccagcaagcgatgaaattgggtatcgcgatggtgccggaagatcgcaaaaaagacggcatcgtacccgtgatgggagttggcgctaatatcacattggcggcactggatgattttactggcgctttcagtttgctggatgatgcgaaagaacaatcgataattgtacagtctttggcccggttgaaagtgaaaacgtcttcttcagagctggccattgcccgcctgagtgggggcaatcagcaaaaagctattttggctaagtgcctgctattaaacccacaaatattgatcctcgatgaaccgacacgtggtatcgacatcggtgcaaaatacgaaatctacaaacttatcaatcaactggtccaacaggggatcgcggtcattgtgatttcctctgaactgccagaggtcttgggattaagtgatcgggtgctggtcatgcatcaggggcgcatcaaagccgatcttatcaaccataacctgactcaagaaaaggtcatggaagccgcactcaggagtgaaacccatgtcacaagctaa

SEQ ID NO: 38849 - protein, 510 aa, Yersinia pseudotuberculosis IP 32953
MPYLLEMKDITKQFGVVKAVDNISLTLEAGQVLSLCGENGSGKSTLMKVLCGIYPVGSYQGEIIFSGETLQAKNIRETEQKGIAIIHQELALVKQMSVLENMFLGSEWGRFGIMDYDAMYLRCQRMLAQVKLVVDPHTPVSELGLGQQQLVEIAKALNKQVRLLVLDEPTASLTESETAILLDIIRDLRNHGIACIYISHKLNEVKEISDHICVIRDGRHIGTRPASTMSEDDIIAMMVGRELKELYPHEAHHIGEEILRVENLCAWHPVNRHIRRVDDVSFSLKRGEILGIAGLVGSGRTETVQCLFGVYPGRWQGDIFIKGQAATIRTCQQAMKLGIAMVPEDRKKDGIVPVMGVGANITLAALDDFTGAFSLLDDAKEQSIIVQSLARLKVKTSSSELAIARLSGGNQQKAILAKCLLLNPQILILDEPTRGIDIGAKYEIYKLINQLVQQGIAVIVISSELPEVLGLSDRVLVMHQGRIKADLINHNLTQEKVMEAALRSETHVTS

SEQ ID NO: 38850 - DNA, 1503 bp, Symbiobacterium thermophilum IAM 14863
  CDS (1)..(1503): transl_table=11
atgctgctgagactcgaaggcatcaccaaacgattcgggtcgctggtagccaacgaccacatcgacctggagatccggcagggggagatccacgccctgctgggcgagaacggggccggcaagtcgacgctgatgaacatcctctatggcctctacacgcccgacgaggggcggatcttctggaaaggcaaggaagtgcagatccgaaaccccaggcacgccatcgacctggggatcggcatggtgcaccagcacttcatgctcgtcccggtgttcaccgttgctgagaacatcaccctgggcaaggaagtggtgcgcaaccgcttcctggacatgaacgaagcccggcggcaggtggcggagctgtccaggcggttcggcctcgaggtcaaccccgacgaccggatcgagtccatctccgtcggcctgcagcagcgcgtggagatcctgaaggcgctgtaccggggcgcggagctgctgatcctcgacgagcccacggcggtgctcacgccgcaggaggtcgaggagctgggcaagatcatgaagcggctggtcgccgaggggcacacgatcatcatcatcacccacaagctcaaagaggtgcttcacctggcggaccgggtgaccgtcatccgccgcggcaagaagatcgcgacgctggacgccgccggccagaccgaggacgagctggcccggctcatggtcggccgcgacgtcatcctgcgggtggacaagcagccggccaaccccgggaaggtggtgctggaggtgaacgaccttcacgccaagaacgaccggggggtggacgcggtccggggcgtctccttcaccgtgcgggccggggagatcgtgggcatcgccggcgtcgacggcaacggacagtccgagctgatttcctgcatcaccggtctgcgcaagcccaccgcgggcaccatccgggtcaacgggcaggacgtgaccggccagagcccgcgccgcatccgggacgcgggcgtgggccacatccctgaagaccggcagaagcgggggctggtgctgaacttcaccgtggcggagaacgcggcgctcggcgaccacagggccttcgcccggcgggggttcataagccagcagcagatggtccagaaggcgcaggagatcatcagcgggttcgacgtgcgcccgccccgccatgactacctggcccgggcgctctccggcggcaaccagcagaaggtgatcgtcggccgcgagatcctgcgcaaccccgacctgctggtggccgtacagcccacccgcggcctcgacgtcggcgcgatcgagttcatccacaagcacctggtggccgagcgcgacgcaggccgggcagtcctcctggtttcgctggaactggacgagatcatgaacctggcagaccggatcctggtgatgtacaagggccagatcgtagccgaagtgccgggccacgaggcgaccgaagaaggcctcggtctgctgatgatgggaggtagcgccagtgcctga

SEQ ID NO: 38851 - protein, 500 aa, Symbiobacterium thermophilum IAM 14863
MLLRLEGITKRFGSLVANDHIDLEIRQGEIHALLGENGAGKSTLMNILYGLYTPDEGRIFWKGKEVQIRNPRHAIDLGIGMVHQHFMLVPVFTVAENITLGKEVVRNRFLDMNEARRQVAELSRRFGLEVNPDDRIESISVGLQQRVEILKALYRGAELLILDEPTAVLTPQEVEELGKIMKRLVAEGHTIIIITHKLKEVLHLADRVTVIRRGKKIATLDAAGQTEDELARLMVGRDVILRVDKQPANPGKVVLEVNDLHAKNDRGVDAVRGVSFTVRAGEIVGIAGVDGNGQSELISCITGLRKPTAGTIRVNGQDVTGQSPRRIRDAGVGHIPEDRQKRGLVLNFTVAENAALGDHRAFARRGFISQQQMVQKAQEIISGFDVRPPRHDYLARALSGGNQQKVIVGREILRNPDLLVAVQPTRGLDVGAIEFIHKHLVAERDAGRAVLLVSLELDEIMNLADRILVMYKGQIVAEVPGHEATEEGLGLLMMGGSASA

SEQ ID NO: 38852 - DNA, 1536 bp, Symbiobacterium thermophilum IAM 14863
  CDS (1)..(1536): transl_table=11
atggaaccgctcgttcggatggatcacatcaccaagacgtttccgggggtcagggccctcagcgacatcaccttcgacatccgtcccggcgaggtgcacgtgctgctgggggaaaacggcgccggcaagtcgacgctcatgaagatcctgagcggcgcttacgaacccaccagcgggaccatcaccgtcgatggccgcgcgtacccgcggctcaccccggcgctctcggccaagctgggcatcagcatcatctatcaggaactgagcgtgatcaacgagctcagcatcgaggagaacatcttcgtcggccgcctgccggtgcggaaggtgatgggcgtcccggtcgtcgactacgcgttcatgcggcagcggacccaggagctgctggacatcctggacctgcgccggtcgccggagacgctcgtcggggatctgagcatctcggagaagcagatggtggagatcgccaaggctgtggcgttcaacgccagggtcatcatcatggacgagccgacctcgtcgctgaccgacgccgaggtggagaagctctttgcgatcatccgccggctgaagggcgagggaaagggcatcgtctacatctcccacaagctgaaggagatcctcgccatcggcgaccggatcaccgtcctgaaggacgggacctacgtggggacgcgggacgtgcaggacgtcaccatggacggcctggtgacgatgatggtgggccgggagctgaaggacaagtaccaggccaacaccgacgtccaccggaccggaaaggtcatcttcgaggtccggaacctgacccgccgggacgggcgcgtgcaggacgtctccttcgccctccgggagggcgaggtgctgggattcgcagggctggtcggcgccggacggagtgagaccatgtgcgccatctacggcaccgaccccatccgctcgggcgagatctggctgcacggcgaacgaatggagatccgctcgccctacgacgccttgaagaaaggcatcggtctggtcaccgaaaaccgccgcgagacgggcttcttcccgaatttcagcatccggcggaacgtggccatcgcccggcagctgaagctcgcccgctggggcggcctgtgggggctcgtgaacgagcgggacgagcagaagacggccgagaaggcgcgggccgacatgcagatcaagtgcgcctcgctggagcagaacatcaccgagctctcgggcggcaaccagcagaaggtgatcctcggcaagtggctggcggcgggcgtgaaagtcttgatcttcgacgagcccacccggggcattgacgtgggcaccaaggcggagatctacaagctgatgcggtcgctggccgaaagcggcatcggggtcatcgtcgtctcgtcggagctgccggaactcttgtcggtgtgcgaccgcattatcgtcatgagcgagggccggatcagcgcggagttcacggccgcggaagcgaccgaggaaaagattgtgaaggcggccaccgtcggcgccggagcgagtggagggaactga

SEQ ID NO: 38853 - protein, 511 aa, Symbiobacterium thermophilum IAM 14863
MEPLVRMDHITKTFPGVRALSDITFDIRPGEVHVLLGENGAGKSTLMKILSGAYEPTSGTITVDGRAYPRLTPALSAKLGISIIYQELSVINELSIEENIFVGRLPVRKVMGVPVVDYAFMRQRTQELLDILDLRRSPETLVGDLSISEKQMVEIAKAVAFNARVIIMDEPTSSLTDAEVEKLFAIIRRLKGEGKGIVYISHKLKEILAIGDRITVLKDGTYVGTRDVQDVTMDGLVTMMVGRELKDKYQANTDVHRTGKVIFEVRNLTRRDGRVQDVSFALREGEVLGFAGLVGAGRSETMCAIYGTDPIRSGEIWLHGERMEIRSPYDALKKGIGLVTENRRETGFFPNFSIRRNVAIARQLKLARWGGLWGLVNERDEQKTAEKARADMQIKCASLEQNITELSGGNQQKVILGKWLAAGVKVLIFDEPTRGIDVGTKAEIYKLMRSLAESGIGVIVVSSELPELLSVCDRIIVMSEGRISAEFTAAEATEEKIVKAATVGAGASGGN

SEQ ID NO: 38854 - DNA, 1569 bp, Bacillus licheniformis ATCC 14580
  CDS (1)..(1569): transl_table=11
atgtccgattgcattttagagatgagaggcatcacgaaggagtttcccggcgtcaaagcgctcgacaatgtccaccttcgcgttaaagcgggcgaaatccatgccctctgcggggaaaacggggcgggcaagtcgactttgatgaaggtgctgagcggcgtctatccgtacggtgcgtatacgggcgacattttatataaaggggaagtatgccaattcaaaaatattaagcaaagcgaggaagcggggatcgtcatcatccaccaggagctggcgctcgtcccccagctttccattgcggaaaatctttttttgggcaatgaacaggccagccgcggcgtcatcaattggcgaaagacaaagctggaaacgctcgaattaatgaaaaaagtcgggcttcaagaatctccggatacgcttgtttcccaaatcggcgtcggaaagcagcagcttgttgaaatcgccaaagctttggcaaaaaaagtgcagctcttgattttggatgaaccgacggcggctttaaatgaagctgacagcgagaatctgctgcagctcttgctcgaactgaaaaaacagggaatctcttcgattatgatttcccataaattaaatgaagttacgaaagtcgcagattcgattaccgtgctccgggacggacagacgatcgaaacgcttgatgttcaaagcgggcaattgactgaaaaccggatcatcagaggcatggtcggcagggagctgcaaaaccgctaccctgacagaagcgccgagatcggcgacgtcatctttgaagtgaaggattggacagttcaccatcctcttcaacaggaccgcaaagtggtaaacatggcggcgttttccgtgaaaagaggcgagatcgcaggaattgccggactgatgggctccggaaggacggagctggcgatgagcatttttggaagatcatatgggaaaaacatttccggcacaatcgaaaaagacgggcgggagctttacatcaaccaccctgaagatgccattaaaaacggcatcgtctatgtgacggaggacaggaaaggaaacggtttgattctgaaggacagcattaaagaaaacattacgctgtcgaaactggataaggtgtcgagccgattggtgatggacgagcggcgcgaacaacatgaagcggaggattttcgccggaaattaaacatcaagacgcccgatatcagccagcggaccggaaatttaagcggaggcaaccagcagaaggtcatgctgagcaagtggattttcgcggagcctgacgttttaatcctggatgaaccgacgcgcggcatcgatgtcggcgccaaatacgaaatctacggcgtcatcaatcagcttgccgaagcgggtaaagcggttatcatgatctcttcggagcttcccgagctgctggggatgtgcgacagaatctatacgatgtgtgagggggaaatcaccgccgaattttccaaagaagaagccgatcaggagaagctgatgaaatatatgaccatccgcatgaagagagggggagaagcgtatgcagacaccggtgcaaacggataa

SEQ ID NO: 38855 - protein, 522 aa, Bacillus licheniformis ATCC 14580
MSDCILEMRGITKEFPGVKALDNVHLRVKAGEIHALCGENGAGKSTLMKVLSGVYPYGAYTGDILYKGEVCQFKNIKQSEEAGIVIIHQELALVPQLSIAENLFLGNEQASRGVINWRKTKLETLELMKKVGLQESPDTLVSQIGVGKQQLVEIAKALAKKVQLLILDEPTAALNEADSENLLQLLLELKKQGISSIMISHKLNEVTKVADSITVLRDGQTIETLDVQSGQLTENRIIRGMVGRELQNRYPDRSAEIGDVIFEVKDWTVHHPLQQDRKVVNMAAFSVKRGEIAGIAGLMGSGRTELAMSIFGRSYGKNISGTIEKDGRELYINHPEDAIKNGIVYVTEDRKGNGLILKDSIKENITLSKLDKVSSRLVMDERREQHEAEDFRRKLNIKTPDISQRTGNLSGGNQQKVMLSKWIFAEPDVLILDEPTRGIDVGAKYEIYGVINQLAEAGKAVIMISSELPELLGMCDRIYTMCEGEITAEFSKEEADQEKLMKYMTIRMKRGGEAYADTGANG

SEQ ID NO: 38856 - DNA, 1482 bp, Bacillus licheniformis ATCC 14580
  CDS (1)..(1482): transl_table=11
atgcatattaaaatgaaggacatttttaaagcctttggccaaaaccaggtgctgtccggcgtttccttcgagcttcaagaaggtgaagtccacgctttaatgggagaaaacggcgccggaaagtcgacactcatgaatctgttgactggacttcacaagctggacagcggaacgatcgagatcgacggaaaagaaacgtatttttcagatccaaaggaagccgaacagaacggaatcgcctttatccatcaggagctgaacatttggcctgaaatgaccgttttggaaaatctgtttatcggcagagagctttcttccaaacttggatttttaaacaacaagaaaatgaaagcgctagcaaaagagcagcttgaaaggctcggtgtctcaatttctcttgaaaaagaagccggagactgttccgtcggccagcagcaaatgatcgaaatcgcaaaagcccttatgacagacgcgaaagtgatcatcatggatgaaccgacggcagcgttgacagaaagagaaattgaaaaactgttcggcgtcattagagcattaaagaaaaacggcgtctccatcgtctatatatcccaccgcatggaagaaatcttcacgatttgcgacaggatcacggtgatgcgcgatggaaaaacggtggacacgaaacggattcccgacaccgactttcatgaagtggtgaaaaagatggtcggacgggagctgaccgaacgctatcctgaaagacagccaaatccgggacgcgtcgtcctcgaagtcaagcaggcatccaaaaaaggagtcttccaaaatatcagcttttccgtccgctccggcgaaatcgtcgggatttcaggactgatgggtgccgggcgcaccgagctgatgagagcggttttcgggctcgatccgcttgactcgggagacattttcatcgaaggcaaaaaagcggcgctcaaaaaaccgagcgatgccgttcaaaagggaatcggctttattaccgagaaccgcaaggatgaaggacttgtgctcgacacgtccatcagagaaaatatcgcccttccgaatctcgccagcttttcgccgaaaggatggattgacaaaaaaagcgagcaggaatttgtcgatcttctgatcaagcggctgacgatcaaaacggaatcgccggaaacccacgcgcgaaacctttcaggaggaaaccagcaaaaagtggtcattgccaaatggatcggcatcggccctaaagtgctgattttggatgagccgaccagaggcgtcgatgtcggcgcgaaaagggagatttatcagctgatgaacgagctgacagaccgcggcgtcgcgatcgtcatggtctcttcagagctccccgagattctcgggatgagcgaccgcgtccttgtaatccatgaaggaacgctaagcggagagctatcaagaaatgatgccacgcaagaacgaattatgacactcgctacaggaggacggtaa

SEQ ID NO: 38857 - protein, 493 aa, Bacillus licheniformis ATCC 14580
MHIKMKDIFKAFGQNQVLSGVSFELQEGEVHALMGENGAGKSTLMNLLTGLHKLDSGTIEIDGKETYFSDPKEAEQNGIAFIHQELNIWPEMTVLENLFIGRELSSKLGFLNNKKMKALAKEQLERLGVSISLEKEAGDCSVGQQQMIEIAKALMTDAKVIIMDEPTAALTEREIEKLFGVIRALKKNGVSIVYISHRMEEIFTICDRITVMRDGKTVDTKRIPDTDFHEVVKKMVGRELTERYPERQPNPGRVVLEVKQASKKGVFQNISFSVRSGEIVGISGLMGAGRTELMRAVFGLDPLDSGDIFIEGKKAALKKPSDAVQKGIGFITENRKDEGLVLDTSIRENIALPNLASFSPKGWIDKKSEQEFVDLLIKRLTIKTESPETHARNLSGGNQQKVVIAKWIGIGPKVLILDEPTRGVDVGAKREIYQLMNELTDRGVAIVMVSSELPEILGMSDRVLVIHEGTLSGELSRNDATQERIMTLATGGR

SEQ ID NO: 38858 - DNA, 1485 bp, Bacillus cereus E33L
  CDS (1)..(1485): transl_table=11
atgcgtattgaaatgaaaaatatttcaaaggcgttcaatggcaatcctgttttgaaaaatgcacagtttatgattgaaacaggagaagtccatgcattgatgggggaaaatggagcgggtaaatcaacgctcatgaagattttaacaggtgtatacaaaagagatggtggaacgatcacgattgatggacaagaacgaacttttaaaaatgcgaaagaagctgaagagtacggtattgcatttatacatcaagaattgaacatattaccgaatttaacagtagctgaaaatatgtttctcggtaaagagttaatgtatggaaagacaggtattttacgtacgcgtcaaatgaacgcgattgcgcagcagcaactagcggagttaggattacatgtaaaaggcgctatgttggcaggagagttatcggttggacaacagcaaattatcgaaattgcaaaagccctaatgacaaacgcgagcgttattattatggatgaacctacagctgcattaacagatcgtgaaattgaaacgttgtttaccgtcattaataaattacgtaaagaaggcgtttcgttcgtttatatctcacaccgaatggaagaaatcttttcaatatgcgatgccattacgattttacgtgatggggaatacgtcggaaagagatccattccagaaacatcgtttgatgaggtagtgagtatgatggtggggcgcagcattggtgaacgttacccagaacgaaatagtcaaattagcgatgttatttttgaaatgcgtaatggaacgaaaaaagggaagtttgaaaatgtttcgtttcaagtgagaaaaggtgaaatccttggtgtagctggcttgatgggagctggccgcacagatattatgaaatcgatatttggatacgaacctttagattctggccaaatttttataaatgggcaagaagtaaagattgatagtccgatagatgcgattagacaaagaatagcattcattacagaggatagaaaatctgaagggttagtgctagatttctcaattcgagaaaatttagctttaccgaatttagaaagtctttcaaagggaagcgtcttaagtaacgaactagaacaacagtttacagcggacatgatgaaacttcttaatgtgaaagcatctagtggagagcaagctgtgaaatctctttctggtggaaatcagcaaaaggttgttattgccaaatggttaggtatccacccacagttactcattttagatgagccaacaaggggtgttgatgttggagcgaaaaaagaaatttactctattatgaataagcttaccgaagaaggagatgccgttattatggtatcatctgagcttccagaagttttaggaatgagtgatcgcgttcttgttattcatgaaggaaaagtcggcggcattttagagaaagatgaggcatcacaagagtctattatggcactagctacagggggagagtaa

SEQ ID NO: 38859 - protein, 494 aa, Bacillus cereus E33L
MRIEMKNISKAFNGNPVLKNAQFMIETGEVHALMGENGAGKSTLMKILTGVYKRDGGTITIDGQERTFKNAKEAEEYGIAFIHQELNILPNLTVAENMFLGKELMYGKTGILRTRQMNAIAQQQLAELGLHVKGAMLAGELSVGQQQIIEIAKALMTNASVIIMDEPTAALTDREIETLFTVINKLRKEGVSFVYISHRMEEIFSICDAITILRDGEYVGKRSIPETSFDEVVSMMVGRSIGERYPERNSQISDVIFEMRNGTKKGKFENVSFQVRKGEILGVAGLMGAGRTDIMKSIFGYEPLDSGQIFINGQEVKIDSPIDAIRQRIAFITEDRKSEGLVLDFSIRENLALPNLESLSKGSVLSNELEQQFTADMMKLLNVKASSGEQAVKSLSGGNQQKVVIAKWLGIHPQLLILDEPTRGVDVGAKKEIYSIMNKLTEEGDAVIMVSSELPEVLGMSDRVLVIHEGKVGGILEKDEASQESIMALATGGE

SEQ ID NO: 38860 - DNA, 1509 bp, Mannheimia succiniciproducens MBEL55E
  CDS (1)..(1509): transl_table=11
atgcaagttccatatttagaatttgataatgtgagcaaaagctttcccggcgttaaagcattgcaaaatatttcctttaaatgctatgagggcaaagttcatgcgttaatgggtgagaatggtgcgggcaagtccaccttgttaaaaattttaagcggcaactatctgcctagcgagggcaaattaagtatcggcggtcgccaactggttttccgtaatactaaagaagccttattagccggtgtcgccattatttaccaggaattaaatattgtgccggaaatgaccgttgcggagaatttatgcttaggtcagttaccccattctttcggcattgtagataaagcggaattaattgagagaacacaacaatacctggataaactggatctcaatatttcgcctaatacccctttaaaagaattatctatcggtcaatggcaaatgatcgagattgccaaagccttaagccggggcgcaaaaatcattgcatttgacgaacccaccagcagcctttccgctcctgaaattgagaaattattcagcgtaattaacgagttacgggatgaaggcaaggtgattttatatgtatctcaccgaatggaagaaattttccgtatcagtgatgaaattaccgtgctgaaagacgggcaatttgtggagactttctccgatctttcaaaaatcaccaatgacgatttagtacgcagcatggtcggacgcaatttgggtgatatttaccattatcgtccccgtgaagtgggtgatgtccgtttgaaaattgcacatttatccggtgaaaaactgcaaggtgattttagtttaacggttcgggccggtgaggttttaggcttattcggcctggtcggcgcagggcgttcggaattattaaaagtgattttcggtgcggatccttgtgtgtcgggaagcattgaattagacggtaaaaccttgtctatccgcagccctaaagacgctattgaacaaggtatcgtcctttgtccggaagaccgtaaaaaagaaggcattgtccccactgccagcgtaggggaaaatattaatatcagcgcccgcagattacataatttttttaaatttattattaatgataaatgggaaaagaaaaacgctgaaaaacaacgccaacaaatgaatgtgaaaaccccgtctatcgagcaattaattgtcaatctttccggtggtaatcaacaaaaagcgattttaggccgttggctttccgaagatattaaagtgttattgctggacgaaccgacccggggtatcgacgtgggggcgaagtccgaaatttacgatttaatttttaagctggccgaccaaaaattagccattattgtggtttccagtgatttacccgaagttatcggcgtatccgatagaattatggtaatgcgcgcccatcaaattaccggtgtggtagaacgcgcggatgcaacggaagaaaaagtattaaaacttgctatggtagaaagccttaatgtaggagattga

SEQ ID NO: 38861 - protein, 502 aa, Mannheimia succiniciproducens MBEL55E
MQVPYLEFDNVSKSFPGVKALQNISFKCYEGKVHALMGENGAGKSTLLKILSGNYLPSEGKLSIGGRQLVFRNTKEALLAGVAIIYQELNIVPEMTVAENLCLGQLPHSFGIVDKAELIERTQQYLDKLDLNISPNTPLKELSIGQWQMIEIAKALSRGAKIIAFDEPTSSLSAPEIEKLFSVINELRDEGKVILYVSHRMEEIFRISDEITVLKDGQFVETFSDLSKITNDDLVRSMVGRNLGDIYHYRPREVGDVRLKIAHLSGEKLQGDFSLTVRAGEVLGLFGLVGAGRSELLKVIFGADPCVSGSIELDGKTLSIRSPKDAIEQGIVLCPEDRKKEGIVPTASVGENINISARRLHNFFKFIINDKWEKKNAEKQRQQMNVKTPSIEQLIVNLSGGNQQKAILGRWLSEDIKVLLLDEPTRGIDVGAKSEIYDLIFKLADQKLAIIVVSSDLPEVIGVSDRIMVMRAHQITGVVERADATEEKVLKLAMVESLNVGD

SEQ ID NO: 38862 - DNA, 1530 bp, Mannheimia succiniciproducens MBEL55E
  CDS (1)..(1530): transl_table=11
atggctaccgaacgtttaagtatgcgcaatatgacaaagaaatatgggacggtgacggtattagaagatgtttcttttaatgttaaagccggagaggttcatgctcttatcggtgagaacggagcgggaaaatccacattattgaatttgttatcgggagtaagagacgctacggcgggagaaatttatattgacggacaaaaagtaaatataaattctccgaaagcggctaaagattgcggtatcgcaatgatacaccaagagctacaaaatgtgcctgaactctccgtttttcaaaatatatttttggggcgttctttaaaaaagaatttgggtttatttgtggataaatctaaagaaagtcaattagccttggaagtcttaaagagtttagatcctggtattgatccgtcggttcccattaagacgcttaaagttgcacagcaacagattgttgagatagcgcgagctttactggataacgccaagattatcgcaatggacgaaccgacatcaagtttaacgccgagtgagttcgaacgtttggccgagttgattaaaggactggcgaatagcggcgtttcaattatttacgtatcgcacaagatggatgaaatattcaaggtgtgtgatcgtgcgacaattctccgtgacggacgttttatcgactgtgtaaatatgtccgagcaaacggaagaaagtatcgtaaccaaaatggtcggccgtaaaatcgaaaaattgactcatatgagttatgccaccgatgaaaaaattttagaagtacgcaatttgggccgggataaagcggtaaaagatattaattttattgctcataaaggagaggttgtcggtatttcgggtttagtcggcgccggtcgtacggaattattcagattgatagcgggtttagataaaccgacatcgggagagattcttgttgaaggtaaaagattaaaattaaacagtgtgcgcgattcaatcaaaatgggaataggtctggtgccggaagaccggaaaaaagaaggtattttacgtgatcgcagcgtattgattaatattgccatgccttcaatggatcgattttctcaaaacgggtttattcgtaaggattatctgggcgctgtttctcatcggttaatgatggatctaaatttaaaaccctttgatttagaaaaaacggtagggacttttagcggaggaaatcaacaaaaagtcattatcggccgttggcttgcggcggggaccaaaatttatctctttgatgaacctacgcgaggtatagatattgggactaaatctgaaatctacaatttaattgagaatttagcaaaagcaggaaatgttattttagtcgtttcatcagaaatgccggaaattattcgagtatctgaccgcgtattagttatgaaggaaggcgctatcacagccgaattatgtggtggtgatatcaatgaagaaaatattgcccaatatgcgattggacaaaataaaattaagaatgaagagggattaaattatgtcagcaattaa

SEQ ID NO: 38863 - protein, 509 aa, Mannheimia succiniciproducens MBEL55E
MATERLSMRNMTKKYGTVTVLEDVSFNVKAGEVHALIGENGAGKSTLLNLLSGVRDATAGEIYIDGQKVNINSPKAAKDCGIAMIHQELQNVPELSVFQNIFLGRSLKKNLGLFVDKSKESQLALEVLKSLDPGIDPSVPIKTLKVAQQQIVEIARALLDNAKIIAMDEPTSSLTPSEFERLAELIKGLANSGVSIIYVSHKMDEIFKVCDRATILRDGRFIDCVNMSEQTEESIVTKMVGRKIEKLTHMSYATDEKILEVRNLGRDKAVKDINFIAHKGEVVGISGLVGAGRTELFRLIAGLDKPTSGEILVEGKRLKLNSVRDSIKMGIGLVPEDRKKEGILRDRSVLINIAMPSMDRFSQNGFIRKDYLGAVSHRLMMDLNLKPFDLEKTVGTFSGGNQQKVIIGRWLAAGTKIYLFDEPTRGIDIGTKSEIYNLIENLAKAGNVILVVSSEMPEIIRVSDRVLVMKEGAITAELCGGDINEENIAQYAIGQNKIKNEEGLNYVSN

SEQ ID NO: 38864 - DNA, 1521 bp, Mannheimia succiniciproducens MBEL55E
  CDS (1)..(1521): transl_table=11
atgacagcacaatcagcgcaaagtgataatcaagtgctactcaccatgacaaacgtgagtaaatctttccctggtgtaaaagcgctagataaagcaaatttaactgtcaaatcccattccgttcacgcccttatgggagaaaacggtgcgggtaaatctactttattaaaatgcctgtttggtatttatgccaaagatgaaggggaaattctttttcttggtaaaccggtaaatttcaaaacgtcgaaagaagcgctggaaaatgggatttccatggtgcaccaagaactcaatctcgtccgtcagcgtaatgtaatggataatctttggttgggccgctatccgttaaaaggcgtgtttgtggatcatacaaaaatgtataacgataccaaagccatttttgacgagctcgatatcgacattgatccgagagaaaaagttgccaatttatccgtttcgcaaatgcaaatgatagaaattgccaaagctttctcttataacgcaaagatcgtaatcatggatgaacctacttcttctctttccgaaaaagaagtggagcatttatttaaaatcatcgaaaaattaaaagatcgcggttgcggaatcgtttatatttcccacaaaatggatgaaatctttaaaatttgcgatgaaattaccattttgcgcgacggtaaatggattaatacggtgccggtaaaaggctccactatggaacaaattgtcgccatgatggtaggccgtgaattaacgcaacgcttcccgccaaaaatcaacgagccgaaagaagtgattcttgaggtggaacatttaaccgcattaaaccaaccttccattcaggatattaattttgaattacgcaaaggtgaaattctggggatcgccggtcttgtgggggcaaaacggaccgatatcgtcgaaaccattttcggtgtgcgcgagcgtaaatccggtacggtaaaacttcatggcaaaattatgaaaaatcgtaccgcacttgaagccatcaacaacggctttgctctggtaaccgaagaacgccgttccaccgggatttacgcaaacctgagtattgaatttaactcattgatttcaaatatgaaatcctatatgaacaaatggggcttattgagtgacaagaaaatgaaaagcgatactcaatgggtaatcgattcaatgaacgtgaaaaccccgtcccataaaactaccatcggctcgctttccggcggtaaccaacaaaaagtggttatcggccgctggttgctcacacaacctgaaattctgatgctggacgaaccgacccgtgggattgacgtgggcgcgaaatacgaaatttatcaacttattatgcaacttgcccaaaaagacaaaggtatcattatgatctcttcggaaatgcccgaattattagggattaccgaccggattttagtaatgagcaacggtaaagttgccggtattgttgaaacagcaaaaacttcgcaagaagaaattttgcaactagctgctaaatatttatag

SEQ ID NO: 38865 - protein, 506 aa, Mannheimia succiniciproducens MBEL55E
MTAQSAQSDNQVLLTMTNVSKSFPGVKALDKANLTVKSHSVHALMGENGAGKSTLLKCLFGIYAKDEGEILFLGKPVNFKTSKEALENGISMVHQELNLVRQRNVMDNLWLGRYPLKGVFVDHTKMYNDTKAIFDELDIDIDPREKVANLSVSQMQMIEIAKAFSYNAKIVIMDEPTSSLSEKEVEHLFKIIEKLKDRGCGIVYISHKMDEIFKICDEITILRDGKWINTVPVKGSTMEQIVAMMVGRELTQRFPPKINEPKEVILEVEHLTALNQPSIQDINFELRKGEILGIAGLVGAKRTDIVETIFGVRERKSGTVKLHGKIMKNRTALEAINNGFALVTEERRSTGIYANLSIEFNSLISNMKSYMNKWGLLSDKKMKSDTQWVIDSMNVKTPSHKTTIGSLSGGNQQKVVIGRWLLTQPEILMLDEPTRGIDVGAKYEIYQLIMQLAQKDKGIIMISSEMPELLGITDRILVMSNGKVAGIVETAKTSQEEILQLAAKYL

SEQ ID NO: 38866 - DNA, 1494 bp, Mannheimia succiniciproducens MBEL55E
  CDS (1)..(1494): transl_table=11
gtgaaaatgactgataccaatattctgacgctgaaaaatatttcaaaaagttttttcgacgtaacggttttggaagatatcaatctggatatcagatgcggcgaggtgctttgtctgattggggaaaacggcgcaggaaaatccaccctgtgtaagattatcgcagggatctacagccgtgatacgggcgaaatgctttatcaggggcaaccctattcccccactacggtaaaagaagcgcaggaagcgggcatcggctttatccatcaggaattaatgctggtaccgaaactcacggtgatggaaaatatttttctcggtgcggaaaaaaccttatccttcggtcgtatgaactggtcggaaatgcgtgaaaaaacccagcatattatcgacgaactggaactggatattaaacccgacgatttaatcgccgatctttccattgcccagcaacaaatggtagaaatcgccaaagctgttttcagcgaatataaaatcattattttcgacgaaccgacatcctctatttcccgcaaaaacacggaagtgttgttcaaaatcattcatcagctgaaaaccaaaaacgtggcgatgatttatatttcccaccgtctggaagaattcaaatatattgccgatcgcgttaccgtactgcgggacggacgtattaccggtaccatgcgttacgaagaaacttcaccggaagacattgtacgtttaatggtgggacgcaaagtggatttcagccgttatcgccgcgataccgtatttacccaagaaaaactacgggtggaaaacattcaaagcaagcatatcagcccgatttcctttcaggtaaacaaaggtgaaatcttaggctttgccggtctggtaggtgccggccggaccgaagttttacgcgccgtttacggggcggacgaagcaaccggcaagatttatatcgatcaaaaagaaatcagcattcattcaccggaagatgcggttaaacacaaaatcggctttattaccgaagaccgtaaatcccaagggttagtgcttggtatgagtatccgtgaaaatatcaccttaccgatcttgaaacgcttctggaacggttggcagttggataaaaagaaagagcgagaagtggtggaagccaaccgcagcaagttgcatatcgtatccaaggatcaggaacagcagactaaaaccctgtcgggcggtaatcaacaaaaagtgattttagcccgttggctggaaagcggcgtggatattctgttttttgacgaaccgacgcgcggtatcgatatcggcgccaagtcggaaatctatgacttaatgcggcagtttaccgaaaacggcggaaccattgtgatggtatcgtctgatttgccggaactcatcaccatttccgatcgcgtcatcgtgatgcgtaacggcgaaaaagtaaaagaaatcgccaatcgcgacgacattacggaagaaaatttaatgcatgccatgatcggtatttaa

SEQ ID NO: 38867 - protein, 497 aa, Mannheimia succiniciproducens MBEL55E
MKMTDTNILTLKNISKSFFDVTVLEDINLDIRCGEVLCLIGENGAGKSTLCKIIAGIYSRDTGEMLYQGQPYSPTTVKEAQEAGIGFIHQELMLVPKLTVMENIFLGAEKTLSFGRMNWSEMREKTQHIIDELELDIKPDDLIADLSIAQQQMVEIAKAVFSEYKIIIFDEPTSSISRKNTEVLFKIIHQLKTKNVAMIYISHRLEEFKYIADRVTVLRDGRITGTMRYEETSPEDIVRLMVGRKVDFSRYRRDTVFTQEKLRVENIQSKHISPISFQVNKGEILGFAGLVGAGRTEVLRAVYGADEATGKIYIDQKEISIHSPEDAVKHKIGFITEDRKSQGLVLGMSIRENITLPILKRFWNGWQLDKKKEREVVEANRSKLHIVSKDQEQQTKTLSGGNQQKVILARWLESGVDILFFDEPTRGIDIGAKSEIYDLMRQFTENGGTIVMVSSDLPELITISDRVIVMRNGEKVKEIANRDDITEENLMHAMIGI

SEQ ID NO: 38868 - DNA, 1521 bp, Burkholderia mallei ATCC 23344
  CDS (1)..(1521): transl_table=11
atggacacgatactggcgctcaccggcatcacgaagcggtttcccggcgtcgtcgcgctgcgcggaatcgatctgcgcgtcgcgcgcggcgagattcacgcgctgctcggcgagaacggcgcgggcaagtcgacgctgatgaagatcctctgcgggatccacccgccggacgagggcgtgatcgcgctcgacggcgagccgcggcgcttcgcgaaccatcacgacgcgatcgcggcgggcgtcggcatcgtgtttcaggagttcagcctgattccggagctgaacgcggtcgacaatctgttcctcggccgcgagtggcgcggccggctcgggctgcgcgagcgcgcgcggatgcgccgcgcggcggcggacatcttcgcgcggctcgacgtcgcgatcgatctgtcggcgccggtgcgcgagctgtcggtcgcgcagcagcagttcgtcgagatcggcaaggcgctgtcgctcgacgcgcggctgctgatcctcgacgagccgaccgcgacgctcacgcccgccgaagccgcgcacctgttcggcgtgatgcgcgagctcaagcgccggggcgtcgcgatgatcttcatctcgcaccacctcgacgagatcttcgaggtgtgcgatcggatcaccgtgctgcgcgacgggcaatacgtcggcacgaccgaggtcgcgcgcaccgatgtcggcgcgctcgtcgagatgatggtgggccggcgcatcgagcagagctttccgccgaagccgcgtcttgcgcgcgacgccgcgcccgtgctcgaggtggacgcgctgcaggtgcgcgagaacggccccgtgaaccgcttcgcgctgcgcgagggcgagattctcggcttcgcgggcctcgtcggctccgggcgcacgtcgagcgcgctcgcgctgatcggcgcgaagcccgcgcgcgtgcggcgaatgcgcgtgcgcggccgcccggtgcgcctcgccgatcccgccgccgcgctcgccgcgggcatcggcctcctgccggagagccgcaagacgcaggggctcatccccgcgttctcgatccggcacaacatcgcgatcaacaacctcggcaagcaccgccggctgcgctggttcgtcgacgcggcggccgagacgcgcacgacgctcgagctgatgcagcggctcggcgtgaaggcgccgacgccgcacacgcgcgtcgacacgctctcgggcggcaatcagcagaaggtcgtgatcgcgcgctggctcaaccatcacacgcggatcctgatcttcgacgagccgacgcgcggcatcgacatcggcgcgaaggcggaaatctatcaactgatgcgcgagctgagcgcgcgcggctattcgatcgtgctgatctcgagcgagttgccggagatcgtcggcctgtgcgatcgcgtcgcggtgttccggcagggccgtatcgaggcgatgctcgaaggcgaggcgatcgagccgaacacggtgatgacctatgcgacttccgacgtacgcggagcgaatcatgaacatgcatga

SEQ ID NO: 38869 - protein, 506 aa, Burkholderia mallei ATCC 23344
MDTILALTGITKRFPGVVALRGIDLRVARGEIHALLGENGAGKSTLMKILCGIHPPDEGVIALDGEPRRFANHHDAIAAGVGIVFQEFSLIPELNAVDNLFLGREWRGRLGLRERARMRRAAADIFARLDVAIDLSAPVRELSVAQQQFVEIGKALSLDARLLILDEPTATLTPAEAAHLFGVMRELKRRGVAMIFISHHLDEIFEVCDRITVLRDGQYVGTTEVARTDVGALVEMMVGRRIEQSFPPKPRLARDAAPVLEVDALQVRENGPVNRFALREGEILGFAGLVGSGRTSSALALIGAKPARVRRMRVRGRPVRLADPAAALAAGIGLLPESRKTQGLIPAFSIRHNIAINNLGKHRRLRWFVDAAAETRTTLELMQRLGVKAPTPHTRVDTLSGGNQQKVVIARWLNHHTRILIFDEPTRGIDIGAKAEIYQLMRELSARGYSIVLISSELPEIVGLCDRVAVFRQGRIEAMLEGEAIEPNTVMTYATSDVRGANHEHA

SEQ ID NO: 38870 - DNA, 1512 bp, Burkholderia mallei ATCC 23344
  CDS (1)..(1512): transl_table=11
gtggctgcggcactgcgttttgacaatatcggcaaggtctttcccggcgtgcgtgcgctcgacggcatttcgttcgacgtgcaggcgggacaggtgcacgggctgatgggcgagaacggggcgggcaagtcgacgctgctcaagattctcggcggcgaatatcagctcgattcgggcagcgtgctcgtcgacgggcgggcgatgcgctttccgagcgcggccgcgtcgatcgcggcgggcgtcgcggtgatccatcaggagctgcaatacgtgcccgatctgacggtggccgagaacctgctgctcggccggctgccgagcgcgctcggctgggtccgcaagcgcgacgcgcagcgcttcgtgcgcgagcggctcgccgcgatgggcgtcgatctcgatgcgcaggcgaagctgcggcggctgtcgatcgcgcagcggcagatggtcgagatctgcaaggcgctgctgcgcaacgcgcgggtgatcgcgctcgacgagccgacgagctcgctgtcgcatcgcgagaccgaggtgctcttcaagctcgtcgacgatctgcgccgcgacggccgcgcgctcatctacatctcgcaccggatggacgagatctaccggctctgcgacgcgtgcacgatctttcgcgacggccgacaggtggcgtcgcacgcgtcgctcgccaacgtgccgcgcgagacgctcgtgcggcagatggtcggccgcgagatcagcgacatctatcactacgcgccgcgcgcgctcggcgacgtgcgcctgtcggcgcgcgcgctcgagggcgatgcgctgcgcgcgggggcgagcttcgacgtgcgcgcgggcgagatcgtcggctttttcgggctcgtcggcgcggggcgcagcgaactgatgcgcgtgatctacggcgcgcagcgcaggacgggcggcgcgctcatgctggacggcgagccgctcgacatccgctcgacgcgcgacgcgatccgccgcgggatcgtgctgtgccccgaggatcgcaaggaagagggaatcgtcgcgcatgcgtcggtcgccgagaacatcaacatcagttgccgccgccacgggctgcgcgcggggctttttctcgaccgcaagcgcgaggccgagacggccgatcgcttcatcaagctgctgaagatcaagacgcccaaccgccggcagaagatccgcttcctgtcgggcggcaatcagcagaaggcgattctcgcgcgctggctcgccgagccggatctgaaggtcgtgatcctcgacgagccgacgcgcggcatcgatgtcggcgcgaagcacgagatctacggcgtgatctacgagctcgcgaagcgcggctgcgcgatcgtgatggtgtcgtccgagctgccggaagtgctcggcgtatcggatcgcatcgtcgtgatgcgcgaagggcggatcgcgggcgagctcgcgcgcggcgaagcgaacgaagaggcggtgctcaatctcgcgctgccgcagggcgcgaccgcgcacgccgcgtga

SEQ ID NO: 38871 - protein, 503 aa, Burkholderia mallei ATCC 23344
MAAALRFDNIGKVFPGVRALDGISFDVQAGQVHGLMGENGAGKSTLLKILGGEYQLDSGSVLVDGRAMRFPSAAASIAAGVAVIHQELQYVPDLTVAENLLLGRLPSALGWVRKRDAQRFVRERLAAMGVDLDAQAKLRRLSIAQRQMVEICKALLRNARVIALDEPTSSLSHRETEVLFKLVDDLRRDGRALIYISHRMDEIYRLCDACTIFRDGRQVASHASLANVPRETLVRQMVGREISDIYHYAPRALGDVRLSARALEGDALRAGASFDVRAGEIVGFFGLVGAGRSELMRVIYGAQRRTGGALMLDGEPLDIRSTRDAIRRGIVLCPEDRKEEGIVAHASVAENINISCRRHGLRAGLFLDRKREAETADRFIKLLKIKTPNRRQKIRFLSGGNQQKAILARWLAEPDLKVVILDEPTRGIDVGAKHEIYGVIYELAKRGCAIVMVSSELPEVLGVSDRIVVMREGRIAGELARGEANEEAVLNLALPQGATAHAA

SEQ ID NO: 38872 - DNA, 1482 bp, Burkholderia mallei ATCC 23344
  CDS (1)..(1482): transl_table=11
gtgactcctgttctgctcgaagcaagccaggtggcgaagcgattcaacggcgtgagcgcgttgcgcgacggacgcctgagccttgcggccggccgcgtgcatgcgctgtgcggcggcaacggcaccggaaaatccacgttcctgaacatcctgatggggctcttgcgccgcgacgagggcacgatccggctgaacggccgcgatgtcgatttcgcgtcgcccgccgaagcgctcgcgagccgcatggcgatcatcacgcaggagctctcgccggtgccggggatgacggtcgccgagaacctgtatcttggtcgcgagcccacccgcgcgggcgtcgtcgtcgatttccgcgcgctgaagcgccgcgcgcaggcgctgctcgaccggctcggcttcgcgatcgacgcgggcgcgccgatgcatcggctgagcctcgcgcagacgcagctcgtcgagatcgcgaaagcgttcagccacgattgccaggtgatgatcatggacgagccgacttccgcgatcggcgagcgcgagaccgagacgctgttcgccgcggtccgcaacgtcaccgcgcacggcgcgggcatcatctacgtgtcgcaccggctgagcgagctgttcgacatcgccgacgactacacggtgtttcgcgacggcgcgtacgtcgagagcggccgcctcgccgatatcgaccgcgcgcatctcgtgcgcgcgatcgtcggccgcgagatgcccgtcgtcgacaaggcgcgccggcccgcgcacggcgagctgtgcctgaaggtggagggcctcacgcgcgcgaacgagttcgaggacgtgagcctcgacgtgcggcgcggcgagattctcggcatctatgggctgatgggctcgggccgcagcgaattcctcaattgcgtgtatggcttgacgcgccccgacgcgggcgccgccaccctcggcggcaagccgctgccgcgcggcgagcccgcgcggtcgatccgcgcgggcatcgcgctcgtcaccgaggaccgcaaggattcgggcctcgtgctctgcggcagcgtgcaggagaacatcgcgatggccgcgtaccgtcgcctgtcgcgcggcggcgtgatccggcgctcgctcgtgcggcggctcgcgcaggcgatggtcgagcggctgcggatcaaggccgcttcgctgcgcatgccggtatcggcgatgagcggcggcaaccagcagaaggtcgtgctcgcgaaatgcctgtcgaccgagcccgtgctgctgctgtgcgacgagccgacgcgcggcatcgacgaaggcgcgaaacaggagatctaccggctgctcgatgcgttcgcgcgcgacggcggcgcggtgatcgtcgtgtcgtcggaggcgcccgagctgctgtatctgagcgaccggatcgccgtgttcaagggcggccgcgtcgccgccgtccgcccgggcgacggcgccacccaggaatccctgctccatctcgcttcatga

SEQ ID NO: 38873 - protein, 493 aa, Burkholderia mallei ATCC 23344
MTPVLLEASQVAKRFNGVSALRDGRLSLAAGRVHALCGGNGTGKSTFLNILMGLLRRDEGTIRLNGRDVDFASPAEALASRMAIITQELSPVPGMTVAENLYLGREPTRAGVVVDFRALKRRAQALLDRLGFAIDAGAPMHRLSLAQTQLVEIAKAFSHDCQVMIMDEPTSAIGERETETLFAAVRNVTAHGAGIIYVSHRLSELFDIADDYTVFRDGAYVESGRLADIDRAHLVRAIVGREMPVVDKARRPAHGELCLKVEGLTRANEFEDVSLDVRRGEILGIYGLMGSGRSEFLNCVYGLTRPDAGAATLGGKPLPRGEPARSIRAGIALVTEDRKDSGLVLCGSVQENIAMAAYRRLSRGGVIRRSLVRRLAQAMVERLRIKAASLRMPVSAMSGGNQQKVVLAKCLSTEPVLLLCDEPTRGIDEGAKQEIYRLLDAFARDGGAVIVVSSEAPELLYLSDRIAVFKGGRVAAVRPGDGATQESLLHLAS

SEQ ID NO: 38874 - DNA, 1572 bp, Burkholderia pseudomallei K96243
  CDS (1)..(1572): transl_table=11
atggattcgaccgacccagattcgacgcccgacacgccgacgctcgtcgtgaccggcatcggcaagacctatgccgagcccgtgctcgacgacgtgtcgctcgcgctgtatccgggcgaggcgctcgcgctgacgggcgagaacggcgcgggcaagagcacgctgtcgaagatcgtcgccgggctcgtcgcgccgacgacgggcgcgatgcggctcgcgggcgccgagtatgcgccgcacagccgcgcgcacgcggaggcgctcggcgtgcggatggtgatgcaggagctcaatctcgtgccgacgctcaccgtcgccgagaatctctttctcgaccgcctgccgcaccgcttcggcgtgatcgaccgcaggcggcttgccgccgacgcgcgcgcggcgatggcgcgcgtggggctcgattcgctcgatcccgatacgctcgtcggctcgctcgggatcggccaccagcagatggtcgagatcgcgagaagcctcgcgggcgactgccgcgtgctgatcctcgacgagccgaccgcgatgctgaccgcgcgcgaagtcgagctgctgttcgatcagatcgcgcggctgaaggccgacggcgtcgcgctcgtctacatctcgcaccggctcgaggagctcgcgcgcgtcgcgcagcgggtggcggtgctgcgcgacggccggctcgtgcacgtcgaccggatcgacgcgcagccgaccgagcggctcgtcgcgctgatggccgggcgcgagatcgccgagcaggcggtgcacggcacgcgcacgccgggcgcgccgcgcctgcgggtggagcggctctcgtgcggcgacgcggtgcgcgacgtgtcgttcgacgtgcgcgcgggcgagattttcggcatttccgggctgatcggcgcggggcgcaccgagttgctgcggctcgtgtacggcgcggacgcggcggacggcggcaccgtgtcgatcggcgatccgccgcggccggcggcgatccgctcgcccgccgacgcggtgcgccacggcatcgcgctcgtcagcgaggaccgcaagggcgagggcctgctgctgccgcagtcgatcgcggcgaacctgtcgctcgggcaactggcgcgcgtcgcgcgcggcggcgtcgtcgacggggagcgggaaaacgcgctcgccgcgcggcagatcgacgcgctgcgcatccgcgcgcgcggccccgcgcagccggtggcggagctctcgggcggcaatcagcagaaggtcgcgatcggccgctggctcggccgcgacatgggcgtgctgctgttcgacgagccgacccgcggcatcgatgtcggcgcgaagttcgacatctatgcgctcctcgacgcgctcgcgcgcgagggccgcgcgatcgtcgtcgtgtcgagcgacctgcgcgagctgatgctgatctgcgaccggatcggcgtgatgtcggcgggacggatgcacgccgtgttcgagcgcggcgggtggacgcaggacgcgctcctcggcgcggcgttcgccggctacgcgcgccgcgacgcggcgctgcacccgcccggcggcgcgagctccgccgcgtga

SEQ ID NO: 38875 - protein, 523 aa, Burkholderia pseudomallei K96243
MDSTDPDSTPDTPTLVVTGIGKTYAEPVLDDVSLALYPGEALALTGENGAGKSTLSKIVAGLVAPTTGAMRLAGAEYAPHSRAHAEALGVRMVMQELNLVPTLTVAENLFLDRLPHRFGVIDRRRLAADARAAMARVGLDSLDPDTLVGSLGIGHQQMVEIARSLAGDCRVLILDEPTAMLTAREVELLFDQIARLKADGVALVYISHRLEELARVAQRVAVLRDGRLVHVDRIDAQPTERLVALMAGREIAEQAVHGTRTPGAPRLRVERLSCGDAVRDVSFDVRAGEIFGISGLIGAGRTELLRLVYGADAADGGTVSIGDPPRPAAIRSPADAVRHGIALVSEDRKGEGLLLPQSIAANLSLGQLARVARGGVVDGERENALAARQIDALRIRARGPAQPVAELSGGNQQKVAIGRWLGRDMGVLLFDEPTRGIDVGAKFDIYALLDALAREGRAIVVVSSDLRELMLICDRIGVMSAGRMHAVFERGGWTQDALLGAAFAGYARRDAALHPPGGASSAA

SEQ ID NO: 38876 - DNA, 1533 bp, Burkholderia pseudomallei K96243
  CDS (1)..(1533): transl_table=11
atggcaggaaacggaggcgacgtggctgcggcactgcgttttgacaatatcggcaaggtctttcccggcgtgcgtgcgctcgacggcatttcgttcgacgtgcaggcgggacaggtgcacgggctgatgggcgagaacggggcgggcaagtcgacgctgctcaagattctcggcggcgaatatcagcccgattcgggcagcgtgctcgtcgacgggcgggcgatgcgctttccgagcgcggccgcgtcgatcgcggcgggcgtcgcggtgatccatcaggagctgcaatacgtgcccgatctgacggtggccgagaacctgctgctcggccggctgccgagcgcgctcggctgggtccgcaagcgcgacgcgcagcgcttcgtgcgcgagcggctcgccgcgatgggcgtcgatctcgatgcgcaggcgaagctgcggcggctgtcgatcgcgcagcggcagatggtcgagatctgcaaggcgctgctgcgcaacgcgcgggtgatcgcgctcgacgagccgacgagctcgctgtcgcatcgcgagaccgaggtgctcttcaagctcgtcgacgatctgcgccgcgacggccgcgcgctcatctacatctcgcaccggatggacgagatctaccggctctgcgacgcgtgcacgatctttcgcgacggccgacaggtggcgtcgcacgcgtcgctcgccaacgtgccgcgcgagacgctcgtgcggcagatggtcggccgcgagatcagcgacatctatcactacgcgccgcgcgcgctcggcgacgtgcgcctgtcggcgcgcgcgctcgagggcgatgcgctgcgcgcgggggcgagcttcgacgtgcgcgcgggcgagatcgtcggctttttcgggctcgtcggcgcggggcgcagcgaactgatgcgcgtgatctacggcgcgcagcgcaggacgggcggcgcgctcacgctggacggcgagccgctcgacatccgctcgacgcgcgacgcgatccgccgcgggatcgtgctgtgccccgaggatcgcaaggaagagggaatcgtcgcgcatgcgtcggtcgccgagaacatcaacatcagttgccgccgccacgggctgcgcgcggggctctttctcgaccgcaagcgcgaggccgagacggccgatcgcttcatcaagctgctgaagatcaagacgcccaaccgccggcagaagatccgcttcctgtcgggcggcaatcagcagaaggcgattctcgcgcgctggctcgccgagccggatctgaaggtcgtgatcctcgacgagccgacgcgcggcatcgacgtcggcgcgaagcacgagatctacggcgtgatctacgagctcgcgaagcgcggctgcgcgatcgtgatggtgtcgtccgagctgccggaagtgctcggcgtatcggaccgcatcgtcgtgatgagcgaagggcggatcgcgggcgagctcgcgcgcggcgaagcgaacgaagaggcggtgctcaatctcgcgctgccgcagggcgcgaccgcgcacgccgcgtga

SEQ ID NO: 38877 - protein, 510 aa, Burkholderia pseudomallei K96243
MAGNGGDVAAALRFDNIGKVFPGVRALDGISFDVQAGQVHGLMGENGAGKSTLLKILGGEYQPDSGSVLVDGRAMRFPSAAASIAAGVAVIHQELQYVPDLTVAENLLLGRLPSALGWVRKRDAQRFVRERLAAMGVDLDAQAKLRRLSIAQRQMVEICKALLRNARVIALDEPTSSLSHRETEVLFKLVDDLRRDGRALIYISHRMDEIYRLCDACTIFRDGRQVASHASLANVPRETLVRQMVGREISDIYHYAPRALGDVRLSARALEGDALRAGASFDVRAGEIVGFFGLVGAGRSELMRVIYGAQRRTGGALTLDGEPLDIRSTRDAIRRGIVLCPEDRKEEGIVAHASVAENINISCRRHGLRAGLFLDRKREAETADRFIKLLKIKTPNRRQKIRFLSGGNQQKAILARWLAEPDLKVVILDEPTRGIDVGAKHEIYGVIYELAKRGCAIVMVSSELPEVLGVSDRIVVMSEGRIAGELARGEANEEAVLNLALPQGATAHAA

SEQ ID NO: 38878 - DNA, 1554 bp, Burkholderia pseudomallei K96243
  CDS (1)..(1554): transl_table=11
atgcagcgttctgatccgccccgcccgttgctcgagatgcgcggcatcagcaagacgttcccggccgtgcgcgcgctcgccggcgtgagcctcaccgtccatccgggcgaggtccattcgctgatgggcgagaacggcgcgggcaagtcgacgctcatgaagatcctgtcgggcgcgtatcaggccgatcccggcggcgagatcctgatcgacggccggccgatctcgatcgacgggccgctcgccgcgcgcgatgcgggcgtcgcggtgatctatcaggagctctgcctcgcgccgaacctgagcgtcgcggagaacatccatgtcggccgcgagctgcgccgcggcaacggccgccggggcacgatcgaccgcgccgcgatggcgcgcggctgtcaggacgtgctcgagcggctcggcgcggatttcgggccgaacacgctcgtcggcacgctgtcgatcgccgagcagcagctcgtcgagatcgcgcgcgccgttcacacccgggcgcgcatcctcgtgatggacgaaccgacgacgccgctgtcgtcgcgcgaaaccgataacctgttccggctgatccgccagttgcgcgccgaagggctcgcgatcatctacatcagccaccggatggcggaaatctacgagctgtccgaccgcgtctcggtgctgcgcgacggcgcgtacgtcggcacgctcgagcgcgacgcgctgtcggccgagcggctcgtcggcatgatggtcggccgcgatatttcgggcttctacaagaaagcgcacgcgccctacgatccgggcaacctgctgctgtcggtgcgcgacatcgcggacggcgcgcgcgtgcgcggctgcagcctcgatctgcacgcgggcgaagtgctcggcatcgcgggtcttgtcggcgcgggccgcaccgagctcgcgcggctcatcttcggcgccgagccgcgcgtgcgcggcgaggtgacgctcgccggcaaggcgttcgccgcgcattcgccgcgcgaggcgatcgacgccgggctcgtgtatctgaccgaggaccgcaagcgccagggcctgttcctcgacatgagcgtgcgcgagaacatcaacatctccgtgtgcgggcgcgacgcgcggctcggcgcgctcgatctcgcgcgcggcgcgcagcgcgcgcgcgacgcgatcgccgcgctgtcgattcgcgtgccgcatgcgaacgtgaacgtcggcgcgctgtcgggcggcaaccagcagaaggtgctgctgtcgcgcctgctggagacgaagccgcgcgtgctgattctcgacgagccgacgcgcggcgtcgacatcggcgcgaaatccgagatctaccggatcatcaacgagctcgcgcgcgccggcgtcggcgtgatcgtgatctcgagcgagctgccggagatcatcggcgtggccgaccgcgtgctcgtgatgcgcgaaggccgcattgccggcgagctcggcgggcgcacggacgcgccgatcacgcaggaggcgatcatcgcgctcgccaccggctcccgcaccgaagcgtcggccgcgcactga

SEQ ID NO: 38879 - protein, 517 aa, Burkholderia pseudomallei K96243
MQRSDPPRPLLEMRGISKTFPAVRALAGVSLTVHPGEVHSLMGENGAGKSTLMKILSGAYQADPGGEILIDGRPISIDGPLAARDAGVAVIYQELCLAPNLSVAENIHVGRELRRGNGRRGTIDRAAMARGCQDVLERLGADFGPNTLVGTLSIAEQQLVEIARAVHTRARILVMDEPTTPLSSRETDNLFRLIRQLRAEGLAIIYISHRMAEIYELSDRVSVLRDGAYVGTLERDALSAERLVGMMVGRDISGFYKKAHAPYDPGNLLLSVRDIADGARVRGCSLDLHAGEVLGIAGLVGAGRTELARLIFGAEPRVRGEVTLAGKAFAAHSPREAIDAGLVYLTEDRKRQGLFLDMSVRENINISVCGRDARLGALDLARGAQRARDAIAALSIRVPHANVNVGALSGGNQQKVLLSRLLETKPRVLILDEPTRGVDIGAKSEIYRIINELARAGVGVIVISSELPEIIGVADRVLVMREGRIAGELGGRTDAPITQEAIIALATGSRTEASAAH

SEQ ID NO: 38880 - DNA, 1518 bp, Burkholderia pseudomallei K96243
  CDS (1)..(1518): transl_table=11
atgagcaaaagctcagtcactctccgggatacgaccgtgactcctgttctgctcgaagcaagccaggtggcgaagcgattcaacggcgtgagcgcgttgcgcgacggacgcctgagccttgcggccggccgcgtgcatgcgctgtgcggcggcaacggcaccggaaaatccacgttcctgaacatcctgatggggctcttgcgccgcgacgagggcacgatccggctgaacggccgcgatgtcgatttcgcgtcgcccgccgaagcgctcgcgagccgcatggcgatcatcacgcaggagctctcgccggtgccggggatgacggtcgccgagaacctgtatcttggccgcgagcccacccgcgcgggcgtcgtcgtcgatttccgcgcgctgaagcgccgcgcgcaggcgctgctcgaccggctcggcttcgcgatcgacgcgggcgcgccgatgcatcggctgagcctcgcgcagacgcagctcgtcgagatcgcgaaagcgttcagccacgattgccaggtgatgatcatggacgagccgacttccgcgatcggcgagcgcgagaccgagacgctgttcgccgcggtccgcaacgtcaccgcgcacggcgcgggcatcatctacgtgtcgcaccggctgagcgagctattcgacatcgccgacgactacacggtgtttcgcgacggcgcgtacgtcgagagcggccgcctcgccgatatcgaccgcgcgcatctcgtgcgcgcgatcgtcggccgcgagatgcccgtcgtcgacaaggcgcgccggcccgcgcacggcgagccgtgcctgaaggtggagggcctcacgcgcgcgaacgagttcgaggacgtgagcctcgacgtgcggcgcggcgagattctcggcatctatgggctgatgggctcgggccgcagcgaattcctcaattgcgtgtatggcttgacgcgccccgacgcgggcgccgccaccctcggcggcaagccgctgccgcacggcgagcccgcgcggtcgatccgcgcgggcatcgcgctcgtcaccgaggaccgcaaggattcgggcctcgtgctctgcggcagcgtgcaggagaacatcgcgatggccgcgtaccgccgcctgtcgcgcggcggcgtgatccggcgctcgctcgtgcggcggctcgcgcaggcgatggtcgagcggctgcggatcaaggccgcttcgctgcgcatgccggtatcggcgatgagcggcggcaaccagcagaaggtcgtgctcgcgaaatgcctgtcgaccgcgcccgtgctgctgctgtgcgacgagccgacgcgcggcatcgacgaaggcgcgaaacaggagatctaccggctgctcgatgcgttcgcgcgcgacggcggcgcggtgatcgtcgtgtcgtcggaggcgcccgagctgctgtatctgagcgaccggatcgccgtgttcaagggcggccgcgtcgccgccgtccgcccgggcgacggcgccacccaggaatccctgctccatctcgcttcatga

SEQ ID NO: 38881 - protein, 505 aa, Burkholderia pseudomallei K96243
MSKSSVTLRDTTVTPVLLEASQVAKRFNGVSALRDGRLSLAAGRVHALCGGNGTGKSTFLNILMGLLRRDEGTIRLNGRDVDFASPAEALASRMAIITQELSPVPGMTVAENLYLGREPTRAGVVVDFRALKRRAQALLDRLGFAIDAGAPMHRLSLAQTQLVEIAKAFSHDCQVMIMDEPTSAIGERETETLFAAVRNVTAHGAGIIYVSHRLSELFDIADDYTVFRDGAYVESGRLADIDRAHLVRAIVGREMPVVDKARRPAHGEPCLKVEGLTRANEFEDVSLDVRRGEILGIYGLMGSGRSEFLNCVYGLTRPDAGAATLGGKPLPHGEPARSIRAGIALVTEDRKDSGLVLCGSVQENIAMAAYRRLSRGGVIRRSLVRRLAQAMVERLRIKAASLRMPVSAMSGGNQQKVVLAKCLSTAPVLLLCDEPTRGIDEGAKQEIYRLLDAFARDGGAVIVVSSEAPELLYLSDRIAVFKGGRVAAVRPGDGATQESLLHLAS

SEQ ID NO: 38882 - DNA, 1446 bp, Mycoplasma hyopneumoniae 232; identical to SEQ ID NO: 27402
  CDS (1)..(1446): transl_table=4

SEQ ID NO: 38883 - protein, 481 aa, Mycoplasma hyopneumoniae 232; identical to SEQ ID NO: 27403

SEQ ID NO: 38884 - DNA, 1539 bp, Mycoplasma hyopneumoniae 232
  CDS (1)..(1539): transl_table=4
ttgaaaaaaactaatattctatcactaaaaaaaataaaaaaagtttatggtcctgtaattgccctttctgatgtgacttttgttgttccaaaaggggaaataactagcctagttggcgaaaatggcgcgggaaaatcgacacttttaaaaattttatcaggagtgattcctgctggacaatatgaaggtgatctaatttttgaagataaaattatggcttttgcaaatacaaaagcctccgaacgtgtcggaattgcaataattcatcaagaactttcaatttcaccttatttatcaatttgcgagaacatgtatatcggtaattatccgactaaatttggcaaagttaactgaaataagatgatttccgaatgcaaaaaatatctagaaatggtcggtcttgatgaagatccaacaacaattgctggctccctttcgattgcaaaacagcaaatgattgagatcgcaaaagcactttcaaaaaatgcaaaactactaattttagatgaaccgacttcttctttaaatgatgaaaatgcttttcgcttacttgatattatgaaaagtttaaaaagtaaaggaattacttcgatttttgtctcccataaattaaatgaagtcaaatatgtctctgataatattgttgtaatccgcgatggtaaattcatttcccagtataataaaaatgaagaaataattgatgaaaaccggctaattcaggacattgttggccggcctttaaagtccaaatttcctccaagggatttagatcgaaaaatcggggaaattatttttgagatcaaagatatagttattcctcatgcaagtattgcaaattataatgttgtcaaaaatgcttcccttgatgtaaaacaaggcgaaattgtcggaatttccggacttgttggatcgggtcgaaccgaattaatgctttcactttttgggcagtattataacaaaccttcaagtggcaaagttttctataaaggtaaagaagtaaaatttactaacacaaaacaggcaatcaaatcgggaattatgtatgcttctgaagatcgaaaaaatgttggtctaatccaaattttttcgattcaaaataatatcacttccgccgctttgcatttattttcaaaatgaggaattctaaataaaaataaggaaataattaatgcccaaaaactaaaaaaagatgtaagtattaaaacaaaaaatattctaaataatgtcgaatccctttctgggggaaatcagcaaaaagttgtaattgccaaagctttaagtaccaaatttgaccttctaattatcgatgagccaacaaaaggtattgatgttggctcaaaatacgaaatttataaaattttactagacctttcatcgcaaggtaaaacaattattgtaatctcttcggaaattgaagaacttttaggaatcaccgatcgaatttttgtcatgtcccagggaattatcaaaggtcagataaaaacttctgaggcaaatcaagaaaaaattatgcaactaagtattgggggtcttatctaa

SEQ ID NO: 38885 - protein, 512 aa, Mycoplasma hyopneumoniae 232
MKKTNILSLKKIKKVYGPVIALSDVTFVVPKGEITSLVGENGAGKSTLLKILSGVIPAGQYEGDLIFEDKIMAFANTKASERVGIAIIHQELSISPYLSICENMYIGNYPTKFGKVNWNKMISECKKYLEMVGLDEDPTTIAGSLSIAKQQMIEIAKALSKNAKLLILDEPTSSLNDENAFRLLDIMKSLKSKGITSIFVSHKLNEVKYVSDNIVVIRDGKFISQYNKNEEIIDENRLIQDIVGRPLKSKFPPRDLDRKIGEIIFEIKDIVIPHASIANYNVVKNASLDVKQGEIVGISGLVGSGRTELMLSLFGQYYNKPSSGKVFYKGKEVKFTNTKQAIKSGIMYASEDRKNVGLIQIFSIQNNITSAALHLFSKWGILNKNKEIINAQKLKKDVSIKTKNILNNVESLSGGNQQKVVIAKALSTKFDLLIIDEPTKGIDVGSKYEIYKILLDLSSQGKTIIVISSEIEELLGITDRIFVMSQGIIKGQIKTSEANQEKIMQLSIGGLI

SEQ ID NO: 38886 - DNA, 1524 bp, Photobacterium profundum SS9
  CDS (1)..(1524): transl_table=11
atggtccctttattaaagatgacaaatatcgttaagtgttttggaacggtcaaagcacttgatggtgtcaatattcagctgcaacaaggtgagatcctctcgttgtgtggtgaaaatggttctggtaaatcaacgttaatgaaagtgttgtgcggtatttatccacacggcgactttgaaggggagatagtgtttgatgggcaagttgttgaggtaaaaacgattgcagagaccgaagcgttaggcattgcgattattcatcaagaattgaccctagtgaaagagctgtcggttttagagaacctgtttttaggtgctgaaattgagacatttggtgtgcttgattttgatcgcatgcacgcagaagccgtgaaattattaaagaaagtgaagcttgatgtaccacccgatacgcgggtgggagatctaggtgtcggacaacaacagcttattgaaatagcgaaggcactttcaaaaaatgcccgattactggtacttgatgaaccgacggcccccttgaccgaatctgaaaccgacatcttgctagagcttgttaatgacctgagggaagagggcgttagctgtatctatatttctcataaactcaacgaagtgaaagctatctctgatcagatctgcgttattcgtgatgggcagcatatcggcacccgtgatgctaagtcgatgacgacggatgacattattaccatgatggttggacgtgagatgaagcaactttttcctcgagaagaacacgatattggcgacattgtacttgaggtgaaaaatatcagcgcttggagtaaagccaatagtcatattcgtaaagtggatgatgtcagtttcgtgttacgaaaaggcgaaattcttggtgtgtcgggcttggttggggctgggcgcaccgaattaatggaatgcttgttcggttgttatcaagggcggtattctggtgaggtgtatttacagggacaaaaactgacattgcagagttgccatgacgcattggatgcggggattgccatggtaccagaagatcgaaagcgtcacggcattatcccaattatgtcagtaggagagaacattactctggcgagtttaacggcgtttacacaatctggtgttctgaatgacgtaaaagaggcgtctgcaatcagtgaatctataaaagcgttaaccgttaaaacaccgaatgccgatctcgcgattaaacacctttctgggggaaaccagcaaaaagcaattcttgcgcgtttcttgttggtgaatccaacggtattgattttagatgaaccgacccgagggatagatgttggcgcaaaatatgaaatttataaattaatgtttcagctcgtcaagcaagggatcagtgtgatcatggtgtcttctgagttacctgaggttctagggatcagtgatcgagtgcttgtgatgcatgaaggaaagataaaaggtgatttgattaacgacaacttgtcgcaagagcaaatcatggactgtgcgctatcggaaaaggtgacagcataa

SEQ ID NO: 38887 - protein, 507 aa, Photobacterium profundum SS9
MVPLLKMTNIVKCFGTVKALDGVNIQLQQGEILSLCGENGSGKSTLMKVLCGIYPHGDFEGEIVFDGQVVEVKTIAETEALGIAIIHQELTLVKELSVLENLFLGAEIETFGVLDFDRMHAEAVKLLKKVKLDVPPDTRVGDLGVGQQQLIEIAKALSKNARLLVLDEPTAPLTESETDILLELVNDLREEGVSCIYISHKLNEVKAISDQICVIRDGQHIGTRDAKSMTTDDIITMMVGREMKQLFPREEHDIGDIVLEVKNISAWSKANSHIRKVDDVSFVLRKGEILGVSGLVGAGRTELMECLFGCYQGRYSGEVYLQGQKLTLQSCHDALDAGIAMVPEDRKRHGIIPIMSVGENITLASLTAFTQSGVLNDVKEASAISESIKALTVKTPNADLAIKHLSGGNQQKAILARFLLVNPTVLILDEPTRGIDVGAKYEIYKLMFQLVKQGISVIMVSSELPEVLGISDRVLVMHEGKIKGDLINDNLSQEQIMDCALSEKVTA

SEQ ID NO: 38888 - DNA, 1494 bp, Photobacterium profundum SS9
  CDS (1)..(1494): transl_table=11
atgaaccaagttttattagaaatgcgtggtattaccaaaacatttcccggcgtaaaagcactcgataatgtgcaattaacgttaaaaaaaggtcgagtaatggctttaatgggagaaaatggtgcgggtaaatccaccctaatgaaagtgctgtttggtatttatcaacgcgactgcggcacgattcgttatcaaggagaacaggttaattacagtggtgctaaagaagcactagaagctggggtttcaatgatccaccaagagctatcccctattcttcaccgcagtattgctgaaaatatttggttagggcgtgaaccacttaagggtccattacgccttatcgaccacgcaaaaatgtaccgtgatacgactgaactcttaaaaaaattagatttgcacctcgacccacgtacgccaatgagcgaactcaccgtcgcgacaatgcaaatgatcgagatatctaaagcgatttcctacaattcaaaaattattattatggatgaacccacctctgctttaaccggtaaagaagtggaccatctgtttgaaatcatagaaaaattaaagaaacaaggcgtatccattgtttacattagccataaaatggatgaaatcttccgcatctgtgacgatataacagtatttcgtgatgggtgttacatcggcgaacgtgaagcacaaaataccaatcacgatgaacttgttcagatgatggtgggtcgtgatttaggcgatgtattcccgcctcctactgcaaaacctggaaaagtacgtcttgaagtaaaaaacctgagcgttgaaggtgtatttgacaacattagcttcaagctgcatgaaggtgaaattttaggtattgcagggcttgtcggcgctggacgcaccgagcttatcgaaaccttatttggggtaagaaagcacgatgtaggtgaaatctggattaacggcgaaaacgtcgaaatcaaaacgcctcaagatgcaatcagtcataaaatggcctttttaaccgaagatcgacgccaatcgggtctttatttgatgcttgatatcttcgctaatacctctattgctcatcttgatgcttaccgcaataaagtcgtgaacgtgcttgatgtacgttcgatgcaaaaagattgcgctagccagtgcaccaaattaaaagtcaaaacaccgggtatggcagaaaaaattgataacctcagcggcggtaatcaacaaaaggttcttcttgcacgttggatgctaaccaaaccagacatcctctttttagacgaaccaacgcgcggtattgatatcggtgcgaagtctgaaatttataaactaatgcgattactcacaggtatgggcaaaagcttagtcatgatctcgtctgaactgcctgaagtgataggaatgagcgaccgaatactggtcatgcatggaggcaagctgaagggtgaacttgacggtaaagatgcctctcagcaacaagtaatgtcaatggctttcaattaa

SEQ ID NO: 38889 - protein, 497 aa, Photobacterium profundum SS9
MNQVLLEMRGITKTFPGVKALDNVQLTLKKGRVMALMGENGAGKSTLMKVLFGIYQRDCGTIRYQGEQVNYSGAKEALEAGVSMIHQELSPILHRSIAENIWLGREPLKGPLRLIDHAKMYRDTTELLKKLDLHLDPRTPMSELTVATMQMIEISKAISYNSKIIIMDEPTSALTGKEVDHLFEIIEKLKKQGVSIVYISHKMDEIFRICDDITVFRDGCYIGEREAQNTNHDELVQMMVGRDLGDVFPPPTAKPGKVRLEVKNLSVEGVFDNISFKLHEGEILGIAGLVGAGRTELIETLFGVRKHDVGEIWINGENVEIKTPQDAISHKMAFLTEDRRQSGLYLMLDIFANTSIAHLDAYRNKVVNVLDVRSMQKDCASQCTKLKVKTPGMAEKIDNLSGGNQQKVLLARWMLTKPDILFLDEPTRGIDIGAKSEIYKLMRLLTGMGKSLVMISSELPEVIGMSDRILVMHGGKLKGELDGKDASQQQVMSMAFN

SEQ ID NO: 38890 - DNA, 1521 bp, Photobacterium profundum SS9
  CDS (1)..(1521): transl_table=11
atgctgccctttagctggaaacccatcatgtcaaacgaagcatttattaccttaaagcgtgtatccaagcattttggttccgttaaggcccttgatggcatcaacttaacttttaataaaggtgaagtgcattgcttagcagggaaaaatggttgtggaaaaagtaccttgtttaaagtgatttctggggtacatgcacctgaaaaaggtgcagagattgtacttgatgggaaaacctattcccgcttgaatccgcaacaatccatagagcatgggattcaggttatctatcaagatttatctttatttcctaaccttactgtcgctgaaaatattgctgtgcaagatcacatggcatggacgaaagggttagttaagcaagcgcgtttagatgcgatagccaaggctgcgatggataaagtgggggtatcacttcctttaactaaacgcgtagagcaactttctattgcggagtgccagttggtcgcgatttgccgtgcaatggcgtctgatgccaaacttgtcattatggatgaaccgacggcttctctgactcgcactgaagttaatagcttaattaaggtggttgcagatttaaaatccaaaggtatcactgttgtgtttgttagccacaagctggatgaggtcatggagatttctgatcgtataacggttattcgtgacggtaaaaccattggtacgtatccagcagaagaaatgaatagtgatgaattggctttcttaatgacggggcaacgttttgagtattctccgttaggtgaatataaacagcaaggagacgtgaagttagaggtcactaaccttactaaaaaaggtcagtttaatgatattaatcttcaagttcgtgctggtgagattgtctctattacggggctgttaggctcaggccgtactgagttatgtttggctttatttggtatgactcgaccagatagcggtcaaatgaaggttaatggcaaacttgttgaatttagttctaacagagaagcgattgctcatggcattggttatgtctcggaagacagaatgagtaccggattagtcatggagcaatccatacaagacaatactacagcgactgttctgtctcgattgaaaaagccgaatggttttcttgatcatgcaaaagcgacaaacttagtgaaaagactcatatcatcgttatcaattaaagttgctgatcctatgttaccagtgaccagtttgtcgggcggtaacgctcagcgaatttctattgctaagtggattgcggctgagcctgatgtgttgattctcgactctccaaccgtgggtgttgatattgcgaacaaagaaagtatttatcagatagcgaaagatctcgccttaaagggaatggctatcatcatggtgagcgatgaaattcctgaagtgttttacaacagccatcgtgtgattgttatgaaagatggacatttttcacatgaatttcatccaataacatcttcagaaaaagaaatcatggaggccgtcaatgcgtga

SEQ ID NO: 38891 - protein, 506 aa, Photobacterium profundum SS9
MLPFSWKPIMSNEAFITLKRVSKHFGSVKALDGINLTFNKGEVHCLAGKNGCGKSTLFKVISGVHAPEKGAEIVLDGKTYSRLNPQQSIEHGIQVIYQDLSLFPNLTVAENIAVQDHMAWTKGLVKQARLDAIAKAAMDKVGVSLPLTKRVEQLSIAECQLVAICRAMASDAKLVIMDEPTASLTRTEVNSLIKVVADLKSKGITVVFVSHKLDEVMEISDRITVIRDGKTIGTYPAEEMNSDELAFLMTGQRFEYSPLGEYKQQGDVKLEVTNLTKKGQFNDINLQVRAGEIVSITGLLGSGRTELCLALFGMTRPDSGQMKVNGKLVEFSSNREAIAHGIGYVSEDRMSTGLVMEQSIQDNTTATVLSRLKKPNGFLDHAKATNLVKRLISSLSIKVADPMLPVTSLSGGNAQRISIAKWIAAEPDVLILDSPTVGVDIANKESIYQIAKDLALKGMAIIMVSDEIPEVFYNSHRVIVMKDGHFSHEFHPITSSEKEIMEAVNA

SEQ ID NO: 38892 - DNA, 1515 bp, Photobacterium profundum SS9
  CDS (1)..(1515): transl_table=11
atgaaccagccaattttagaacttaaaggcattgaaaaagcattccctggtgtaaaagcgctagataatgcttgtttgaatgtttacccaggcaaggtaatggctttaatgggtgaaaatggtgccggtaagtcgacgcttatgaagtccttaactggaatctatgcgatggatgcaggtgaaattcgctaccaagggaaagccgttaacttcgatggccctcgccactctcaagaagctggcatcagtattattcaccaagaactgaacctgatccctgaattaaccattgctgagaatatctttcttggtcgtgaaaaaaccaatgcatttggtggcattaaatgggcagaaatgttccgtgaagccgatgatctacttaagcgcttaaacgtaaaacaccactcccgccaattattgggagagttaagccttggtgagcagcaaatggttgagattgcgaaagccttatctttcaaatctcaagtcatcattatggatgagccaaccgatgcactgacagatactgaaactgagtcgttgtttaaagtgattaatgagttgcgtgctgaaggttgcggtattgtgtatatctcgcaccgcctaaaagaaatcttcgaaatctgcgacgacattaccgtattacgagacggaaaattcattggtgaacgtgctgtagccgataccgatgaagacggcttgatcgaaatgatggtaggccgtcgcttagatgagcaataccctcgtattgatgtgcgccacggtgaaacctgccttgaagtaacaaacctgactggtgcaggtgtcaataatgtcagcttcaaactggatcgcggtgagatcttaggtgtatcaggcttaatgggtgcgggtcgtagcgaattaatgaaagtgatttacggtgccctaaagcgtgaatcaggcgatatcaaacttaacggcaaaaccattaacccagtaaccccacaagatggcttagcgaacgggattgcgtatatatcggaagaccgcaaaggtgatgggctggtacttgggttatcagtgaaagagaacatgtcgctatgttcactagaacagctttctaaaggtgttcagctaaaacattacgaagaagtgaccgcggtggaagatttcatccgcttattcaacatcaaaaccccaacgcgtgatcaaatcattggcaacctctctggcggtaaccaacagaaagtcgctatcgccaaagggttaatgacccgtcccaaagtcctgattttggatgagccaacccgtggtgtcgatgtaggggcaaagaaagagatttatcaactcatcaaccaatttaaagcggaaggcatgagcatcatcttagtttcttctgaaatgccagaagtactgggaatgagtgaccgcatcatagtgatgcacgaaggccgtattagcggtgaatttatggcagccgatgccaatcaagaaaaattactggcctgtgcggtaggtaaaaccaccgagcagaacaacgaggtagcagcatga

SEQ ID NO: 38893 - protein, 504 aa, Photobacterium profundum SS9
MNQPILELKGIEKAFPGVKALDNACLNVYPGKVMALMGENGAGKSTLMKSLTGIYAMDAGEIRYQGKAVNFDGPRHSQEAGISIIHQELNLIPELTIAENIFLGREKTNAFGGIKWAEMFREADDLLKRLNVKHHSRQLLGELSLGEQQMVEIAKALSFKSQVIIMDEPTDALTDTETESLFKVINELRAEGCGIVYISHRLKEIFEICDDITVLRDGKFIGERAVADTDEDGLIEMMVGRRLDEQYPRIDVRHGETCLEVTNLTGAGVNNVSFKLDRGEILGVSGLMGAGRSELMKVIYGALKRESGDIKLNGKTINPVTPQDGLANGIAYISEDRKGDGLVLGLSVKENMSLCSLEQLSKGVQLKHYEEVTAVEDFIRLFNIKTPTRDQIIGNLSGGNQQKVAIAKGLMTRPKVLILDEPTRGVDVGAKKEIYQLINQFKAEGMSIILVSSEMPEVLGMSDRIIVMHEGRISGEFMAADANQEKLLACAVGKTTEQNNEVAA

SEQ ID NO: 38894 - DNA, 1476 bp, Photobacterium profundum SS9
  CDS (1)..(1476): transl_table=11
atgacaggaataagtaaagagttccctggggttaaagctctcgataaagtaaacttgaaagtacgccctcattctattcacgcattaatgggagagaatggagcagggaaatcgacgttattaaaatgcttatttgggatctatgagaaaaacgaaggggatatcgttttcttaggtaaaagcattaatttttcatcatcaaaagaagcgctagaagccggtgtttctatggtgcaccaagaacttaatcaggttctgcagcgtaccgttatggataatatttggcttggccgttatccgacaaaaggtttctttgttgatcaaaagaaaatgtacgaagaaactaaaaaagtatttgaagaactcgatattgatatcgaccctaatgtaaaagtcgcgaccttatctgtatctcaaatgcagatgttagaaattgcaaaagcattttcttatgacgcaaaaattgtgattatggatgagccaacatcgtcattaactgaaaaagaagttaatcacctattcaagatcattaaaaagctaaaagagaaaggctgtggcattgtttacatttctcacaagatggaagaaatatttgaaatctgcgatgaaattaccattttacgggatggtatttgggttgatactcgcccgttagaaggtttaaccatggatcaaatcatcggcatgatggttggacgtgaactaacgcagcgatttcctgaaaaaacaaatacgccgaaagaaaccattttagctgtaaagaatttaacggcgttgaatcagccttctgttaacgatgttagttttgaacttcgtaaaggtgaaattctaggtattgctggattagtgggggcgaagcgaaccgatattgtagaaacattattcggtattcgtgaacgcagcagcggcgatattattttacatggtaaacacctaaagaataaagatgcccacgaagccattaataatggttttgcgttagtgacagaagagcgacgctctactgggatttatagcaacctcgatattacatttaattctttggtagcgaatgttgaacaatataaagaaggctttgggctactcagtaaccgaaaaatgaaaagcgatactcagtgggtaatcgatgccatgagtgtgaaaacaccgtcgcataaaaccatgattggttcgttatctggcgggaaccagcaaaaaatcattattggacgctggttattaaccggccctgaaatcttaatgttagatgagcctacgcgaggtattgatgttggtgcgaaatttgaaatctatcagctgatattagaattggcaaataaagataaagggataattattatctcttccgaaatgcctgaacttttaggtattactgatcgcatactcgtgatgagtaatggtcgtgctgctggcatcgtagaaacaaaaaataccacacagaatgaaattctcagtttggcctctcgttacctttaa

SEQ ID NO: 38895 - protein, 491 aa, Photobacterium profundum SS9
MTGISKEFPGVKALDKVNLKVRPHSIHALMGENGAGKSTLLKCLFGIYEKNEGDIVFLGKSINFSSSKEALEAGVSMVHQELNQVLQRTVMDNIWLGRYPTKGFFVDQKKMYEETKKVFEELDIDIDPNVKVATLSVSQMQMLEIAKAFSYDAKIVIMDEPTSSLTEKEVNHLFKIIKKLKEKGCGIVYISHKMEEIFEICDEITILRDGIWVDTRPLEGLTMDQIIGMMVGRELTQRFPEKTNTPKETILAVKNLTALNQPSVNDVSFELRKGEILGIAGLVGAKRTDIVETLFGIRERSSGDIILHGKHLKNKDAHEAINNGFALVTEERRSTGIYSNLDITFNSLVANVEQYKEGFGLLSNRKMKSDTQWVIDAMSVKTPSHKTMIGSLSGGNQQKIIIGRWLLTGPEILMLDEPTRGIDVGAKFEIYQLILELANKDKGIIIISSEMPELLGITDRILVMSNGRAAGIVETKNTTQNEILSLASRYL

SEQ ID NO: 38896 - DNA, 1551 bp, Geobacillus kaustophilus HTA426
  CDS (1)..(1551): transl_table=11
atgaacgggttgtcaatgcggggcatggaaaaatcgtttggcgccgtgcgcgtgctcgacggcgtggacttcgacgttcgtcctggcgaagtccacgcccttttaggcatgaacggcgccggcaaaagcacgctcatgaacattttggccggcgccattccgcctgacgctggtacgatcacgatcgacggtacgatatacacgttttcatcgccgcgcgaagcaaaacaagccggcatcggcctcgtcgttcaagaagttgacacagcgctctttcccggcttgccgatttacgaaaatgtagcggcggacgagttcgtccatgtgaagcaacggccgattcgctcgctgcgtcaagaaaaagagcgggccgccgccctgcttcgccgcgtcggcctgtcgttgccgccgacgaaattggttcgcgactgctcgctccatgaaaagcagctgattgtgctcgccaaagtgctgtcatccaacgcgcgctatatcatcctagacgaaccgacggccgccttaagcgaggcggaaacaaggcgtctgtttgccatcatcgatgaactgaagcagcaaggcgtcggctttatttacatctctcataaactgaaagaagttcaggagatcgctgaccggctgacgattttgcgcgacggccgcgtcgtctatcacggaggcgcccgcagcctgccgcttgaggacatcgtccttcatatgactggaacgaagcggaccgccgccgcgaaacaagcacgcacatacagaagcgacatcgcgtttgccgcccgcggaattttgatcgacaaaaccgggacaacagtcgacctatacgcccaccgcggcgaaatcgtcggcatcgctggcctcgtcggcgccggcaagacggagcttgccgaaagcctcatcgcccaccggaacacatccggcgagtgggaaattgatggcagacgctatgtgttctcatcgccttatgaagccatcgacgccggcctttgcctcatcccggaagaacggcgcaaacaagggttgtttttgcccgaatcagtgaaaacgaacttgaccgtccgccttctttcccgcctgtcgcgctggcaatggatcagctgggcgaaagaagcggctgaagccgacgggctcgtccgctcgctaggtgttcatccgccgtcaagcaccaccgtcgttcgccacttgagcggcggcaatcaacaaaaagtcgtcatcggcaaatggctcaacacaaacgcacgcgtctttttgtttgacgaaccgaccaaagggatcgacgtccatgcgaagcaagaggtgttttccatcattcgctcccttgccgatgaaggaaaaacggtgctgtacttttccagcgaatttcaagagctgcttgacatttgcgacaccatctacgtgatggtcgacggccggctgctcgctcgcctgccggccgctgaattgacgtatgaacagcttgtttactattgcagcggaggtgagatccatgagccagccagccgtttccacaacgccgtcgaaaaaaacggcgccgtccattcttga

SEQ ID NO: 38897 - protein, 516 aa, Geobacillus kaustophilus HTA426
MNGLSMRGMEKSFGAVRVLDGVDFDVRPGEVHALLGMNGAGKSTLMNILAGAIPPDAGTITIDGTIYTFSSPREAKQAGIGLVVQEVDTALFPGLPIYENVAADEFVHVKQRPIRSLRQEKERAAALLRRVGLSLPPTKLVRDCSLHEKQLIVLAKVLSSNARYIILDEPTAALSEAETRRLFAIIDELKQQGVGFIYISHKLKEVQEIADRLTILRDGRVVYHGGARSLPLEDIVLHMTGTKRTAAAKQARTYRSDIAFAARGILIDKTGTTVDLYAHRGEIVGIAGLVGAGKTELAESLIAHRNTSGEWEIDGRRYVFSSPYEAIDAGLCLIPEERRKQGLFLPESVKTNLTVRLLSRLSRWQWISWAKEAAEADGLVRSLGVHPPSSTTVVRHLSGGNQQKVVIGKWLNTNARVFLFDEPTKGIDVHAKQEVFSIIRSLADEGKTVLYFSSEFQELLDICDTIYVMVDGRLLARLPAAELTYEQLVYYCSGGEIHEPASRFHNAVEKNGAVHS

SEQ ID NO: 38898 - DNA, 1515 bp, Geobacillus kaustophilus HTA426
  CDS (1)..(1515): transl_table=11
atgcaatcatatgttttggaaatgaagggaattacaaaagagtttccaggggttcgggcgttggataacgtgactttttctgtccgtaagggagaaattcatgccctttgtggtgaaaatggtgcagggaagtctaccttgatgaaagtcttaagtggggtttatccatatggatcatatgatggaaagatctacatcgagggaaaagaagtccgatttagaaatattaaagagtctcaagaagcaggaattgcgattatttatcaagaactagctgtagtcgaggaaatgacggttgcggagaacttgtttctcggtcatgaactaatgcgaggtaaatatattgattggaatcgtttatattctgaggcacagaaatggttgcagaaaattgggttggacattgacccagagacaaaggttcgcaatttaacggtgggcaaacagcagttaattgaaattgctaaagcactctcaaaaaatgctaaaattattattttagacgaaccgacagcagcattaaccgatagtgatgttgccaccttaaaaaatattttgtgcgatcttcgttctcaaggagtaacttgcatttatatctcccatagactgaatgaagttatggaattggcagatacggtaaccgttttgcgtgatggccaaacaatcagcaccgatcgtatcgaactgctgacagaagagcagattattgcaaaaatggttggaagggaattaaatgaattatatccgtatgaaccaaggaatgttgggaaagaaattctcaaagttgaccactattctgtcattgatgaacaaacgggaagggaagtaattcacgatgtttcattttcattaaaagcaggggaaatcctcggaatctcaggattgatgggttcagggaggaccgaattgtttaccagcctattcggcgcctatcatggcaagaaaaaaggaacagtttggattgatgggaaacaagttgatattcgtcgtcctgcagaggcgattcagtacggaatggcgtatgtatctgaagaccgaaaaaagtatggtctcgttttagagatggatattattaagaattccactcttgtcgctttgaaaaaagtcacaaaatggaacgttattgatcatgcgttagaagtgaagcaggcagaagaaataacgaaaagaatgaaattaaaagctcctactttagaagcgaaagtatcccaactaagcggtggaaaccagcaaaaagtcgttttaagcaaatggcttttaaatagcccgaaaatattgattttggatgaaccgactcgcggaatcgatgtcggggcaaagtacgaaatttacaaaattattaacgagttagctagtcagggagtgggaattgttttaatttcatctgagttgccagaagtcatgggaatgtcggatcgcattttagtcatgtccgagggaagaataaccggggagtttcagcgtcatgaggccacccaagagaaaattatgacttgtgcaacgggaggaaaatga

SEQ ID NO: 38899 - protein, 504 aa, Geobacillus kaustophilus HTA426
MQSYVLEMKGITKEFPGVRALDNVTFSVRKGEIHALCGENGAGKSTLMKVLSGVYPYGSYDGKIYIEGKEVRFRNIKESQEAGIAIIYQELAVVEEMTVAENLFLGHELMRGKYIDWNRLYSEAQKWLQKIGLDIDPETKVRNLTVGKQQLIEIAKALSKNAKIIILDEPTAALTDSDVATLKNILCDLRSQGVTCIYISHRLNEVMELADTVTVLRDGQTISTDRIELLTEEQIIAKMVGRELNELYPYEPRNVGKEILKVDHYSVIDEQTGREVIHDVSFSLKAGEILGISGLMGSGRTELFTSLFGAYHGKKKGTVWIDGKQVDIRRPAEAIQYGMAYVSEDRKKYGLVLEMDIIKNSTLVALKKVTKWNVIDHALEVKQAEEITKRMKLKAPTLEAKVSQLSGGNQQKVVLSKWLLNSPKILILDEPTRGIDVGAKYEIYKIINELASQGVGIVLISSELPEVMGMSDRILVMSEGRITGEFQRHEATQEKIMTCATGGK

SEQ ID NO: 38900 - DNA, 1512 bp, Geobacillus kaustophilus HTA426
  CDS (1)..(1512): transl_table=11
atgagcgaagactatgtgctggaaatgatagacataaccaaagaatttccaggcgtcaaagcgttagacggtgtgcagctgaaggttaaaagaggcacggttcacgcgctcatgggagagaatggggctgggaaatcgacattgatgaaaattttaattggcatttacacgccggaccgaggcaagattatccttgacggcgaagagttgaaagtctccacgatcaaacatgcgcttgatagaggcatttcaatgattcaccaagagttaagccctgttccgaacatgacagtagcggaaaacatttttcttggcagggagccgagttatccgttcgccggctgggtcaaaatgaaagagctcgtcaaaaagacgaggcaactattcgaacggcttgagatcgatattgaccccaatgcgaagatggcggatttgagcatcgccaatatgcagatggtggaaattgcaaaggcgatttcttatcattcgaagctcattattatggacgaaccaacgtctgcgattacagagaaagaggttcaccaccttttccgaattatccgttcgttgaaaaaagagggagtctccattatttatattacccataagatggatgagctcgaacaaatcaccgatgaggtgaccgtgctgagggatggcaagtacatcgggacgaagccgagccatcaaatgacaagagatgaactcattcaaatgatggttgggcgggaactaaatcaaattttccataaaccaaaagtcccgattggggaagtggcgttgtcggttcaagggttgacgaaaaaagggaaatttcatgatgtgagctttgaagtgcgaaaaggggaaattgtcggatttgccggtttgatgggatccggaagaacggaagtattagaaagcgttttcggtgttaccaaaccggatgcgggagacatttatgtccacggaaaaaaggcgacgatccgctcgacgcgggatgcgattcggtatggaatgggattgttgacggaagaccgaaaactgacaggcctgtttttgccgctgtcggtcgaggacaacatgatcacggttacggtcaaccagtatacgaaggcaggctttttgcagcaacgaaaaatccgcgaagactgccaacggcttgctgaacagctttcgattaaaacaccgagcttgcagcagttgatcaaatacttaagcggaggcaatcagcaaaaggcactcattgcccgttggttgcttcacaacccggatattttgttcctcgatgaaccgacaaggggaatcgacgtaggagcgaaagcggaaatttatcatctgatttttgagctcgccaagaatggaaaagcgatcattgtggtttcgtctgaaatgccagaaatattaggattgagcgaccgggttattgttatgcatgaagggagaaaaatgggagaactaacgagggaagaagcgacccaagagcggattatgcagctggcaacgggccagctgatcgagacgaaaagataa

SEQ ID NO: 38901 - protein, 503 aa, Geobacillus kaustophilus HTA426
MSEDYVLEMIDITKEFPGVKALDGVQLKVKRGTVHALMGENGAGKSTLMKILIGIYTPDRGKIILDGEELKVSTIKHALDRGISMIHQELSPVPNMTVAENIFLGREPSYPFAGWVKMKELVKKTRQLFERLEIDIDPNAKMADLSIANMQMVEIAKAISYHSKLIIMDEPTSAITEKEVHHLFRIIRSLKKEGVSIIYITHKMDELEQITDEVTVLRDGKYIGTKPSHQMTRDELIQMMVGRELNQIFHKPKVPIGEVALSVQGLTKKGKFHDVSFEVRKGEIVGFAGLMGSGRTEVLESVFGVTKPDAGDIYVHGKKATIRSTRDAIRYGMGLLTEDRKLTGLFLPLSVEDNMITVTVNQYTKAGFLQQRKIREDCQRLAEQLSIKTPSLQQLIKYLSGGNQQKALIARWLLHNPDILFLDEPTRGIDVGAKAEIYHLIFELAKNGKAIIVVSSEMPEILGLSDRVIVMHEGRKMGELTREEATQERIMQLATGQLIETKR

SEQ ID NO: 38902 - DNA, 1542 bp, Geobacillus kaustophilus HTA426
  CDS (1)..(1542): transl_table=11
atgtctgagtttattttagaaatgagagggattacgaaacaattccctggagtgaaagcacttgataatgtgaatttaaaaatacgggaaggggaaattcacgcgctttgtggagagaatggagcaggaaaatcgacattaatgaaagtcttgagcggcgtttatccgtacggcacgtatgacggagaaattttatttaagggcgaagtatgtagatttaaagatattaaacagagcgaacagttaggaattgttatcattcatcaagagctggccttgattccctatttatccattgccgaaaatatttttttagggaatgaacgggcgaaaagaggcatcattaactggaatgaaacgatcgctcaaacaaaaaagctgttgcagaaagtcggattagaggagtcgccgcatacattggtcggccaacttggcgtcggcaagcagcaacttgtagaaatcgcgaaggcgttggctaaagatgtgaaattgcttattttggatgagccgaccgcagcgttgaatgaagatgacagcgaaaatttgctgaatttgcttttggaattgaaaaaacaggggttatcggccattattatttcccataaattaaatgaaattacgaaagtcgctgattcgatcacgattttacgagatggaaaaacaattgaaacgttggatatgaaacatgatgaggtgaccgaagaccggattatccgtggaatggtcggacgcgatttaacgaatcgctatccttcaagaacaccgaagataggcgaaatcatattcgaggtcaggaattggacagtatatcaccctgtttattcggagcgcaaagtgcttgataatatcaatctgtcgattcgcagaggagaaattgtggggatcgccggccttatgggggcgggacgaaccgaattggccatgagcatctttggtcggtcatacggaaagaaaattagcggagaaatatggaaaaacggggtcaaaatcgatgtcagcgatgtcagcaaggccattgccaacgggattgcctatgtaacagaagatcgaaaaggaaatggccttatcctaatggaagacattcggaaaaatattacgctttcccgtttaggaaaaatctcgaatcattttgtggtcgatgaaaatcaagaaattgttgaatcggagcgattccgtgaccaattcaaaattaaaacgccaagcgtatttcaaaaagtagaagcccttagtggcgggaatcaacaaaaagtggtgttaagcaaatggatttttgctgagccagatattttgattctcgacgaaccaacacgggggattgacgtcggcgcgaaatatgaaatttacacgatcattcagcagctagccgatgcagggaaaggtattttaatgatttcgtccgaacttccagaaattcttggcatgtgcgatcgaatttatgtgatgagtgaagggagaatcactggagaggtgtcgcgggaagaagcgacacaggaaaaactaatgaggcttatgacgaaaacagcgattcaggagggggcataa

SEQ ID NO: 38903 - protein, 513 aa, Geobacillus kaustophilus HTA426
MSEFILEMRGITKQFPGVKALDNVNLKIREGEIHALCGENGAGKSTLMKVLSGVYPYGTYDGEILFKGEVCRFKDIKQSEQLGIVIIHQELALIPYLSIAENIFLGNERAKRGIINWNETIAQTKKLLQKVGLEESPHTLVGQLGVGKQQLVEIAKALAKDVKLLILDEPTAALNEDDSENLLNLLLELKKQGLSAIIISHKLNEITKVADSITILRDGKTIETLDMKHDEVTEDRIIRGMVGRDLTNRYPSRTPKIGEIIFEVRNWTVYHPVYSERKVLDNINLSIRRGEIVGIAGLMGAGRTELAMSIFGRSYGKKISGEIWKNGVKIDVSDVSKAIANGIAYVTEDRKGNGLILMEDIRKNITLSRLGKISNHFVVDENQEIVESERFRDQFKIKTPSVFQKVEALSGGNQQKVVLSKWIFAEPDILILDEPTRGIDVGAKYEIYTIIQQLADAGKGILMISSELPEILGMCDRIYVMSEGRITGEVSREEATQEKLMRLMTKTAIQEGA

SEQ ID NO: 38904 - DNA, 1485 bp, Geobacillus kaustophilus HTA426
  CDS (1)..(1485): transl_table=11
ttgattgacatgcggtcgattcaaaaatcgtttggcgccaatatcgttctgaatggcgttgattttgaagtgcttcctggagaagtgcatgcgttgatgggagagaacggagcggggaaatcgacgctcatcaaggtgttgaccggcatttatgagcgggatgggggaacgattgttgtcaacgggcgcgaagtgcattaccgtcatccgaaagaggcggaacgcgacgggattgtcgtgattcatcaagagttgaatgtcattccaacattgacggtggccgaaaacatttttcttggccgcgagccgaaaatcgggagaacgggtgtcattcgttataaagaaatggagcaacaggccgcttcctatttgcggagattagggatggaccttgacccacgagaactcgccggtcggttgtctgtcggaaaacagcaaatgatcgaaattgccagggccatttcgacgaatgcgaagtgccttattatggatgaaccgacagcggcgctgacggaacgggaaattcaggctttattttctgttattcccaccttgaaacagcaaggcgtcgcggttgtttacatttcacatcggatggaagagatttttaccatttgcgaccggatttcggttctccgcgatggccagttcatcggaacgaaacgagtaaaggaaacgaacttcgatgaaattgttcaaatgatggtcggcaggcaaattggggaacgttttccaaaacggcgcgtcaccattggagaagaacggctgcgcgtagagcggctcacgaaaaaagggttgtttgagaatgtatcgttttccgtgcgagccggtgaagtgcttggtgtggcgggactgatgggatcggggcgaaccgagatcatggaagcgattttcggagccagaccattcgatgaaggagacatctatatcgacgggcgtcctgtgcgcatccgttctccgcgccaggccgtcgaacatggcatcgccatgattaccgaagaccgaaagcaaaaagggctcattctcgagatgagcgtccatgagaatttgaccttgccgaagttggaacaattagcaacagcgggattcatccagtcatcgaaagaacgggacgtggtgttgacatacattcatctgttgaatattaaagcctcttccccagatttacccgtgaaagcattgagcggcgggaatcaacaaaaagtcgtattcggcaaatggctggcgatgaacccgcgcatcctcattttggatgaaccgactcgcggcgtggatgttggggcaaagaaagagatttatgaagtgatcaatgaattggctgcccaaggcgccgcgatcattatgatctcttctgaactgccggaagtattgggcatgagcgaccgcgtcatggtcgtccatgaagggaaagtgcaagcgatcttggaaaacgacgggttggatcaagaaaccatcatgcgggcggcgacaggggggaatcgatga

SEQ ID NO: 38905 - protein, 494 aa, Geobacillus kaustophilus HTA426
MIDMRSIQKSFGANIVLNGVDFEVLPGEVHALMGENGAGKSTLIKVLTGIYERDGGTIVVNGREVHYRHPKEAERDGIVVIHQELNVIPTLTVAENIFLGREPKIGRTGVIRYKEMEQQAASYLRRLGMDLDPRELAGRLSVGKQQMIEIARAISTNAKCLIMDEPTAALTEREIQALFSVIPTLKQQGVAVVYISHRMEEIFTICDRISVLRDGQFIGTKRVKETNFDEIVQMMVGRQIGERFPKRRVTIGEERLRVERLTKKGLFENVSFSVRAGEVLGVAGLMGSGRTEIMEAIFGARPFDEGDIYIDGRPVRIRSPRQAVEHGIAMITEDRKQKGLILEMSVHENLTLPKLEQLATAGFIQSSKERDVVLTYIHLLNIKASSPDLPVKALSGGNQQKVVFGKWLAMNPRILILDEPTRGVDVGAKKEIYEVINELAAQGAAIIMISSELPEVLGMSDRVMVVHEGKVQAILENDGLDQETIMRAATGGNR

SEQ ID NO: 38906 - DNA, 1506 bp, Salmonella enterica subsp. enterica serovar Paratyphi A str. ATCC
  CDS (1)..(1506): transl_table=11
atggacgcattactgcaactcaaagggatcgataaagcgttccccggcgtgaaggctctctccggcgccgcgttaaacgtttatcctggccgcgttatggcgctgatgggggaaaacggcgccggaaaatccaccatgatgaaagtattaaccggcatctatacgcgagatgcgggatcgttgttatggctaggtaaagagaccacctttaatgggcctaaatcgtctcaggaagccgggatcggcattattcatcaggaactgaacctgattccgcagttgaccattgcggaaaatatcttcctgggccgtgagtttgtgaatcgctttggcaaaatcgactggaaaaagatgtatgccgaagccgaccagctcttagccaaactcaatctgcgctttaagagcgataagctggtgggcgaactctctatcggcgatcagcaaatggtggaaatcgccaaagtgctgagcttcgaatccaaagtcatcattatggatgaaccgaccgatgcgctgaccgacactgaaaccgaatctctgttccgcgttatccgcgaattaaaatcgcagagacgcggcattgtctatatctcccaccgtatgaaagagatcttcgaaatttgcgatgacgtgacggtcttccgcgatgggcaatttatcgccgagcgtgaagtggccacgttgaccgaagattctcttatcgaaatgatggtgggacgtaagctggaagatcagtacccgcatctggataacgcgccgggtgagattcgcctgaaggtcgataatctgtgcggaccgggcgtgaatgatgtctcttttgtgctgcgaaaaggcgagattcttggcatctccggcctgatgggcgccggtcgcaccgagctgatgaaagtattgtacggcgcgatgcctcgaaccagcggttacgtgacgctcgatggacacgaagtggtgacgcgttctccgcaggacgggctggccaatggcatcgtttatatctctgaagaccgtaagcgcgatggactggtgctcggcatgtcagttaaagagaatatgtcgctgacggcgctggattatttcagccgcgctggcggaagcctgaaacacaaagatgagcagcaggcggtgggggattttatccgtctgttcaacgtcaagacgccgtcaatggaacaggcgataggcctgctttctggcggtaatcagcaaaaagtggcgattgcccgcgggttgatgacgcgcccgaaagtgctcattctcgacgagccgacccgcggcgtggacgtcggcgccaagaaagagatttaccagcttatcaaccagtttaaggccgacggcctgagcatcattctggtctcatctgagatgccagaagtattaggcatgagcgatcgcatcatcgtcatgcatgaagggcatctcagcggtgaatttactcgcgagcaggccacccaggaagtgttaatggctgccgcagtgggcaagcttaatcgcgtgaatcaggagtaa

SEQ ID NO: 38907 - protein, 501 aa, Salmonella enterica subsp. enterica serovar Paratyphi A str. ATCC
MDALLQLKGIDKAFPGVKALSGAALNVYPGRVMALMGENGAGKSTMMKVLTGIYTRDAGSLLWLGKETTFNGPKSSQEAGIGIIHQELNLIPQLTIAENIFLGREFVNRFGKIDWKKMYAEADQLLAKLNLRFKSDKLVGELSIGDQQMVEIAKVLSFESKVIIMDEPTDALTDTETESLFRVIRELKSQRRGIVYISHRMKEIFEICDDVTVFRDGQFIAEREVATLTEDSLIEMMVGRKLEDQYPHLDNAPGEIRLKVDNLCGPGVNDVSFVLRKGEILGISGLMGAGRTELMKVLYGAMPRTSGYVTLDGHEVVTRSPQDGLANGIVYISEDRKRDGLVLGMSVKENMSLTALDYFSRAGGSLKHKDEQQAVGDFIRLFNVKTPSMEQAIGLLSGGNQQKVAIARGLMTRPKVLILDEPTRGVDVGAKKEIYQLINQFKADGLSIILVSSEMPEVLGMSDRIIVMHEGHLSGEFTREQATQEVLMAAAVGKLNRVNQE

SEQ ID NO: 38908 - DNA, 1536 bp, Salmonella enterica subsp. enterica serovar Paratyphi A str. ATCC; identical to SEQ ID NO: 27416
  CDS (1)..(1536): transl_table=11

SEQ ID NO: 38909 - protein, 511 aa, Salmonella enterica subsp. enterica serovar Paratyphi A str. ATCC; identical to SEQ ID NO: 27417

SEQ ID NO: 38910 - DNA, 1530 bp, Silicibacter pomeroyi DSS-3
  CDS (1)..(1530): transl_table=11
atgaccgtccccgccatcgagctcaaagggatttccaaatcctttgggcctgtgcaagcaaacaaggacatctcgatcagcgtcgcccccggcaccattcacggtatcatcggcgaaaacggtgcgggcaagtccaccctgatgagcatcctttacggcttctacaaggccgacaagggcgagatatggatcaacggcaagaagaccgagatcccagacagccaggcggccattgccgccgggatcggcatggtgttccagcatttcaagctggtcgagaattttaccgtgctggaaaacatcattctgggcgccgaggatggcgggttgctgaaaccctcgctggccaaggcccgccgcaccctggccgagctggccgccgaatacgagctgaatgtcgaccccgatgcggtgatcgaagagatcggcgtcggcatgcaacagcgggtcgagatcctcaaggcgctgtatcggcaggccgaaatcctgatcctggacgagccgaccggcgtgctgaccccggctgaggccgatcagctgttccgcatccttcaccggctcaaggacgagggcaagacgatcatcctgatcacccacaagctgcgcgagatcatggaggcgactgacacggtcagcgtcatgcggcggggcgagatgacggccaccgtcaagaccgccgaaaccagccccgaacatctggccgagttgatggtgggccgcaaggtgctgctgcgcgtcgacaaggtgcccgccaaacccggaaaaccgatcctggagatcgagaacctgcgcgtaaccgacgaaaagggcgtcgaacgtgtcaagggcatcgacctgaccgtgcgcgcgggcgagatcctgggcatcgccggcgttgccggaaatggccagtccgaactgctcgaggttctgggcggcatgcgcccgggcagcggcgcgatccggctgaacggcgctccgctgccgctgagcggacccggatccgacgcgcgcgcccgccgcaccgcccatgtggcccatgtgcccgaggatcgccagcgtgaaggtctgatcatggacttccacgcctgggaaaacgtcgcctttggctatcaccacgatccggcctatcaatccggcatcttcatgaacaacgccgccctgcgcgccgataccgagcgcaagatcgagaaattcgatgtccgccccgccgatggttggctggcagccaagaatttctcgggcggcaaccagcaaaagatcgtcgtggcacgcgagatcgagcgcaatcctgacctgctgctggtcggccaaccgacacgcggcgtcgatatcggcgccatcgagttcattcacaagcagatcgtcgccctgcgcgatcagggcaaggcggtgctgctggtctcggtcgagctggaggagatctttggcctcgccgaccggattgcggtgatgttcgacggccatatcatgggcgaacgcctgcccgacgagacggatgaaaaggaacttggcctcttgatggccggtgtcaacggggaggccgcctga

SEQ ID NO: 38911 - protein, 509 aa, Silicibacter pomeroyi DSS-3
MTVPAIELKGISKSFGPVQANKDISISVAPGTIHGIIGENGAGKSTLMSILYGFYKADKGEIWINGKKTEIPDSQAAIAAGIGMVFQHFKLVENFTVLENIILGAEDGGLLKPSLAKARRTLAELAAEYELNVDPDAVIEEIGVGMQQRVEILKALYRQAEILILDEPTGVLTPAEADQLFRILHRLKDEGKTIILITHKLREIMEATDTVSVMRRGEMTATVKTAETSPEHLAELMVGRKVLLRVDKVPAKPGKPILEIENLRVTDEKGVERVKGIDLTVRAGEILGIAGVAGNGQSELLEVLGGMRPGSGAIRLNGAPLPLSGPGSDARARRTAHVAHVPEDRQREGLIMDFHAWENVAFGYHHDPAYQSGIFMNNAALRADTERKIEKFDVRPADGWLAAKNFSGGNQQKIVVAREIERNPDLLLVGQPTRGVDIGAIEFIHKQIVALRDQGKAVLLVSVELEEIFGLADRIAVMFDGHIMGERLPDETDEKELGLLMAGVNGEAA

SEQ ID NO: 38912 - DNA, 1638 bp, Bacillus clausii KSM-K16
  CDS (1)..(1638): transl_table=11
ttgacagcggctactatgaggcgtcacagcttgatcaataacagcggcttgctaatagccgcttgctctaaaaaagaggtgaagcaaatggccgatattttgctggaaatgaaaaacattaccaagacgttttctggtgtaaaggcattaagcaatgtcaatttgaaagtgaaacgaggcgaaatccatgcgctttgcggggaaaatggcgcaggaaagtcgacgttaatgaaagtgctaagcggtgtttacggatacggtacgtacgaaggggacattttgtttgaaggcgatgtttgccgttttaaagacttgaaacaaagcgaagagaaacgaattgtcatcattcatcaagaacttgctctcatcccagagcttagcatcgccgaaaatatctttttaggaaatgaacaaaaacaacgcggcattatcgattgggccgaaaccgcaacgaaagcgcaagaactccttaaaaaagtgaaattggcagaatcaccccagacgctgattaaacatatcggtgttggcaaacaacaactggtggaaatcgccaaagcgctcgctaaaaacgtaaaattgctcatattagatgaaccgacggcttcactaaacgaaagcgacagcgaaaacttgctcaagctgttagcggaattaaaggaacaaggcgtgacgtctattatcatttcccataagttgaatgaaattaaggcaattgctgattcggttacgatcttacgggatggcaaaacaattgaaacacttgatttgcatacggaagatgtgagcgaagaccgcatcattcgagggatggtcggcagagatttaacaaaccgctatccagaagggcaaagtgagatcggcgatatcgtgttttcaatcgaaaattggaatgtgtttcatccagtgcaaagggatcggcaaatcatccatgatgtcaatttgcacgtgaaaaaaggcgagattgttggcattgctggcttaatgggcgctggtcgcacagaactggcgatgagtttatttggcagatcgtatggcacaaacataacgggcacgatcaaaaaagatggcaaagccatctcgatcccttctgtacgggcagcaatcgatcacggcctcgcctacgcgaccgaagaccgaaaatcctatgggctcgtgttgatgaatgatataaaagaaaacatcacactggccaacttgcctgccgtctccaaaaatcaaatcatcgatcaaatgaaagagacacaagtagcagaatcgtttatgaagaaattgcaaattaaagcgcattccattttgcaagaaacaggcaagcttagtggcggcaaccaacaaaaagttgtgttaagcaaatggattttatccgaccccgatgtattaatcttagacgaaccgacgcgtggaattgacgtcggcgcaaaatatgagatttatacgctcattcgcgagcttgctgctaaaggaaaagcaattctattgatttcttctgaactgccagaactacttggcatggccgaccgtgtttatacaatgaacaaagggcgcatcacaggagaactagaaaagaaagacctttcccaagagcttctgatgaggcgaatgacaatggaaatggaggatcaccatgaaagcatttcttaa

SEQ ID NO: 38913 - protein, 545 aa, Bacillus clausii KSM-K16
MTAATMRRHSLINNSGLLIAACSKKEVKQMADILLEMKNITKTFSGVKALSNVNLKVKRGEIHALCGENGAGKSTLMKVLSGVYGYGTYEGDILFEGDVCRFKDLKQSEEKRIVIIHQELALIPELSIAENIFLGNEQKQRGIIDWAETATKAQELLKKVKLAESPQTLIKHIGVGKQQLVEIAKALAKNVKLLILDEPTASLNESDSENLLKLLAELKEQGVTSIIISHKLNEIKAIADSVTILRDGKTIETLDLHTEDVSEDRIIRGMVGRDLTNRYPEGQSEIGDIVFSIENWNVFHPVQRDRQIIHDVNLHVKKGEIVGIAGLMGAGRTELAMSLFGRSYGTNITGTIKKDGKAISIPSVRAAIDHGLAYATEDRKSYGLVLMNDIKENITLANLPAVSKNQIIDQMKETQVAESFMKKLQIKAHSILQETGKLSGGNQQKVVLSKWILSDPDVLILDEPTRGIDVGAKYEIYTLIRELAAKGKAILLISSELPELLGMADRVYTMNKGRITGELEKKDLSQELLMRRMTMEMEDHHESIS

SEQ ID NO: 38914 - DNA, 1500 bp, Bacillus clausii KSM-K16
  CDS (1)..(1500): transl_table=11
atgattgttgaaatgagccagataagcaagtcatttagtggaaaccaagtattgaaaaatgtgtctttcacgcttgaaaaaggagaaattcacgcgttaatgggcgaaaatggtgctggtaagtctacccttatgaaaattttaacgggcatttatccaagggatgaaggggttgtccgtgtgaaagggaaggaggttgcctacacgcatccaaaagatgcggaaaaagacggaattgctgtcattcatcaagaactcaatattttgccagagctgtcagttgcagagaatttgtttcttggcaatgagtacaccgttggaaaaacgggttggcttaaaaccaaaaagatgaacgaatatgctgaacaacagctggccgagcttggtcttaaagtaaaagcttcggaccgggcaggtgctttatcagtcgggaagcagcaattgattgaaattgccaaagcccttatgacaaatgcagacattattattatggacgagccaacagcagcgctaacagaccgggagattgatacattgtttactgttattcgtggcttgcaggagaaaggcgtgactttcgtttatatatcgcaccgaatggaagaaatcttctccttgtgccaacgtattacagtccttcgtgatggaaactatgtgagcacgaaagtcattgccgagacgagttttgatgagatcgtcaaattaatggtcggtcgggagcttggaggtcgctatcctgatcatgatttagaaccaggtgcggtaaaactcgccgttaaaaatgtgagtagaaaaaatgaatttgaaagcgttacctttgaggtgcgggaaggtgaaatctttggtattgctggtttgatgggggcggggcgctcagaagtggtggaaagcatttttggctatcggcatttgcatagtggcacgattgaaattgatcaaaaaccagttgtatttaaacgaccggttgatgcaattgagaatggtattgcctttgtgccagaagaccgaaaaacaaaaggacttatcgttaatttttcagttcgggacaatctctccataacgaacttagcaactgtttcttcgggaaacatgatgtcttctacaaaagaacaggctctttatcaagaacttgtaaagaagttaggtgtccgtacctctggaccacaccaaaaagcgaaatcactgagtggaggaaaccagcaaaaagtggttatcgctaaatggcttggtatgaagccgaaagtgctcattttggatgaaccaactcggggcgttgatgtaggtgcgaaaaaagagatctatacaattatgaatgaactggccaagcaaggtgtggcaattataatggtttcttcagaactgccggaaattatcggcatgagcacacgcgttgccgtgatgtttgaaggcaaattaatgaaagtacttgaccgcaatgagttatcagaagaaacgattatgcactatgcgacgggaggagacaaacatgttcaccaataa

SEQ ID NO: 38915 - protein, 499 aa, Bacillus clausii KSM-K16
MIVEMSQISKSFSGNQVLKNVSFTLEKGEIHALMGENGAGKSTLMKILTGIYPRDEGVVRVKGKEVAYTHPKDAEKDGIAVIHQELNILPELSVAENLFLGNEYTVGKTGWLKTKKMNEYAEQQLAELGLKVKASDRAGALSVGKQQLIEIAKALMTNADIIIMDEPTAALTDREIDTLFTVIRGLQEKGVTFVYISHRMEEIFSLCQRITVLRDGNYVSTKVIAETSFDEIVKLMVGRELGGRYPDHDLEPGAVKLAVKNVSRKNEFESVTFEVREGEIFGIAGLMGAGRSEVVESIFGYRHLHSGTIEIDQKPVVFKRPVDAIENGIAFVPEDRKTKGLIVNFSVRDNLSITNLATVSSGNMMSSTKEQALYQELVKKLGVRTSGPHQKAKSLSGGNQQKVVIAKWLGMKPKVLILDEPTRGVDVGAKKEIYTIMNELAKQGVAIIMVSSELPEIIGMSTRVAVMFEGKLMKVLDRNELSEETIMHYATGGDKHVHQ

SEQ ID NO: 38916 - DNA, 1527 bp, Thermococcus kodakarensis KOD1
  CDS (1)..(1527): transl_table=11
atggaagaaaaaacgccgatacttgagatgagggacatcgtcaaggtttatcccgacggcactaaagcccttcacggggttaccgttcaggtttatgagggcgagatacttggtctcctcggtgagaacggtgctggaaaaacgactcttatgaagatcctctttggaatgctcaaaccaacaaatggtaaaatctttctcagggggaaagaggttcggtttaaaagccccgccgacgccatagcgaacggtatcggcatggttcaccagcatttcacgctcgttgatgtttttacggccctagagaacattatcctaggtatggagggtcacggcttattctccaagatagacctagaaaaagcgcgtggagagatcaaggccctcatggacgagctgaactttcaggtccccctcgatgtcccagtggagaacctccccgtcggcgttcagcagagggtcgagatactgaagatgctctaccgaaacgtggacatactgatcctcgacgagcccacggctgttctaacgccaatagaggtcaaggagctcttcgctgttctaaggaagctaaaggcccagggcaagactataatcttcatcagccacaagctcaatgaggtcatggagataacggaccgcgtcacagttataagaaagggcaaggtgatcgggactgttaagacgagcgaggcaactcctcagcttctagcgagaatgatggtcggcagggacgtagtccttagaatacaaaagcctccaaaggagcctggaaacacggttcttaaagttgagaacctgtgggtcaagggcgatcgcggagaggaagccgtaaggggagtttcctttgaggtcagagcgggggagatatttggaatagcgggtgttgaaggcaacggtcagagcgaactgatagaggccatatctggccttaggagagtcgaaaagggtaggatatacctcaatggagtcgacataaccggcaaaagtcccagggatctctacgacatgggttttgcacacataccggaggatagaacccacatggggctcgtaatcgagatgagcgtaatggagaactcgattctcggaatgcactggagaaaggagttctcacgtggctttgggcttatagactggggcagggtcaagaaacacgctagtgagcttatagaggagtttgagataagtgcccctggtgtgaatgcaccagcgaagagcttaagcggtggaaaccagcagaaactcatcgttgccagagaagtcagcaaaaagccagagtttataatcgcggcacagcctacaagaggcgttgatgtggcttcaaccgagtacatcaggaactacctcgtgaagctcagaaacgagaacaaggcggttctcctcgtctcggctgatctcgacgaggttctccagctgagcgacaggatggcaatcatgtacgaggggcaatttatgggggttgttaagcccgaggaagttaccgaggagcagatcggccttatgatgggaggtgtgaaagcatga

SEQ ID NO: 38917 - protein, 508 aa, Thermococcus kodakarensis KOD1
MEEKTPILEMRDIVKVYPDGTKALHGVTVQVYEGEILGLLGENGAGKTTLMKILFGMLKPTNGKIFLRGKEVRFKSPADAIANGIGMVHQHFTLVDVFTALENIILGMEGHGLFSKIDLEKARGEIKALMDELNFQVPLDVPVENLPVGVQQRVEILKMLYRNVDILILDEPTAVLTPIEVKELFAVLRKLKAQGKTIIFISHKLNEVMEITDRVTVIRKGKVIGTVKTSEATPQLLARMMVGRDVVLRIQKPPKEPGNTVLKVENLWVKGDRGEEAVRGVSFEVRAGEIFGIAGVEGNGQSELIEAISGLRRVEKGRIYLNGVDITGKSPRDLYDMGFAHIPEDRTHMGLVIEMSVMENSILGMHWRKEFSRGFGLIDWGRVKKHASELIEEFEISAPGVNAPAKSLSGGNQQKLIVAREVSKKPEFIIAAQPTRGVDVASTEYIRNYLVKLRNENKAVLLVSADLDEVLQLSDRMAIMYEGQFMGVVKPEEVTEEQIGLMMGGVKA

SEQ ID NO: 38918 - DNA, 1506 bp, Gluconobacter oxydans 621H
  CDS (1)..(1506): transl_table=11
atgacagttcttcagattgaaggcgtccggaagacctatcctggcgtggtggcgctcgatcatgtcgatctgacgctggagcccgggaagatccatattcttgcaggggagaacggcgccggcaaatccacgctcatcaagacgctgaccgggctggtcgtgccggatgagggaaccgtcttgatcgaaggacaggatgcgctgcatgaccggacactgttcgagaaggtcgcctatgtcccgcaggagctgaacctgttcgggccgatgaccgtagccgagaacatgttcatgccgttcaaccgttccgggttcgggcatctgacggtgtcgcgcggggctatggagaaggcggcggcggaactgatcgagcggttcggcattcatgcgaagccggggcagctcgtgaaccgcatcagcgtaccggatcagcagctccttcagattgcgcgcgcggcatgccgtgaagaattcaaggttctgatcctggacgagccgacctcgtcactgacagccaatgagacggagcatctgttccgcatcattcaccggctgcgcgacgagggctgcgcgatcgtgttcgtatcgcacaagatggaagaaatctttgcgctcggagacacggtgacggtgctgcgcaatggtcgcagcgtgggcacctatccgatggcggagatgacggaggggcacctgatccggctgatgtcgggcagttcggtctcgcttgaggagaagttccagccacgcatggctgcgtctgaaactgacgtcatattgagcgttaaagatatgtccgggccggggttctcggatgcgtcttttgtcctgcggcgtggagaaatcctgggctttgctggacttgtgggcgcgggacgctcggagctgatgcagacgatcttcggatatctgcgggcaacaggagggcacgccttcctcgaaggcgaggaaatcccgaaaggccgtaccgatcgggccgtggctctgggcatggtttacctgtccgaggagcgcaagcatcacggcattttcccgcttctgagtgtgcgggaaaatatcagtctctcggttctggatcgcatgaagtgcggcgggatcatttccccggcgcgtgagaatgaggtcgtggccgaaacgatccgccagttcgacgtgcgcacgtcctcggctggcaagaagatcgcacatctgtctggcggaaaccagcagaaggcaatcatcggccgggcgatggcgcggcggccgcgtgtgctgattttcgacgagccgaccaagggtatcgatatcggcacgaagttccagatctaccgcatcatgcagcagctcgcggaagagggcgtggggatcattctcgtctcgtccgaaatgaccgagctccagcgctgcgcttcgcggatcatcaccatgtattccggccggatcacggggtcgttcgatcaggccactactgacgtcaacacacttgtcggcgcgatcatcggcgccccggagaaccgtcatgtcgcttga

SEQ ID NO: 38919 - protein, 501 aa, Gluconobacter oxydans 621H
MTVLQIEGVRKTYPGVVALDHVDLTLEPGKIHILAGENGAGKSTLIKTLTGLVVPDEGTVLIEGQDALHDRTLFEKVAYVPQELNLFGPMTVAENMFMPFNRSGFGHLTVSRGAMEKAAAELIERFGIHAKPGQLVNRISVPDQQLLQIARAACREEFKVLILDEPTSSLTANETEHLFRIIHRLRDEGCAIVFVSHKMEEIFALGDTVTVLRNGRSVGTYPMAEMTEGHLIRLMSGSSVSLEEKFQPRMAASETDVILSVKDMSGPGFSDASFVLRRGEILGFAGLVGAGRSELMQTIFGYLRATGGHAFLEGEEIPKGRTDRAVALGMVYLSEERKHHGIFPLLSVRENISLSVLDRMKCGGIISPARENEVVAETIRQFDVRTSSAGKKIAHLSGGNQQKAIIGRAMARRPRVLIFDEPTKGIDIGTKFQIYRIMQQLAEEGVGIILVSSEMTELQRCASRIITMYSGRITGSFDQATTDVNTLVGAIIGAPENRHVA

SEQ ID NO: 38920 - DNA, 1479 bp, Lactobacillus acidophilus NCFM
  CDS (1)..(1479): transl_table=11
atgaaaattgaattgaatgatattaaaaaaaattttggtactaataaagtattaagaggtgtggattttaaagttaattcaggagaagttcatgctttaatgggagaaaatggtgctggaaaatcaactttaatgaatattttaacaggtctattaaaaaaagatgctggttcaattaaagttgacggacaagaaacaacatatgcgaatgcactggacgctgaacatcatggtatcagttttattcatcaagaaatgaataatttcccagaaatgagcgttgtagataacatttttttaaataaagaaattaaaaataaattcggcttgatgaatcaaaaattaatgaagaagaaggcaaaagcatatttagataaattaggttcggatatagatgtagatatgaagattggcaacttgacagtgggacaacaacaaatgatcgagattgctaaatctttaatgacaaatgcaaaaataataattatggatgaaccaacagcagcattgactgaaaatgaaacagatattttgtttaaaactattcgtgaattaaaaaaacaaaatgtaggatttatatatatttcacatagaatggaagaattatgggaaatatgtgatcgagtaacagttatgcgagatggtatatctatcaatacgtataatacaaaagacgtaaaagaagataaaattgttcatgatatggttggtagagatataggtgattactatccagaaagaaaaccaaaattaggccctgtagccttaaaagctgaaaatttgtcaggggaaaaattccataatatctcttttgaagttcatgagggtgaaattcttggattttctggcttgatgggcgctggtcgtacagaaacaatgagagctttgtttggaatagataaacttactagcggaaaaatttatcttgaaggaaaagaggtaaagctaaatagtcctagtgattctattaaacatggtattggttttttaactgaagatagaaaaaatgagggattagtattagatcaatctttagaagataatattgctttaccaagtattgatggttttagaaaacatggaattattgatcaaaaagcagaagataaatttgctgagatgctgatgaaacgtttaactgtaaaagcacaaagtgcagatgtttctgcaagaagtttatcaggaggtaatcaacaaaaagttgttttagctaaatgggtaggaagcggatcaaaagttttaattttggatgaaccaactcgaggtgtagatgttggtgctaaaaaagaaatttatgaattgatgaatcaattaactgacagacatgtagcaattattatggtttcaagtgatttgcctgaagtgttaagtatgagtgacaggattgaagttctatatgaaggaaaacagatgggagttgttgatgcaaaaggtgccactcaggagcaagtaatgaaactagctacgggaggaaagtaa

SEQ ID NO: 38921 - protein, 492 aa, Lactobacillus acidophilus NCFM
MKIELNDIKKNFGTNKVLRGVDFKVNSGEVHALMGENGAGKSTLMNILTGLLKKDAGSIKVDGQETTYANALDAEHHGISFIHQEMNNFPEMSVVDNIFLNKEIKNKFGLMNQKLMKKKAKAYLDKLGSDIDVDMKIGNLTVGQQQMIEIAKSLMTNAKIIIMDEPTAALTENETDILFKTIRELKKQNVGFIYISHRMEELWEICDRVTVMRDGISINTYNTKDVKEDKIVHDMVGRDIGDYYPERKPKLGPVALKAENLSGEKFHNISFEVHEGEILGFSGLMGAGRTETMRALFGIDKLTSGKIYLEGKEVKLNSPSDSIKHGIGFLTEDRKNEGLVLDQSLEDNIALPSIDGFRKHGIIDQKAEDKFAEMLMKRLTVKAQSADVSARSLSGGNQQKVVLAKWVGSGSKVLILDEPTRGVDVGAKKEIYELMNQLTDRHVAIIMVSSDLPEVLSMSDRIEVLYEGKQMGVVDAKGATQEQVMKLATGGK

SEQ ID NO: 38922 - DNA, 1515 bp, Vibrio fischeri ES114
  CDS (1)..(1515): transl_table=11
atgactcaagctatcttagaattaaacggcattgagaaagccttccccggagtgaaagctctggatggtgcttgtcttaatgtctatcccggcaaagtcatggccctgatgggtgaaaatggcgcgggtaaatcaaccttaatgaagtcactaacgggcatctacgcaatggatgctggcgaaatccgctatgaaggcaaagcggttaactttaatggtcctaaacactctcaagaatctggtattagtattattcaccaagagttgaacctaattcctgaattgaccattgcagaaaacatcttcttaggccgtgaaaaaaccaatgcgtttggcgggatcaaatggtctgaaatgtacaaagatgctgatgccctactcaaacgtttgaatgtaaaacaccactctcgccaactattaggtgaactgagtttaggtgaacaacaaatggttgaaattgccaaagctctatcattcaaatccaaagttatcatcatggatgaaccgacagatgcgttaacggataccgaaaccgaatcgctatttaaagtaattaacgaactacgtgatgaaggttgtggcattgtttatatctcgcaccgtctaaaagagatcttcgagatctgcgatgacattacagtactgcgtgatggtaaattcatcggtgaacgtgtcgttgcggatatcgatgaagacacactaattgaaatgatggtaggccgtcgtcttgatgagcaataccctcgcatcgatgttcaacatggtgaaaaatccctagagctattcgatgtatcaggtcctggtgttcataatgttagcttttcattagaccgtggggaaatccttgggatctcaggtttaatgggcgcaggccgtactgaattgatgaaaatcatctacggtgcactgccaatgacttgtggtgctatcaagctaaacaacaaaatgattaaccctatttcaccacgtgatggattagctaatggcatcgcctacatctcagaagaccgtaaaggtgatggtctggttcttggattatcggttaaagagaacatgtcgatttgttctttagatcaattatcgaaaggcattcaattagatcatcatgcggaagtcaccgcggttgaagactttattcgtttattcaacattaagacccctactcgtgatcaaatcattggtaatttatctggtggtaatcaacaaaaagtagccattgctaaaggattaatgactcgtccaaaagtattgattttagatgaaccaacacgtggcgttgatgttggtgcgaaaaaagagatctaccaattaattaaccaatttaaagcggaaggcatgagcatcattttagtctcatctgaaatgcctgaagttctaggaatgagtgaccgcatcctagttatgcatgaaggccgtattagtggcgaattcatggcaaaagatgccgaccaagaaaaattattggcttgtgcagtaggtaaaactgttgagcaaaatgtagaggtaacagcatga

SEQ ID NO: 38923 - protein, 504 aa, Vibrio fischeri ES114
MTQAILELNGIEKAFPGVKALDGACLNVYPGKVMALMGENGAGKSTLMKSLTGIYAMDAGEIRYEGKAVNFNGPKHSQESGISIIHQELNLIPELTIAENIFLGREKTNAFGGIKWSEMYKDADALLKRLNVKHHSRQLLGELSLGEQQMVEIAKALSFKSKVIIMDEPTDALTDTETESLFKVINELRDEGCGIVYISHRLKEIFEICDDITVLRDGKFIGERVVADIDEDTLIEMMVGRRLDEQYPRIDVQHGEKSLELFDVSGPGVHNVSFSLDRGEILGISGLMGAGRTELMKIIYGALPMTCGAIKLNNKMINPISPRDGLANGIAYISEDRKGDGLVLGLSVKENMSICSLDQLSKGIQLDHHAEVTAVEDFIRLFNIKTPTRDQIIGNLSGGNQQKVAIAKGLMTRPKVLILDEPTRGVDVGAKKEIYQLINQFKAEGMSIILVSSEMPEVLGMSDRILVMHEGRISGEFMAKDADQEKLLACAVGKTVEQNVEVTA

SEQ ID NO: 38924 - DNA, 1551 bp, Salmonella enterica subsp. enterica serovar Choleraesuis str
  CDS (1)..(1551): transl_table=11
atgcgaacgtcattctttgcgctggcgtcactttctgaggccgctatggacgcattactgcaactcaaagggatcgataaagcgttccccggcgtgaaggctctctccggcgccgcgttaaacgtttatcctggccgcgttatggcgctggtgggggaaaacggcgccggaaaatccaccatgatgaaagtattaaccggcatctatacgcgagatgcgggatcgttgttatggctgggtaaagagaccacctttaacgggcctaaatcgtctcaggaagccgggatcggcattattcatcaggaactgaacctgattccgcagttgaccattgcggaaaatatcttcctgggccgtgagtttgtgaatcgctttggcaaaatcgactggaaaaagatgtatgccgaagccgaccagctcttagccaaactcaatctgcgctttaagagcgataagctggtgggcgaactctctatcggcgatcagcaaatggtggaaatcgccaaagtgctgagcttcgaatccaaagtcatcattatggatgaaccgaccgatgcgctgaccgacactgaaaccgactctctgttccgcgttatccgcgaattaaaatcgcaggggcgcggcattgtctatatctcccaccgtatgaaagagatcttcgaaatttgcgatgacgtgacggtcttccgcgatgggcaatttatcgccgagcgtgaagtggccacgttgaccgaagattctcttatcgaaatgatggtgggacgtaagctggaagatcagtacccgcatctggataacgcgccgggtgagattcgcctcaaggtcgataatctgtgcggaccgggcgtgaatgatgtctcttttgtgctgcgaaaaggcgagattcttggcatctccggcctgatgggcgccggtcgcaccgagctgatgaaagtattgtacggcgcgatgccgcgaaccagcggttacgtgacgcttgatggacacgaagtggtgacgcgttctccgcaggacgggctggccaatggcatcgtttatatctctgaagaccgtaagcgcgatggactggtgctcggcatgtcagttaaagagaatatgtcgctgacggcgctggactatttcagccgcgctggcggaagcctgaaacacaaagatgagcaacaggcggtgggggattttatccgtctgttcaacgtcaagacaccgtcaatggaacaggcgataggcctgctttctggcggtaatcagcaaaaagtggcgattgcccgcgggttgatgacgcgcccgaaagtgctcattctcgacgagccgacccgcggtgtggacgtcggcgccaagaaagagatttatcagcttatcaaccagtttaaggccgacggcctgagcatcattctggtctcatctgagatgccagaagtattaggcatgagcgatcgcatcatcgtcatgcatgaagggcatctcagcggtgaatttactcgcgagcaggccacccaggaagtgttaatggctgccgcagtgggcaagcttaatcgcgtgaatcaggagtaa

SEQ ID NO: 38925 - protein, 516 aa, Salmonella enterica subsp. enterica serovar Choleraesuis str
MRTSFFALASLSEAAMDALLQLKGIDKAFPGVKALSGAALNVYPGRVMALVGENGAGKSTMMKVLTGIYTRDAGSLLWLGKETTFNGPKSSQEAGIGIIHQELNLIPQLTIAENIFLGREFVNRFGKIDWKKMYAEADQLLAKLNLRFKSDKLVGELSIGDQQMVEIAKVLSFESKVIIMDEPTDALTDTETDSLFRVIRELKSQGRGIVYISHRMKEIFEICDDVTVFRDGQFIAEREVATLTEDSLIEMMVGRKLEDQYPHLDNAPGEIRLKVDNLCGPGVNDVSFVLRKGEILGISGLMGAGRTELMKVLYGAMPRTSGYVTLDGHEVVTRSPQDGLANGIVYISEDRKRDGLVLGMSVKENMSLTALDYFSRAGGSLKHKDEQQAVGDFIRLFNVKTPSMEQAIGLLSGGNQQKVAIARGLMTRPKVLILDEPTRGVDVGAKKEIYQLINQFKADGLSIILVSSEMPEVLGMSDRIIVMHEGHLSGEFTREQATQEVLMAAAVGKLNRVNQE

SEQ ID NO: 38926 - DNA, 1536 bp, Brucella abortus biovar 1 str. 9-941
  CDS (1)..(1536): transl_table=11
atgactgcgccgcgtcaggctggcgagcctgctcttctggaagccgtttctctgtccaaatcctttgggccggtgcaggttctggaaaatataaatctgcgcgtcaacggtggtgaaattcacgcgatcattggtgaaaatggcgcgggtaaatccacgctcatgaaaattctggccggtaacgaacgccagacgggcggagaaatccgtattgatggcaagccggtttccttttccagcccggcagcagcagaggcacgaggcatcgtgctggtgcatcaggaaatcctgcttgcaccagacctgacagttgcgcagaacatatatctcggtcgtgaacttgggggtaagcggggacgcggactactggtcgatgatcggtcgatgcgcgagggcgcgcgcagggctatccgtgatctcggcgctgaaatagacccggatgccgtggttgcgacgctatcaattgcccaacgccagcttgtgcagattgcacgggtgctgttggtgccgcatcgcctcgtgatcttcgatgagccgacggcttcgctcacgcctttcgagacggaagcccttctgaaagtcatccgtgatattcgagccaagggcgttgcggttctctatatttcgcatcggctgccggaagtgaaggagatagccgaccgtgtgactattctgcgtgacggcaagctggtttccagccatttggcatcctctttgcagccggctgatatggcgcggctgatggttgggcgcgatgtcgccaagctctatcccgatcgcgcaagccggtatgacagcgccgctattctggaagtagaaaacttcagtgtgccgggcttcgtgcgcaatgcaagtttttgtctgaaccgtggcgagatacttggctttgccggtctggttggtgcgggccgaacggagcttatggaaggaatcgtcggtttgcgcccagccaagggagaattgcgccatgatggtaggctggtgcacttcaacaatgcacatgacagccagcaggcgggcatcgtttatctgagcgaagaccgtaaaggcaaagggctgctcctgtcgaaagatctcggcaccaatctcaccctggcttcacttgacaggttcgtgcgcggcctccagatcgaccgcaaccgcgaacgtgtggcgttggatgaggcgatccgtgcattcgacatacgcacgggccgtaaggatatcctggccggtcagctttcaggcggcaaccagcagaaactgcttcttgccaaaatgatgatgcttaccccgtccatcatcatcatagacgagccgacgcgaggcatcgatgtcggcacgaaggagcagatttatcagttcattgccaacctggcggatgaaggaaaatccatcattgttgtatcgtccgaaatgccggaactgatcggtatttgcgaccgtatcgtggtgatgcgggaggggcaaattgccggggaggtgagcggcgcaggcatgacggaacatgaaattgtggcgctcgccaccggcgttggcgccaacgaggctgcatga

SEQ ID NO: 38927 - protein, 511 aa, Brucella abortus biovar 1 str. 9-941
MTAPRQAGEPALLEAVSLSKSFGPVQVLENINLRVNGGEIHAIIGENGAGKSTLMKILAGNERQTGGEIRIDGKPVSFSSPAAAEARGIVLVHQEILLAPDLTVAQNIYLGRELGGKRGRGLLVDDRSMREGARRAIRDLGAEIDPDAVVATLSIAQRQLVQIARVLLVPHRLVIFDEPTASLTPFETEALLKVIRDIRAKGVAVLYISHRLPEVKEIADRVTILRDGKLVSSHLASSLQPADMARLMVGRDVAKLYPDRASRYDSAAILEVENFSVPGFVRNASFCLNRGEILGFAGLVGAGRTELMEGIVGLRPAKGELRHDGRLVHFNNAHDSQQAGIVYLSEDRKGKGLLLSKDLGTNLTLASLDRFVRGLQIDRNRERVALDEAIRAFDIRTGRKDILAGQLSGGNQQKLLLAKMMMLTPSIIIIDEPTRGIDVGTKEQIYQFIANLADEGKSIIVVSSEMPELIGICDRIVVMREGQIAGEVSGAGMTEHEIVALATGVGANEAA

SEQ ID NO: 38928 - DNA, 1479 bp, Brucella abortus biovar 1 str. 9-941
  CDS (1)..(1479): transl_table=11
ttggaatttctgctcgatgtggaggggctcaggaagtcctttggcggtgttgctgccttgcgggatgggcggctgcaattgcgtaccggctcggtacatgcgctgtgcggcggcaatggcgcgggcaaatccacgtttttgaaaatcctgatgggcattcatgcccgcgatggtggacatatccgccggcgtggaaaagaggttacgtattccagccccgccgaagcgttgcaggcgggtatcgcgatcatcgaacaggagctaagccccgttccccatatgaccgtggcggagaatatctatttgggcagggagccgcttcgccgtttcggtggcatcgatttcaagacgatgaacctcaatgcccagaagcttttggaccagcttgagttcaagattcgcgccaaccagttcatgatgaacctgcctgtcgcgcaggtgcagcttgtggaaatagccaaggcgctcagtcacgacgctgaagtcattttcatggacgaaccgacatcggccattggtgaaaaagaagcacagcagctttttgcagcgatagagcgtttgaaagcgagcggaaaaggcattgtctatgtctcccatcgcctgtcggaaatttttcagattgccgatagctataccgtgtttcgcgacggcagttatatcgatagcggcggtctcggtggcatcacccgtgcggaactgatccatatgatcgtcgggcgggaactgggtgaggaatatatcaagacgaatgcgcctacggaaataccgggcgtcgaggtttccggcctcagcgcgcccggcaagataaccgacatttcctttaccgcgcataagggcgagatttttggcatttacgggttgatggggtcaggccgctcggaaatattcaactgtcttttcggattggagaaagcctcccaaggaacaattcggcttgaaggcgaacccgtcaccgtccggcgccccgcggacgccatggctctggggctggcttttgtgacggaagatcgcaagctgaccggcctcaatctcggcgacagcgttcgcaacaatatatgccttgccagccttcccgagatgagtccgcatttttcaatgaatcggcgtgcggaatcggccgccagcagggagatgatcgagcgtttcaggatcaaggttgcgcacgacacgatggccgtttcgggcctttccggcggcaaccagcagaaggtcgtgctcggaaaatggttcctgcgaaagccatgcgttctgctgctcgatgaacccactcgcggtgtcgatgtgggtgcaaaacaggaaatttatcgcatcatttgcgaatttgccgcccaaggcgggaccgtcgtcatggtttcttccgagattgatgaagtcctcggcatgtctgaccgcatcatggtcatgcgtggcggacaatcggtcggcatctaccgcagggcggaaacggacgcgcagtcattggtgcatctttcgacatga

SEQ ID NO: 38929 - protein, 492 aa, Brucella abortus biovar 1 str. 9-941
MEFLLDVEGLRKSFGGVAALRDGRLQLRTGSVHALCGGNGAGKSTFLKILMGIHARDGGHIRRRGKEVTYSSPAEALQAGIAIIEQELSPVPHMTVAENIYLGREPLRRFGGIDFKTMNLNAQKLLDQLEFKIRANQFMMNLPVAQVQLVEIAKALSHDAEVIFMDEPTSAIGEKEAQQLFAAIERLKASGKGIVYVSHRLSEIFQIADSYTVFRDGSYIDSGGLGGITRAELIHMIVGRELGEEYIKTNAPTEIPGVEVSGLSAPGKITDISFTAHKGEIFGIYGLMGSGRSEIFNCLFGLEKASQGTIRLEGEPVTVRRPADAMALGLAFVTEDRKLTGLNLGDSVRNNICLASLPEMSPHFSMNRRAESAASREMIERFRIKVAHDTMAVSGLSGGNQQKVVLGKWFLRKPCVLLLDEPTRGVDVGAKQEIYRIICEFAAQGGTVVMVSSEIDEVLGMSDRIMVMRGGQSVGIYRRAETDAQSLVHLST

SEQ ID NO: 38930 - DNA, 1533 bp, Brucella abortus biovar 1 str. 9-941
  CDS (1)..(1533): transl_table=11
atgcaggtttcatccaggcctgtcgtggacgcgccggctccgctgctcgaagcgcgcaacgtgttcaaggggtttttcggcaacccggtgctgaagggggtcagcatcgccttgcggcccggccgcgtgcacgcactgcttggagaaaacggtgcgggcaagtccacactcatcaatctgctgtccggcgccttgccgccggacagcgggaatattgtgctggaaggtgcagctctttccagattgaacccggcgcaagcgcggaaagcgggcattgctgtcattcagcaggaacttagtctgacgccggaattgtcgattgcagaaaatatcgggcttggcgcctatccgcgccgtttcggcctgatcgactacaaggcccttcacggggaagccttggccgtttgtaaacgtgtcggcctgaccgaaccgctcgaaactccggtcggcacactgtcgctcgggcgcaggcagatggtcgagattgccaaggcgcttttccgcaaaccgcgggtgctcatccttgatgagccgacatcatcgctatctgcgcatgaggcgggcgtattatcatcgctggttctcaaattgcgcgatgagggcgtcgcacttctctatatctctcacaggctcaacgaaattcgctcgctctgttctcatgtgaccgtgctcaaagacggtgtcgtgaccgcagatcagtcattatcaaattcggacccggaggagctagttcgcctgatggtcgggcgtgatactggcgaccttttccccgcttggcgaaccagtgccaccggcgaaaaacggattcatattcgcggcatgagcgcgggtatggtgcagaatgtcgatatggatgccaatgcgggcgagatcatcggtatcggcggtctggttgggcaaggacaggaagattttctgctgggtctctatggtgcgctgccgaccgcagcccgtgaagcgatagtgtgcggaaataacggcctgttcaaatcggttggcgcggcaaacgcggctggccttgcctatgtcccggcggatcggaagcgggaagggctcgtgctgccgcattccattgcgtcaaacctgctcctgccgtcacttgatcgatatacgcggcacggtttgcgcaacacggcaaacgagcagcgtgtcgttgccaaacttgccgaacggctgacgatcaggggagatactgcgcgcccggttcaggcgctgtccggcggcaatcagcaaaaggttgcgcttgccaaatggcttccgctggaacctacaatcctgttgctgaacgatccaacccgcggcgtcgatatcgaaaccaagcgtgaaatctacctgatgctgcgccggtttgccgatgaaggaaagctcgttgtcctgctgagttccgacacgccggagcttgtgcatttgtgtgaccgcgtcatggttttccgcgagggccgcatggtcgcgaccctgaaacacggggatctgtcggaagaggcaattgtaggggctgccatgggcctgaaatcgtcgagaaaggcagcctga

SEQ ID NO: 38931 - protein, 510 aa, Brucella abortus biovar 1 str. 9-941
MQVSSRPVVDAPAPLLEARNVFKGFFGNPVLKGVSIALRPGRVHALLGENGAGKSTLINLLSGALPPDSGNIVLEGAALSRLNPAQARKAGIAVIQQELSLTPELSIAENIGLGAYPRRFGLIDYKALHGEALAVCKRVGLTEPLETPVGTLSLGRRQMVEIAKALFRKPRVLILDEPTSSLSAHEAGVLSSLVLKLRDEGVALLYISHRLNEIRSLCSHVTVLKDGVVTADQSLSNSDPEELVRLMVGRDTGDLFPAWRTSATGEKRIHIRGMSAGMVQNVDMDANAGEIIGIGGLVGQGQEDFLLGLYGALPTAAREAIVCGNNGLFKSVGAANAAGLAYVPADRKREGLVLPHSIASNLLLPSLDRYTRHGLRNTANEQRVVAKLAERLTIRGDTARPVQALSGGNQQKVALAKWLPLEPTILLLNDPTRGVDIETKREIYLMLRRFADEGKLVVLLSSDTPELVHLCDRVMVFREGRMVATLKHGDLSEEAIVGAAMGLKSSRKAA

SEQ ID NO: 38932 - DNA, 1590 bp, Brucella abortus biovar 1 str. 9-941
  CDS (1)..(1590): transl_table=11
atgaacctagccaatcctgtctcgctggacgagcgtggggcactgccggatactttcggaaagcctcttcttgaaatgcgtgggatcaacaagtccttcggtgtcgtgaaggcgctgagcgatgtgaacttcaccgtcatgccgggcgaaatacatgcctttgtgggtgaaaacggcgcgggaaaatccacgctgatgaaggtgctttcgggtgtttatccccatggaagctatgaaggcgcgatctattacgacggggaagagcggcagtttcgggatattaacgattccgaggcgctcggcatcgtcatcattcatcaggaattggccctcattccgctgatgtcgattgccgagaatatttttctcgtcaatcctccggcaagccggggtgtcatcgaccgctccgccgtgcacaagcggacgcgggagctattgaaaaaggtcggtctggcggaaacgcccgatacgctcatcaccgatatcggcattggcaagcagcagcttgttgaaatcgccaaggcgctttccaagcgtgtgcggctgttgatcctcgatgaaccaacagcaagcctcaacgaaaatgacagtgcggcgcttctggcgctgctgcgcgagtttcgcgcgcagggcatcacctcgatcctcatttcgcacaagctcaatgaaatccgcgaagtggccgacaagattaccgttctgcgcgacggcaaggcggttgcgacacttgattgccatgcgggcgaagtggaggaagacgatatcatccgcaagatggtggaccgcgatctggagagccgttatcccaagcgcgatcccaagatcggcaatgtcatcttcgaggtcgataactggtcggtctatcatccgctgcatcccgatcggcattcggtcaagaacgtgtcattcaaggtgcgggcgggcgagatcgtcggcattgccggattgatgggagcggggcgcacggaattcgccatgagcctgtttggccgttcatggggcacgaatatcactggcgaggcgcgcatcaatggcaagacggtggatatttccaccgtggcgcgggcaatcaaggcgggccttgcctatgttaccgaggatcgcaagaagcttggcctggttcttggccagaatatttcgcgcaatatctcgctggcgcacttacgcggcgtgagcccgaaaggcattatcgacgatatccgggaaatgaagatcgcgaattcctatcgcgaccagatgcgtattcgctgtcacaatgtctatcaggaaaccggcacgctttcgggcggcaaccagcagaaggtggtgctgtcgaaatggcttttcactggccccgacgtgctgatcctggacgagccgacacgcggtatcgatgttggcgcgaaatatgacatttacacaatcatcaattcactggcggaaagcggcaagggcgttgtcgtcatttcttcggaaatgccggagctgatcggcatttgcgaccgcatcgtcgtcatgcatgagggcgccttcgtcggcgaagtggcaggcgaggaagcaacgcaggaaaacatcatgcgcgccatcatgcgaaacaagggaaaagggtaa

SEQ ID NO: 38933 - protein, 529 aa, Brucella abortus biovar 1 str. 9-941
MNLANPVSLDERGALPDTFGKPLLEMRGINKSFGVVKALSDVNFTVMPGEIHAFVGENGAGKSTLMKVLSGVYPHGSYEGAIYYDGEERQFRDINDSEALGIVIIHQELALIPLMSIAENIFLVNPPASRGVIDRSAVHKRTRELLKKVGLAETPDTLITDIGIGKQQLVEIAKALSKRVRLLILDEPTASLNENDSAALLALLREFRAQGITSILISHKLNEIREVADKITVLRDGKAVATLDCHAGEVEEDDIIRKMVDRDLESRYPKRDPKIGNVIFEVDNWSVYHPLHPDRHSVKNVSFKVRAGEIVGIAGLMGAGRTEFAMSLFGRSWGTNITGEARINGKTVDISTVARAIKAGLAYVTEDRKKLGLVLGQNISRNISLAHLRGVSPKGIIDDIREMKIANSYRDQMRIRCHNVYQETGTLSGGNQQKVVLSKWLFTGPDVLILDEPTRGIDVGAKYDIYTIINSLAESGKGVVVISSEMPELIGICDRIVVMHEGAFVGEVAGEEATQENIMRAIMRNKGKG

SEQ ID NO: 38934 - DNA, 1545 bp, Brucella abortus biovar 1 str. 9-941
  CDS (1)..(1545): transl_table=11
atgagcctggctgcgaaaatcgaaggcaaaaacggcgatgtcgttcttgccgcgcagaatgtggccaagtcctatggccgcatccatgcgctgaaaggcgtgaatttcgagattcgccgggggcaggtcacgacgcttttcggtgaaaacggtgcgggcaagtccacgctgatgaaagtgctttccggcgtgatccagccgactttgggcacgatcatcctcgatggcaagccggtgacgttcaattcatccaccgaagcgcgcgaccatggcatctcgatcatccatcaggaattaagcctcgcgcccaacatgaatgtgcgcgacaacatcttcatggggcgcgaaatccgcaccgccaccggcgtcgattttgccgaggaagagcggctgacgcgcgaactcatgaaggaactggaagaagatatcgatccgctgacgccggttgaggaattgcgtctcggccagcagcaggtcgttgagatcgcccgtgcgctttcggtcaattcgcgcattctcatcatggatgagccgacttcggcgctcagtgcttcggaagtcgaggttctgttcaaggtgatccgcgacctgacggcgcgcggtgtcgccatcgtctatatttcgcatcatctggaagaggcgctccagatcaccaatcatgcggtggtgctgcgcgacggcaccatgacggcctgtgcgccgcgtgaggaaatcgatctggaatggatcgtgcgcaatatggtcggtgaaaacttcgacctcggttctcctcccactggctatgaatggggcgatgtcgcgctttcggtcgaagacctgaccgttcccgaccccagcggcagtggcttctcgctggtggaccgcatgtcgctcaatgtgcgggcgggcgaaatcgtctgcatctatggtctcatgggtgcgggccgcacggaattgctggaatcggttgccggtcgcttgaaatcgagcggcgggcgtattctcctcaaagggcaggatatttccggcctcaccatcgctgagcgcatcgaaaagggccttgtgctggtgccggaagatcgccagcgcgacggtctcgtccagacgatgacggtcggcaagaacctgtcgcttgccagcattgcggaaatgaccagggggatattcacctcgcgcaagcgcgaaaagcagatcgtcgatcagtcgatcaggaatgtgcacatcaagaccgatggcggcgaggcggcaatcggttcgctttcgggcggcaatcagcagaaagtcgtaattggcaagatgctggcgaccgaaccggatgtgatcctgctcgatgagccgagccgcggcatcgacatcggcgcaaaggcggaagtgttcaagcttctggccgaaaaggcgaagcaggggctggccgtggtctacaccacctcggaagtcggcgaatgcctcagcatcgcgcaccgcatcatcgtcatgcaccgtggacgcatctccgccgaattcggatcggacgtgtccaaggaaaagatcatggccgcctcgggcgaagccatggtcggtcattaa

SEQ ID NO: 38935 - protein, 514 aa, Brucella abortus biovar 1 str. 9-941
MSLAAKIEGKNGDVVLAAQNVAKSYGRIHALKGVNFEIRRGQVTTLFGENGAGKSTLMKVLSGVIQPTLGTIILDGKPVTFNSSTEARDHGISIIHQELSLAPNMNVRDNIFMGREIRTATGVDFAEEERLTRELMKELEEDIDPLTPVEELRLGQQQVVEIARALSVNSRILIMDEPTSALSASEVEVLFKVIRDLTARGVAIVYISHHLEEALQITNHAVVLRDGTMTACAPREEIDLEWIVRNMVGENFDLGSPPTGYEWGDVALSVEDLTVPDPSGSGFSLVDRMSLNVRAGEIVCIYGLMGAGRTELLESVAGRLKSSGGRILLKGQDISGLTIAERIEKGLVLVPEDRQRDGLVQTMTVGKNLSLASIAEMTRGIFTSRKREKQIVDQSIRNVHIKTDGGEAAIGSLSGGNQQKVVIGKMLATEPDVILLDEPSRGIDIGAKAEVFKLLAEKAKQGLAVVYTTSEVGECLSIAHRIIVMHRGRISAEFGSDVSKEKIMAASGEAMVGH

SEQ ID NO: 38936 - DNA, 1536 bp, Brucella abortus biovar 1 str. 9-941
  CDS (1)..(1536): transl_table=11
atgtccgaatatcttttggaaatgcgaaacatcggtaaagagttcaacggcgtcaaggcgctggatggcatttacctgaaagtgcgcgcgggagaatgtgtcgggctgtgcggtgaaaacggggcgggcaagtccaccctgatgaaagtgctgtcgggtgtttatccccatggcacatggactggtgaaattttctgggaaggcaaagaacttaaagccagtggcattcgcgataccgaagctgcgggtattgtcatcatccatcaggaactgatgatggtgccacacctgtcggtcgcggagaatatcttccttggttgcgagccaaccacaggcggtttcattgattatgaccagatgaatgcacgggcagccgaactgctcgctcggctcaagataaacgatatcaatgtcgcattgccggtttatcattactcaggcggcaagcagcagttgatcgagattgcaaaggcaatcaacaaaaatgccaagcttctgatccttgacgagccaacctcggccctgaccgcttcagaaacccgggttctcatcgacctgatcaaggacttcaaaaagcagggcatggcttgcgtttacatctctcacaaactcgatgaagtggcggaaatctccgacacggtaacggttattcgtgatggagcgcatatcgcgacacgtccgatgtccgaactgacaacgcccgatatcatcacgatgatggtcgggcgtgagatgaagaacctcttcccgcgtgaaccccatgacattggcgaggtgatgtttgaagcccgcaatataagttgctgggatgtgaccaatcctggccgcaaggtggtcgacgatgtttcgtttgcgctaaggcgcggtgagattttgggcattgcgggccttgtgggtgccgggcgtacagaactcgtatcgagcttgtttggtgtctggccgggcgcctgtcaggggcaggtttttctggagggcaaggaaatcaaaatccgcacgccgcgcgatgcggtgcgccaaggcatttgcatggtgccggaagatcgcaaacgcgatggcatcctgccgatcatgccagttggccacaatatgacgatctccgtgcttgatcgcttttcgctacgaggcctcatcgataaagacgcggaactcgtggcgatccagcgtgagattttgagactcaaggtcaagaccgccgatccgatgcttgccattgcctcgctatctggcggcaatcagcagaaggccgtgctttcaaagatgatgctgcctgatccgaaagtgctcattcttgatgagcccacacgcggcgtcgatgtcggcgcgaaatatgaaatttacaagctgatattcgcgctcgccaggcagggcgtatcgattttgatggtttcgtcggaaatgccggaagtccttgggatcagtgatcgtgttctcgtcattggcgagggcaaattgcgcggcgatttcccgaatgaaaatcttacacaggagaaggttcttgccgctgcaattggcaagcctgcaaccaacgcggcctag

SEQ ID NO: 38937 - protein, 511 aa, Brucella abortus biovar 1 str. 9-941
MSEYLLEMRNIGKEFNGVKALDGIYLKVRAGECVGLCGENGAGKSTLMKVLSGVYPHGTWTGEIFWEGKELKASGIRDTEAAGIVIIHQELMMVPHLSVAENIFLGCEPTTGGFIDYDQMNARAAELLARLKINDINVALPVYHYSGGKQQLIEIAKAINKNAKLLILDEPTSALTASETRVLIDLIKDFKKQGMACVYISHKLDEVAEISDTVTVIRDGAHIATRPMSELTTPDIITMMVGREMKNLFPREPHDIGEVMFEARNISCWDVTNPGRKVVDDVSFALRRGEILGIAGLVGAGRTELVSSLFGVWPGACQGQVFLEGKEIKIRTPRDAVRQGICMVPEDRKRDGILPIMPVGHNMTISVLDRFSLRGLIDKDAELVAIQREILRLKVKTADPMLAIASLSGGNQQKAVLSKMMLPDPKVLILDEPTRGVDVGAKYEIYKLIFALARQGVSILMVSSEMPEVLGISDRVLVIGEGKLRGDFPNENLTQEKVLAAAIGKPATNAA

SEQ ID NO: 38938 - DNA, 1554 bp, Pseudomonas syringae pv. syringae B728a
  CDS (1)..(1554): transl_table=11
atgtcagcgtctgctcagacagctgttctttcggtcagtggcatcggcaaaacctacgcacagcccgtgctcggggacgtcgacctgacgttgatgcgcggcgaagtgctggctctgaccggggaaaacggtgccggtaaaagcaccttgtcgaaaatcatcggcgggctggtaacgcctaccaccggaaacatggaattccagggccagccttatcagcctgcaagtcgtacccaggccgaaaagctcggcattcgcatggtcatgcaggaactcaacctgctgccgaccctgaccgtggctgaaaacctgtttcttcacgacctgccccgcagggccggctggatcgaccgcaagcgcttgcgcgaaaacgcgaccgaggccatggctcaagtggggctcgacgccattgatcccgacacgctggtcggcgaattggggatcggtcatcaacagatggtcgagatcgcccgcaacctgatcggcgactgtcacgtactgattctcgacgaacccactgccatgctcacctcgcgcgaagtggaaatgctcttcgagcagatcacacggctgcaggcgcggggcgtctcgatcatctacatctcccaccggcttgaagagctggccagggtgtcccagcgcatcgccgtgctgcgcgacggcaagctggtgtgtgtcgagccgattgcccgctacaacagtgagcaactggtgaccctgatggtcggccgtgagctcggcgagcatatcgacatgggcgcccggcagattggcgaggtggcgctgtcagtcaaggggctcagtcgcgccggcaaggttcaggatgtgtccttcgacgtgcgtcgaggtgaaatcttcggtatttccggactgatcggtgccgggcgtaccgagttgttgcgtttgatttacggtgcagacgttgccgacagcggtgacatcgaagtcggaagttcgctgcaaaaagtcagcattcgctcgccagccgacgcggtggcgcagggtatcgcgctgatcacggaagaccgaaagagcgaaggcctgctgatgtcgcaatcgatcagcgccaacattgcgctgggcaacatgcattcgatttccagcgcgggcgtggtcaacagcgaagatgagctgaaactggcgcagcgccaggtggcggccatgcgcattcgcagctccagtccgggccagctggtctccgagttgtcgggtggcaatcagcagaaggtggtgatcggtcgctggctggaacgtgactgcacggtgatgctgttcgacgagccgacacggggcatcgacatcggtgccaagttcgatatctacgcgctgctggccgaattgacccgtcagggcagggcgctggtgatggtgtccagcgatctgcgcgaactgatgcttatctgtgatcgtatcggcgtgctgtctgccggtcgcctgatcgacacgttcgagcgcgatagctggacccaggaccaattgctggccgctgccttcgccggttatcagaaacgtgacgcgctgctcaatgatgcggcgcccaggaacaactcatga

SEQ ID NO: 38939 - protein, 517 aa, Pseudomonas syringae pv. syringae B728a
MSASAQTAVLSVSGIGKTYAQPVLGDVDLTLMRGEVLALTGENGAGKSTLSKIIGGLVTPTTGNMEFQGQPYQPASRTQAEKLGIRMVMQELNLLPTLTVAENLFLHDLPRRAGWIDRKRLRENATEAMAQVGLDAIDPDTLVGELGIGHQQMVEIARNLIGDCHVLILDEPTAMLTSREVEMLFEQITRLQARGVSIIYISHRLEELARVSQRIAVLRDGKLVCVEPIARYNSEQLVTLMVGRELGEHIDMGARQIGEVALSVKGLSRAGKVQDVSFDVRRGEIFGISGLIGAGRTELLRLIYGADVADSGDIEVGSSLQKVSIRSPADAVAQGIALITEDRKSEGLLMSQSISANIALGNMHSISSAGVVNSEDELKLAQRQVAAMRIRSSSPGQLVSELSGGNQQKVVIGRWLERDCTVMLFDEPTRGIDIGAKFDIYALLAELTRQGRALVMVSSDLRELMLICDRIGVLSAGRLIDTFERDSWTQDQLLAAAFAGYQKRDALLNDAAPRNNS

SEQ ID NO: 38940 - DNA, 1524 bp, Pseudomonas syringae pv. syringae B728a
  CDS (1)..(1524): transl_table=11
atgcaacaggctatcgagcaatacgccacaggcggtgccttgcgcttcaacggcatcggcaaggtcttccccggcgtcaaggcgctttcggacatcagtttcgaagcgcgccccggcagtgttcacgcattgatgggagagaacggtgccggcaaatccacgctgctgaaaatccttggcgggtcgtatcagcccaacagcggcaccttgcagatcggcgagcagagctatcagttcaagtccaccgccgagagcatcgcggcgggtgtggcggtgattcaccaggagctgcatctggtgccggaaatgaccgttgccgagaacctgctgctcgggcacatgcccaatcgcttcgggctgatcaatcgcggtgcgatgtatcgccgggccggcgagctgctcaagggtctggctgacgaaattgacccgcacacacgcttgggcgacctttcgctggggcagcggcaattggtcgagatcgccaaggccatgtcgcgcaatgctcatgtcatcgcctttgacgagcccaccagcagcctgtcggcgcgtgagatcgaccgactgatggcgatcatcgtgcgcctgcgcgacgagggccgagtgattctttacgtgtcgcatcgcatggaagaaatcttccgcgtctgtgatgcggtgacggtgttcaaggacggacgcttcgtcaagacgttcgagcaaatggccgatctcgaccatgaccgactggtgacctgcatggtcggtcgcgatatccagaacatctacaactaccgccctcgccagcatcaggggccgagcctgcgggttaccggcctgctggggccgggcctgcacgagccggtcaccttcgccgtgcagaagggcgaagtgctgggcttcttcggcctggtcggcgccgggcgtaccgagctgttccggctgctctcggggcttacccgcagctctgcaggcaccctgcaactggacggcaaaccgctgacactcaagtctccccgagatgccatcgaggctggaattctgctctgcccggaggaccgcaagaaagaaggcatcgtgccgctgtccagcgtcgcagagaacatcaacatcggtgcgcgcccccggcacgtgaacctcggttgcctgattcagggtcgctgggagcgtgacaacgcacgcagccagatcaagtcgatgaacgtcaagacgccatcgcccgagcagcagatcatgttcctctccggcggcaatcaacagaaggcgattcttggccgctggctgtcgatgcccatgaaagtcctgctgctggacgagccgactcgcgggatcgacgtcggggccaagtccgagatttacgagatcattcacaacctggccgcggacggtatcgcggtgattgtggtctccagcgatctgatggaagtgatgggcatttcagaccgcattctggtgatgagcgaaggcgcaatcaccggtgaactcaatcgcgacgaggctgacgagtcgcgactcctgcaattggctctgcctcgcacgcgcggctga

SEQ ID NO: 38941 - protein, 507 aa, Pseudomonas syringae pv. syringae B728a
MQQAIEQYATGGALRFNGIGKVFPGVKALSDISFEARPGSVHALMGENGAGKSTLLKILGGSYQPNSGTLQIGEQSYQFKSTAESIAAGVAVIHQELHLVPEMTVAENLLLGHMPNRFGLINRGAMYRRAGELLKGLADEIDPHTRLGDLSLGQRQLVEIAKAMSRNAHVIAFDEPTSSLSAREIDRLMAIIVRLRDEGRVILYVSHRMEEIFRVCDAVTVFKDGRFVKTFEQMADLDHDRLVTCMVGRDIQNIYNYRPRQHQGPSLRVTGLLGPGLHEPVTFAVQKGEVLGFFGLVGAGRTELFRLLSGLTRSSAGTLQLDGKPLTLKSPRDAIEAGILLCPEDRKKEGIVPLSSVAENINIGARPRHVNLGCLIQGRWERDNARSQIKSMNVKTPSPEQQIMFLSGGNQQKAILGRWLSMPMKVLLLDEPTRGIDVGAKSEIYEIIHNLAADGIAVIVVSSDLMEVMGISDRILVMSEGAITGELNRDEADESRLLQLALPRTRG

SEQ ID NO: 38942 - DNA, 1488 bp, Pseudomonas syringae pv. syringae B728a
  CDS (1)..(1488): transl_table=11
atggccaagccattactgctccaggctgaacacgtcaccaaggcttacgctggcatccccgccctgcgtgacgggcgtctctcgttacgagccgggagcgtgcacgccctgtgcggcggcaatggcgcgggcaagtccactttcctgagcattctgatgggcatcacccagcgcgatgcggggaccatcctgctcaacggcgagccggtgcagttcagtcgtcccggcgatgccctggcagccggcattgcgatgatcacccaagagctggaacccatccccttcatgaccgtcgccgagaacatctggctgggccgcgagccacgtcgggccgggtgcattgtcgacagcaaggaactgaaccgacgcacccgggcactgctggacgagctggaattcgatgtcgacgccaccagccccatgcatttgctgagcgtggcacagatacaactggtggaaatcgccaaggccttcagccatgactgttcggtaatgatcatggacgagcccacttcggccatcggcgagcgtgaggcacaaaccctgttcaaggccatccgccggcttgctgcacggggtgcgggcatcatctacgtatcccaccgcctcagcgagctggcgcagattgccgacgattacagcatcttccgcgatggcgcctttgtcgaaagcggacgtatggccgatatcgaccgggcacacctggtacgcggcatcgtcggccaggagttacagcgtatcgatcacaaggtaggtcgcgaatgcgccgccgaatgctgccttaatgtcgaaggcctgagtcgcaccggcgaattcgaagacatcagcctgcacgtgcgtcatggtgaaattctcggcatctatgggctgatgggctcgggtcgcagcgagtttctcaactgcctgtatggcttgaccataccggattcaggcagcgtcaccctgcaaggcaagctgctgccggtcggcctgcccaaagcgactattcgcgcgggcgtctcactggtcaccgaagaccgcaaggacagcggcctggtacttaatggcagcatcctgtccaacatcgcactgtcggcctaccggcagttgtcgaactggtcgctgatcgacgcccgcaaggagcacaaactggccgaagacatggtcaagcgcctgcagatcaagacgacttctctggatctgcccgtcgcgtcgatgagcggtggcaaccaacagaaggtcgtcctcgccaagtgcctgtcgaccgagccggtgtgcctgctctgcgacgaaccgacccggggcatcgacgaaggcgccaagcaggaaatctatcacctgctggatcagttcgtacgcgctggcggagccgccatcgtggtctcttcggaagcgccggaactgttgcgcctgagtgaccgaatcgccgtgttcaagggtggcaggctggtgaccatcagcagcgatgccgatctttcccaggaagtcctgttgagtcttgcctcatga

SEQ ID NO: 38943 - protein, 495 aa, Pseudomonas syringae pv. syringae B728a
MAKPLLLQAEHVTKAYAGIPALRDGRLSLRAGSVHALCGGNGAGKSTFLSILMGITQRDAGTILLNGEPVQFSRPGDALAAGIAMITQELEPIPFMTVAENIWLGREPRRAGCIVDSKELNRRTRALLDELEFDVDATSPMHLLSVAQIQLVEIAKAFSHDCSVMIMDEPTSAIGEREAQTLFKAIRRLAARGAGIIYVSHRLSELAQIADDYSIFRDGAFVESGRMADIDRAHLVRGIVGQELQRIDHKVGRECAAECCLNVEGLSRTGEFEDISLHVRHGEILGIYGLMGSGRSEFLNCLYGLTIPDSGSVTLQGKLLPVGLPKATIRAGVSLVTEDRKDSGLVLNGSILSNIALSAYRQLSNWSLIDARKEHKLAEDMVKRLQIKTTSLDLPVASMSGGNQQKVVLAKCLSTEPVCLLCDEPTRGIDEGAKQEIYHLLDQFVRAGGAAIVVSSEAPELLRLSDRIAVFKGGRLVTISSDADLSQEVLLSLAS

SEQ ID NO: 38944 - DNA, 1572 bp, Pseudomonas syringae pv. syringae B728a
  CDS (1)..(1572): transl_table=11
atgggatcagcgattacagacgttgcggcggtgccaccggccttgcacctgagaggtatcagcaagcgctttggggccactcaggcgctggatggcgtcaacctgcgggtcgaggccggaacgattcacgggctggtgggggaaaacggggcgggcaagtcgaccctgatcaaggttctcgccggtattcatcgtgccgatgccggccgtttgagtattcatggccagccgttcgacaatttcacgccgcgtcaggtcgaggccgcaggcgtgcacttcattcatcaggagcgactgctgccgggcagcttcagtgtcggcgaagccttgtttttcgggcaggaaatcaagcgtggccccttcctcgatcgccgcgcccaggagcgcgaggcagcaaggcttctggacgattactttgccatgcgcctgcccgccggggcgctagtacgcgatctggacagcgcccagcggcagatactgcaggtcactcgtgcgttgctggccagaccgaaggtgctggtgttcgacgagccgagtgtgtcactggtcaagcaggaggtggaccgcttgctggacatcgtccgccgcctgcgcgatgaagggctgaccattgtctacatttcacactatttgcaggagatcgaatcgctgtgtgatcaggtcaccgtgctgcgtaacggacgcgatgtggcggtgctcgatccggctctcaccagcaccgcgcagatcgcccggctgatggtcaatcgcgaggtaggcgagcaatatttccgtgcccggacattacccggcgcgccagtgcttcaactgcgcggactgggggcagggcgcttctacgacggcgttgacctgagtgtgcggcgtggcgaagtactgggcctgaccgggctggtcggctcgggtgccaaggagctgctcaagagcctgttcgggctgctcaagccggatcgcggcgaattgctcttgaacggtcagcggttgcagctgaaatcaccgcgtgacgcagtacaccatggcatcgcgctggtccccgaggagcgccgcacacacggcgtggcaccggcgctttcggtgctggagaacatcaccctggccagcctgaggcgcttcagccgctggggattgctcgacgctgcggcgcaggccggggaaagccaacagctgatcgatgaactggcaatcaagacctcaggccatgatgcgccggtgcacgcgctcagcggtggcaaccagcagaaggttgcgctgggcaaatggctgagccgccattcgacgttatacctgctggacgagcccagcgtgggtgtcgacatcggcgccaaggtggaaatctaccggttgattgccaagcttgccgagggcggcgcggcggtgctggtgctgtcgtcggacttgccggaactgatcggcatcactcagcgcattgtggtcctgcacagaggacgcgttgcaggcgaattcgactcattgagcaccgacagcgaccagttgctggcctgcgccacgggcgccactgaaagcgaccatgacagccaatcattccctccggaggcccattatgtccgcgcttga

SEQ ID NO: 38945 - protein, 523 aa, Pseudomonas syringae pv. syringae B728a
MGSAITDVAAVPPALHLRGISKRFGATQALDGVNLRVEAGTIHGLVGENGAGKSTLIKVLAGIHRADAGRLSIHGQPFDNFTPRQVEAAGVHFIHQERLLPGSFSVGEALFFGQEIKRGPFLDRRAQEREAARLLDDYFAMRLPAGALVRDLDSAQRQILQVTRALLARPKVLVFDEPSVSLVKQEVDRLLDIVRRLRDEGLTIVYISHYLQEIESLCDQVTVLRNGRDVAVLDPALTSTAQIARLMVNREVGEQYFRARTLPGAPVLQLRGLGAGRFYDGVDLSVRRGEVLGLTGLVGSGAKELLKSLFGLLKPDRGELLLNGQRLQLKSPRDAVHHGIALVPEERRTHGVAPALSVLENITLASLRRFSRWGLLDAAAQAGESQQLIDELAIKTSGHDAPVHALSGGNQQKVALGKWLSRHSTLYLLDEPSVGVDIGAKVEIYRLIAKLAEGGAAVLVLSSDLPELIGITQRIVVLHRGRVAGEFDSLSTDSDQLLACATGATESDHDSQSFPPEAHYVRA

SEQ ID NO: 38946 - DNA, 1557 bp, Pseudomonas syringae pv. syringae B728a
  CDS (1)..(1557): transl_table=11
atgtctgactacctgttgcaaatgaacggcatcgtcaaatcctttggcggtgtaaaagcgctcaacggcatcgatatcacagtgaagcccggcgagtgcgtcggcctgtgcggcgagaacggcgcgggcaaatccaccttgatgaaagtcctgtcggcggtctatccctacggcacctgggagggcgaaatcctgtgggacggccaaccgctcaaggcacagtcgatcagtgaaacggaagcggccgggatcgtcatcatccatcaggaactgacgctggtcccggacctgtcggtggccgaaaacatttttatgggccacgagctgacgctccccggcgggcgcatgaattacccggccatgatgcaccgcgccgagtcgctgatgcgtgaactcaaagtgcctgacatgaacgtggcgctgccggtttcgcagtatggcggcggctaccagcaactggtggaaatcgccaaggcgctgaacaagaaggcgcgcctgttgattctcgacgagccctcctcggccctgacccgctccgaaatcgaggtgttgctggacatcattcacgacctgaaggccaagggggtcgcgtgcgtgtacatctcgcacaaactcgatgaggtggccgccgtgtgcgacaccgtttccgtcatccgcgacggcaaacatatcgccaccactgcaatggcggacatggacattccaaagatcatcacccagatggtcggacgcgaaatgagcaacctctaccccaccgagccgcatgatgtcggcgaggtgattttcgaagcgcggcatatcacctgctacgacgtcgataaccccaggcgcaagcgcgtcgacgacgtgtcattcctcctcaggcgcggggaaatcctcggcatcgccgggctggtgggcgcgggccgtaccgaactggtatccgccctgttcggcgcctaccccggtcggtacagcggtgaagtgtggctgaatggccaggcgatcgacacgcgcacgccgctcaaatcgatccgcgccggcgtgtgcatggtccctgaagaccgcaagcgccagggcatcattccggacctgggcgtcggccagaacatcaccctcgcggtcctcgacagctactcgaacatgacccgcatcgacgctgaagccgaactgggcagtatcgaccgggaaatctcgcgcatgcacctcaagaccgccagcccgtttttgccaatcaccagcctgtcaggcggcaatcagcagaaagccgtgctggcgaagatgctgctcacccgcccgcgcgttctgattctcgacgagcctacccgcggcgtcgatgtcggtgccaagtacgagatctacaagctgatgggcgcgctggcagccgagggcgtgtcgatcatcatggtgtcttcggagctggccgaagtgctgggcgtgtccgaccgtgtgctggtgattggcgacggccagttgcgcggcgacttcatcaaccatgacctgactcaggagcaggtcctcgccgctgcactcagccactccgatgcccctcacaataatgcccggaagaccgcgtag

SEQ ID NO: 38947 - protein, 518 aa, Pseudomonas syringae pv. syringae B728a
MSDYLLQMNGIVKSFGGVKALNGIDITVKPGECVGLCGENGAGKSTLMKVLSAVYPYGTWEGEILWDGQPLKAQSISETEAAGIVIIHQELTLVPDLSVAENIFMGHELTLPGGRMNYPAMMHRAESLMRELKVPDMNVALPVSQYGGGYQQLVEIAKALNKKARLLILDEPSSALTRSEIEVLLDIIHDLKAKGVACVYISHKLDEVAAVCDTVSVIRDGKHIATTAMADMDIPKIITQMVGREMSNLYPTEPHDVGEVIFEARHITCYDVDNPRRKRVDDVSFLLRRGEILGIAGLVGAGRTELVSALFGAYPGRYSGEVWLNGQAIDTRTPLKSIRAGVCMVPEDRKRQGIIPDLGVGQNITLAVLDSYSNMTRIDAEAELGSIDREISRMHLKTASPFLPITSLSGGNQQKAVLAKMLLTRPRVLILDEPTRGVDVGAKYEIYKLMGALAAEGVSIIMVSSELAEVLGVSDRVLVIGDGQLRGDFINHDLTQEQVLAAALSHSDAPHNNARKTA

SEQ ID NO: 38948 - DNA, 1578 bp, Pseudomonas syringae pv. syringae B728a
  CDS (1)..(1578): transl_table=11
atgttcggttctgctactgccaatccgcccgcgcaacgcaatctgccgtccggcgacggggatggcggggcgcctgatgcccaggccccgtatctgctggaaatcagccatgtcagcaagggctttcctggcgtggttgcgctcaatgatgtgcaactgcgtgttcgccctggcagcgtgctggcgctgatgggcgagaacggagccggaaaatcgaccctgatgaaaatcattgcgggcatctatcagccggacgcgggtgaaatccgtctgcggggcaagccggtcagcttcgatacgcctctttccgcgttgcaggcaggcatcgccatgattcatcaggaactgaacctgatgccgttcatgagcattgccgagaacatctggatcggtcgcgagcagctcaacggcctgcacatggtcgatcaccgcgagatgcaccgctgcactgccgagctgctggagcgcctgcgcatcaagctcgatcccgaggaactggtcggcacgctgagtattgccgagcggcagatggtggagatcgccaaggccgtgtcatacaactcggacgtgctgatcatggacgaaccgacctcggccatcaccgaaaccgaagtcgctcacctgttctcgatcatcagcgacctgcgtgcccagggcaaaggcatcatctacatcacccacaagatgaacgaagtcttcgaaatcgccgacgaggtggcggtgttccgcgacggcgcctacatcggtctgcagcgcgccgatagcatggacggcgacagcctgatcaccatgatggtgggccgggaactgacccagctgttccccgagcgggagaaaccggcaggcgatgtgctgctgtccgtcaaccggctgagcctgaacggcattttcaaggacgtgagcttcgacctgcgtgccggggaagtgcttggcattgccgggctgatgggctcggggcgcaccaatgtggccgagacgctgtttggcataacccccagcgacagcggcgaggtgcgcttcgatggcaagacggtgcacatcggcgatccacatcaggccatcgaactgggttttgcgctgctcacggaggatcgcaaattgaccggcctgtttccatgcctgtcggtgatggaaaacatggagatggccgtgctggccaactatgccggtaacggtttcgtgcaacagaaggccttgcgctcccagtgcgaagacatgtgcaaaaagcttcgggtcaagacgccgtcgctggagcagtgcatcgacacattatccggcggcaaccagcagaaggcgctgctggcgcgctggctgatgaccaaccccaaggtactgattctggatgagcccacacgcggtatcgacgtgggtgccaaggtagaaatctaccgcctgatctccctgctggccagtgaaggcatggcagtgatcatgatttcctcggagctgccggaggttctcggcatgagtgaccgggtcatggtcatgcacgaaggcgaaatgatgggcatccttgatcgcagtgaagcgacccaggaaaaagtcatgcatctggcctccggccacaaggttcattga

SEQ ID NO: 38949 - protein, 525 aa, Pseudomonas syringae pv. syringae B728a
MFGSATANPPAQRNLPSGDGDGGAPDAQAPYLLEISHVSKGFPGVVALNDVQLRVRPGSVLALMGENGAGKSTLMKIIAGIYQPDAGEIRLRGKPVSFDTPLSALQAGIAMIHQELNLMPFMSIAENIWIGREQLNGLHMVDHREMHRCTAELLERLRIKLDPEELVGTLSIAERQMVEIAKAVSYNSDVLIMDEPTSAITETEVAHLFSIISDLRAQGKGIIYITHKMNEVFEIADEVAVFRDGAYIGLQRADSMDGDSLITMMVGRELTQLFPEREKPAGDVLLSVNRLSLNGIFKDVSFDLRAGEVLGIAGLMGSGRTNVAETLFGITPSDSGEVRFDGKTVHIGDPHQAIELGFALLTEDRKLTGLFPCLSVMENMEMAVLANYAGNGFVQQKALRSQCEDMCKKLRVKTPSLEQCIDTLSGGNQQKALLARWLMTNPKVLILDEPTRGIDVGAKVEIYRLISLLASEGMAVIMISSELPEVLGMSDRVMVMHEGEMMGILDRSEATQEKVMHLASGHKVH

SEQ ID NO: 38950 - DNA, 1482 bp, Haemophilus influenzae 86-028NP
  CDS (1)..(1482): transl_table=11
atggaaactttactcaaaattagtggtgttgataagtcatttccaggtgtgaaagccttgaataatgcctgtttatctgtttacgctggacgcgtaatggcattgatgggggaaaatggggcgggtaaatcgactttgatgaaggtgcttactggtatttattctaaagatgcaggcacaattgagtatcttaatcgatcagttaatttcaatggacctaaagcctcacaggaagctggcattagtattattcaccaagaactgaatttggtcggtaatctcacgattgcagaaaacattttccttggtcgtgaatttaaaacctcgtggggagcgattaactggcagaaaatgcaccaagaagcagacaagctacttgcgcgtttgggggtaactcacagcagtaaacagctttgcgctgaactttctattggtgagcaacaaatggtggagatagccaaagccttaagttttgaatccaaagttatcattatggatgaaccaaccgatgcgctcacagatacggagaccgaagccctattcaatgtgattcgtgaactcaaagcagaaaatcgtggcattgtttatatctctcatcgtttaaaagaaattttccaaatttgtgatgatgtgacggttttacgcgatggtcaatttatcggtgaacgcattgtggcagaaattacagaagatgatttaattgaaatgatggttggtcgtcgtcttgatgaacaatatccgcatttatcacaagaaaaaggcgaatgtgtattggatgtgaaaaatgtgagcggaagcggtattgatgatgtttccttcaaattgcatgccggtgaaattgttggtgtctcgggcttaatgggtgcgggtagaacggaactcggcaagctactttacggtgctttgccaaaaacggcgggaaaagtgcggttaaaaaatcaagagattgagaatctcagtccgcaagatggtttggataatggtattgtatatatttctgaagatcgtaaaggtgatggcttggttttaggaatgtcagtaaaagaaaatatgtcgctcacatcgctcgatcatttttcacaaaaaggcagtattcgtcatcaagcggaaaaaatgacagtagatgactttattctgatgtttaacattaaaacacctaatcgtgatcaacaagtaggtttgctatctggtggaaatcaacaaaaagtggcaattgctcgtggattaatgactcgcccaaatgtgttgattttagatgaaccaactcgtggcgtagatgttggcgcgaagaaagaaatttatcagttgattaacgaatttaagaaagagggcttgagtattttaatgatctcatctgatatgccagaagtgcttggtatgagcgatagagtgttggtaatgcgtgaaggtaaaattagtgcagaattttctcgcaaagacgcaactcaagaaaaattattagcagcagctattggtaaataa

SEQ ID NO: 38951 - protein, 493 aa, Haemophilus influenzae 86-028NP
METLLKISGVDKSFPGVKALNNACLSVYAGRVMALMGENGAGKSTLMKVLTGIYSKDAGTIEYLNRSVNFNGPKASQEAGISIIHQELNLVGNLTIAENIFLGREFKTSWGAINWQKMHQEADKLLARLGVTHSSKQLCAELSIGEQQMVEIAKALSFESKVIIMDEPTDALTDTETEALFNVIRELKAENRGIVYISHRLKEIFQICDDVTVLRDGQFIGERIVAEITEDDLIEMMVGRRLDEQYPHLSQEKGECVLDVKNVSGSGIDDVSFKLHAGEIVGVSGLMGAGRTELGKLLYGALPKTAGKVRLKNQEIENLSPQDGLDNGIVYISEDRKGDGLVLGMSVKENMSLTSLDHFSQKGSIRHQAEKMTVDDFILMFNIKTPNRDQQVGLLSGGNQQKVAIARGLMTRPNVLILDEPTRGVDVGAKKEIYQLINEFKKEGLSILMISSDMPEVLGMSDRVLVMREGKISAEFSRKDATQEKLLAAAIGK

SEQ ID NO: 38952 - DNA, 1497 bp, Staphylococcus haemolyticus JCSC1435
  CDS (1)..(1497): transl_table=11
atgattcaaatgactaatatccataaagccttcggggacaacgaggttctaaagggagttgattttactctaaagccaggtacagtgcatgcactaatgggagaaaatggggctggtaaatcaacactcatgaaaattttagttgggattcataaaaaagaccaaggtgttatcactaattctgatattgagatcgactataacaatcctaaagaagcggaagaaaaaggattaacatttattcaccaagaactgaatttatatccagaattaacagtgcttgataacttgttcgttggaaaagaaatcagaaacaaaataggaatactaaataaaaaagaaatgaagcaacaagctgagcaagtgtttaaagaattagatttctatattccattaaacaaagtggtcaaagattgctcaattggtgagcaacaaatgatagaaatagctaaagcgatgatgacaaaagcacaaatcattattatggatgaaccaacagcaacattaacagataaagaaatacgacgtttgttcgacatgattcataatttaaaagctaaaggtgtgtcctttgtatacatttcacatagaatggctgaaatttttgagatttcggatgaaataacagtgatgcgtgatggcgtttctgttatgtatgatgaaacgacaaatctaacatacaaccaaattgttaaagcaatggttggacgtgaattagatgaacagtttccagatagaacgtatgaaccacaagatattgttttaaatgtaaagcgacttaataatccgctacatcatattgagaatcaatcattttatcttaaaaaaggtgaaatattgggcgtgagtggtctaatgggggcaggtcgtacagaaatgatgagaagtttgttcggtgtcgataaagcagataatgaaattgaaattaaaggacaaacagtatctataacgtctccaatcgaagcgatgaaacatggacttgcttttataactgagaatcgtaaagaagaagggttaatcttagacttctccattcaagacaatatggtgttaccttcgttatttagtttttcaaaacatggcatcgtagacgataaaagttctgagcaatttgttgatacgatgcgtaaaagacttaatattaaatctccaggtagactgccggctggctcattatcaggtggtaatcaacaaaaggtcgtattagcaaagtggattggtaccggtgcgcaaatcattattttagatgagcctacacgaggtattgatgtcggagcaaaaagagagatttatcaacttatgaatgaacttacggatcgtggtgtgtctattattatggtctcatctgaattgcctgaagtcattggtatgagcgatagagtgatggtcgttcacgaaggtaatatcaaaggggatctaacaggaaatgaaattacagaagaaaatattatgactttagctacagggggaactttaaatgaaacagttaacagctaa

SEQ ID NO: 38953 - protein, 498 aa, Staphylococcus haemolyticus JCSC1435
MIQMTNIHKAFGDNEVLKGVDFTLKPGTVHALMGENGAGKSTLMKILVGIHKKDQGVITNSDIEIDYNNPKEAEEKGLTFIHQELNLYPELTVLDNLFVGKEIRNKIGILNKKEMKQQAEQVFKELDFYIPLNKVVKDCSIGEQQMIEIAKAMMTKAQIIIMDEPTATLTDKEIRRLFDMIHNLKAKGVSFVYISHRMAEIFEISDEITVMRDGVSVMYDETTNLTYNQIVKAMVGRELDEQFPDRTYEPQDIVLNVKRLNNPLHHIENQSFYLKKGEILGVSGLMGAGRTEMMRSLFGVDKADNEIEIKGQTVSITSPIEAMKHGLAFITENRKEEGLILDFSIQDNMVLPSLFSFSKHGIVDDKSSEQFVDTMRKRLNIKSPGRLPAGSLSGGNQQKVVLAKWIGTGAQIIILDEPTRGIDVGAKREIYQLMNELTDRGVSIIMVSSELPEVIGMSDRVMVVHEGNIKGDLTGNEITEENIMTLATGGTLNETVNS

SEQ ID NO: 38954 - DNA, 1554 bp, Pseudomonas fluorescens Pf-5
  CDS (1)..(1554): transl_table=11
atgtcagtttctgctgccaacgctgtcctatcggtcagcggtatcggcaagacttatgcgcaaccggtgttgaccggcatcgacctgacgctgttgcgtggtgaagtgctggcgctcaccggcgagaacggtgccggcaagagcaccctgtcgaagatcatcggtggcctggtcagccccaccacagggcacatgcagttcaatggccaggattatcgtccgggcagtcgcgcccaggccgaggatctgggcattcgcatggtgatgcaggagctcaacctgctgccgaccctgtcggtggccgagaacctgttcctcgacaacctgcccagcagtggtggctggatcagccgccggcaattgcgcaaggcggcgatcggggccatggcccaggtcggtctggatgccatcgaccccgacaccctggtgggcgagctgggcatcggccaccagcagatggtggagatcgcccgtaacctgatcggcgactgccatgtgctgattctcgatgagcccaccgccatgctcacgtcccgcgaggtagaaatgctcttcgagcagatcacccgcctgcaggcccgcggcgtgtcgatcatctatatctcccatcgcctggaagagctggcccgggttgcccagcgcatcgcggtattgcgtgacggctgcctggtctgtgtcgagccgatggccaactacaacagcgagcaactggtgaacctgatggtgggccgcgagctgggcgagcacatcgacctgggcgagcgccggatcggcgcgccggccttgacggtgagcaacctcagccgctcggacaaagtccgcgatgtgtccttcgaggtccgcagtggcgagatcttcggaatttccgggttgatcggggcagggcgcaccgagctgctgcgcctgatcttcggtgccgatgtcgccgacagcggcaccatcgccctgggcaccccggcgcgcccggtgagcatccgctcgccagtggatgcggtggccaacggcatcgccctgattaccgaggaccgcaagggtgaggggctgctgttgacccagtccatcagcgccaatatcgccctgggcaacatgccggcgatttccagcagcggcctggtcaatggccaggacgaggagcatctggcgcggcgccagatcgacgccatgcgtatccgcagctccagcccggcgcaactggtcagcgagctgtccggtggcaaccagcagaaggtggtgatcggccgctggctggagcgcgactgttcggtgctgctgttcgatgagccgacccgtggcatcgatgtcggtgccaagttcgatatctacggcctgttgggggagttgacccggcagggcaaggcccttgtggtggtgtccagcgacctgcgcgagctgatgctgatctgcgatcgcatcggcgtgctctcggccgggcggctgatcgataccttcgagcgcgacagctggacccaggacgaactgcttgccgcggcatttgccggctatcaaaaacgagatgcgctgatcgatgaagcggcgcctaggaatgcatcatga

SEQ ID NO: 38955 - protein, 517 aa, Pseudomonas fluorescens Pf-5
MSVSAANAVLSVSGIGKTYAQPVLTGIDLTLLRGEVLALTGENGAGKSTLSKIIGGLVSPTTGHMQFNGQDYRPGSRAQAEDLGIRMVMQELNLLPTLSVAENLFLDNLPSSGGWISRRQLRKAAIGAMAQVGLDAIDPDTLVGELGIGHQQMVEIARNLIGDCHVLILDEPTAMLTSREVEMLFEQITRLQARGVSIIYISHRLEELARVAQRIAVLRDGCLVCVEPMANYNSEQLVNLMVGRELGEHIDLGERRIGAPALTVSNLSRSDKVRDVSFEVRSGEIFGISGLIGAGRTELLRLIFGADVADSGTIALGTPARPVSIRSPVDAVANGIALITEDRKGEGLLLTQSISANIALGNMPAISSSGLVNGQDEEHLARRQIDAMRIRSSSPAQLVSELSGGNQQKVVIGRWLERDCSVLLFDEPTRGIDVGAKFDIYGLLGELTRQGKALVVVSSDLRELMLICDRIGVLSAGRLIDTFERDSWTQDELLAAAFAGYQKRDALIDEAAPRNAS

SEQ ID NO: 38956 - DNA, 1548 bp, Pseudomonas fluorescens Pf-5
  CDS (1)..(1548): transl_table=11
atgaacgcttgtgcttctgcttcgagcctgcactccctgagcccggccgtggcgccccaggagccctacctgctggaagtgctgaatgtcagcaagggctttcccggggtggtggccctggccaacgtgcaactgcgggtacgccccggcacggtcctggcgctgatgggcgagaacggtgccggcaagtcgaccctgatgaagatcatcgcgggcatctatcagcccgactccggcgaactgcgcctcaagggccggcctgtgaccttcgccacgccgctggcggcgctgcaggcggggatcgccatgatccaccaggaactcaacctgatgccgcacatgagcatcgccgagaacatctggatcggccgcgagcaacagaaccgcctgggcctgatcgaccatcgggaaatgcaccgctgcaccgccgccttgctggcgcgcctgcgcatcgaactggaccccgaggagcaggtgggcaacctgagcatcgccgagcgccagatggtggagatcgccaaggcggtgtcctacgactccgacgtgctgatcatggacgaaccgacctcggccatcaccgacaaggaggtggcgcacctgttctcgatcattgccgacctcaaggcccagggtaagggcatcgtctatatcacccacaagatgaacgaagtgttcgccatcgccgatgaggtggcggtgtttcgcgatggcgcctacatcggcctgcaacgggccgacagcctggacggcgacagcctgatctcgatgatggtggggcgcgagctgagccagttgtttcccctgcgcgagaagcctatcggcgagctgctgctcaaggtccgcgacttgcgcctggacggggtgttcaagggcgtgtcgttcgatctgcatgccggggagatcctcggcattgccgggctgatgggctcggggcggaccaatgtcgccgaaaccctgttcggcatcaccccaagcgatggcggcgagattgtcctcgacggccagcccctgcgcatcggcgacccgcaccgggcgatcgagaagggccttgccctgctgaccgaggatcgcaagctcagtggcttgttcccctgcctgtcggtcctggaaaacatggaagtggcggtactgccgcactacgccggcggcggttttgtccagcagaaggccttgcgcgccttgtgcgaggacatgtgcaggaagctgcgggtcaagaccccgtccctggagcaatgcatcgacaccctgtccgggggcaatcagcagaaggccctgctggcgcgctggctgatgacccagccgcggatcctgattctcgacgagccgacccggggcattgacgtgggggccaaggctgagatctaccgcctgatcgccagtctggccggtgagggcatggcggtgatcatgatttcctcggaactgcccgaggtgctgggcatgagcgaccgggtcatggtcatgcacgaagggcaactgatgggcaccctggaccgcaacgaggcgacccaggaacgggtcatgcaactggcttcgggcctgaactag

SEQ ID NO: 38957 - protein, 515 aa, Pseudomonas fluorescens Pf-5
MNACASASSLHSLSPAVAPQEPYLLEVLNVSKGFPGVVALANVQLRVRPGTVLALMGENGAGKSTLMKIIAGIYQPDSGELRLKGRPVTFATPLAALQAGIAMIHQELNLMPHMSIAENIWIGREQQNRLGLIDHREMHRCTAALLARLRIELDPEEQVGNLSIAERQMVEIAKAVSYDSDVLIMDEPTSAITDKEVAHLFSIIADLKAQGKGIVYITHKMNEVFAIADEVAVFRDGAYIGLQRADSLDGDSLISMMVGRELSQLFPLREKPIGELLLKVRDLRLDGVFKGVSFDLHAGEILGIAGLMGSGRTNVAETLFGITPSDGGEIVLDGQPLRIGDPHRAIEKGLALLTEDRKLSGLFPCLSVLENMEVAVLPHYAGGGFVQQKALRALCEDMCRKLRVKTPSLEQCIDTLSGGNQQKALLARWLMTQPRILILDEPTRGIDVGAKAEIYRLIASLAGEGMAVIMISSELPEVLGMSDRVMVMHEGQLMGTLDRNEATQERVMQLASGLN

SEQ ID NO: 38958 - DNA, 1554 bp, Pseudomonas syringae pv. phaseolicola 1448A
  CDS (1)..(1554): transl_table=11
atgtcagcgtctgttcagacagctgttctttcggtcagtggcatcggtaaaacctacgctcaacccgtgctcggtgacgtcgatctgacgttgatgcgtggcgaagtgctggccctgaccggggaaaacggtgccggtaaaagcaccttgtcgaaaatcattggcggcctggtgacgcccactaccgggcgcatggagtttcaagggcagccttatgaacctgtgagtcgtacccaggccgaaaagctcggggttcgcatggtcatgcaggagctcaacctgctgccggccctgaccgttgccgaaaacctgttccttgacgacctgccacgtcgtgctggctggatcgaccgcaagcgcctgcgtgaaaacgcgatcaaggctatggctcaggtgggtctggacgctattgatcccgatacgctggtcggcgatttggggatcggtcatcagcagatggtcgagatcgctcgcaacctggttggcgactgccatgtgctgatcctcgacgagcctactgccatgctcacctcccgcgaggtggaaatgctgttcgagcagatcacgcggctgcaggctcgtggtgtctcgatcatctacatctcccaccggcttgaggagcttgccagagtgtctcagcgcatagccgtactgcgcgatggcaagctggtgtgcgtcgagccaattgcccgctacaacagcgagcaactggtcacgttgatggtcggccgtgaacttggcgaacacatggacatgggcacccggcagattggcgaagtagcgctgtcagtcaaggggctcagtcgtgccggcaaggttcaggatgtttcgttcgatgtgcgacgaggtgaaatcttcggtatttccgggctgatcggtgccgggcgcaccgagttgctgcgcctgatctacggtgcagatgttgccgacagtggtgcgattgaagttgggcagccactgcaagccgtcaccatccgttcaccctcggacgccgtggagcacggtattgccctgatcacggaagaccgcaagagcgaaggactgctgatgtcgcagtcaatcagcgccaacattgcgctgggtaatatgcattcgatctccagagcaggcctggtcaacaccgatgacgaactgaagctggcgcagcgccaggtggctgccatgcgtattcgcagttccagtccggaccagctggtctccgagctgtcaggcggtaatcagcagaaggtcgtgatcggtcgctggctggaacgtgattgcccggtgatgctgttcgacgagccgacgcgaggcatcgacgtcggtgccaaattcgatatctacgcgctgctggccgaattgacccgtcagggcagggcgctggtggtggtttccagtgatctgcgcgaactgatgttgatctgcgatcgtatcggtgtgctgtctgccggtcgcctgatcgacacgttcgagcgcgacagctggacccaggaccaattgcttgccgctgccttcgccggttatcagaaacgtgacgcgctgctcaatgacgccgcgcccaggaacgactcatga

SEQ ID NO: 38959 - protein, 517 aa, Pseudomonas syringae pv. phaseolicola 1448A
MSASVQTAVLSVSGIGKTYAQPVLGDVDLTLMRGEVLALTGENGAGKSTLSKIIGGLVTPTTGRMEFQGQPYEPVSRTQAEKLGVRMVMQELNLLPALTVAENLFLDDLPRRAGWIDRKRLRENAIKAMAQVGLDAIDPDTLVGDLGIGHQQMVEIARNLVGDCHVLILDEPTAMLTSREVEMLFEQITRLQARGVSIIYISHRLEELARVSQRIAVLRDGKLVCVEPIARYNSEQLVTLMVGRELGEHMDMGTRQIGEVALSVKGLSRAGKVQDVSFDVRRGEIFGISGLIGAGRTELLRLIYGADVADSGAIEVGQPLQAVTIRSPSDAVEHGIALITEDRKSEGLLMSQSISANIALGNMHSISRAGLVNTDDELKLAQRQVAAMRIRSSSPDQLVSELSGGNQQKVVIGRWLERDCPVMLFDEPTRGIDVGAKFDIYALLAELTRQGRALVVVSSDLRELMLICDRIGVLSAGRLIDTFERDSWTQDQLLAAAFAGYQKRDALLNDAAPRNDS

SEQ ID NO: 38960 - DNA, 1557 bp, Pseudomonas syringae pv. phaseolicola 1448A
  CDS (1)..(1557): transl_table=11
atgtccgactatctgttgcaaatgaacggcatcgtcaaaacctttgacggcgtcaaagccctgaacggcattgacataaaggtccggcccggtgaatgcgtcggcctgtgcggcgaaaacggcacgggcaagtccacgctgatgaaggtgctgtcggcggtatacccttacggcacctgggacggcgagattctctgggacggcacccccctcaaggcgcagtcaatcagcgaaacggaagcagccggtatcgtcatcattcatcaggaactcacgctggtgcctgacctgtcggtggccgaaaacatcttcatgggtcatgaactgacgctcccgggtgggcgcatgaactacccggccatgatccatcgcgccgaagtgttgatgcgtgagctcaaagtgccagacatgaacgtggctctgccggtttcccagtacggcggcggttatcagcaactggtggaaatcgccaaggcactgaacaagaaagctcgtctgttgattctcgacgagccgtcctctgccctgacacgctcggaaatcgaggtgctgctggacatcattcgtgacctgaaagccaagggcgtggcgtgcgtgtacatttcgcacaaactcgatgaagtggcggccgtgtgcgacaccatttcggtgatccgcgatggtaagcacatcgccaccaccgcaatgtcggacatggacatcccgaagatcatcacccagatggtcggtcgcgaaatgagcaacctctaccccaccgaaccccatgagatcggcgaggtgattttcgaggcgcgaaacattacctgttacgacgtcgataaccccggacgcaaacgggtcgacgacatttcgtttgctctcaagcgcggggaaattctcggcattgccgggctggtaggcgcgggtcgcaccgaactggtgtccgctctgttcggtgcctacccgggccgatataccggtgaagtgtggctggacggccaacctgtcgacacgcgcacgccgctcaaatcaatccgcgccggcctgtgcatggtcccggaagaccgtaagcgtcagggcattattccggacctgggcgttggtcagaacatcaccctcgcggttctcgatacctactcgaaaatgacccgcatcgatgccgaagccgagctgggcagcatcgaccgggaaatctcgcgcatgcatctcaagacggccagcccgttcctgccgatcaccagcctgtccggtggcaaccagcagaaagccgtgctggcgaagatgctgctgacccgcccgcgcgttctgattctcgacgaaccgacccgcggcgtcgatgtgggtgccaagtacgagatctacaagctgatgggcgcgctggcggccgaaggtgtgtcaatcatcatggtctcttcggagctggccgaagtactgggagtctccgaccgtgtgctggtgattggcgaaggccagttgcgcggcgacttcatcaaccatgaactcactcaggaacaggtgctcgccgctgcgctcagccaccccgatgcccctgacaataatgcccggaagaccgcatag

SEQ ID NO: 38961 - protein, 518 aa, Pseudomonas syringae pv. phaseolicola 1448A
MSDYLLQMNGIVKTFDGVKALNGIDIKVRPGECVGLCGENGTGKSTLMKVLSAVYPYGTWDGEILWDGTPLKAQSISETEAAGIVIIHQELTLVPDLSVAENIFMGHELTLPGGRMNYPAMIHRAEVLMRELKVPDMNVALPVSQYGGGYQQLVEIAKALNKKARLLILDEPSSALTRSEIEVLLDIIRDLKAKGVACVYISHKLDEVAAVCDTISVIRDGKHIATTAMSDMDIPKIITQMVGREMSNLYPTEPHEIGEVIFEARNITCYDVDNPGRKRVDDISFALKRGEILGIAGLVGAGRTELVSALFGAYPGRYTGEVWLDGQPVDTRTPLKSIRAGLCMVPEDRKRQGIIPDLGVGQNITLAVLDTYSKMTRIDAEAELGSIDREISRMHLKTASPFLPITSLSGGNQQKAVLAKMLLTRPRVLILDEPTRGVDVGAKYEIYKLMGALAAEGVSIIMVSSELAEVLGVSDRVLVIGEGQLRGDFINHELTQEQVLAAALSHPDAPDNNARKTA

SEQ ID NO: 38962 - DNA, 1572 bp, Pseudomonas syringae pv. phaseolicola 1448A
  CDS (1)..(1572): transl_table=11
atgagagcagcgattgcagacgttacgagggcaacggcggccttgcacttgcagggtatcagtaagcgctttggtgccactcaggcactggatggggtcaacctgcgggtcgaggccggaacgattcatgggctggttggcgaaaacggcgcaggcaagtcaaccctgatcaaggtcctcgccggtattcatcgtgccgatgcgggcagcttgagtattcatggccagcagttcgacagctttactccgcgccagattgaagccacgggcgtgcatttcattcatcaggagcgcttgctgccgggcagcttcagcgtcggcgaggcgttgtttttcgggcaggaaatcaagcgcggtctgttcgtcgatcgacgcgctcaggagcgcgaagcggcccggttgctggatgattattttgccatgcgcctgccgagcggggcgctggtacgcgatctggacagcgcgcagcgacagatattgcagatcactcgcgcactgctggccaaaccgcaggtgctggtgttcgacgagccgagtgtgtcactggtcaaacaggaggtggaccggttgttggcgattgtccggcgcttgcgcgatgacggtctgaccattgtgtacatctcccactacctgcaggaaatcgaatcgttgtgtgatcaggtcaccgtgctgcgcaatggacgcgatgtggcggtggttgatcccgcgcttgtcagcaccgcgcagatcgcccggctgatggtcaatcgcgacgtgggtgagcaatatttccgggcgcagacgcagcccggcccgccagtgcttcaattgaacgggctgggagcagggcgcttttacaacggcgttgacctgagcgtgcgaagtggcgaggtggtgggcctgaccgggctggtcggctcgggtgccaaggaactgctcaagagcctgttcgggctgctcaagccggatcgtggcgacgtgctgttgaatggtcagccgttgggcctgaaatcccctcgtgatgcggtgcgcaacggtatagcgctggtccccgaagagcgccgcacgcatggcgtagcgccagtgctttcggtgctggagaacattaccctggccagcctcgggcgcttcagccgctggggattgctcgacggtgctgcgcagtcaagggaaagccagcgtctgatcggtgaactggcgatcaagacctcaggccatgatgcggcggttcaattgctcagcggtggcaaccagcaaaaggtcgccctggccaagtggctgagtcgacactcgacgttgtacctgctggatgagcccagtgtgggtgtcgacattggtgccaaggtggaaatctaccggctgattgcccggctggctgaaggcggtgcagcagtgctggtgctgtcgtcggacctgccggaactgatcggcatcacccagcgcattgtggtgctgcacagggggcgtattgcgggcgaattcgattcgtcgagcaccgacagtgaccagttgctggcctgcgccaccggtgccagcgaaagccgtcatgacggtaaaaatactctccaggagacccgccatgtccacgcttga

SEQ ID NO: 38963 - protein, 523 aa, Pseudomonas syringae pv. phaseolicola 1448A
MRAAIADVTRATAALHLQGISKRFGATQALDGVNLRVEAGTIHGLVGENGAGKSTLIKVLAGIHRADAGSLSIHGQQFDSFTPRQIEATGVHFIHQERLLPGSFSVGEALFFGQEIKRGLFVDRRAQEREAARLLDDYFAMRLPSGALVRDLDSAQRQILQITRALLAKPQVLVFDEPSVSLVKQEVDRLLAIVRRLRDDGLTIVYISHYLQEIESLCDQVTVLRNGRDVAVVDPALVSTAQIARLMVNRDVGEQYFRAQTQPGPPVLQLNGLGAGRFYNGVDLSVRSGEVVGLTGLVGSGAKELLKSLFGLLKPDRGDVLLNGQPLGLKSPRDAVRNGIALVPEERRTHGVAPVLSVLENITLASLGRFSRWGLLDGAAQSRESQRLIGELAIKTSGHDAAVQLLSGGNQQKVALAKWLSRHSTLYLLDEPSVGVDIGAKVEIYRLIARLAEGGAAVLVLSSDLPELIGITQRIVVLHRGRIAGEFDSSSTDSDQLLACATGASESRHDGKNTLQETRHVHA

SEQ ID NO: 38964 - DNA, 1524 bp, Pseudomonas syringae pv. phaseolicola 1448A
  CDS (1)..(1524): transl_table=11
atgcaacaggctatcgagcaaacatccataaacggtgccttgcgcttcaatggcatcggcaaggtcttccccggcgtaaaggcgctttcggacatcagcttcgaagcgcgccccggcagtgttcacgccttgatgggcgagaacggtgccggtaaatccacgctgctgaaaatcctcggcggctcttatcagcccaatagcggcaccttgcagatcggtgagcagagctaccagttcaaatccaccgccgagagtattgcggcgggtgtggcggtgattcaccaggaattgcatctggtgccggaaatgaccgtcgccgagaacctgctgcttgggcacatgcccaatcgtttcggtttgatcaatcgtggcgcgatgtaccgtcgggcaggtgagctgctcaaaggcctggctgacgaaatcgacccgcgcactcgcctgggtgatctttcactgggccagcggcaattggtggagatcgccaaggccatgtcacgcaatgcgcacgtcatcgcctttgacgaacccaccagcagcctgtcggcacgtgaaattgaccggttgatggcgattatcgtgcggctgcgcgacgaggggcgggtgattctctacgtgtctcatcgcatggaagaaatcttccgtgtctgtgatgccgtaacagtgttcaaggacggtcgttttgtaaaaacctttgagcagatggctgatctggatcatgaccggctggtgacctgcatggtcggccgggatattcagaacatctacaattatcgtccgcgccagcatcaagggcctagcctgcgagtgaccgggttactggggccggggctgcacgaacccgtgagttttgccgtagagaaaggtgaagtgctgggtttcttcgggctggtgggcgccgggcgtaccgagctgttccgtctgctgtcggggttgacgcgcagcacggcaggcacgttgcagctggacggcaagccattgacgctcaagtccccacgcgattcgatcgaagcaggcattctgctctgcccggaggaccgcaagaaggaaggtatcgtgccgctgtccagcgtcgcggagaacatcaacatcggtgcacggccccggcatgtgaatctcggctgcctgattcagggccgctgggagcgcgacaacgcacgcagccagatcaagtcgatgaacgtcaagacaccatcgcctgagcaacagatcatgttcctctccggcggcaatcagcagaaggcgattctcggtcgctggctgtcgatgccgatgaaggtcctgttgctggacgagcccacccgcgggattgacgtcggtgccaagtccgagatctacgagatcattcacaacctggccgccgacgggattgcggtcattgtggtgtccagtgacctgatggaagtcatgggtatttccgaccgcattctggtgatgagcgaaggcgcgatcactggtgaactcaaccgcgatgaggctgatgagtcgcgactcctgcaattggctctgcctcgcacgcgtagctga

SEQ ID NO: 38965 - protein, 507 aa, Pseudomonas syringae pv. phaseolicola 1448A
MQQAIEQTSINGALRFNGIGKVFPGVKALSDISFEARPGSVHALMGENGAGKSTLLKILGGSYQPNSGTLQIGEQSYQFKSTAESIAAGVAVIHQELHLVPEMTVAENLLLGHMPNRFGLINRGAMYRRAGELLKGLADEIDPRTRLGDLSLGQRQLVEIAKAMSRNAHVIAFDEPTSSLSAREIDRLMAIIVRLRDEGRVILYVSHRMEEIFRVCDAVTVFKDGRFVKTFEQMADLDHDRLVTCMVGRDIQNIYNYRPRQHQGPSLRVTGLLGPGLHEPVSFAVEKGEVLGFFGLVGAGRTELFRLLSGLTRSTAGTLQLDGKPLTLKSPRDSIEAGILLCPEDRKKEGIVPLSSVAENINIGARPRHVNLGCLIQGRWERDNARSQIKSMNVKTPSPEQQIMFLSGGNQQKAILGRWLSMPMKVLLLDEPTRGIDVGAKSEIYEIIHNLAADGIAVIVVSSDLMEVMGISDRILVMSEGAITGELNRDEADESRLLQLALPRTRS

SEQ ID NO: 38966 - DNA, 1578 bp, Pseudomonas syringae pv. phaseolicola 1448A
  CDS (1)..(1578): transl_table=11
atgttcggttcagctactgccaacccgcccgcacaacgcgatctgccgtccagtgacagcgatagcccgacgccggatgcccagccgccttatctgcttgaaatcagccatatcagcaagggcttccccggtgtcatcgcgctcaacgacgtccaactgcgtgtgcgccctggcagcgtgctggcgctgatgggcgagaacggtgccggaaagtcaacgctgatgaaaatcatcgctggcatctaccagccggactcgggcgaaatccgcttgcgtggcaagccgattcgcttcgagacgccactttcggccttgcaggccggcattgcgatgatccatcaggagctgaacctgatgccgttcatgagcatcgccgagaacatctggatcggtcgcgaacagctcaacggtctgcacatggtcgatcaccgggaaatgcaccgctgcactaccgaactgctggagcgcctgcgcatcaggctcgatcccgaagacctggtgggcaacctgagtatcgccgagcggcagatggtcgagatcgccaaagctgtgtcatataactcggacgtgctgatcatggatgagccgacttcggccatcaccgaaaccgaagtcgctcacctgttttcgatcatcaacgacctgcgcgctcagggtaaaggcatcatctacatcacccacaagatgaacgaagtcttcgagattgccgacgaagtagcggtttttcgcgacggcgcctatatcggcctgcagcgcgccgaaagtatggacggcgacagcctgatcaccatgatggtggggcgtgagttgacccaactgtttcccgagcgggaaaagccgccaggcgaagtgctgctttcagtcagcaacctgtgcctgaacggcattttcaaggacgtgagtttcgatttgcgtgccggagagattcttggcattgccggattgatggggtcgggccggaccaatgtggccgagaccctgttcggcataacccccagcgacagcggcgaggtacgctttgatggcactacggtacacattgccgacccgcatcaggccattgaactgggttttgcgctgttgacggaagaccgcaagttgactgggctgtttccatgcctgtcggtgatggaaaacatggaaatggccgtgcttgccaactatgccggcaacggtttcgtgcaacagaaggcactgcgtgcgctgtgcgaggacatgtgcaaaaaacttcgggtcaagaccccgtcactggagcagtgcatcgacaccttgtcgggcggtaaccagcagaaggcgttgctggcacgctggctgatgaccaatccccggctactgattctggatgagcccacccgcggcatcgacgtaggggccaaggcggaaatctatcgcctgatctccctgctcgccagtgaaggcatggccgtcatcatgatctcttcagagctgccggaagtcctcggtatgagcgaccgggtgatggtcatgcacgaaggcgaaatgatgggcatcctcgatcgaggcgaagcgacccaggaaaaagtcatgcatctggcctccggccacaaggttcattga

SEQ ID NO: 38967 - protein, 525 aa, Pseudomonas syringae pv. phaseolicola 1448A
MFGSATANPPAQRDLPSSDSDSPTPDAQPPYLLEISHISKGFPGVIALNDVQLRVRPGSVLALMGENGAGKSTLMKIIAGIYQPDSGEIRLRGKPIRFETPLSALQAGIAMIHQELNLMPFMSIAENIWIGREQLNGLHMVDHREMHRCTTELLERLRIRLDPEDLVGNLSIAERQMVEIAKAVSYNSDVLIMDEPTSAITETEVAHLFSIINDLRAQGKGIIYITHKMNEVFEIADEVAVFRDGAYIGLQRAESMDGDSLITMMVGRELTQLFPEREKPPGEVLLSVSNLCLNGIFKDVSFDLRAGEILGIAGLMGSGRTNVAETLFGITPSDSGEVRFDGTTVHIADPHQAIELGFALLTEDRKLTGLFPCLSVMENMEMAVLANYAGNGFVQQKALRALCEDMCKKLRVKTPSLEQCIDTLSGGNQQKALLARWLMTNPRLLILDEPTRGIDVGAKAEIYRLISLLASEGMAVIMISSELPEVLGMSDRVMVMHEGEMMGILDRGEATQEKVMHLASGHKVH

SEQ ID NO: 38968 - DNA, 1506 bp, Mycoplasma hyopneumoniae J
  CDS (1)..(1506): transl_table=4
ttattttttaaacttgagaaaatcaatttaagttttggccctgttaaagttctaaaaaatatgaatttagaactttataaaggcgcagcagtcgccctaattggcgaaaatggggcgggaaaatcaagtctgatgaaagttttaagtggggtttatcaacctgattcagggaaaatgaacttttgtagtgataatatttgcaatcaaaaagttgaattttccggggtaattaattcccaaaaacaaggaattgccattattcaccaagagcaaaatttagttgaaagcctaagtgtttcccagaacattttcctgggacgggaatttcggaattcctttggacttttagattataaaaaacaagatgaagaagcaaaaaaacttttagatactttaggggctgaatttagtccaaaagcacttgtttcttcgctttcgatctcacaaaagcaatttatcgaaatcgccaaagctttatcccaaaaaccggaaattatcatttttgatgaaccgacttcggttctaaccgaaaaagatacccaaaaactttatctgcttgttgaaaaacttaaaaaacaaggaattgcaatcgtctgaattacccatagaatggaagaaattaagaaaacttgtgaatttatcactgtgattcgaaacggaatgtatattgaaagtaagccaataaatgaatttaaaaacgaagatgagattatttctttaatggtcggttttgatatcgagcagcgctatcccgaaaaaacgccggttagaagtaaaaaaccatcgtttttagttagaaatttatcaaatgataaagtttctaatatcagttttgaaatcaaaccaggtgaaattttagttttttatggccttgtaagttcaggtcgaactgaattagctagaactttaattggcgatatgccttatttaaatggtcatattgaactaaatggtcaagaatttcgcccaaaaaatattaaggacagtcttgatcatggaatttattatctttctgaaaataggaaacaaattggtctaaatgttaatttaccaattaattttaatatcacaatttcttctcttggctcaaatcagattttttctttccttccttttgtctcaaaagcaaaaataactaaaactacaaatcattatattaaacaattaaagatcaaaacaacttcacaagatacgccattaacttctttatcaggtggaaatcaacaaaaagtttcacttgcaaaagggcttgcaacccaaccgcaagttttcatcctcgatgaaccaactcgcggagtcgatgttggcgcaagaaaggaaatttataatttaattcaccaattaaaacaagaaaataaaacaattatgataatttcttcggatatgcaagaggttatcggaatcgctgatcgggtaattacaatgtatgaaggcagaattacaagtgaattagttggcccgcaaattaccgatcaaaatataatgaaatattcacttaatttatag

SEQ ID NO: 38969 - protein, 501 aa, Mycoplasma hyopneumoniae J
MFFKLEKINLSFGPVKVLKNMNLELYKGAAVALIGENGAGKSSLMKVLSGVYQPDSGKMNFCSDNICNQKVEFSGVINSQKQGIAIIHQEQNLVESLSVSQNIFLGREFRNSFGLLDYKKQDEEAKKLLDTLGAEFSPKALVSSLSISQKQFIEIAKALSQKPEIIIFDEPTSVLTEKDTQKLYLLVEKLKKQGIAIVWITHRMEEIKKTCEFITVIRNGMYIESKPINEFKNEDEIISLMVGFDIEQRYPEKTPVRSKKPSFLVRNLSNDKVSNISFEIKPGEILVFYGLVSSGRTELARTLIGDMPYLNGHIELNGQEFRPKNIKDSLDHGIYYLSENRKQIGLNVNLPINFNITISSLGSNQIFSFLPFVSKAKITKTTNHYIKQLKIKTTSQDTPLTSLSGGNQQKVSLAKGLATQPQVFILDEPTRGVDVGARKEIYNLIHQLKQENKTIMIISSDMQEVIGIADRVITMYEGRITSELVGPQITDQNIMKYSLNL

SEQ ID NO: 38970 - DNA, 1545 bp, Mycoplasma hyopneumoniae J
  CDS (1)..(1545): transl_table=4
attaaattgaaaaaaactaatattctatcactaaaaaaaataaaaaaagtttatggtcctgtaattgctctttctgatgtgacttttgttgttccaaaaggggaaataactagcctagttggtgaaaatggcgcgggaaaatcgacacttttaaaaattttatcaggagtgattcctgctggacaatatgaaggtgatctaatttttgaagataaaattatggcttttgcaaatacaaaagcctccgaacgtgtcggaattgcaataattcatcaagaactttcaatttcaccttatttatcaatttgcgagaacatgtatatcggtaattatccgactaaatttggcaaagttaactgaaataagatgatttccgaatgcaaaaaatatctagaaatggtcggtcttgatgaagatccaacaacaattgctggctctctttcgattgcaaaacagcaaatggttgagatcgcaaaagcactttcaaaaaatgcaaaactactaattttagatgaaccgacttcctctttaaatgatgaaaatgcttttcgcttacttgatattatgaaaagtttaaaaagtaaaggaattacttcgatttttgtctcccataaattaaatgaagtcaaatatgtctctgataatattgttgtaatccgcgatggtaaattcatttcccagtataataaaaatgaagaaataattgatgaaaaccggctaattcaggacattgttggccggcctttaaagtccaaatttcctcctagggatttagatcgaaaaatcggggaaattatttttgagatcaaagatatagttattcctcatgctagtattgcaaattataatgttgtcaaaaatgcttcccttgatgtaaaacaaggcgaaattgtcggaatttccggacttgttggatcgggtcgaaccgaattaatgctttcactttttgggcagtattataacaaaccttcaagtggcaaagttttctataaaggtaaagaagtaaaatttactaacacaaaacaggcaatcaaatcgggaattatgtatgcttccgaagatcgaaaaaatgttggtctaatccaaattttttcgattcaaaataatatcacttccgccgctttgcatttattttcaaaatgaggaattctaaataaaaataaggaaataattaatgcccaaaaactaaaaaaagatgtaagtattaaaacaaaaaatattctaaataatgtcgaatccctttctgggggaaatcagcaaaaagttgtaattgccaaagctttaagcaccaaatttgaccttctaattatcgatgagccaacaaaaggtattgatgttggctcaaaatacgaaatttataaaattttactagacctttcatcacaaggtaaaacaattattgtaatctcttcggaaattgaagaacttttaggaatcaccgatcgaatttttgtcatgtcccagggaattatcaaaggtcagataaaaacttctgaggcaaatcaagaaaaaattatgcaactaagtattgggggtcttatctaa

SEQ ID NO: 38971 - protein, 514 aa, Mycoplasma hyopneumoniae J
MKLKKTNILSLKKIKKVYGPVIALSDVTFVVPKGEITSLVGENGAGKSTLLKILSGVIPAGQYEGDLIFEDKIMAFANTKASERVGIAIIHQELSISPYLSICENMYIGNYPTKFGKVNWNKMISECKKYLEMVGLDEDPTTIAGSLSIAKQQMVEIAKALSKNAKLLILDEPTSSLNDENAFRLLDIMKSLKSKGITSIFVSHKLNEVKYVSDNIVVIRDGKFISQYNKNEEIIDENRLIQDIVGRPLKSKFPPRDLDRKIGEIIFEIKDIVIPHASIANYNVVKNASLDVKQGEIVGISGLVGSGRTELMLSLFGQYYNKPSSGKVFYKGKEVKFTNTKQAIKSGIMYASEDRKNVGLIQIFSIQNNITSAALHLFSKWGILNKNKEIINAQKLKKDVSIKTKNILNNVESLSGGNQQKVVIAKALSTKFDLLIIDEPTKGIDVGSKYEIYKILLDLSSQGKTIIVISSEIEELLGITDRIFVMSQGIIKGQIKTSEANQEKIMQLSIGGLI

SEQ ID NO: 38972 - DNA, 1506 bp, Mycoplasma hyopneumoniae 7448
  CDS (1)..(1506): transl_table=4
ttattttttaaacttgagaaaatcaatttaagttttggccctgttaaagttctaaaaaatatgaatttagaactttataaaggcgcagcagtcgctctaattggcgaaaatggagctggaaaatcaagtctgatgaaagttttaagtggggtttatcaacctgattcagggaagatgaacttttgtagtgataatatttgtaatcaaaaagttgaattttccggggtaattaattcccaaaaacaaggaatcgccattattcaccaagagcaaaatttagttgaaagcctaagtgtttcccagaacattttcctgggccgtgaatttcggaattcctttggacttttagattataaaaaacaagatgaagaagcaaaaaaacttttagatactttaggggctgaatttagtccaaaagcacttgtttcttcgctttcgatctcacaaaagcaatttatcgaaatcgccaaagctttatcccaaaaaccggaaattatcatttttgatgaaccgacttcggttctaaccgaaaaagatacccaaaaactttatctgcttgttgaaaaacttaaaaaacaaggaattgcaatcgtctgaattacccatagaatggaagaaattaagaaaacttgtgaatttatcactgtgattcgaaacggaatgtatattgaaagtaagccaataaatgaatttaaaaacgaagatgagattatttctttaatgttcggttttgatatcgagcagcgttatcccgaaaaaacgccggttagaagtaaaaaaccatcgtttttagttagaaatttatcaaatgataaagtttctaatatcagttttgaaatcaaaccaggtgaaattttagttttttatggccttgtaagttcaggtcgaactgaattagctagaactttaattggcgatatgccttatttaaatggtcatattgaactaaatggtcaagaatttcgcccaaaaaatattaaggacagtcttgatcatggaatttattatctttctgaaaataggaaacaaattggtctaaatgttaatttaccaattaattttaatatcacaatttcttctcttggctcaaatcagattttttctttccttccttttgtctcaaaagcaaaaataactaaaactacaaatcattatattaaacaattaaagatcaaaacaacttcacaagatactccattaacttctttatcaggtggaaatcaacaaaaagtctcacttgcaaaagggcttgcaactcaaccgcaagttttcatcctcgatgaaccaactcgcggagtcgatgttggagcaagaaaggaaatttataatttaattcaccaattaaaacaagaaaataaaacaattatgataatttcttcggatatgcaagaagttatcggaatcgctgatcgggtaattacaatgtatgaaggcagaattacaagtgaattagttggcccgcaaattaccgatcaaaatataatgaaatattcacttaatttatag

SEQ ID NO: 38973 - protein, 501 aa, Mycoplasma hyopneumoniae 7448
MFFKLEKINLSFGPVKVLKNMNLELYKGAAVALIGENGAGKSSLMKVLSGVYQPDSGKMNFCSDNICNQKVEFSGVINSQKQGIAIIHQEQNLVESLSVSQNIFLGREFRNSFGLLDYKKQDEEAKKLLDTLGAEFSPKALVSSLSISQKQFIEIAKALSQKPEIIIFDEPTSVLTEKDTQKLYLLVEKLKKQGIAIVWITHRMEEIKKTCEFITVIRNGMYIESKPINEFKNEDEIISLMFGFDIEQRYPEKTPVRSKKPSFLVRNLSNDKVSNISFEIKPGEILVFYGLVSSGRTELARTLIGDMPYLNGHIELNGQEFRPKNIKDSLDHGIYYLSENRKQIGLNVNLPINFNITISSLGSNQIFSFLPFVSKAKITKTTNHYIKQLKIKTTSQDTPLTSLSGGNQQKVSLAKGLATQPQVFILDEPTRGVDVGARKEIYNLIHQLKQENKTIMIISSDMQEVIGIADRVITMYEGRITSELVGPQITDQNIMKYSLNL

SEQ ID NO: 38974 - DNA, 1545 bp, Mycoplasma hyopneumoniae 7448
  CDS (1)..(1545): transl_table=4
attaaattgaaaaaaactaatattctatcactaaaaaaaataaagaaagtttatggtcctgtaattgctctttctgatgtgacttttgttattccaaaaggggaaataactagcctagttggtgaaaatggcgcgggaaaatcgacacttttaaaaattttatcaggagtgattcctgctggacaatatgaaggtgatctaatttttgaagataaaattatggcttttgcaaatacaaaagcctccgaacgtgtcggaattgcaataattcatcaagaactttcaatttcaccttatttatcaatttgtgagaatatgtatatcggtaattatccgactaaatttggcaaagttaactgaaataagatgatttccgaatgcaaaaaatatctagaaatggtcggtcttgatgaagatccaacaacaattgctggctccctttcgattgcaaaacagcaaatggttgagatcgcaaaagcactttcaaaaaatgcaaaactactaattttagatgaacccacttcttctttaaatgatgaaaatgcttttcgcttacttgatattatgaaaagtttaaaaagtaaaggaattacttcgatttttgtctcccataaattaaatgaagtcaaatatgtctctgataatattgttgtaatccgcgatggtaaattcatttcccagtataataaaaatgaagaaataattgatgaaaaccggctaattcaagacattgttggccggcctttaaagtccaaatttcctcctagggatttagatcgaaaaatcggggaaattatttttgagatcaaagatatagtcattcctcatgctagtattgcaaattataatgttgtcaaaaatgcctcacttgatgtaaaacaaggcgaaattgtcggaatttccggacttgttggatcgggtcgaaccgaattaatgctttcactttttgggcaatattataacaaaccttcaagtggcaaagttttctataaaggtaaagaagtaaaatttactaacacaaaacaggcaatcaaatcgggaattatgtatgcttccgaagatcgaaaaaatgttggtctaatccaaattttttcgattcaaaataatatcacttccgcggccttgcatttattttcaaaatgaggaattctaaataaaaataaagaaataattaatgcccaaaaactaaaaaaagatgtaagtattaaaacaaaaaatattctaaataatgtcgaatccctttctgggggaaatcagcaaaaagttgtaattgccaaagctttaagtaccaaatttgaccttctaattatcgatgagccaacaaaaggtattgatgttggctcaaaatacgaaatttataaaattttactagacctttcatcacaaggtaaaacaattattgtaatctcttcggaaattgaagaacttttaggaatcaccgatcgaatttttgtcatgtcccagggaattatcaaaggtcagataaaaacttctgaggcaaatcaagaaaaaattatgcaactaagtattgggggttttatctaa

SEQ ID NO: 38975 - protein, 514 aa, Mycoplasma hyopneumoniae 7448
MKLKKTNILSLKKIKKVYGPVIALSDVTFVIPKGEITSLVGENGAGKSTLLKILSGVIPAGQYEGDLIFEDKIMAFANTKASERVGIAIIHQELSISPYLSICENMYIGNYPTKFGKVNWNKMISECKKYLEMVGLDEDPTTIAGSLSIAKQQMVEIAKALSKNAKLLILDEPTSSLNDENAFRLLDIMKSLKSKGITSIFVSHKLNEVKYVSDNIVVIRDGKFISQYNKNEEIIDENRLIQDIVGRPLKSKFPPRDLDRKIGEIIFEIKDIVIPHASIANYNVVKNASLDVKQGEIVGISGLVGSGRTELMLSLFGQYYNKPSSGKVFYKGKEVKFTNTKQAIKSGIMYASEDRKNVGLIQIFSIQNNITSAALHLFSKWGILNKNKEIINAQKLKKDVSIKTKNILNNVESLSGGNQQKVVIAKALSTKFDLLIIDEPTKGIDVGSKYEIYKILLDLSSQGKTIIVISSEIEELLGITDRIFVMSQGIIKGQIKTSEANQEKIMQLSIGGFI

SEQ ID NO: 38976 - DNA, 1560 bp, Ralstonia eutropha JMP134
  CDS (1)..(1560): transl_table=11
atgccactgtctgaagccactgccgccgcggcgccgctgctggaaatgcgcaacatttccaagactttcccgggtgtgaaggcactcagcaatgtccagctcacgatcttcccgggcgaagtccacgcgttgatgggcgaaaacggcgcgggcaaatccacgctgatgaagatactctccggcgcctatatcgccgatgagggcgctgagtgccgcatcggcagccggcccgtggtcatcgacggcccgctcgcggcccgcgcgcatggtgtggcggtgatctaccaggagctgagcctggcccccaacctgagtgtggccgagaacatctatctgggacggcacctgcaccgccacggcatggtggaccgcgccgcaatggcgcgcgcctgcgaaggcacgctagccaggcttggtgctgacttcacgccgcagacgctggtcgagcgcctgtcgatcgcccagcgccaactggtggaaatcgcacgcgcggtgcatttcgagactcgcattctggtgatggacgaacccaccacgccactgtccacccgcgaaaccgaccgcctgttcgcgctgatccgccagctgcgggccgacggcatggccatcatctacatcagccaccgcatggccgagatcgacgaactcgcggatcgcgtcaccgtgctgcgcgacggctactacgtcggcacgctggaaaaggcccagctgacccaggcggggctggtcaagatgatggtcggccgcgacctgtcgggcttctacaccaagacgcatggcgagacgcaggtcggcgacatggtgctgtcggtgcgcaatatgtcggacggccgccgcgtgcgcgattgcagcttcgacctgcatgccggagaggtcctgggcctggctggcctcgtcggcgcgggccgcacggaactggcgaggctggtgtttggcgcggatgcgcgcagcagcggcgcggtgttcctcgccggctcgccactggcgatcagccagccgcgccaggccatcgacgcgggcattgcctacctgacggaagaccgcaagctgcagggcctgttcctcgaccagagcgtgcacgagaacatcaacctgatcgttgccgcgcgcgatgcgctgcgcggcggccggctcaaccgtgcctgcgcacgccggcgtacggccgatgccgtcagttcgctgggcatccgcgtggcgcatccgcgcgtcaatgtcggtgcgctgtcgggcggcaaccagcagaaggtgatgctgtcgcgcctgctggaaaccaagccgcgtgtgctgattctggacgagcccacgcgtggcgtggacatcggtgccaaggcggagatctaccgcctgatcgacgccctcgcccgctccggcgtggccgtcctgctgatctccagcgaattgccggaagtggtaggcctctgcgaccgcgtgctggtgatgcgtgaaggccggctggtgggcgaggtgcaagcctgcccggatgccgcagccacgcaggaacgcatcatcgcactcgccaccggcgcggatgagccggcacaggccaccgtactgcactga

SEQ ID NO: 38977 - protein, 519 aa, Ralstonia eutropha JMP134
MPLSEATAAAAPLLEMRNISKTFPGVKALSNVQLTIFPGEVHALMGENGAGKSTLMKILSGAYIADEGAECRIGSRPVVIDGPLAARAHGVAVIYQELSLAPNLSVAENIYLGRHLHRHGMVDRAAMARACEGTLARLGADFTPQTLVERLSIAQRQLVEIARAVHFETRILVMDEPTTPLSTRETDRLFALIRQLRADGMAIIYISHRMAEIDELADRVTVLRDGYYVGTLEKAQLTQAGLVKMMVGRDLSGFYTKTHGETQVGDMVLSVRNMSDGRRVRDCSFDLHAGEVLGLAGLVGAGRTELARLVFGADARSSGAVFLAGSPLAISQPRQAIDAGIAYLTEDRKLQGLFLDQSVHENINLIVAARDALRGGRLNRACARRRTADAVSSLGIRVAHPRVNVGALSGGNQQKVMLSRLLETKPRVLILDEPTRGVDIGAKAEIYRLIDALARSGVAVLLISSELPEVVGLCDRVLVMREGRLVGEVQACPDAAATQERIIALATGADEPAQATVLH

SEQ ID NO: 38978 - DNA, 1509 bp, Ralstonia eutropha JMP134
  CDS (1)..(1509): transl_table=11
atgaacgcgatgacccaggtcagcccactgctcgagatgcgtggcatctgcaaaacttttccaggcgtcaaggcgctggacgacgtctccttcgacatctatcccggcgaggtgcacatgctccttggcgagaacggcgcaggcaagtcgtcgctgatgaaggtgctgtgcggcgtttatgtggccgatgccggcgagttccaccatcagggccagcgcgtcgaggtatcggggccggcggacacgatgcggctcggcatcgccgtgatcttccaggaattctcgctggtgccctacctcgacatcgcgcagaacatttttcttggccgtgagccgcgcggacgggtgccgggctcggtggaccatgcaaagatgcatgccgaagcgcggcgcctgctggacacgctcggcatggacatcagcacgcatacgcccgtgcatcgcctgggcgtggcgcagcagcagatgatcgagattgccaaggcgctgtcgcagaacgcacgcatcctcgtgctggatgagcccacggccgctctctccgagcgcgagaccgaaaagctgttcggcgtcatcgcacgcctcaaggccgacggcgtgtcgatgatctatatctcgcaccgcatggcggaagtcttcgcgctcggtgaccgcatcaccgtcatgcgagacggccgcaaggtcggcagctacatgcccggcgatgccacgcctgatgaactggtggcgcgcatggtcggccgcaaggtggacatgggctacacccgcacacgcggcggcccggtcggcgaggtggcgctcgacatgcaaggcgtcagcgctgacaacggcattgacgacatcacgctgcaggtgcgtgccggtgagatcgtcgggctggccgggctcgtcggctcagggcgcagcgaggtcgcgcgggctgtgtttggcgcggacccggtgcgcgcgggcgaaatccgcattttcggcaagtccatgcgcggcggtcccgacaaggcacgcgcgctcggcgcggcgctgatccccgaaagtcgcaagaccgaagggctcgcgctgatccgctcggtgcgcgacaacctgctcctggccggcctgcgccgcgcctttcccgcacactggtatcgcagcggcaaggcggcgcagctgtccacgcgcgagattggacggctgcgcattgccacgccgagcggcgaccagctcgcgcagttcctgtcgggcggtaaccagcagaagatcgtgatcggcaagtggctggtcgccgaatcgcgcctgttcattttcgacgagcctacgcgcggcatcgacgttggcgccaaggccgaaatcttcgcgctgatcgacgggctggtgaagcaaggcgccgccgtgctgctgatcagttccgagctgccagagatcatcaacgtatgcgaccgcacctatgtcatgcgcggcggccgcgtcgccggcgagcttgcgcatgacgccatgaccgaggaaagcattctgcaactggggatgaacgatgcctga

SEQ ID NO: 38979 - protein, 502 aa, Ralstonia eutropha JMP134
MNAMTQVSPLLEMRGICKTFPGVKALDDVSFDIYPGEVHMLLGENGAGKSSLMKVLCGVYVADAGEFHHQGQRVEVSGPADTMRLGIAVIFQEFSLVPYLDIAQNIFLGREPRGRVPGSVDHAKMHAEARRLLDTLGMDISTHTPVHRLGVAQQQMIEIAKALSQNARILVLDEPTAALSERETEKLFGVIARLKADGVSMIYISHRMAEVFALGDRITVMRDGRKVGSYMPGDATPDELVARMVGRKVDMGYTRTRGGPVGEVALDMQGVSADNGIDDITLQVRAGEIVGLAGLVGSGRSEVARAVFGADPVRAGEIRIFGKSMRGGPDKARALGAALIPESRKTEGLALIRSVRDNLLLAGLRRAFPAHWYRSGKAAQLSTREIGRLRIATPSGDQLAQFLSGGNQQKIVIGKWLVAESRLFIFDEPTRGIDVGAKAEIFALIDGLVKQGAAVLLISSELPEIINVCDRTYVMRGGRVAGELAHDAMTEESILQLGMNDA

SEQ ID NO: 38980 - DNA, 1491 bp, Staphylococcus saprophyticus subsp. saprophyticus ATCC 15305
  CDS (1)..(1491): transl_table=11
atgattgaaatgaagaatatttataaatcttttggtcagaatgatgttcttagaggtgtggattttgatattgcggatgccgaagttcatgcattgatgggggagaatggtgccggcaaaagtacgttaatgaaaattttaaccggcgtttatgaagcaaatggtggacaaattttagaagatggtaaaccacttcaatttaaaaatacaaaagacgctgagcaacatggtgtgtcatttattcaacaagaattaaatatttggcctaatttaacggttttagaaaacctatttttaggtaaagaaccaacgaagtttttagggataattaatcataaagtgatgagaaaacaagcgttggaaatatttaacaatttaaatatacagcttgatttgaatcaaatggctgggacgttatcagtaggtatgcaacaaatgttagaaattagtaaagcattaatgcaagattctaaagtcattattatggacgaaccaacggcagctttaacgactagtgagattgaagtgttattcacacaaattaataaattaaaatctaaaggtgtttcatttatttatatttcacatagaatggaagaaatttttaatattgcagaccgtattacagtgatgagagacggccggtctatattaacttcgaacacgcaagagacctctaatgcaaaaattgtaaaagccatgattggtagagatttggataaccagtatccagaaagaaattataagcaagatgaattagtgctgtcagttaatcagttaagttctacggtatatgacttaaatgatgtacattttgagttacacaagggtgagatttttggattcagtggacttatgggtgctggtagatctgaaatcatgcgcgtgttatttggcctagacaaaggacaaatgcaagtaacacttaatggtaaaaccattcacatgaataatcctaagacggccataaagcacgggttagcgtttattactgaaaatagaaaagaagaaggtttagttctacaagattctattatagaaaatatttcattacctgcattgaaaagtttttcaaagggtggttttttaacaccaacagcgatgaacaattatacagaacagatgattcagcgtttgaatatcaaaggtggaaaagatgatagttgtatggatttatctggaggaaatcaacaaaaggttgttttggctaaatggattgctactgcaccacacgttttgattttagacgaaccaactaggggaattgacgttggcgcaaaacgtgaaatttatcaattaatgaatgaactgacagaacgtggtatgtctatcattatgatttcatcagaattaccagaagtgataggaatgagtgatagagttgccgttgtacatgaaggtaatattgcaggtgttttaaataaaaaagatctaactgaggaacgtattatgacattagctacaggagggaatatcaatgaaacaatctag

SEQ ID NO: 38981 - protein, 496 aa, Staphylococcus saprophyticus subsp. saprophyticus ATCC 15305
MIEMKNIYKSFGQNDVLRGVDFDIADAEVHALMGENGAGKSTLMKILTGVYEANGGQILEDGKPLQFKNTKDAEQHGVSFIQQELNIWPNLTVLENLFLGKEPTKFLGIINHKVMRKQALEIFNNLNIQLDLNQMAGTLSVGMQQMLEISKALMQDSKVIIMDEPTAALTTSEIEVLFTQINKLKSKGVSFIYISHRMEEIFNIADRITVMRDGRSILTSNTQETSNAKIVKAMIGRDLDNQYPERNYKQDELVLSVNQLSSTVYDLNDVHFELHKGEIFGFSGLMGAGRSEIMRVLFGLDKGQMQVTLNGKTIHMNNPKTAIKHGLAFITENRKEEGLVLQDSIIENISLPALKSFSKGGFLTPTAMNNYTEQMIQRLNIKGGKDDSCMDLSGGNQQKVVLAKWIATAPHVLILDEPTRGIDVGAKREIYQLMNELTERGMSIIMISSELPEVIGMSDRVAVVHEGNIAGVLNKKDLTEERIMTLATGGNINETI

SEQ ID NO: 38982 - DNA, 1512 bp, Shigella sonnei Ss046
  CDS (1)..(1512): transl_table=11
atgttcacggcaacagaggcagtcccggtagcaaaagtggtggcaggaaataagcgttaccccggcgtcgttgcgctggataacgttaacttcacgctcaataaaggcgaagttcgtgcgctgttaggtaaaaacggcgcgggcaaatcgactctcattcgaatgcttaccggcagcgaacgcccggatagcggtgatatctggattggcgagacgcgactggaaggtgacgaagctacgttgactcgccgtgccgctgaactgggggttcgtgcggtttatcaggaattaagtctggtggaagggctgacggtggcagaaaacctctgccttggtcaatggcctcgccgcaacggcatgattgattacctgcaaatggcgcaggatgcccaacgttgcttacaggcgctgggcgttgacgttagtcctgaacaacttgtttcaacgctaagcccggcgcaaaagcaactggtggaaattgcacgggtgatgaagggcgagccgcgcgtggtcattcttgatgaacccaccagctcgcttgccagtgcagaagttgaactggtgatcagtgcggtgaaaaagatgtcggcactgggcgtggcggtgatttatgtcagccaccggatggaagaaatccgccgcattgcctcctgtgccaccgttatgcgcgatggtcaggtggcgggcgatgtgatgctcgaaaacacctccacgcatcatattgtgtcgctaatgctagggcgtgatcacgttgatattgcgccggttgcccctcaggaaattgtggatcaggccgtactggaagtccgtgcgttacgccataagcccaagctggaggatatcagctttacgttacgtcgcggcgaagtgcttggcattgctggcctgctgggggcagggcgcagtgaattgctgaaggcgattgttgggctggagacgtatgaacagggcgaaattgttatcaacggcgagaaaatcacgcgccccgattacggcgacatgctgaaacgcggcattggctatacgccagaaaaccgcaaagaagcggggatcattccctggttgggcgttgacgaaaatacagtgctgaccaatcggcaaaaaatcagcgccaacggagtgctgcaatggtccaccatccgccgcctgaccgaagaggtgatgcagcggatgacggtcaaggccgctagtagcgaaacgcccatcggcacgctttctggtggcaatcagcaaaaagtggtgatcggtcgttgggtctatgccgccagccagattttgttgctcgacgagccaacgcgcggcgtcgatatcgaagccaaacagcagatttaccgtattgtccgtgagctggctgccgaaggaaaaagcgtggtgtttatctccagtgaagtggaggagttgccgctggtgtgtgaccgcatcctgttattacagcacggcacgttctcgcaggagtttcactcgccggtcaatgtggatgagctgatgtccgccattctgtctgtgcactga

SEQ ID NO: 38983 - protein, 503 aa, Shigella sonnei Ss046
MFTATEAVPVAKVVAGNKRYPGVVALDNVNFTLNKGEVRALLGKNGAGKSTLIRMLTGSERPDSGDIWIGETRLEGDEATLTRRAAELGVRAVYQELSLVEGLTVAENLCLGQWPRRNGMIDYLQMAQDAQRCLQALGVDVSPEQLVSTLSPAQKQLVEIARVMKGEPRVVILDEPTSSLASAEVELVISAVKKMSALGVAVIYVSHRMEEIRRIASCATVMRDGQVAGDVMLENTSTHHIVSLMLGRDHVDIAPVAPQEIVDQAVLEVRALRHKPKLEDISFTLRRGEVLGIAGLLGAGRSELLKAIVGLETYEQGEIVINGEKITRPDYGDMLKRGIGYTPENRKEAGIIPWLGVDENTVLTNRQKISANGVLQWSTIRRLTEEVMQRMTVKAASSETPIGTLSGGNQQKVVIGRWVYAASQILLLDEPTRGVDIEAKQQIYRIVRELAAEGKSVVFISSEVEELPLVCDRILLLQHGTFSQEFHSPVNVDELMSAILSVH

SEQ ID NO: 38984 - DNA, 1506 bp, Shigella sonnei Ss046
  CDS (1)..(1506): transl_table=11
atggaagcattacttcagcttaaaggcatcgataaagccttcccgggcgtaaaagccctctcgggcgctgcgttaaatgtctatccgggccgcgtgatagcgctggtgggcgaaaacggcgcgggtaaatccaccatgatgaaagtgcttactggtatctatactcgcgatgccggcacgcttttatggctggggaaagaaacgacatttaccgggccgaaatcttcccaggaagccgggattgggattatccatcaggaactgaacctgatcccgcagttgaccattgccgaaaacattttcctcggtcgtgagtttgttaatcgctttggcaaaattgactggaaaaccatgtatgccgaagcggataaattgctggctaaacttaacctgtgctttaaaagcgacaagctggtgggcgatctttccatcggtgaccagcaaatggttgaaatcgccaaagtgctgagctttgagtcgaaagtcatcattatggatgaaccgaccgatgcgctgaccgataccgaaaccgaatccctgttccgcgtcatccgcgagctgaaatcgcaaggccgcggtattgtctatatctcccaccgcatgaaagaaatcttcgagatttgcgatgacgttaccgtttttcgtgacgggcaatttattgctgagcgcgaagtggcatcactgaccgaagattcgctgattgagatgatggtgggccgcaagctggaagatcaatatccacacctggacaaagcgccgggagatatccgcctgaaagtcgataatctctgcggacctggcgttaacgatgtctcttttactttacgcaaaggcgaaattcttggcgtctctggtttgatgggcgcaggtcgtaccgaactgatgaaagtgctctacggcgcacagccgcgcaccagcggttacgtcaccctggatgggcatgaagtcgttacccgttcaccgcaggatggcctggcaaacggcattgtgtatatctccgaagaccgtaaacgtgacggtttagtgttgggcatgtcagtaaaagagaacatgtcgctgacagcgctgcgctacttcagccgcgctggcggcagtttgaagcatgccgatgaacagcaggcagtgagtgatttcattcgtctgtttaatgtgaaaacaccgtcgatggaacaggcaattggtctgctttccggtggcaatcagcaaaaagtggcgattgcccgcggtctgatgacacgccccaaagtgttgatccttgatgaacctacccgtggcgtagatgtcggcgcgaaaaaagagatctatcaactgattaaccagttcaaagccgatggcttgagcatcattctggtgtcatcggagatgccagaagtattaggcatgagcgatcgcatcatcgtcatgcatgaagggcatctcagcggggaatttactcgtgagcaggccacccaggaagtgttaatggctgccgctgtgggcaagcttaatcgcgtgaatcaggagtaa

SEQ ID NO: 38985 - protein, 501 aa, Shigella sonnei Ss046
MEALLQLKGIDKAFPGVKALSGAALNVYPGRVIALVGENGAGKSTMMKVLTGIYTRDAGTLLWLGKETTFTGPKSSQEAGIGIIHQELNLIPQLTIAENIFLGREFVNRFGKIDWKTMYAEADKLLAKLNLCFKSDKLVGDLSIGDQQMVEIAKVLSFESKVIIMDEPTDALTDTETESLFRVIRELKSQGRGIVYISHRMKEIFEICDDVTVFRDGQFIAEREVASLTEDSLIEMMVGRKLEDQYPHLDKAPGDIRLKVDNLCGPGVNDVSFTLRKGEILGVSGLMGAGRTELMKVLYGAQPRTSGYVTLDGHEVVTRSPQDGLANGIVYISEDRKRDGLVLGMSVKENMSLTALRYFSRAGGSLKHADEQQAVSDFIRLFNVKTPSMEQAIGLLSGGNQQKVAIARGLMTRPKVLILDEPTRGVDVGAKKEIYQLINQFKADGLSIILVSSEMPEVLGMSDRIIVMHEGHLSGEFTREQATQEVLMAAAVGKLNRVNQE

SEQ ID NO: 38986 - DNA, 1503 bp, Shigella sonnei Ss046
  CDS (1)..(1503): transl_table=11
atgacgaccgaccaacaccaggagatcctccgcaccgaaggattaagtaaatttttccccggcgtcaaagcgttagacaacgttgatttcagcctgcgccgtggcgaaatcatggcgctgcttggtgaaaacggggcgggaaaatcaacgctaatcaaagcattaactggtgtataccacgccgatcgcggcaccatctggctggaaggccaggctatctcaccgaaaaataccgcccatgcacaacaactcggtattggcaccgtctatcaggaagtcaacctgctacccaatatgtcggttgctgataatctattcataggtcgcgaacccaaacgtttcggccttctacgccgtaaagagatggaaaagcgcgccaccgaactgatggcatcttacggtttcttcctcgacgtgcgcgaaccgcttaaccgcttttcagtcgcgatgcagcaaatcgtcgccatttgccgggctatcgatctctccgccaaagtgctgatcctcgatgaacccaccgccagcctcgacacccaggaagtggagctattatttggcctgatgcgtcagttgcgcgatcgcggcgtcagcctgatctttgtcactcactttctcgatcaggtctatcaggtcagcgatcggatcactgtcttacgcaacggcagtttcgtaggctgtcgggaaacgcgcgagctaccgcagatcgaactggtaaaaatgatgctggggcgcgagctggatacccacgtgctacagcgtgccgggcgaacattgttgagcgacaaacccgttgccgcgttcaaaaattacggcaaaaaaggaacgatagcaccgtttgatctcgaagtgcgccccggcgagatcgtcggtctggctggcttgctgggatccggacgtaccgaaaccgccgaagtgatcttcggtatcaaacctgctgacagcggcacggcgttgatcaaaggcaaaccgcaaaccctgcgatcgccacatcaggcttcagtactgggcatcggattctgcccggaagacaggaaaaccgatggcatcatcgccgccgcctcggtgcgggaaaatatcatcctcgctctccaggcccagcgcggctggctacgacccatttcccgcaaagagcagcaagagattgccgaacgctttatccgccagcttggcattcgcacaccttcaactgaacaaccgattgaatttctctccggtggcaatcagcaaaaagtgctgctttcacgttggctactgacccgaccgcaatttctgatccttgatgagccaacccgtggcattgatgttggtgcccacgccgagatcatccgcctgattgaaacgctgtgtgctgacggtctggcgctgctggtgatctcctccgaactggaagagctggtgggctatgccgaccgggtgatcatcatgcgcgatcgcaaacaggtggcggagatcccgctggcacagctttccgttccggcgatcatgaacgccattgcggcgtaa

SEQ ID NO: 38987 - protein, 500 aa, Shigella sonnei Ss046
MTTDQHQEILRTEGLSKFFPGVKALDNVDFSLRRGEIMALLGENGAGKSTLIKALTGVYHADRGTIWLEGQAISPKNTAHAQQLGIGTVYQEVNLLPNMSVADNLFIGREPKRFGLLRRKEMEKRATELMASYGFFLDVREPLNRFSVAMQQIVAICRAIDLSAKVLILDEPTASLDTQEVELLFGLMRQLRDRGVSLIFVTHFLDQVYQVSDRITVLRNGSFVGCRETRELPQIELVKMMLGRELDTHVLQRAGRTLLSDKPVAAFKNYGKKGTIAPFDLEVRPGEIVGLAGLLGSGRTETAEVIFGIKPADSGTALIKGKPQTLRSPHQASVLGIGFCPEDRKTDGIIAAASVRENIILALQAQRGWLRPISRKEQQEIAERFIRQLGIRTPSTEQPIEFLSGGNQQKVLLSRWLLTRPQFLILDEPTRGIDVGAHAEIIRLIETLCADGLALLVISSELEELVGYADRVIIMRDRKQVAEIPLAQLSVPAIMNAIAA

SEQ ID NO: 38988 - DNA, 1557 bp, Nostoc punctiforme PCC 73102
  CDS (1)..(1557)
atggcaacaagtatagaaacctcatttcctgatgcaccaagcaccacccctgtattagaaatgcaagggattaccaaacgatttcatggtgtatctgcgctccaaaatgttaatctcacgatttatccgggagaagttcatgccctgatgggtgaaaacggggcaggcaaaagcacattgatgaaaatcttggctggagcttacattgctgatgaaggagaaattcgcatcaatggtcaacccttgaaaattaccgatccggcgacagcacgcaaggcgggtattaatcttatttatcaagaactgaatgttgcacctaatttaaccgttaccgaaaatatgtttatgggtagcgagttgcgtcggggtcagtttttagaccgcaaagccatgcaacttgaagcagagcaagtgttagatagcttgggagccaattttacagcgcagactatagttgggactttatccatcgcagaacagcagcaagtcgaaattgccagagcgctgaaagataaaagccgggttttggtgatggatgagccaacagcagcattatctgaccgcgagagcgaccatttattcgaagtaattcgcaaactacggagtgatggcattgcgattatttacatcagtcatcgtatggaagaaatctatgctttagctgaccggattagcgtactgcgcgatggtcaatatattggtagtcttacacgcagcgaaatttctccacagcgattggtgcagatgatggttggtcgctccatgcaagacttttacgaacatcaacggcaaatgaatcctggccctgtggtgctggaagtcagaaacatgagtgatgctcgcaaaaagattgagcctgctagctttgaacttcatgcaggggaaattctcggtttagcggggttagttggtgcaggacgcacagaattatcccggctaatttttggtgctgaccgtaaagctagtggcgaagtatttttaaatggcaaaaaactagaaattaatacgcccagtgatgcgatcgctgccggaattggctatgtcccggaagaccgcaaagaccaaggtttatttctagagatgagcgcccgcaagaatattgctatcaacacactcaagcaggatgctaaaggtggaattgttaactggccttcagtgaatcggctgtcaacagaagcggtggaaaactttaatatccgcctggccaatttggaaattagagcattggatctttctggtgggaatcaacagaagctactgctagcgcgttggttagccattaaacctagagtactgatgttagatgagccgacacgcggcgtagatattggtgccaaaagcgaaatttaccgaattatgagtgaattggcagcacaaggtgttgctattttaatggtttccagcgaactatcagagattgtcggtatgagcgatcgcgtcttagtgatgcgagaaggacaactggtaggcgaactagacggcagccttggcaaagaaatcaaacaagaaaagattatgcactacgcaactggagcatcggaggtatcagcattatga

SEQ ID NO: 38989 - protein, 518 aa, Nostoc punctiforme PCC 73102
MATSIETSFPDAPSTTPVLEMQGITKRFHGVSALQNVNLTIYPGEVHALMGENGAGKSTLMKILAGAYIADEGEIRINGQPLKITDPATARKAGINLIYQELNVAPNLTVTENMFMGSELRRGQFLDRKAMQLEAEQVLDSLGANFTAQTIVGTLSIAEQQQVEIARALKDKSRVLVMDEPTAALSDRESDHLFEVIRKLRSDGIAIIYISHRMEEIYALADRISVLRDGQYIGSLTRSEISPQRLVQMMVGRSMQDFYEHQRQMNPGPVVLEVRNMSDARKKIEPASFELHAGEILGLAGLVGAGRTELSRLIFGADRKASGEVFLNGKKLEINTPSDAIAAGIGYVPEDRKDQGLFLEMSARKNIAINTLKQDAKGGIVNWPSVNRLSTEAVENFNIRLANLEIRALDLSGGNQQKLLLARWLAIKPRVLMLDEPTRGVDIGAKSEIYRIMSELAAQGVAILMVSSELSEIVGMSDRVLVMREGQLVGELDGSLGKEIKQEKIMHYATGASEVSAL

SEQ ID NO: 38990 - DNA, 1539 bp, Burkholderia cepacia R18194
  CDS (1)..(1539)
atgcaacccgacctgactccgaaccccgcgccgccgctgatcgcattgaccggtatcggcaagcgcttccccggcgtacaggcgctcgacgattgccatttcgacctgcgtgccggcgaagtgcatgcgctgatgggcgagaacggcgccggcaagtcgacactgatgaagatcctggcgggcgtctaccagcgcgacgacggcgagatccggatggacggccgtgcagtggaaatcgccgatccgcgcgccgcgcaggcgctcgggatcggcatcatccatcaggaactgaacctgatgaaccacctgagcgtcgcgcagaacatcttcatcggccgcgagccgcgcggccgcttcggcgtgttcgtcgacgaagcggcactcaaccgcgacgcggccgcgatcttcgcgcggatgcggctcgatctcgacccgcgtacaccggtcggacagctcacggtggcgaagcagcagatggtcgagatcgcgaaggcgctgtcgttcgactcgcgcgtgctgatcatggacgaaccgaccgccgcgctcaacaacgcggagatagccgagctgttccgcatcatcggcgacctgcgcgcacacggtgtcggcatcgtctacatctcgcacaagatggacgagctgcgccagatcgccgatcgcgtgaccgtgatgcgcgacggcaagtatgtcgcgaccgtgccgatggcggacacgtcgatggacgcgatcatcgcgatgatggtcggccgccagctcgccaccgaattccgcacgccgcccgatacgtccgcgaacgacgtcgcgctcgaagtgcgcgggctgtcgcgcggccgtgcgattcgcgatgtcggcttcacgctgcggcgcggcgagatcctcggcttcgcggggctgatgggcgcgggccgcaccgaggtcgcgcgagcggtgttcggtgcggacccggtcgacgcgggcgagatccgcgtgcatggcaagaccgtgtcgatccgctcgccggccgacgcggtgaggcacggcatcggctacctgtccgaggatcgcaagcacttcgggctcgcggtcgggatggacgtgcagaacaacatcgcgttgtcgagcatgcgccgcttcgtgcgccgcggcttgttcctcgacgcgcgtgcgctgcgcgacaccgcgcaatcgtacgtgcggcagctcgcgatccgcacgccgtcggtgacgcagccggcgcggctgctgtcgggcggcaaccagcagaagatcgtgatcgcgaagtggctgctgcgcgactgcgacatcctgttcttcgacgaaccgacgcgcggcatcgacgtcggcgcgaaaagcgagatctacaagctgctcgacgcgctcgccgccgacggcaaggcgatcgtgatgatctcgtcggagctgcccgaagtgctgcgcatgagccaccggattctcgtgatgtgcgaagggcgcgtgaccggcgaattgcgcgcggccgacgccacgcaggaaaagatcatgcagctcgcgacgcagcgcgagtcgaccgtattgtcctga

SEQ ID NO: 38991 - protein, 512 aa, Burkholderia cepacia R18194
MQPDLTPNPAPPLIALTGIGKRFPGVQALDDCHFDLRAGEVHALMGENGAGKSTLMKILAGVYQRDDGEIRMDGRAVEIADPRAAQALGIGIIHQELNLMNHLSVAQNIFIGREPRGRFGVFVDEAALNRDAAAIFARMRLDLDPRTPVGQLTVAKQQMVEIAKALSFDSRVLIMDEPTAALNNAEIAELFRIIGDLRAHGVGIVYISHKMDELRQIADRVTVMRDGKYVATVPMADTSMDAIIAMMVGRQLATEFRTPPDTSANDVALEVRGLSRGRAIRDVGFTLRRGEILGFAGLMGAGRTEVARAVFGADPVDAGEIRVHGKTVSIRSPADAVRHGIGYLSEDRKHFGLAVGMDVQNNIALSSMRRFVRRGLFLDARALRDTAQSYVRQLAIRTPSVTQPARLLSGGNQQKIVIAKWLLRDCDILFFDEPTRGIDVGAKSEIYKLLDALAADGKAIVMISSELPEVLRMSHRILVMCEGRVTGELRAADATQEKIMQLATQRESTVLS

SEQ ID NO: 38992 - DNA, 1545 bp, Pseudomonas fluorescens PfO-1
  CDS (1)..(1545)
atgcacgcgcaagtacagacacaagaacacagcgccagcggcagcctgcgtttcaacgggatcggcaagaccttcccgggcgtgaaggcgctggacggcatcagtttcgtcgcgcatcccgggcaggttcacgccttgatgggcgagaacggcgccggcaaatcgaccctgctgaaaatcctcggtggcgcctacattccgagcagcggcgagctgcagatcggcgagcagacgatggccttcaagtccactgccgacagcatcggcagcggcgtggcggtgattcaccaggaactgcatctggtgccggaaatgaccgtggcggagaacctgtttctcggtcacctgccggccagtttcggcctgatcaatcgcggcgcgctgcgccagcaagccttggcttgcctcaaaggcctggccgatgaaatcgacccgcagaccaaggtcggacgcctgtccctcggtcagcggcaactggtggaaatcgccaaggcgctgtcccgtggcgcgcacgtgattgccttcgacgaaccgaccagcagcctctcggctcgggaaatcgaccggttgatggcgatcatcggccggctgcgtgacgagggcaaagtagtgctctacgtctcccatcgcatggaagaagtgttccgcatctgcgacgcggtgacggtgttcaaggacggtcgctacgtgcgcaccttcgacgacatgagccagttgacccacgatcaactggtgacctgcatggtcggtcgcgacattcaggacatctacgattatcgcggtcgcccgcgcggtgccgtggcgctgagagtcgatggcttgctcggcccgggcctgcgcgagccgatcagtttcgatgcgcacaagggcgagattctgggcctgttcgggctggtcggggcagggcgcaccgagctgttccggctgctcagcggtctggagcgcaacaccgccggacgcctggaattgcgcggccatgaactgaagctgcgttcgccccgcgatgcgattgccgccgggattctgctatgcccggaggatcgcaagaaggaaggcatcattccgctcgccagtgtcgccgagaacatcaacatcagtgcgcgcggtgcgcattccgggctcggctgcctgctgcgcgggatttgggaaaagggcaacgccgagaaacagatcaaggccctgaaagtgaaaacgccccacgccgggcaacagatcaagttcctgtccggcggcaatcagcagaaggcgattctcggccgctggctgtcgatgccgatgaaagtcctgctgctcgacgagccgacccggggtatcgacatcggcgccaaggccgagatctaccagatcatccataacctggccgccgacggtatttcggtaatcgtggtgtccagcgatctgatggaagtgatgggtatttccgaccgcattctggtgctgtgcgagggcgccttgcgtggcgaagtcagccgcgaccaggccaacgaatccaacctgctgcaactggctttgccgcgccaccgcgctgacggcgtggcgaactga

SEQ ID NO: 38993 - protein, 514 aa, Pseudomonas fluorescens PfO-1
MHAQVQTQEHSASGSLRFNGIGKTFPGVKALDGISFVAHPGQVHALMGENGAGKSTLLKILGGAYIPSSGELQIGEQTMAFKSTADSIGSGVAVIHQELHLVPEMTVAENLFLGHLPASFGLINRGALRQQALACLKGLADEIDPQTKVGRLSLGQRQLVEIAKALSRGAHVIAFDEPTSSLSAREIDRLMAIIGRLRDEGKVVLYVSHRMEEVFRICDAVTVFKDGRYVRTFDDMSQLTHDQLVTCMVGRDIQDIYDYRGRPRGAVALRVDGLLGPGLREPISFDAHKGEILGLFGLVGAGRTELFRLLSGLERNTAGRLELRGHELKLRSPRDAIAAGILLCPEDRKKEGIIPLASVAENINISARGAHSGLGCLLRGIWEKGNAEKQIKALKVKTPHAGQQIKFLSGGNQQKAILGRWLSMPMKVLLLDEPTRGIDIGAKAEIYQIIHNLAADGISVIVVSSDLMEVMGISDRILVLCEGALRGEVSRDQANESNLLQLALPRHRADGVAN

SEQ ID NO: 38994 - DNA, 1902 bp, Burkholderia vietnamiensis G4
  CDS (1)..(1902): transl_table=11
atgggtcgtctacgcgctcaacgaggagaccgtgctcggcgcggtgcgcgcgaccgaacagctgcacatcccggccgcggacgtgatcggcgtcggcatcaacggtgcgggcgaggcgttcgccgagttccagaagaaggagccgaccggcttctacgggacgatcgcggtcagctcgacgaaccacggcaaggacagcacgcagaacctcgtcgactggatccgcaacggcaagatgccgccggccgacacgcagacgagcggcaagctgatgacgcgcgcgaactggcaggccgtgcgcgccgagctgggcatctgagcgtgcggggcgacgacgcgatgacgatgcagacgatcacggccgtgcccggcaacggcgccgcggccacgcccggcgccgcgacgccgctcgccggcggcgcgctgctcgcgctcgacggcatcacggtgacgttcccgggcgtgcgcgcgctcgacggcgtgtcgctggcggtgcgcgcgggcgaggtgcacgggctgatgggcgagaacggcgccggcaagtcgacgctgctgaaggtgctgtccggcgtgaaccagccgcaggccggcacgttgacgctgaacggcaccgagcagcgcttcgcgtcgacgcgcgcggcgctcgaggccggcatcgcgatcatctatcaggaactgcacctggtgccggagctgacggtcgcggaaaacctgatgctcggccaactgccgagccggctcggcgtggtcgacgaacgcgcgctcgccgtgcgcgcgctcgacgcgctggagcggctcggcgagcacatcgatcccgacatcccggtgaagtacctgtcgatcggccagcgccagatgatcgagatcggcaaggcgctgatgcgcgacgcgcgcgtgatcgcattcgacgaaccgaccagctcgctgtcggcgcgcgagacgacgcagctgttccgcatcatccgctcgctgcgcgaacagggccgcgcgatcatctacgtgacgcaccggatggaggaggtcgacgcgctgtgcgatcgcgtgacggtgttccgcgacggccggcggatcgagacgttcgagtcggtcgccgatctcgaccgcgaccggctgatcggctgcatggtcggccgctcgatcgaggacgtctacggctaccggccgcgcgcggccggcgacgtgatgatcgaggcgaaggccttgaccggccccggcctgtccgagccggtgtcgttcgccgcgcggcgcggcgagatcgtcggcttcttcgggctggtcggcgcaggccgctcggagctgatgaagctgctgtacggcgccgtgcgtccgaccggcgggcacgtcgagctgggcggcgcgcgcgtcgcgttcaggagcccgcgcgacgcggtgcgcgccggtatcgcgctgtgtccggaggaccgcaagcacgagggcatcgtcgcgatcgcgtcggtggccgacaacctgaacatcagcgcgcgccgccacttcagcccggcgcgcatgctgctcgacgggcggcgcgagcgcgagctcgcgcagaagtacatcgagcggctcgcgatcaagacgcgcgacggcgacacgccgatcggcgcgctgtcgggcggcaaccagcagaaggtcgtgctcgcgcgctggctggccgagcgcatcgacgtgttcctgatggacgagccgacgcgcggcatcgacgtcggcgcgcgcgccgaaatctacaacctgttttacgaactcgcggaagcgggccgcaccgtgatcatcgtgtcgagcgatctcgccgaagtgatcggcgtggcggaccgcatcatcgtgatgaaggaagggcgcatcgcgggcgaggtcgcgaaggcgcaggcgacgcccgacacgctgatcaagctcgcgctgccgcgctag

SEQ ID NO: 38995 - protein, 633 aa, Burkholderia vietnamiensis G4
MGRLRAQRGDRARRGARDRTAAHPGRGRDRRRHQRCGRGVRRVPEEGADRLLRDDRGQLDEPRQGQHAEPRRLDPQRQDAAGRHADERQADDARELAGRARRAGHLSVRGDDAMTMQTITAVPGNGAAATPGAATPLAGGALLALDGITVTFPGVRALDGVSLAVRAGEVHGLMGENGAGKSTLLKVLSGVNQPQAGTLTLNGTEQRFASTRAALEAGIAIIYQELHLVPELTVAENLMLGQLPSRLGVVDERALAVRALDALERLGEHIDPDIPVKYLSIGQRQMIEIGKALMRDARVIAFDEPTSSLSARETTQLFRIIRSLREQGRAIIYVTHRMEEVDALCDRVTVFRDGRRIETFESVADLDRDRLIGCMVGRSIEDVYGYRPRAAGDVMIEAKALTGPGLSEPVSFAARRGEIVGFFGLVGAGRSELMKLLYGAVRPTGGHVELGGARVAFRSPRDAVRAGIALCPEDRKHEGIVAIASVADNLNISARRHFSPARMLLDGRRERELAQKYIERLAIKTRDGDTPIGALSGGNQQKVVLARWLAERIDVFLMDEPTRGIDVGARAEIYNLFYELAEAGRTVIIVSSDLAEVIGVADRIIVMKEGRIAGEVAKAQATPDTLIKLALPR

SEQ ID NO: 38996 - DNA, 1545 bp, Burkholderia cenocepacia AU 1054
  CDS (1)..(1545): transl_table=11
atggcaatgcctcgcaatctgcccggtcaggccgcgcacgacgaagccgaccaggagatcctgcgcctggacgggattcgcaagcgcttcccgggcgtcctcgcgctcgacgggattcgcctcgacctgcgccgcggcgaggtgcatgcggtgtgcggcgaaaacggcgcgggcaaatcgacgctgatgaagatcatcagcggccaatacctgcccgacgagggtgccgttcactatcgcggcgcgccggtgcggtttcgttcggcttccgaagcgcaggcggccggcatctcgatcatccaccaggaactcaatctcgtcccgcacctgagcgtggcggagaacctgttccttgcgcgcgagccgcggcgcgggccgttcgtcgatacgaaacgcatgaacgcggaggcggcgcgctgcatcgcgcgcatcggcctgaacgtcgcgccgacgacgaaggtcggcgtgctgtccatcgcgcagcagcaaatggtcgagatcgcgaaggcgctgtcgcacgatgcgcgcgtgctgatcatggacgagcccacgtcgtcgctgacggaagcggaaacggtgcaactctttcgcatcatcgaggagctgcgcgccgacggcgtggcgattctgtatatctcgcaccggctcgacgaaatggcgcagatcgtcgatcgcgtgacggtgctgcgcgacgggcgccacatttcgacggacgatttcgccgacgtgagcatcgacgacatcgtcgcgcgcatggtggggcggacgctcgacgacgcctatccgtcgcggcaatcggtgccgaccgacgacgtgctgctcgacgtgcgggacctgcgtcgcgacggcgtgttcgggccggtgtcgttcgcgctgcgccgtggcgagatcctcggtttcgcgggattgatgggcgccgggcgcaccgagatcgcgcgcgcgatcttcggcgccgatcgtcccgacggcggcacgatcgcgctgcacggccggcccgtgacgatccgctcgccgcgcgaggcgatccggcacggcatcgcgtacctgtcggaggaccgcaagaaggaggggctcgcgctgccgatgccggtcgcggcgaatctcacgctcgcgaacgtgcgcggcatcgcgtcgcgcttcggattcctgcgtttcgacgacgagatcgacgtggcgcgccgctacgtgcaggacctggcgattcgcacgccgtccgtgcaccagcgcgtgcgcaacctgtccggcggcaaccagcagaaggtcgtcatcggcaaatggctgtaccgcggctcgaagatcctgttcttcgacgagccgacgcgcgggatcgacgtcggcgccaaattcgcgatctacgggctgatggaccggctcgccgccgacggcgtcggcgtggtgctgatcagttcggaactgccggagctgctcggcatgaccgaccggatcgccgtttttcatgaaggtcgaatgaccgccattctcgatacgaaacacaccagtcaggaggagatcatgcactacgcgtcggggcgttcccatgcttga

SEQ ID NO: 38997 - protein, 514 aa, Burkholderia cenocepacia AU 1054
MAMPRNLPGQAAHDEADQEILRLDGIRKRFPGVLALDGIRLDLRRGEVHAVCGENGAGKSTLMKIISGQYLPDEGAVHYRGAPVRFRSASEAQAAGISIIHQELNLVPHLSVAENLFLAREPRRGPFVDTKRMNAEAARCIARIGLNVAPTTKVGVLSIAQQQMVEIAKALSHDARVLIMDEPTSSLTEAETVQLFRIIEELRADGVAILYISHRLDEMAQIVDRVTVLRDGRHISTDDFADVSIDDIVARMVGRTLDDAYPSRQSVPTDDVLLDVRDLRRDGVFGPVSFALRRGEILGFAGLMGAGRTEIARAIFGADRPDGGTIALHGRPVTIRSPREAIRHGIAYLSEDRKKEGLALPMPVAANLTLANVRGIASRFGFLRFDDEIDVARRYVQDLAIRTPSVHQRVRNLSGGNQQKVVIGKWLYRGSKILFFDEPTRGIDVGAKFAIYGLMDRLAADGVGVVLISSELPELLGMTDRIAVFHEGRMTAILDTKHTSQEEIMHYASGRSHA

SEQ ID NO: 38998 - DNA, 1512 bp, Burkholderia cenocepacia AU 1054
  CDS (1)..(1512): transl_table=11
gtgtcagcggcactgcgttttgacaatatcggcaaggtatttcccggcgtgcgcgcactcgacggcatttcgttcgacgtgcatgcgggcgaggtgcatggcctgatgggcgagaacggcgcgggcaagtcgacgctgctgaagattctcggcggcgaataccagcccgatgcgggcagcgtgctggtcgacggccggcccgtgcagttcgcgaatgcggccgcgtcgatcgcggccggcatcgcggtgattcaccaggaattgcagtacgtgcccgacctgacggtcgcggagaacctgctgctcggccgcctgccgaacgcgttcggctgggtcaagaaacgcgaggcgaagcgttacgtgcgcgagcggctcgccgagatgggcgtcgatctcgatcctgacgcgcggctcgggcggctgtcgatcgcgcagcggcagatggtcgagatctgcaaggcgctgatgcgcaacgcccgcgtgatcgcgctcgacgaaccgacgagttcgctgtcgcatcgcgagacggaagtgctgttcaagctggtcgacgatctgcgcgcgcagggccgcgcgctgatctacatctcgcaccggatggacgagatctaccggctgtgcgacgcgtgcacgatcttccgcgacgggcgcaagatcgcgtcgcacgacgcgctggccgacgtgccgcgcgagcgactcgtcgccgagatggtcgggcgcgagatcgcggacatctaccattacgcgccgcgcacgctcggcgacgtgcggttttccgccgaaggcgtcgacggcccggcgctgcgcgaaccggcgagcttctcggtgcgcgcgggcgagatcgtcggcttcttcgggctcgtcggcgcgggccgcagcgagctgatgcggctcgtgtacggcgcggaccgccggcgcgcgggcgcgctgacgctcgacggcaagcgcatcgacgtgaagcgcaccggcgacgcgatccgccacggcatcgtgctgtgcccggaggaccgcaaggaagaagggatcatcgcgatcgcgtcggtcgccgagaacatcaacatcagctgccgccgccattcgctgcgtgcggggttgttcatcaacggcaagaccgaaagcgaaacggccgaccgcttcatccagcggctgaagatcaagacgccgaaccggcgccagaagatccgcttcctgtcgggcggcaaccagcagaaggcgatcctgtcgcgctggctcgcggagcccgacctgaaggtcgtgatcctcgacgagccgacgcgcgggatcgacgtcggcgcgaagcacgagatctacgacgtgatctaccggctcgcggagcgcggctgcgcgatcgtgatggtgtcgtcggaactgccggaagtgctcggcgtgtccgaccgcatcgtcgtgatgcgcgaaggccggatcgccggcgagctgccgcgcgccgacgcgaacgaacatgcggtgctgaacctcgcgctgccgcagacgagcgcggtcgaggcggcctga

SEQ ID NO: 38999 - protein, 503 aa, Burkholderia cenocepacia AU 1054
MSAALRFDNIGKVFPGVRALDGISFDVHAGEVHGLMGENGAGKSTLLKILGGEYQPDAGSVLVDGRPVQFANAAASIAAGIAVIHQELQYVPDLTVAENLLLGRLPNAFGWVKKREAKRYVRERLAEMGVDLDPDARLGRLSIAQRQMVEICKALMRNARVIALDEPTSSLSHRETEVLFKLVDDLRAQGRALIYISHRMDEIYRLCDACTIFRDGRKIASHDALADVPRERLVAEMVGREIADIYHYAPRTLGDVRFSAEGVDGPALREPASFSVRAGEIVGFFGLVGAGRSELMRLVYGADRRRAGALTLDGKRIDVKRTGDAIRHGIVLCPEDRKEEGIIAIASVAENINISCRRHSLRAGLFINGKTESETADRFIQRLKIKTPNRRQKIRFLSGGNQQKAILSRWLAEPDLKVVILDEPTRGIDVGAKHEIYDVIYRLAERGCAIVMVSSELPEVLGVSDRIVVMREGRIAGELPRADANEHAVLNLALPQTSAVEAA

SEQ ID NO: 39000 - DNA, 1560 bp, Burkholderia ambifaria AMMD
  CDS (1)..(1560): transl_table=11
atgacgatgcagacgatcacggccgtgtccggcaacgacgacgcggccacgcacggcgccgccgcgccgcccggcggcgcgctgctctcgctcgacgggatcacggtgacattcccgggcgtgcgcgcgctcgatgccgtgtcgctgtcggtgcgcgcgggcgaagtgcacgggctgatgggcgagaacggcgcgggcaagtcgacgctgttgaaggtgctgtccggcgtgaaccagccgcaggccggcacgctgacgctgaacggcacggtgcagcgcttcgcgtcgacgcgcgccgcgctcgaggccggcatcgcgatcatctaccaggagctgcatctggtgccggagctgacggtcgcggagaacctgatgctcgggcagttgccgagccggctcggcgtggtcgacgagcgcgcgctcgcggtgcgtgcgctcgatgcgctggagcgcctcggcgagcacatcgatccggacatcccggtgaagtatctgtcgatcggccagcgccagatgatcgagatcggcaaggcgctgatgcgcgacgcgcgcgtgatcgcgttcgacgaaccgacgagttcgctgtccgcgcgcgagacgacgcagctgttccgcatcatccgctcgctgcgcgcggaagggcgagcgatcatctacgtcacgcaccggatggaggaagtcgacgcgctgtgcgaccgcgtgacggtgttccgcgacggccgccggatcgagacgttcgaatcggtcgccgagctcgatcgcgaccagctgatcggctgcatggtcggccgctcgatcgaggacgtgtacggctaccggccgcgcgcggccggcgacgtgatgatcgaggcgaaggggctgaccgggcccggcttgtccgagccggtgtcgttcgccgcgcgccgcggcgagatcgtcggcttcttcgggctcgtcggcgcgggccgctcggagctgatgaagctgctgtacggcgcgacgcgcccgagcggcggccacgtcgagctgggcggcaagcgcgtcgcgttttcgagcccgcgccacgcggtgcgcgccggcatcgcgctgtgcccggaggatcgcaagcaggaaggcatcgtcgcgatcgcgtcggtggccgacaacctgaacatcagcgcgcgccgtcatttcagcccggcgcgcgtgctgctcgacgcgcggcgcgaacgcgacctcgcgcaacgctacatcgagcggctcgcgatcaagacgcccgacggcgacacgccgatcggcgcgctgtcgggcggcaaccagcagaaggtcgtgctcgcgcgctggctggccgagcgcatcgacgtgttcctgatggacgagccgacgcgcggcatcgacgtcggcgcgcgcgcggaaatctacaacctgttctacgaactcgcggaagcgggccgcacggtgatcctcgtgtcgagcgacctggccgaggtgatcggcgtgtcggaccggatcatcgtgatgaaggaaggacggatcgcgggcgaagtggcgaaggcgcaggcgacgcccgacgcgctgatcaagctcgcgctgccgcgttag

SEQ ID NO: 39001 - protein, 519 aa, Burkholderia ambifaria AMMD
MTMQTITAVSGNDDAATHGAAAPPGGALLSLDGITVTFPGVRALDAVSLSVRAGEVHGLMGENGAGKSTLLKVLSGVNQPQAGTLTLNGTVQRFASTRAALEAGIAIIYQELHLVPELTVAENLMLGQLPSRLGVVDERALAVRALDALERLGEHIDPDIPVKYLSIGQRQMIEIGKALMRDARVIAFDEPTSSLSARETTQLFRIIRSLRAEGRAIIYVTHRMEEVDALCDRVTVFRDGRRIETFESVAELDRDQLIGCMVGRSIEDVYGYRPRAAGDVMIEAKGLTGPGLSEPVSFAARRGEIVGFFGLVGAGRSELMKLLYGATRPSGGHVELGGKRVAFSSPRHAVRAGIALCPEDRKQEGIVAIASVADNLNISARRHFSPARVLLDARRERDLAQRYIERLAIKTPDGDTPIGALSGGNQQKVVLARWLAERIDVFLMDEPTRGIDVGARAEIYNLFYELAEAGRTVILVSSDLAEVIGVSDRIIVMKEGRIAGEVAKAQATPDALIKLALPR

SEQ ID NO: 39002 - DNA, 1692 bp, Burkholderia ambifaria AMMD
  CDS (1)..(1692): transl_table=11
atggatcacgcagggcaaggcaccgccggcgctgacgctgacgacgggcatgctcgcgacgcgcgacaacgtgtcgaaggtgcgcgacgagatggggctcgcatcgaagtaagcggcttgccggctgccgcggcgatgcggcagccggcgatcgatggatctgcaaagtggggagacgacgtgtcagcggcactgcgttttgacaatatcggcaaggtatttcccggcgtgcgcgcactcgacggcatctcgttcgacgtgcatgcgggcgaggtgcatggcctgatgggcgagaacggcgcgggcaagtcgacgctgctgaagattctcggcggcgaataccagcccgatgcgggcagcgtgctggtcgacggccagcccgtgcatttttcgagtgcggccgcgtcgatcgcggccggcattgcggtgattcaccaggaactgcagtacgtgcccgacctgacggtcgcggagaacctgctgctcggccgcctgccgaacgcgctcggctgggtgaagaagggcgaggcgaagcgccatgtgcgcgaacggctcaccgcgatgggcgtcgatctcgatcccgacgcgaagctcgggcggctgtcgatcgcgcagcggcagatggtcgagatctgcaaggcgctgatgcgcaacgcgcgcgtgatcgcgctcgacgagccgacgagctcgctgtcgcatcgcgagaccgaggtgctgttcaagctcgtcgacgacctgcgcgcgcagggccgcgcgctgatctacatctcgcaccggatggacgagatctaccggctgtgcgatgcatgcaccatcttccgcgacgggcgcaagatcgcgtcgcacgaatcgctcgccgacgtgccgcgcgagcagctcgtcgccgagatggtcgggcgcgagatttcggacatctaccattacgcgccgcgcgcgctcggcgacgtgcggttttcggccgaaggcgtcgacggcccggcgctgcgcgaaccggcgagcttctcggtgcgcgcgggcgagatcgtcgggttcttcgggctggtcggcgcggggcgcagcgaactgatgcggctcgtgtacggcgcggatcgccggcgcgcgggcgagctgacgctcgacggcaagcgcatcgacgtgaagcgcaccggcgacgcgatccgccacggcatcgtgctgtgtccggaggaccgcaaggaagaagggatcatcgcgatggcgtcggtcgcggagaacatcaacatcagctgccgccgccattcgctgcgcgccgggctcttcatcgaccgcaagaccgaaatcgagacggccgaccgcttcatccagcggctgaagatcaagacgccgaaccgccggcagaagatccgcttcctgtcgggcggcaaccagcagaaggcgatcctgtcgcgctggctcgcggagcccgacctgaaggtcgtgatcctcgacgagccgacgcgcgggatcgacgtcggcgcgaagcacgagatctacgacgtgatctaccggctcgcggagcgcggctgcgcgatcgtgatggtgtcgtcggaactgccggaagtgctcggcgtgtccgaccgcatcgtcgtgatgcgcgaaggccgcatcgcgggcgagctggcgcgcgcgcaggcgaacgagcatgcggtgctcagcctcgcgctgccgcagacgagcgtcgccgaggcggcctga

SEQ ID NO: 39003 - protein, 563 aa, Burkholderia ambifaria AMMD
MDHAGQGTAGADADDGHARDARQRVEGARRDGARIEVSGLPAAAAMRQPAIDGSAKWGDDVSAALRFDNIGKVFPGVRALDGISFDVHAGEVHGLMGENGAGKSTLLKILGGEYQPDAGSVLVDGQPVHFSSAAASIAAGIAVIHQELQYVPDLTVAENLLLGRLPNALGWVKKGEAKRHVRERLTAMGVDLDPDAKLGRLSIAQRQMVEICKALMRNARVIALDEPTSSLSHRETEVLFKLVDDLRAQGRALIYISHRMDEIYRLCDACTIFRDGRKIASHESLADVPREQLVAEMVGREISDIYHYAPRALGDVRFSAEGVDGPALREPASFSVRAGEIVGFFGLVGAGRSELMRLVYGADRRRAGELTLDGKRIDVKRTGDAIRHGIVLCPEDRKEEGIIAMASVAENINISCRRHSLRAGLFIDRKTEIETADRFIQRLKIKTPNRRQKIRFLSGGNQQKAILSRWLAEPDLKVVILDEPTRGIDVGAKHEIYDVIYRLAERGCAIVMVSSELPEVLGVSDRIVVMREGRIAGELARAQANEHAVLSLALPQTSVAEAA

SEQ ID NO: 39004 - DNA, 1527 bp, Rhizobium tropici
  CDS (1)..(1527): transl_table=11
atgagtatgcttgtcgagatggtcagcatcaacaagtcctttggtgcgaccaaagtcctgtcgaatgttcaattttcgcttgaacgcggctccgtccacgcgttgatgggcgagaacggggcgggaaaatccacgctgatgcgaattctggccggcgtctatcaacagaccgctggacgcatccgtctgcgaggagaagaagtgaccttccggtcccccaaggaagcgcgtctcgccggggtgtcgacagtgtttcaggagttcaccctgatccccaatctcacggtcgccgaaaacatgtttcttggacacgaaccgcggcgtgccgatgggtcgatagacaccgccgaggtcgtcgagcgatcccgcaagctgcttgccgacgttttccctcaactggacgcgacggcgattgtggaaacgctgacggttgcccagcagcaggcagtggaaatcgccaaaggcctgacatccaatgccgatgtcttcattttcgatgaaccgaccgcggcactaaactcaacggacgtcgctcatctcttcaaggtcatccgcgatctgaaggcgcaaaacaaggctgtcgtctacatctcgcatcggatgaacgaggtgttcgaactgtgcgacaccatcaccgtcatgaaggacggggcttgggtaaagacagccagggcagaagactttaatctccaaacgctcgtggcaaccatggttggacgcgaacttcagagtttctttccgccgagggcacaggccattggatcggcgatgctcgtcgtggcagggcttcgtctcaatgaccatggcccgccagtcggtttttccgtacgcacgggcgagatcatcgggctcgccgggctggagggccaggggcagcgtgaaatcatgcgtgcggtcgtcggggtcgaacccgccgcagctgcgagcgtccagcgtcgccgcgacgacagcatgatcgatgtgaacgtatcctcaggcttttcgagtgccatctcagcgggcattggtttcattcctgaagaccgcaagcaggaaggcctgtttcttcggcttccgatctacgacaacatcgcacttggcaagcaattgaaccggaacatggcgagcgttgcatggcgttccatctccagggttcacgatgtcataaagtcgctccgtgttgcggctgccgaccccgcctcgcccgtcggcaaactttcgggcggaaaccagcaaaaggtgcttctgtgccgctggctgctttcgggggtcgatatccttgtcatcgaggagccgacacggggcgtcgatgtcggcgcgaaagcggaaatctacaagctgcttcgcgattttgccgatcgtggcggtgcagtgatcgtctcgtcgcgcgagcacgccgaactgatcgggctgtgtgacaacatcctggtcgttcacgacaaaaagatcgtcgggcagatgcccgcgctcgatgccacagaggaaaccatcctgggaaccgcactaggttcgaacttcgcgcacgatccgcgcgccgctgttcattga

SEQ ID NO: 39005 - protein, 508 aa, Rhizobium tropici
MSMLVEMVSINKSFGATKVLSNVQFSLERGSVHALMGENGAGKSTLMRILAGVYQQTAGRIRLRGEEVTFRSPKEARLAGVSTVFQEFTLIPNLTVAENMFLGHEPRRADGSIDTAEVVERSRKLLADVFPQLDATAIVETLTVAQQQAVEIAKGLTSNADVFIFDEPTAALNSTDVAHLFKVIRDLKAQNKAVVYISHRMNEVFELCDTITVMKDGAWVKTARAEDFNLQTLVATMVGRELQSFFPPRAQAIGSAMLVVAGLRLNDHGPPVGFSVRTGEIIGLAGLEGQGQREIMRAVVGVEPAAAASVQRRRDDSMIDVNVSSGFSSAISAGIGFIPEDRKQEGLFLRLPIYDNIALGKQLNRNMASVAWRSISRVHDVIKSLRVAAADPASPVGKLSGGNQQKVLLCRWLLSGVDILVIEEPTRGVDVGAKAEIYKLLRDFADRGGAVIVSSREHAELIGLCDNILVVHDKKIVGQMPALDATEETILGTALGSNFAHDPRAAVH

SEQ ID NO: 39006 - DNA, 1536 bp, Chlorobium tepidum
  CDS (1)..(1536): transl_table=11
atggcgacagcagtaaagctctccggaatctccaaaaccttcggcagcctcaaggccaacgacaacgtttcgctttcgatcgaagcggggtcgatccacgcgctcgtcggcgaaaacggcgcgggcaaaagcaccttgtcgaacatcatctatggcctgctgcatcctgactccgggacgattgaaatcgatggcaaggcggtgaaattcagctccgtgcggcaagccatcgaggccggaatcggcatggtgcaccagcacttcatgctggtgccgaccctctcggtgacggaaaacatcattctcggcaaggaggagagccgcctagcactgccaacccggcgcatcggcaaggaaattcgccagctcagccagcagcacggactcgaagtcgatccggacgcactggtttcaaccctgtcggtcggcgaacagcagcgcgtggaaattctcaagctgctctaccgacgtgccaagctcctgattctcgacgagccgaccgccgtgctctcgccgcccgaaaccgcgcgactctttgccacgctgcgctcgctcgccgccgaagggcgtaccgtcctgctcatcacccacaagctcgacgaagtactcaccgtctcggactcggtgagcgtcatgcgcaaagggtcgctggtcggcaccgtgccgaccacatcgaccagcaaggaggatttggcgagaatgatggtcgggcgcgatgttctgctcagaaccgccaatgcgccgcagactccgggtaaaacagtgctctcgatcgacaagctgacctaccgctcgccgcttggcatcgacaaactcaccggcctgacgctgcacgtgagagcaggagaaatctacggcatcgccggagtggagggcaacggccagagcgagctgctctcgttgttgtggggaacgttcgatcgcagcggcaaaaccggcggatcgatcaccatcgacgcccaggagacgcttggcaagaatccgtcggaaatcgctgcactcggcgtttcgatgatacccgaagaccggcacaaatcggcgatcatcgctgaatatggcatcgaggaaaacctgatcctcggcaggcatcgcgaaaaagcattccatcgcggcatcggatttgatcgtgacgccgttcacaaaaatgctacggccatgatcgagcaatacgacatccggtgtgcggcgggaaccaatccgcccatcgcctctctctctggcggtaaccagcagaagatcgtggtggcgcgtgaaatggaacgcccccaactgaagctgcttgtgctggcgcagccaacgcgcggcgtcgatatcggcgctatcgagcagattcacaagcgcatcatcgacgctcgcaaaagcggtctggcgatcctgctcatttcgtcggaactcgaagagattgtcgctctttcgactcgaatcggttgcctctacaaaggcgcgatccgccacgaattcagcgaaacggaggtctggcggggacgcgatcacgagtcgggcttcgagaaagagatcggtatgcacatcacctga

SEQ ID NO: 39007 - protein, 511 aa, Chlorobium tepidum
MATAVKLSGISKTFGSLKANDNVSLSIEAGSIHALVGENGAGKSTLSNIIYGLLHPDSGTIEIDGKAVKFSSVRQAIEAGIGMVHQHFMLVPTLSVTENIILGKEESRLALPTRRIGKEIRQLSQQHGLEVDPDALVSTLSVGEQQRVEILKLLYRRAKLLILDEPTAVLSPPETARLFATLRSLAAEGRTVLLITHKLDEVLTVSDSVSVMRKGSLVGTVPTTSTSKEDLARMMVGRDVLLRTANAPQTPGKTVLSIDKLTYRSPLGIDKLTGLTLHVRAGEIYGIAGVEGNGQSELLSLLWGTFDRSGKTGGSITIDAQETLGKNPSEIAALGVSMIPEDRHKSAIIAEYGIEENLILGRHREKAFHRGIGFDRDAVHKNATAMIEQYDIRCAAGTNPPIASLSGGNQQKIVVAREMERPQLKLLVLAQPTRGVDIGAIEQIHKRIIDARKSGLAILLISSELEEIVALSTRIGCLYKGAIRHEFSETEVWRGRDHESGFEKEIGMHIT

SEQ ID NO: 39008 - DNA, 1491 bp, Treponema pallidum
  CDS (1)..(1491): transl_table=11
atgtgcgatgtactcaccataagggatctttctaagtcttttgcgaggaacagggttctcaacggggtgaacttccgtatgggaaagggtgccgtggtggggcttatgggagaaaatggtgcgggaaaatccacgcttatgaagtgcctctttggaatgtacgctaaggacactggtcagattctcgtggatggaagcccggtggactttcagtctcccaaagaagcgctagaaaacggtgtcgccatggtccatcaggagctcaatcaatgccttgatcgcactgtcatggacaatttgtttctcggcaggtaccctgcccgtttcgggatagttgacgagaaacgcatgctcgacgactccctcactctgttcgcttccttgaaaatggacgtaaacccgcgggccgtcatgcgcagcatgtctgtctctcagcggcagatggtagagattgccaaggcgatgtcctataacgcgaagattatagtcctcgacgagcctacttcctctctcacggagagggagattgtcaggctctttgccattatacgagacctgagcaaaaaaggagtggcattcatctatatctcccacaaaatggatgagatctttcagatctgcagcgaggtgattgtgctgcgggatggtgtcctcacgctctcacaatccataggggaagtggaaatgagcgacctcatcaccgctatggtcgggcgcactttggacaagcgctttcccgacgctgacaataccgtcggtgacgattatcttgaaatacgaggtctttctacaaggtatgctccgcagctgcgggatatttccctttctgtgaaaaggggcgagatttttggcttgtacgggctggtcggtgcggggaggagtgaactgcttgaagcgattttcggcctacgtaccatcgcagacggtgagatctctttagcaggaaaaaaaattcgcttgaagagcagcagggacgcaatgaaactcaatttcgcctttgtgcccgaggaacgtaagctcaacggaatgttcgcaaaggggagcatagagtataacaccacgattgcaaatctccctgcgtataagcgttacggtctactctcaaagaaaaagctgcaggaggcagcggagcgggaaataaaggccatgcgcgtgaagtgcgtttctccaagcgagcttatcagtgcgctcagcgggggtaatcagcagaaagtcattattggaaagtggctcgaacgcgatcccgacgtcctcttgcttgatgagccgaccagggggatcgacgtgggtgcgaaatatgaaatttatcagctcatcattcgtatggcgcgtgagggaaagacaatcattgtggtttctagtgaaatgcctgaaattcttggaatcaccaacaggatcgcagtcatgtccaattatcgattggctgggattgtggatacaaagagtaccgatcaggaagccttgctcagactttctgcgcgatacctgtag

SEQ ID NO: 39009 - protein, 496 aa, Treponema pallidum
MCDVLTIRDLSKSFARNRVLNGVNFRMGKGAVVGLMGENGAGKSTLMKCLFGMYAKDTGQILVDGSPVDFQSPKEALENGVAMVHQELNQCLDRTVMDNLFLGRYPARFGIVDEKRMLDDSLTLFASLKMDVNPRAVMRSMSVSQRQMVEIAKAMSYNAKIIVLDEPTSSLTEREIVRLFAIIRDLSKKGVAFIYISHKMDEIFQICSEVIVLRDGVLTLSQSIGEVEMSDLITAMVGRTLDKRFPDADNTVGDDYLEIRGLSTRYAPQLRDISLSVKRGEIFGLYGLVGAGRSELLEAIFGLRTIADGEISLAGKKIRLKSSRDAMKLNFAFVPEERKLNGMFAKGSIEYNTTIANLPAYKRYGLLSKKKLQEAAEREIKAMRVKCVSPSELISALSGGNQQKVIIGKWLERDPDVLLLDEPTRGIDVGAKYEIYQLIIRMAREGKTIIVVSSEMPEILGITNRIAVMSNYRLAGIVDTKSTDQEALLRLSARYL

SEQ ID NO: 39010 - DNA, 1518 bp, Thermoanaerobacter ethanolicus; identical to SEQ ID NO: 27588
  CDS (1)..(1518): transl_table=11

SEQ ID NO: 39011 - protein, 505 aa, Thermoanaerobacter ethanolicus; identical to SEQ ID NO: 27589

SEQ ID NO: 39012 - DNA, 1449 bp, Rhizobium sp
  CDS (1)..(1449): transl_table=11
atggagttgcgggaaaatgagatcctcggcctgatcggccagaacggctctggaaagtcgacgctactgaagattttcactggcgtcgaacaaccaacggaaggctcgctgctgctgaggggtcagcaaactatcatccgctctcctcttgcagcggccgccctcggcatcggcatggtgcatcaggaacaatcattgattacaaacctgacggtcgccgaaaacatcttcttcgacaagcacgcacttggcaaacggtatggtttctacaactggaggagcctgaacaaggccgctgagcgccagcttgcgaagcttgaatgcgaaattccaccggacctcaaagtggaaaagctcagcttcccggaacgacagcttgtggaattcgcaaaggtcctcgctgttgaagagttaattgacgaccaactcgtcatccttttcgacgagccgacgtcccttctcagcccatctgaaattgaggggctttttcggcagatccggcggctcaaagagcgcgcatctatcgtatttgtttcgcatcgcatggacgaagtccttgaaatctccgaccgcgttcacgtcatgagcaatggggaaaacgttgccgaacgcactccgtcggaaacagatcacaaggaactctatcacctgatggtcggttcgcgtcgatccgaggactactttctcgaggagcgccgccgccctacgagcgcagcgccgccgcggctcgaaacccatagactatcggcgcccggggcttttaaggatgtttcctttgccatccgccaaggtgagatactggctctaacaggtgttgccgggtccggcgccgaagaattctgccgcgctcttttcgggctcgaagagggcgtcacgggcaaaatcatcttcaatggcaaggaacatcctgttgatgcgcgtcccagtgacttaatcgcggagggtatcggctatgtcgctgcagaacgaaagcttgagggagtggttaccgggcgaaccattgttgacaacatcgtactgtcattcggaagcaaacttgggaagggactgtttatcgacagagatcgtgaaatcagctcggcgcttcactggatcgcgcgcctcaaggtaaaaactccgaacgcggccgaatatgtcgagaggttaagcggcgggaaccagcagaaggtgtcgctggcgaaatggctcctgtcagaaaacttgcagttactgatactcgatcatccaacccgcggacttgatcccggtgcaaaggccgatttgttcgaagcaatacgtgatctctcagatcagggaatatcgattctatttgtgtcggaaacgctggaggaaaccttaggaatggccgatacgatcgtcgtcatgcgtgatggacaagtctctgccacgttctccgatctcttccatgcgaaaccggcgcctgaggctatagtggaggctatggtatga

SEQ ID NO: 39013 - protein, 482 aa, Rhizobium sp
MELRENEILGLIGQNGSGKSTLLKIFTGVEQPTEGSLLLRGQQTIIRSPLAAAALGIGMVHQEQSLITNLTVAENIFFDKHALGKRYGFYNWRSLNKAAERQLAKLECEIPPDLKVEKLSFPERQLVEFAKVLAVEELIDDQLVILFDEPTSLLSPSEIEGLFRQIRRLKERASIVFVSHRMDEVLEISDRVHVMSNGENVAERTPSETDHKELYHLMVGSRRSEDYFLEERRRPTSAAPPRLETHRLSAPGAFKDVSFAIRQGEILALTGVAGSGAEEFCRALFGLEEGVTGKIIFNGKEHPVDARPSDLIAEGIGYVAAERKLEGVVTGRTIVDNIVLSFGSKLGKGLFIDRDREISSALHWIARLKVKTPNAAEYVERLSGGNQQKVSLAKWLLSENLQLLILDHPTRGLDPGAKADLFEAIRDLSDQGISILFVSETLEETLGMADTIVVMRDGQVSATFSDLFHAKPAPEAIVEAMV

SEQ ID NO: 39014 - DNA, 1539 bp, Rhizobium leguminosarum bv
  CDS (1)..(1539): transl_table=11
atgaacgccgcctttcaacaacccgtcacggacagcaaaaccggcgatgcccccgccattctggaaatgcgcggcatctcccagatctttcctggtgtgaaggcgctggacaatgtcagcattgcccttcatcccggcacggtcaccgctttgatcggcgaaaacggcgccggcaaatcgacgctcgtcaagatcctgaccggcatctaccgcccgaacgaaggcgagattctggtcgacggccggccgacgacctttgccagcgcccaggccgcgatcgatgccggcgtcaccgccatccatcaggaaaccgtgcttttcgacgagctgacggtggccgagaacattttcctcggccacgcgccgcgcacgcgctttcgcaccatcgactggcagacgatgaacagccggtcgaaggcgctgctgaccgcgctcgaaagcaatatcgatccgaccatccggctaaaggacctgtcgatcgcgcagcgtcacctggtggcgatcgcgcgcgctttgtcgatcgaggcccgcatcgtcatcatggacgagccgaccgccgcactctcccggaaggaaatcgacgatctcttccgcattgtccggggcctgaaagaacagggcaaggcgatcctcttcatcagccacaagttcgacgagctttacgaaatcgccgatgatttcgtcgtcttcccgcgacggtcgcgccgtccggtcaggggcgtctcaaggaaaacgccgcaggacgagatcgtccggatgatggtcggccgcgacgtcgagaacgtctttccgaagatcgacgtcgccatcggcggcccggtcctggagatccgcaattacagccaccgcaccgaattccgcgacatttccttcacgttgcgcaagggcgagattctcggcgtttacggcctgatcggcgccggccgctcggaactgtcgcaatcgctcttcggcatcaccaagccgctttcgggcaagatggtgctcgaaggccaggagatcaccatccattcgccgcaggatgctatccgcgccggcatcgtctacgtgccggaggagcgcggccgccatggcctggcgctgccaatgccgatcttccagaacatgacgctgccttcgctcgcccgcacctcgcgccgcggtttcctgcgggccgcaaacgaattcgcgctcgcgcgcaaatatgccgagcggctggatctgcgcgccgccgccctttccgtgccggtcggcacgctctccggcggcaaccagcagaaggtcgtcatcggcaaatggctggcgacggcgccgaaggtcatcatcctcgacgagccgaccaagggcatcgacatcggctcgaaggccgccgtgcacggcttcatcagcgaactcgccgccgagggcctgtcgatcatcatggtttcctccgaactgccggagatcatcggcatgtcggatcgcgttctcgtcatgaaagaaggcctgtcggcggggattttcgaacgcgccgaactgtcgccggaagcgctggtgcgcgccgccaccggcaatgcgtga

SEQ ID NO: 39015 - protein, 512 aa, Rhizobium leguminosarum bv
MNAAFQQPVTDSKTGDAPAILEMRGISQIFPGVKALDNVSIALHPGTVTALIGENGAGKSTLVKILTGIYRPNEGEILVDGRPTTFASAQAAIDAGVTAIHQETVLFDELTVAENIFLGHAPRTRFRTIDWQTMNSRSKALLTALESNIDPTIRLKDLSIAQRHLVAIARALSIEARIVIMDEPTAALSRKEIDDLFRIVRGLKEQGKAILFISHKFDELYEIADDFVVFPRRSRRPVRGVSRKTPQDEIVRMMVGRDVENVFPKIDVAIGGPVLEIRNYSHRTEFRDISFTLRKGEILGVYGLIGAGRSELSQSLFGITKPLSGKMVLEGQEITIHSPQDAIRAGIVYVPEERGRHGLALPMPIFQNMTLPSLARTSRRGFLRAANEFALARKYAERLDLRAAALSVPVGTLSGGNQQKVVIGKWLATAPKVIILDEPTKGIDIGSKAAVHGFISELAAEGLSIIMVSSELPEIIGMSDRVLVMKEGLSAGIFERAELSPEALVRAATGNA

SEQ ID NO: 39016 - DNA, 1515 bp, Bifidobacterium longum bv; identical to SEQ ID NO: 27590
  CDS (1)..(1515): transl_table=11

SEQ ID NO: 39017 - protein, 504 aa, Bifidobacterium longum bv; identical to SEQ ID NO: 27591

SEQ ID NO: 39018 - DNA, 1491 bp, Arthrobacter nicotinovorans
  CDS (1)..(1491): transl_table=11
gtgttagcacttgaagtacggggagtgagcaaatcattcttcggattcccggtactgaccggcgtagaccttgagataaggccgggagaggtgcacgggctcgtaggagagaacggcgccgggaaatctacattgatgaagattcttgcgggagtctacacaagggacgagggcaaggttgttctaggtggcaaggatgttatgttcagccatcctgtgcaggctcagctggcaggcatttccacggtattccaggaattcaacctgttgccggaccggtccgtagccgaaaatatctatctcggccgcgaaccgcgtgtgcgaggtttcatctcgcaacgaaagatgaacgcagcgactgcagagcttttttcatcccttggagttgactccattaacccggcagcgcatgtgcggacactatctgtggcgcagcaacagctcgtggaaattgccaaggccctcagctttgacgcccgggtcatctccatggacgagccaaccgctgcgcttgcggatcacgaagtggagctcctgtacagcatcattgaaaacctcaagaagcgcggcgttgccgttctctacgtttcccacagattgcgggaaatttttaagctttgtgaccgcatcacggttctcaaggatggcgcccttgtagccacgaagccggcagaagaactcaacgagcaggaactggtccggcttatggtcgggcgccccctatcctcgttcttcccgcccaagaccgaaggaacagtagttggagacacagcgctctcccttcaaaacgccgggaaccatgtagtaaacaacgtgacgctgaaactccgtcgcggggaaatcctgggaatagccggactgcaagggtcaggccgcacagaagttttggatgctatctccggatcggcaccattcacccgcggcgagatacacgtcaatggggcacccacgaccatcaaaacaacccgccaagcaattcgagccgggattgctcacgtcacggaggacaggaaagctacgggactgctcctgaatcaatcagtcattgataacgctctgacagtaatccgagcctgctatcccaaacgcacttcaactgcccgtcaggctgcaaccgacctgtttctggagctgcaactctcagcacggggaccggatcaggagatcaggtacctttccggcggcaatcaacaaaaggtgattctcaccaagtggctgcttatggaaccacaaatcgtccttctcgatgagccaaccagagggattgatgttggtgcgaagtttgccctgtacgtcctcatgcgacgtttggctgccgccggacacgccatcctcatggtttccagcgaattgcctgaactcatcgggatggccgacagagttctcgttatgcgtgacggggaactggtctccgagcttcctgccgggtccagcgaagaaagcattttgcaggcagcggccggcataaccgacgcggcggtggcagcatga

SEQ ID NO: 39019 - protein, 496 aa, Arthrobacter nicotinovorans
MLALEVRGVSKSFFGFPVLTGVDLEIRPGEVHGLVGENGAGKSTLMKILAGVYTRDEGKVVLGGKDVMFSHPVQAQLAGISTVFQEFNLLPDRSVAENIYLGREPRVRGFISQRKMNAATAELFSSLGVDSINPAAHVRTLSVAQQQLVEIAKALSFDARVISMDEPTAALADHEVELLYSIIENLKKRGVAVLYVSHRLREIFKLCDRITVLKDGALVATKPAEELNEQELVRLMVGRPLSSFFPPKTEGTVVGDTALSLQNAGNHVVNNVTLKLRRGEILGIAGLQGSGRTEVLDAISGSAPFTRGEIHVNGAPTTIKTTRQAIRAGIAHVTEDRKATGLLLNQSVIDNALTVIRACYPKRTSTARQAATDLFLELQLSARGPDQEIRYLSGGNQQKVILTKWLLMEPQIVLLDEPTRGIDVGAKFALYVLMRRLAAAGHAILMVSSELPELIGMADRVLVMRDGELVSELPAGSSEESILQAAAGITDAAVAA

SEQ ID NO: 39020 - DNA, 1590 bp, Brucella suis
  CDS (1)..(1590): transl_table=11
atgaacctagccaatcctgtctcgctggacaagcgtggggcactgccggatactttcggaaagcctcttcttgaaatgcgtgggatcaacaagtccttcggtgtcgtgaaggcgctgagcgatgtgaacttcaccgtcatgccgggcgaaatacatgcctttgtgggtgaaaacggcgcgggaaaatccacgctgatgaaggtgctttcgggtgtttatccccatggaagctatgaaggcgcgatctattacgacggggaagagcggcagtttcgggatattaacgattccgaggcgctcggcatcgtcatcattcatcaggaattggccctcattccgctgatgtcgattgccgagaatatttttctcgtcaatcctccggcaagccggggtgtcatcgaccgctccgccgtgcacaagcggacgcgggagctattgaaaaaggtcggtctggcggaaacgcccgatacgctcatcaccgatatcggcattggcaagcagcagcttgttgaaatcgccaaggcgctttccaagcgtgtgcggctgttgatcctcgatgaaccaacagcaagcctcaacgaaaatgacagtgcggcgcttctggcgctgctgcgcgagtttcgcgcgcagggcatcacctcgatcctcatttcgcacaagctcaatgaaatccgcgaagtggccgacaagattaccgttctgcgcgacggcaaggcggttgcgacacttgattgccatgcgggcgaagtggaggaagacgatatcatccgcaagatggtggaccgcgatctggagagccgttatcccaagcgcgatcccaagatcggcaatgtcatcttcgaggtcgataactggtcggtctatcatccgctgcatcccgatcggcattcggtcaagaacgtgtcattcaaggtgcgggcgggcgagatcgtcggcattgccggattgatgggagcggggcgcacggaattcgccatgagcctgtttggccgttcatggggcacgaatatcactggcgaggcgcgcatcaatggcaagacggtggatatttccaccgtggcgcgggcaatcaaggcgggccttgcctatgttaccgaggatcgcaagaagcttggcctggttcttggccagaatatttcgcgcaatatctcgctggcgcacttacgcggcgtgagcccgaaaggcattatcgacgatatccgggaaatgaagatcgcgaattcctatcgcgaccagatgcgtattcgctgtcacaatgtctatcaggaaaccggcacgctttcgggcggcaaccagcagaaggtggtgctgtcgaaatggcttttcactggccccgacgtgctgatcctggacgagccgacacgcggtatcgatgttggcgcgaaatatgacatttacacaatcatcaattcactggcggaaagcggcaagggcgttgtcgtcatttcttcggaaatgccggagctgatcggcatttgcgaccgcatcgtcgtcatgcatgagggcgccttcgtcggcgaagtggcaggcgaggaagcaacgcaggaaaacatcatgcgcgccatcatgcgaaacaagggaaaagggtaa

SEQ ID NO: 39021 - protein, 529 aa, Brucella suis
MNLANPVSLDKRGALPDTFGKPLLEMRGINKSFGVVKALSDVNFTVMPGEIHAFVGENGAGKSTLMKVLSGVYPHGSYEGAIYYDGEERQFRDINDSEALGIVIIHQELALIPLMSIAENIFLVNPPASRGVIDRSAVHKRTRELLKKVGLAETPDTLITDIGIGKQQLVEIAKALSKRVRLLILDEPTASLNENDSAALLALLREFRAQGITSILISHKLNEIREVADKITVLRDGKAVATLDCHAGEVEEDDIIRKMVDRDLESRYPKRDPKIGNVIFEVDNWSVYHPLHPDRHSVKNVSFKVRAGEIVGIAGLMGAGRTEFAMSLFGRSWGTNITGEARINGKTVDISTVARAIKAGLAYVTEDRKKLGLVLGQNISRNISLAHLRGVSPKGIIDDIREMKIANSYRDQMRIRCHNVYQETGTLSGGNQQKVVLSKWLFTGPDVLILDEPTRGIDVGAKYDIYTIINSLAESGKGVVVISSEMPELIGICDRIVVMHEGAFVGEVAGEEATQENIMRAIMRNKGKG

SEQ ID NO: 39022 - DNA, 1494 bp, Treponema denticola
  CDS (1)..(1494): transl_table=11
atgagtgatgtagttcttgaaataaagaacctttcaaaatctttcggaaagaataaggttttggacggtataaatctgactgtaagacaaggctccgtaatgggactcatgggcgaaaacggagcaggaaaatctaccatgatgaagtgccttttcggtatatatacacgggatgagggcgccatttctttattaaataaatcgatcgaatttaaaaatcctaaagaagctcttgaaagcggagttgctatggttcatcaagaactgaatctttgtcttgacagaaccgttacagataatttatttttaggacgctatccgaccaacttcgggattgttgacgaaataaaaatgtttgaatctgcaagctctcttttttcttcgctcaatatgaatgtcaatcccaaaacaataatgcgtaccatgtccgtttcgcagcggcagatggttgaaatagcaaaggctgtttcctacaacgcaaagctcatcgtattggatgagccgacctcttctttaaccgagagggaggtaaaaaaacttttttcgataataagagccttacaaaaaaaaggcgtttcatttatttatatttcgcataagatggatgaggtttttgaggtttgcgatgaggtcgccgttttacgggacggtaagatgattctttcaaagcccgtagccggaacaaatatgaacgaaattatttcggccatggtaggccgctctctggataagcgtttccccgatgtggataatgtccccggagaagattttttaaaaatagaaaacttaaaaacaaaatatgctcccgtgcttgaagatatttcctttaccgtaaggaagggagaaatcttaggcctttacgggcttgtaggggcagggaggagtgagcttttgggagccctcttcggtatccgcactatagaatccgggagcataagtataaacgataaatatcttaaatttaagagcagtaaagaagccatggctcatggctttgctctgttgaccgaagagcgtaaactaaacgggatgttcggcaaggatacaatagaatttaacacggtaattaccaatttgaataattataaaaccatcggcgtcttgtcaaagcgtaaaatacgggaggccgcaaacagggaaattgaaactatgaggacgaggtgcctttcggctgatcagggtatttcggctttgagcggaggaaatcagcaaaaggttataataggaaaatggctggagcgttcacccgatgtgtttttgatggatgagcctacccgcggtatcgatgtaggggccaaatatgaaatatatcagctcattattaagatggcaaaagagggaaaaaccataatagttgtttcgagcgagatgcccgaaattttaggtatcacgaaccgcatagccgtcatgtccaaccgtcgccttgctggtatcgtaaacacaaaagaaaccgatcaggaaactctgctcaggctttcggctaagtatttgtag

SEQ ID NO: 39023 - protein, 497 aa, Treponema denticola
MSDVVLEIKNLSKSFGKNKVLDGINLTVRQGSVMGLMGENGAGKSTMMKCLFGIYTRDEGAISLLNKSIEFKNPKEALESGVAMVHQELNLCLDRTVTDNLFLGRYPTNFGIVDEIKMFESASSLFSSLNMNVNPKTIMRTMSVSQRQMVEIAKAVSYNAKLIVLDEPTSSLTEREVKKLFSIIRALQKKGVSFIYISHKMDEVFEVCDEVAVLRDGKMILSKPVAGTNMNEIISAMVGRSLDKRFPDVDNVPGEDFLKIENLKTKYAPVLEDISFTVRKGEILGLYGLVGAGRSELLGALFGIRTIESGSISINDKYLKFKSSKEAMAHGFALLTEERKLNGMFGKDTIEFNTVITNLNNYKTIGVLSKRKIREAANREIETMRTRCLSADQGISALSGGNQQKVIIGKWLERSPDVFLMDEPTRGIDVGAKYEIYQLIIKMAKEGKTIIVVSSEMPEILGITNRIAVMSNRRLAGIVNTKETDQETLLRLSAKYL

SEQ ID NO: 39024 - DNA, 1533 bp, Escherichia coli
  CDS (1)..(1533): transl_table=11
atggccacgccatatatatcgatggcggggatcggcaagtcctttggtccggttcacgcattaaagtcggttaatttaacggtttatcctggtgaaatacatgcattactaggagaaaatggcgcgggtaaatccacgctaatgaaagttttatccggaatacatgagccgaccaaaggcaccattaccattaataacattagctataacaagctggatcataaattagcggcacaactcggtatcgggattatttatcaggaactcagcgttattgatgaattaaccgtactggaaaatttatatattggtcgtcatctgacgaaaaaaatctgtggcgtcaatattatcgactggcgagaaatgcgtgtccgcgccgccatgatgttattacgcgtgggcttgaaagttgatctagatgagaaagtggcgaatttatctatcagccacaagcagatgctagaaattgccaaaacgctgatgctcgatgccaaagtcatcatcatggatgaacccacctcctcactcaccaataaagaggtggactatctgtttctgatcatgaatcagttgcgtaaagagggtacggccatcgtctatatctcgcataagttggcggaaattcgccgtatttgcgaccgctatacggtgatgaaagacggcagcagcgtttgcagcggcatagtaagcgatgtgtcaaatgacgatatcgtccgtctgatggtaggccgcgaactgcaaaaccgttttaacgcgatgaaggagaatgtcagcaaccttgcgcacgaaacggtttttgaggtgcggaacgtcaccagtcgtgacagaaaaaaggtccgggatatctcatttagcgtctgccggggagaaatattaggctttgccggactggtcggttccggacgtactgaactgatgaattgtctgtttggcgtggataaacgcgctggcggagaaatccgtcttaatggcaaagatatctctccacgttcacccctggatgccgtgaaaaaagggatggcttacatcactgaaagccgccgggataacggttttttccccaacttttccatcgctcagaacatggcgatcagccgcagtctgaaagacggcggctataaaggcgcgatgggcttgtttcatgaagttgacgagcaacgtaccgctgaaaatcaacgcgaactgctggcgctgaaatgtcattcggtaaaccagaatatcaccgaactctccgggggaaatcagcagaaagtcctgatctccaaatggctgtgctgttgcccggaagtgattattttcgatgaacctacccgcggcatcgacgttggcgcgaaagccgaaatttacaaagtgatgcgccaactggcggacgacggaaaagtcatcctgatggtgtcatctgaactacctgaaattatcaccgtctgcgaccgcatcgccgtgttctgcgaaggacgactgacgcaaatcctgacgaatcgcgatgacatgagcgaagaggagattatggcatgggctttaccacaagagtaa

SEQ ID NO: 39025 - protein, 510 aa, Escherichia coli
MATPYISMAGIGKSFGPVHALKSVNLTVYPGEIHALLGENGAGKSTLMKVLSGIHEPTKGTITINNISYNKLDHKLAAQLGIGIIYQELSVIDELTVLENLYIGRHLTKKICGVNIIDWREMRVRAAMMLLRVGLKVDLDEKVANLSISHKQMLEIAKTLMLDAKVIIMDEPTSSLTNKEVDYLFLIMNQLRKEGTAIVYISHKLAEIRRICDRYTVMKDGSSVCSGIVSDVSNDDIVRLMVGRELQNRFNAMKENVSNLAHETVFEVRNVTSRDRKKVRDISFSVCRGEILGFAGLVGSGRTELMNCLFGVDKRAGGEIRLNGKDISPRSPLDAVKKGMAYITESRRDNGFFPNFSIAQNMAISRSLKDGGYKGAMGLFHEVDEQRTAENQRELLALKCHSVNQNITELSGGNQQKVLISKWLCCCPEVIIFDEPTRGIDVGAKAEIYKVMRQLADDGKVILMVSSELPEIITVCDRIAVFCEGRLTQILTNRDDMSEEEIMAWALPQE

SEQ ID NO: 39026 - DNA, 1554 bp, Bacillus halodurans
  CDS (1)..(1554): transl_table=11
atgaacatgcctaattgtttgttggaaatgcggaacataacgaaagcctttcctggtgtgaaggcactaaataacgttaatctgaaagtcgaacaaggggagattcatgcattagtaggtgaaaacggagcgggaaagtctacgttaatgaaagtacttagcggtgtttatccccatgggacgtacgagggcgatattttatttgaaggtagagtttgtcaatttaaggatattaaagaaagcgaacagctcggaatcgttattattcaccaggagctagccttagttcccgaattatcgattgcagaaaatatttttttagggaatgaacaagcgaagaatggagtgattgactggaatcaaacgattactgaggcagcgaaactgctaaaaaaagtcggattatctgattcgccgagaacgttagcaatgaacatcggggtcggtaagcaacagcttgtggaaattgctaaagcattgtctaagaaagtgaagctactcattctggatgaaccgaccgccgccttgaatgaagaagatagtcaaaatttattacatttgctgctggagtttaagaagcaaggaatgacgtcgatcatcatttctcataagttaaatgaaatatcgtatgtggcagatcatttaacgattttgagagacggtcaatcgattgaaacactgtcgctacagagcggagaagtaacagaggatcggatcattaaaggaatggtcggacgagacctcgagaaccggtttccgccgcgggagccaaagattggcgacgtgattttagaagtgaaccattggcacgtggacgacccgctccatccagatcggtcgctaatcaaagatgttaacctttacttgaaacgaggggaaattgttggggttgcaggtttaatgggggctggaaggaccgagctagcgatgagcatctttggtaaatcttatggaaagaacattcgcggtcagctgataaaggatggaaaagaaataaaggtccattcagtaaaggatgccattgatcacggtctcgcctatgtaaccgaggatcgtaaaacctatggattgattttaatcgatgatattaaacacaatatttccttaacgagcttagagaagctatcaaaaaacggtgtcgttgataaaacacgagaagtaaaagaagctgaggacttccgaaaaaaaatgaacatccgtacccctagcattgaccagaaaacgggaaatttaagtggtggcaaccaacagaaggtcgttttaagtaaatggatcttatcagggcctgacattttgatattggatgagcccactcggggaatcgatgtaggggcgaaatacgagatttatagtgtcattcatgagttggctgcccaaggcaaagccgttctggttatttcttcagagcttccagagctactcggtttaagcgatcggatttacgcactatgtgaagggcgaataactggggaggttactcgagaagaggccaatcaagagatcttaatgaagtacatgacgaggacaggaggaaatgggcatgaagttagctga

SEQ ID NO: 39027 - protein, 517 aa, Bacillus halodurans
MNMPNCLLEMRNITKAFPGVKALNNVNLKVEQGEIHALVGENGAGKSTLMKVLSGVYPHGTYEGDILFEGRVCQFKDIKESEQLGIVIIHQELALVPELSIAENIFLGNEQAKNGVIDWNQTITEAAKLLKKVGLSDSPRTLAMNIGVGKQQLVEIAKALSKKVKLLILDEPTAALNEEDSQNLLHLLLEFKKQGMTSIIISHKLNEISYVADHLTILRDGQSIETLSLQSGEVTEDRIIKGMVGRDLENRFPPREPKIGDVILEVNHWHVDDPLHPDRSLIKDVNLYLKRGEIVGVAGLMGAGRTELAMSIFGKSYGKNIRGQLIKDGKEIKVHSVKDAIDHGLAYVTEDRKTYGLILIDDIKHNISLTSLEKLSKNGVVDKTREVKEAEDFRKKMNIRTPSIDQKTGNLSGGNQQKVVLSKWILSGPDILILDEPTRGIDVGAKYEIYSVIHELAAQGKAVLVISSELPELLGLSDRIYALCEGRITGEVTREEANQEILMKYMTRTGGNGHEVS

SEQ ID NO: 39028 - DNA, 1542 bp, Bacillus stearothermophilus
  CDS (1)..(1542): transl_table=11
atgtctgaattcattttagagatgagggggattacgaaacagttcccgggagtcaaagcacttgataatgtcaattttaaggtgcgtgaaggcgaaattcatgcgctttgcggggaaaacggggcaggaaagtcaacgttgatgaaagtattaagcggtgtttatccgtatgggacgtatgatggggaaattgtatttaagggagaggtatgcaagtttaagaacattaaacagagcgaacaattagggattgtcatcatccaccaagagttggccttgattccctatctatccattgccgaaaatatttttttaggaaatgaacgggcgaaaaaaggcatcattaactggaatgaaacgatcgctcaaacaaaaaagctgttgcagaaagtcggattagaggagtcgccgcatacattggtcggccaacttggcgtcggcaagcagcaacttgtagaaattgcgaaggcgttggctaaagatgtgaaattgcttattttggatgagccgactgcagcgttgaatgaggatgacagcgaaaatttactgaatttgcttttggaattgaaaaaacaggggttatcggccattattatttcccataaattaaatgaaattacaaaagtcgctgattcgatcacgattttacgggatggaaaaaccattgaaacgttggatatgaaacatgatgaggtgaccgaagaccggattatccgtggaatggttgggcgtgacttaactaatcgttatccggcaaggacgccgaagattggtgaagtcatatttgaagtgaagaactggactgtgtatcaccccatttattctgagcgcaaggtgcttgatcacatcaatctgtcgattcgtcgaggggaaattgttgggatcgcaggcctcatgggggcgggacgaaccgaattggccatgagcatctttggtcggtcatacggaaagaaaattagcggagagatatggaaaaacggagtcaaaatcgatgtcagcgatgtcagcaaggccattgccaacgggattgcctatgtaacagaagatcgaaaaggaaatggcctcatcctaatggaagacattcggaaaaatattacactttcccgcttagggaaaatctcaaatcattttgtggtcgatgaaaatcaagaaattgttgaatcggagcgattccgtgaccaattcaaaattaaaacgccaagcgtatttcaaaaagtagaagcccttagtggcgggaatcaacaaaaagtggtgttaagcaaatggatttttgctgagccagatattttgattctcgacgaaccaacacgggggattgacgtcggcgcgaaatatgaaatttacacgatcattcagcagctagccgatgcaggaaaaggtattttaatgatttcgtccgaactcccagaaattcttggcatgtgcgatcgaatttatgtgatgagtgaagggagaatcactggagaggtgtcgcgggaagaagcgacacaggaaaaactaatgaggcttatgacgaaaacagcgattcaggagggggcatga

SEQ ID NO: 39029 - protein, 513 aa, Bacillus stearothermophilus
MSEFILEMRGITKQFPGVKALDNVNFKVREGEIHALCGENGAGKSTLMKVLSGVYPYGTYDGEIVFKGEVCKFKNIKQSEQLGIVIIHQELALIPYLSIAENIFLGNERAKKGIINWNETIAQTKKLLQKVGLEESPHTLVGQLGVGKQQLVEIAKALAKDVKLLILDEPTAALNEDDSENLLNLLLELKKQGLSAIIISHKLNEITKVADSITILRDGKTIETLDMKHDEVTEDRIIRGMVGRDLTNRYPARTPKIGEVIFEVKNWTVYHPIYSERKVLDHINLSIRRGEIVGIAGLMGAGRTELAMSIFGRSYGKKISGEIWKNGVKIDVSDVSKAIANGIAYVTEDRKGNGLILMEDIRKNITLSRLGKISNHFVVDENQEIVESERFRDQFKIKTPSVFQKVEALSGGNQQKVVLSKWIFAEPDILILDEPTRGIDVGAKYEIYTIIQQLADAGKGILMISSELPEILGMCDRIYVMSEGRITGEVSREEATQEKLMRLMTKTAIQEGA

SEQ ID NO: 39030 - DNA, 1521 bp, Escherichia coli
  CDS (1)..(1521): transl_table=11
atggtcagctcaacgactccgtcctccggggaatacttgttggaaatgagcggtatcaacaagtcctttcctggtgttaaggcacttgataacgttaatttaaaagtccggccacattctatccatgcattaatgggggaaaacggtgcaggaaaatcgacattattaaaatgcctgtttggtatttatcaaaaagactccggcaccattttattccagggtaaagagatcgatttccattctgcaaaagaagccctggaaaatggtatttcgatggtacaccaggagttaaacctggtattacaacgttcggtgatggataacatgtggctggggcgatatcccaccaaaggcatgtttgtcgatcaggacaaaatgtaccgcgaaaccaaagcgatttttgacgaactggatattgatatcgatccgcgtgcgcgcgtcggcacattatccgtttcgcaaatgcagatgatcgaaatcgccaaagcgttttcctataacgcgaaaattgtgattatggatgaaccgacttcttcgttaaccgaaaaagaggtcaatcatctgttcactattattcgtaaattaaaagagcgcggctgcggtattgtttatatctcgcataaaatggaagaaatcttccagttatgtgatgaagttaccgtattgcgcgacggtcagtggatcgccaccgaaccgctggcaggactgacgatggacaagatcatcgccatgatggttgggcgttctcttaaccagcgtttccctgacaaagaaaacaaaccgggcgaagtcatcctcgaggtacgtaacctgacgtcactgcgccagccgtcgattcgcgatgtctcgtttgatctgcataaaggggagatcctcggtattgccggtctggtgggggcgaaacgtaccgatattgttgagacgttatttggtattcgcgagaaatcggctggcaccataacgttgcacggcaaacagatcaataaccataatgccaacgaagccataaaccatggatttgcactggtaactgaggagcgccgctcaacgggaatttatgcctatctggatattggttttaactcgttaatttccaatattcgcaactacaaaaataaagttggtttactggataactcgcggatgaaaagcgatacccagtgggtgattgattcgatgcgggtaaaaacgccgggtcatcggacgcaaattggttcgctctccggtggtaatcagcaaaaggtgattattggtcgctggctactaacgcaaccagaaatattaatgctcgatgaaccgacgcgcggtattgatgtcggggcgaagtttgaaatttatcagttaattgccgaactggcgaagaaaggcaaggggattattattatctcctctgaaatgcctgagttgttagggataacagaccgtattctggtcatgagcaatggtctcgtttccggaattgtcgatacaaaaacaacaacgcaaaacgaaattctgcgtcttgcgtctttgcacctttaa

SEQ ID NO: 39031 - protein, 506 aa, Escherichia coli [sequence omitted]

SEQ ID NO: 39032 - DNA, 1521 bp, Haemophilus influenzae
  CDS (1)..(1521): transl_table=11
atgacagctcaaactcaatgtcaagacagccaagtgctgctcacaatgaccaatgtctgcaagtcctttccgggcgtaaaagccttagataacgccaacttaacggttcgatcacattctgttcatgccttaatgggcgagaacggcgcgggcaaatctacattactaaaatgtttattcggtatttatgccaaagatgaaggcgaaattcttttcttaggcgaacccgtcaatttcaaaacatctaaagaagcccttgaaaatggtatttcaatggtgcaccaagaactcaacctcgtgcgtcaaactagcgtaatggataatttatggcttggacgctatccacttaaaggtccttttgttgatcacgccaaaatgtaccgtgatactaaagcgatttttgatgaattggatattgatgtagatccgaaagaaaaagtcgccaaactttcagtttctcaaatgcagatgatcgaaattgcgaaggcgttctcgtataacgctaaaatcgtaatcatggatgaaccaacatcctcgctttctgaaaaagaagttgagcatctgtttaaaattatcgacaaattaaaacaacgcggttgcggcattatttatatttctcacaaaatggatgaaatcttcaaaatctgtgatgaaattactattttacgcgacggtaaatggatcaacacggtaaacgtgaaagaatccacaatggaacaaattgttggaatgatggtagggcgtgaattaacacagcgtttccctgaaaaaaccaacgtgccaaaagaagttattttgcaggtggaaaatcttaccgctaaaaatcaaccatccattcaagacgtatcttttgaattacgcaaaggtgaaattctcggtattgcagggcttgtgggggctaaacgtaccgatatcgttgaagctatttttggcgtacgtgaattaatcgaaggaacgattaagttacacggaaaaactgtgaaaaatcataccgcacttgaagcgattaataatggctttgcattggttactgaagagcgtcgttcaacggggatttattctaatttaagtattgagtttaattcattgatttcaaatatgaaatcttatctcactccgtggaaattacttagcacgaagaagatgaaaagtgatacccagtgggtaattgattcaatgaatgttaaaacaccatcacacagaactacaattggttctctttctggtggtaaccaacaaaaagtcattattggtcgttggcttttaactcaacctgaaattttgatgctagatgagccgactcgtggtatcgatattggggcaaaatttgaaatttaccaacttattcaagaactcgctaaaaaagataaaggcattattatgatttcatcagaaatgccagaattactgggtgtgactgatcgcattttagtaatgagtaacggtaaattagcaggtatcgttgaaagcgcaaaaacatcgcaagaagaaattttgcaactcgcggcaaaatatttataa

SEQ ID NO: 39033 - protein, 506 aa, Haemophilus influenzae
MTAQTQCQDSQVLLTMTNVCKSFPGVKALDNANLTVRSHSVHALMGENGAGKSTLLKCLFGIYAKDEGEILFLGEPVNFKTSKEALENGISMVHQELNLVRQTSVMDNLWLGRYPLKGPFVDHAKMYRDTKAIFDELDIDVDPKEKVAKLSVSQMQMIEIAKAFSYNAKIVIMDEPTSSLSEKEVEHLFKIIDKLKQRGCGIIYISHKMDEIFKICDEITILRDGKWINTVNVKESTMEQIVGMMVGRELTQRFPEKTNVPKEVILQVENLTAKNQPSIQDVSFELRKGEILGIAGLVGAKRTDIVEAIFGVRELIEGTIKLHGKTVKNHTALEAINNGFALVTEERRSTGIYSNLSIEFNSLISNMKSYLTPWKLLSTKKMKSDTQWVIDSMNVKTPSHRTTIGSLSGGNQQKVIIGRWLLTQPEILMLDEPTRGIDIGAKFEIYQLIQELAKKDKGIIMISSEMPELLGVTDRILVMSNGKLAGIVESAKTSQEEILQLAAKYL

SEQ ID NO: 39034 - DNA, 1521 bp, Salmonella typhimurium
  CDS (1)..(1521): transl_table=11
atgggcagcacgatttctccgccgtcgggtgaatatttgttggaaatgcgtggcattaacaaatcatttcccggcgtgaaagcgcttgataatgtcaacttaaacgttcgtccgcactctattcatgcattaatgggcgaaaacggcgcaggcaaatcaacattattaaaatgtcttttcggtatttaccaaaaagattccggcagcattgtatttcagggaaaagaagtggacttccattcggcgaaagaagcgctggagaatgggatttcgatggtacaccaggagttaaacctggtattacaacgttcggtcatggataacatgtggctgggacgttatcccaccaaaggtatgtttgtcgaccaggataaaatgtaccaggataccaaagcgatatttgatgaactggatatcgatattgacccacgcgcgcgcgtaggaacgttatccgtttcgcaaatgcagatgatcgaaattgcgaaggcgttttcctataacgctaagatcgttattatggatgaaccgacctcatcgttaactgagaaagaggttaatcatctgttcacgattattcgcaagctgaaagaacgcggctgcggtattgtttatatctcgcataaaatggaagaaatttttcaattgtgcgatgaaattactattttgcgcgacggtcagtggattgccacccagccgctggaagggctggatatggataagatcattgcgatgatggtcgggcgttccctgaaccagcgtttcccggataaagaaaataagccgggcgacgtgattctggaggtccgtcacctgacctcgctgcgtcagccttccattcgcgatgtctcctttgatttgcacaagggcgaaattctgggcattgccggtctggttggggcaaagcgtaccgatatcgtcgaaacgctgtttggcattcgtgagaagtcgtccgggacaatcactttacatggcaagaaaattaataatcacactgcgaacgaagcgattaaccacggttttgcgctggtgacggaagagcgtcgttccaccggaatttacgcctatctggatatcggatttaactcattaatttcgaatatccgtaattataaaaataaagtggggttactggataattcccggatgaaaagcgacacccaatgggtcattgattccatgcgggtaaaaacgccggggcatcgcacgcaaattggttcgctttccggcggcaatcagcaaaaggtgatcattggtcgctggctattaacgcagccggaaatattaatgctggacgaaccgacccgcggcattgatgtcggcgcaaaatttgaaatttatcagcttattgcggaactggcgaaaaaaggcaaggggatcatcattatctcttctgaaatgccggagctgttagggattaccgatcgtatcctggtgatgagtaacggtctcgtttccggcattgtcgatactaaaacaacaacgcaaaacgaaattttgcgtcttgcttctttgcacctttaa

SEQ ID NO: 39035 - protein, 506 aa, Salmonella typhimurium
MGSTISPPSGEYLLEMRGINKSFPGVKALDNVNLNVRPHSIHALMGENGAGKSTLLKCLFGIYQKDSGSIVFQGKEVDFHSAKEALENGISMVHQELNLVLQRSVMDNMWLGRYPTKGMFVDQDKMYQDTKAIFDELDIDIDPRARVGTLSVSQMQMIEIAKAFSYNAKIVIMDEPTSSLTEKEVNHLFTIIRKLKERGCGIVYISHKMEEIFQLCDEITILRDGQWIATQPLEGLDMDKIIAMMVGRSLNQRFPDKENKPGDVILEVRHLTSLRQPSIRDVSFDLHKGEILGIAGLVGAKRTDIVETLFGIREKSSGTITLHGKKINNHTANEAINHGFALVTEERRSTGIYAYLDIGFNSLISNIRNYKNKVGLLDNSRMKSDTQWVIDSMRVKTPGHRTQIGSLSGGNQQKVIIGRWLLTQPEILMLDEPTRGIDVGAKFEIYQLIAELAKKGKGIIIISSEMPELLGITDRILVMSNGLVSGIVDTKTTTQNEILRLASLHL

SEQ ID NO: 39036 - DNA, 1491 bp, Treponema pallidum
  CDS (1)..(1491): transl_table=11
atgtgcgatgtactcaccataagggatctttctaagtcttttgcgaggaacagggttctcaacggggtgaacttccgtatgggaaagggtgccgtggtggggcttatgggagaaaatggtgcgggaaaatccacgcttatgaagtgcctctttggaatgtacgctaaggacactggtcagattctcgtggatggaagcccggtggactttcagtctcccaaagaagcgctagaaaacggtgtcgccatggtccatcaggagctcaatcaatgccttgatcgcactgtcatggacaatttgtttctcggcaggtaccctgcccgtttcgggatagttgacgagaaacgcatgttcgacgactccctcactctgttcgcttccttgaaaatggacgtaaacccgcgggccgtcatgcgcagcatgtctgtctctcagcggcagatggtagagattgccaaggcgatgtcctataacgcgaagattatagtcctcgacgagcctacttcctctctcacggagagggagattgtcaggctctttgccattatacgagacctgagcaaaaaaggagtggcattcatctatatctcccacaaaatggatgagatctttcagatctgcagcgaggtgattgtgctgcgggatggtgtcctcacgctctcacaatccataggggaagtggaaatgagcgacctcatcaccgctatggtcgggcgcactttggacaagcgctttcccgacgctgacaataccgtcggtgacgattatcttgaaatacgaggtctttctacaaggtatgctccgcagctgcgggatatttccctttctgtgaaaaggggcgagatttttggcttgtacgggctggtcggtgcggggaggagtgaactgcttgaagcgattttcggcctgcgtaccatcgcagacggtgagatctctttagcaggaaaaaaaattcgcttgaagagcagcagggacgcaatgaaactcaatttcgcctttgtgcccgaggaacgtaagctcaacggaatgttcgcaaaggggagcatagagtataacaccacgattgcaaatctccctgcgtataagcgttacggtctactctcaaagaaaaagctgcaggaggcagcggagcgggaaataaaggccatgcgcgtgaagtgcgtttctccaagcgagcttatcagtgcgctcagcgggggtaatcagcagaaagtcattattggaaagtggctcgaacgcgatcccgacgtcctcttgcttgatgagccgaccagggggatcgacgtgggtgcgaaatatgaaatttatcagctcatcattcgtatggcgcgtgagggaaagacaatcattgtggtttctagtgaaatgcctgaaattcttggaatcaccaacaggatcgcagtcatgtccaattatcgattggctgggattgtggatacaaagagtaccgatcaggaagccttgctcagactttctgcgcgatacctgtag

SEQ ID NO: 39037 - protein, 496 aa, Treponema pallidum
MCDVLTIRDLSKSFARNRVLNGVNFRMGKGAVVGLMGENGAGKSTLMKCLFGMYAKDTGQILVDGSPVDFQSPKEALENGVAMVHQELNQCLDRTVMDNLFLGRYPARFGIVDEKRMFDDSLTLFASLKMDVNPRAVMRSMSVSQRQMVEIAKAMSYNAKIIVLDEPTSSLTEREIVRLFAIIRDLSKKGVAFIYISHKMDEIFQICSEVIVLRDGVLTLSQSIGEVEMSDLITAMVGRTLDKRFPDADNTVGDDYLEIRGLSTRYAPQLRDISLSVKRGEIFGLYGLVGAGRSELLEAIFGLRTIADGEISLAGKKIRLKSSRDAMKLNFAFVPEERKLNGMFAKGSIEYNTTIANLPAYKRYGLLSKKKLQEAAEREIKAMRVKCVSPSELISALSGGNQQKVIIGKWLERDPDVLLLDEPTRGIDVGAKYEIYQLIIRMAREGKTIIVVSSEMPEILGITNRIAVMSNYRLAGIVDTKSTDQEALLRLSARYL

SEQ ID NO: 39038 - DNA, 1482 bp, Bacillus subtilis
  CDS (1)..(1482): transl_table=11
atgcagattgaaatgaaagacattcataaaacattcggaaaaaatcaggtgctgtcaggcgtttcctttcagctcatgcctggcgaggttcacgcattaatgggagaaaacggcgccggcaagtccacgcttatgaacattttgacaggcctgcacaaagcagataaaggtcaaatcagcataaacggaaacgaaacgtatttttccaatccgaaagaagcggaacagcatggaatagcctttatccatcaggaattgaatatctggccggaaatgaccgttcttgagaatctatttatcggtaaagagatatcctccaagctgggcgttttacaaacaagaaaaatgaaagcgctagcaaaagagcaatttgacaaactttccgtctctctttctcttgatcaagaagccggcgaatgttccgtcggacagcagcaaatgatcgaaattgcaaaagcgcttatgacaaatgccgaggtaatcattatggatgaaccgaccgcagcgttgactgaacgtgaaatcagcaagctctttgaggtcattacagcgttaaaaaagaacggcgtctccattgtctatatttcgcatcgcatggaagaaatttttgcgatttgcgacagaattaccatcatgcgtgacggaaaaacggtagatacaacaaacatctcagaaactgattttgatgaagtcgtcaaaaaaatggtcggacgggagctgactgaacgatatccaaaacgcactccttctctcggtgacaaagtattcgaggtgaaaaatgcttccgtaaaagggagttttgaggacgtcagcttttatgtgcgttccggtgagatcgtcggtgtttcaggattaatgggagccggccggacagaaatgatgagagcgctgttcggcgttgacaggctggacacgggtgagatatggatcgctgggaaaaaaacggctattaagaacccgcaggaagccgtgaaaaaaggtctcggctttattacagagaatcgcaaggatgaagggctcctgctcgacacctcgatccgcgaaaatattgccctgcccaatctgtccagcttctcaccaaagggtctcattgatcataagcgggaggctgaatttgtcgatctgttaatcaagcgcctcactatcaaaacagcatcaccggaaacgcacgcacgccatttatcaggaggaaaccagcaaaaagtggtgatagccaagtggatcggcatcggaccgaaagtgcttatcttggatgagccaaccagaggtgtggatgttggcgccaaacgagagatttatacgctgatgaatgagctgaccgaacgcggtgtcgctatcatcatggtgtcatcagagcttcctgaaattctgggaatgagcgatcggattatcgttgtccatgaaggcagaatcagcggcgaaatccatgcgcgagaagcaacacaagaacgaattatgacacttgccacgggagggcggtaa

SEQ ID NO: 39039 - protein, 493 aa, Bacillus subtilis
MQIEMKDIHKTFGKNQVLSGVSFQLMPGEVHALMGENGAGKSTLMNILTGLHKADKGQISINGNETYFSNPKEAEQHGIAFIHQELNIWPEMTVLENLFIGKEISSKLGVLQTRKMKALAKEQFDKLSVSLSLDQEAGECSVGQQQMIEIAKALMTNAEVIIMDEPTAALTEREISKLFEVITALKKNGVSIVYISHRMEEIFAICDRITIMRDGKTVDTTNISETDFDEVVKKMVGRELTERYPKRTPSLGDKVFEVKNASVKGSFEDVSFYVRSGEIVGVSGLMGAGRTEMMRALFGVDRLDTGEIWIAGKKTAIKNPQEAVKKGLGFITENRKDEGLLLDTSIRENIALPNLSSFSPKGLIDHKREAEFVDLLIKRLTIKTASPETHARHLSGGNQQKVVIAKWIGIGPKVLILDEPTRGVDVGAKREIYTLMNELTERGVAIIMVSSELPEILGMSDRIIVVHEGRISGEIHAREATQERIMTLATGGR

SEQ ID NO: 39040 - DNA, 1506 bp, Escherichia coli
  CDS (1)..(1506): transl_table=11
atggaagcattacttcagcttaaaggcatcgataaagccttcccgggcgtaaaagccctctcgggcgcagcgttaaatgtctatccgggccgcgtgatggcgctggtgggcgaaaacggcgcgggtaaatccaccatgatgaaagtgcttactggcatctatactcgcgatgccggtacgcttttatggctggggaaagaaacgacatttaccgggccaaaatcttcccaggaagccgggattgggattatccatcaggaactgaacctgatcccgcagttgaccattgccgaaaacattttcctcggtcgtgagtttgttaatcgctttggcaaaattgactggaaaaccatgtatgccgaagcggataaattgctggctaaacttaacctgcgctttaaaagcgacaagctggtgggcgatctttccatcggtgaccagcaaatggttgaaatcgccaaagtgctgagctttgagtcgaaagtcatcattatggatgaaccgaccgatgcgctgaccgataccgaaaccgaatccctgttccgcgtcatccgcgagctgaaatcgcaaggccgcggtattgtctatatctcccaccgcatgaaagaaatcttcgagatttgcgatgacgttaccgtttttcgtgatgggcaatttattgctgagcgcgaagtggcatcactgaccgaagattcgctgattgagatgatggtgggtcgcaagctggaagatcaatatccgcacctggacaaagcgccgggagatatccgcctgaaagtcgataatctctgcggacctggcgttaacgatgtctcttttactttacgcaaaggcgaaattcttggcgtctctggtttgatgggcgcaggtcgtaccgaactgatgaaagtgctctacggcgcactaccgcgcaccagcggttacgtcaccctggatgggcatgaagtcgttacccgttcaccgcaggatggcctggcaaacggcattgtgtatatctccgaagaccgtaaacgtgacggtttagtgttgggcatgtcagtaaaagagaacatgtcgctgacagcgctgcgctacttcagccgcgctggcggcagtttgaagcatgccgatgaacagcaggctgtgagtgatttcattcgtctgtttaatgtgaaaactccgtcgatggaacaggcaattggtctgctttccggtggcaatcagcaaaaagtggcgattgcccgcggtctgatgacacgccccaaagtgttgatccttgatgaacctacccgtggcgtagatgtcggcgcgaaaaaagagatctatcaactgattaaccagttcaaagccgatggcttgagcatcattctggtgtcatcggagatgccagaagtattaggcatgagcgatcgcatcatcgtcatgcatgaagggcatctcagcggggaatttactcgtgagcaggccacccaggaagtgttaatggctgccgctgtgggcaagcttaatcgcgtgaatcaggagtaa

SEQ ID NO: 39041 - protein, 501 aa, Escherichia coli
MEALLQLKGIDKAFPGVKALSGAALNVYPGRVMALVGENGAGKSTMMKVLTGIYTRDAGTLLWLGKETTFTGPKSSQEAGIGIIHQELNLIPQLTIAENIFLGREFVNRFGKIDWKTMYAEADKLLAKLNLRFKSDKLVGDLSIGDQQMVEIAKVLSFESKVIIMDEPTDALTDTETESLFRVIRELKSQGRGIVYISHRMKEIFEICDDVTVFRDGQFIAEREVASLTEDSLIEMMVGRKLEDQYPHLDKAPGDIRLKVDNLCGPGVNDVSFTLRKGEILGVSGLMGAGRTELMKVLYGALPRTSGYVTLDGHEVVTRSPQDGLANGIVYISEDRKRDGLVLGMSVKENMSLTALRYFSRAGGSLKHADEQQAVSDFIRLFNVKTPSMEQAIGLLSGGNQQKVAIARGLMTRPKVLILDEPTRGVDVGAKKEIYQLINQFKADGLSIILVSSEMPEVLGMSDRIIVMHEGHLSGEFTREQATQEVLMAAAVGKLNRVNQE

SEQ ID NO: 39042 - DNA, 1482 bp, Haemophilus influenzae
  CDS (1)..(1482): transl_table=11
atggaaactttactcaaaattagtggtgttgataaatcatttccaggtgtgaaagccttgaataatgcctgtttatctgtttacgctggacgcgtaatggcattgatgggggaaaatggggcgggtaaatcgactttgatgaaggtgcttactggtatttattctaaagatgcaggcacaattgagtatcttaatcgatcagttaatttcaatggacctaaagcctcacaggaagctggcattagtattattcaccaagaactgaatttggtcggtaatctcacgattgcagaaaacatttttcttggtcgtgaatttaaaacctcgtggggagcgattaactggcagaaaatgcaccaagaagcagacaagttacttgcgcgtttgggggtaactcacagcagtaaacagctttgcgctgaactttctattggtgagcaacaaatggtggagatagccaaagccttaagttttgaatccaaagttatcattatggatgaaccaaccgatgcgctcacagatacggagaccgaagccctattcaatgtgattcgtgaactcaaagcagaaaatcgtggcattgtttatatctctcatcgtttaaaagaaattttccaaatttgtgatgatgtgacggttttacgcgatggtcaatttatcggtgaacgcgttatggcagagattacagaagatgatttaattgaaatgatggttggtcgtcgtcttgatgaacaatatccgcatttatcacaagaaaaaggcgaatgtgtattggatgtgaaacatgtgagcggaagcggcattgatgatgtttccttcaaattgcatgccggtgaaattgttggtgtctcgggcttaatgggcgcgggtagaacggaactcggcaagctactttacggtgctttgccaaaaacggcgggaaaagtgcggttaaaaaatcaagagattgagaatcgcagtccgcaagatggtttggataatggtattgtatatatttctgaagatcgtaaaggtgatggcttggttttaggaatgtcagtaaaagaaaatatgtcgctcacatcgctcgatcatttttcacaaaaaggcggtattcgtcatcaagcggaaaaaatggcagtagatgactttattctgatgtttaacattaaaacacctaatcgtgatcaacaagtaggtttgctatctggtggaaatcaacaaaaagtggcaattgctcgtggattaatgactcgcccaaatgtgttaattttagatgaaccaactcgtggcgtagatgttggcgcgaagaaagaaatttatcagttgattaacgaatttaagaaagagggcttgagtattttaatgatctcatctgatatgccagaagtgcttggtatgagcgatcgagtgttggtaatgcgtgaaggtaaaattagtgcagaattttctcgtgaagaggcaacacaagaaaagttattagcagcagctattggtaaataa

SEQ ID NO: 39043 - protein, 493 aa, Haemophilus influenzae
METLLKISGVDKSFPGVKALNNACLSVYAGRVMALMGENGAGKSTLMKVLTGIYSKDAGTIEYLNRSVNFNGPKASQEAGISIIHQELNLVGNLTIAENIFLGREFKTSWGAINWQKMHQEADKLLARLGVTHSSKQLCAELSIGEQQMVEIAKALSFESKVIIMDEPTDALTDTETEALFNVIRELKAENRGIVYISHRLKEIFQICDDVTVLRDGQFIGERVMAEITEDDLIEMMVGRRLDEQYPHLSQEKGECVLDVKHVSGSGIDDVSFKLHAGEIVGVSGLMGAGRTELGKLLYGALPKTAGKVRLKNQEIENRSPQDGLDNGIVYISEDRKGDGLVLGMSVKENMSLTSLDHFSQKGGIRHQAEKMAVDDFILMFNIKTPNRDQQVGLLSGGNQQKVAIARGLMTRPNVLILDEPTRGVDVGAKKEIYQLINEFKKEGLSILMISSDMPEVLGMSDRVLVMREGKISAEFSREEATQEKLLAAAIGK

SEQ ID NO: 39044 - DNA, 1542 bp, Escherichia coli
  CDS (1)..(1542): transl_table=11
atgccttatctacttgaaatgaagaacattaccaaaaccttcggcagtgtgaaggcgattgataacgtctgcttgcggttgaatgctggcgaaatcgtctcactttgtggggaaaatgggtctggtaaatcaacgctgatgaaagtgctgtgtggtatttatccccatggctcctacgaaggcgaaattatttttgcgggagaagagattcaggcgagtcacatccgcgataccgaacgcaaaggtatcgccatcattcatcaggaattggccctggtgaaagaattgaccgtgctggaaaatatcttcctgggtaacgaaataacccacaatggcattatggattatgacctgatgacgctacgctgtcagaagctgctcgcacaggtcagtttatccatttcacctgatacccgcgttggcgatttagggcttgggcaacaacaactggttgaaattgccaaggcacttaataaacaggtgcgcttgttaattctcgatgaaccgacagcctcattaactgagcaggaaacgtcgattttactggatattattcgcgatctacaacagcacggtatcgcctgtatttatatttcgcacaaactcaacgaagtcaaagcgatttccgatacgatttgcgttattcgcgacggacagcacattggtacgcgtgatgctgccggaatgagtgaagacgatattatcaccatgatggtcgggcgagagttaaccgcgctttaccctaatgaaccacataccaccggagatgaaatattacgtattgaacatctgacggcatggcatccggttaatcgtcatattaaacgagttaatgatgtctcgttttccctgaaacgtggcgaaatattgggtattgccggactcgttggtgccggacgtaccgagaccattcagtgcctgtttggtgtgtggcccggacaatgggaaggaaaaatttatattgatggcaaacaggtagatattcgtaactgtcagcaagccatcgcccaggggattgcgatggtccccgaagacagaaagcgcgacggcatcgttccggtaatggcggttggtaaaaatattaccctcgccgcactcaataaatttaccggtggcattagccagcttgatgacgcggcagagcaaaaatgtattctggaatcaatccagcaactcaaagttaaaacgtcgtcccccgaccttgctattggacgtttgagcggcggcaatcagcaaaaagcgatcctcgctcgctgtctgttacttaacccgcgcattctcattcttgatgaacccaccaggggtatcgatattggcgcgaaatacgagatctacaaattaattaaccaactcgtccagcagggtattgccgttattgtcatctcttccgaattacctgaagtgctcggccttagcgatcgtgtactggtgatgcatgaagggaaactaaaagccaacctgataaatcataacctgactcaggagcaggtgatggaagccgcattgaggagcgaacatcatgtcgaaaagcaatccgtctga

SEQ ID NO: 39045 - protein, 513 aa, Escherichia coli
MPYLLEMKNITKTFGSVKAIDNVCLRLNAGEIVSLCGENGSGKSTLMKVLCGIYPHGSYEGEIIFAGEEIQASHIRDTERKGIAIIHQELALVKELTVLENIFLGNEITHNGIMDYDLMTLRCQKLLAQVSLSISPDTRVGDLGLGQQQLVEIAKALNKQVRLLILDEPTASLTEQETSILLDIIRDLQQHGIACIYISHKLNEVKAISDTICVIRDGQHIGTRDAAGMSEDDIITMMVGRELTALYPNEPHTTGDEILRIEHLTAWHPVNRHIKRVNDVSFSLKRGEILGIAGLVGAGRTETIQCLFGVWPGQWEGKIYIDGKQVDIRNCQQAIAQGIAMVPEDRKRDGIVPVMAVGKNITLAALNKFTGGISQLDDAAEQKCILESIQQLKVKTSSPDLAIGRLSGGNQQKAILARCLLLNPRILILDEPTRGIDIGAKYEIYKLINQLVQQGIAVIVISSELPEVLGLSDRVLVMHEGKLKANLINHNLTQEQVMEAALRSEHHVEKQSV

SEQ ID NO: 39046 - DNA, 1512 bp, Haemophilus influenzae
  CDS (1)..(1512): transl_table=11
atggcattgttggaaatgaaacatatcacaaaaaaatttggtgatgtgaccgcacttcataatatatccattgaattagaagcgggggaaattttatctttatgtggtgaaaatggatctggaaaatctacattaatgaaaatactttgcggtatttatccttgtggagattacagcggtgatatttacttttcagaaagtgaactaaaagcaaggaatattagagatactgaagaaaaaggcatttcaattattcatcaagaacttactctcgtaaagaatatgtctgtattggagaatatttttttgggtaacgaaataactcataaaggtttgacagcagataatgaaatgtacttacgttgcaaaaatttattacagcaggtgcaattagatgccgatcccaatacacgagtaggagaattaggtttagggcaacagcaattagttgaaatagctaaggctttgaataaacaagtaagacttcttatcttagatgaaccaacggcttcacttactgaaaaagaaacggaaattttgttaaatcttattaaggatcttaaagcacacaatatcgcttgtatctatatttcccataaactcaatgaagttaaggctatctctgacaaaatttgcgtcattcgtgatggtgaacatgttggtacgaaagacgcttcaacaatgacagaagatgacattatcaccatgatggtaggtcgggaaattacctcactttatccacatgaacctcatgaaatcaaagatgaaattttacgagtagaaaatctctctgcttggcatccaatcaatacacatattaagcgtgttgataacgtaagttttagtcttcatgagggggaaattttaggtgttgcaggtttagttggttcaggtcgtacagacatggtgcaatgcttatttgggtcttatgaaggtaagtttgaaggaaatatttttatcaatcaaaaacaagtaaatatcaaaaattgtgcccaagcgattgaacataaaattgtgatggttcctgaagatcggaagaaacacggcattgtttctattatgggagttggcaaaaacattacgctttcttctttgaaatcttattgtttcggaaaaatggtagttaatgaagcaaaagaagagcaaataattggctcagccatcaaacgactaaaggtgaaaactttttcaccagatttgccaataggacgacttagtggcggtaatcaacagaaagcgatcctagcaaaatgtttatcgttaaatcctaaaatactgattttagatgaaccaacaagaggaattgatgttggtgcgaaatatgaaatttataagttaattaaccaattagcacaagaagggattgctattattgtcatttcatcagaactaccagaagttttaggcattagtgatagagttcttgttatgcaccaaggtaaacttaaagctagtcttatcaatactgctcttactcaagaacaagttatggaaacagcacttaaggagtaa

SEQ ID NO: 39047 - protein, 503 aa, Haemophilus influenzae
MALLEMKHITKKFGDVTALHNISIELEAGEILSLCGENGSGKSTLMKILCGIYPCGDYSGDIYFSESELKARNIRDTEEKGISIIHQELTLVKNMSVLENIFLGNEITHKGLTADNEMYLRCKNLLQQVQLDADPNTRVGELGLGQQQLVEIAKALNKQVRLLILDEPTASLTEKETEILLNLIKDLKAHNIACIYISHKLNEVKAISDKICVIRDGEHVGTKDASTMTEDDIITMMVGREITSLYPHEPHEIKDEILRVENLSAWHPINTHIKRVDNVSFSLHEGEILGVAGLVGSGRTDMVQCLFGSYEGKFEGNIFINQKQVNIKNCAQAIEHKIVMVPEDRKKHGIVSIMGVGKNITLSSLKSYCFGKMVVNEAKEEQIIGSAIKRLKVKTFSPDLPIGRLSGGNQQKAILAKCLSLNPKILILDEPTRGIDVGAKYEIYKLINQLAQEGIAIIVISSELPEVLGISDRVLVMHQGKLKASLINTALTQEQVMETALKE

SEQ ID NO: 39048 - DNA, 1512 bp, Escherichia coli; identical to SEQ ID NO: 27632
  CDS (1)..(1512): transl_table=11

SEQ ID NO: 39049 - protein, 503 aa, Escherichia coli; identical to SEQ ID NO: 27633

SEQ ID NO: 39050 - DNA, 1503 bp, Escherichia coli O157
  CDS (1)..(1503): transl_table=11
atgacgaccgaccaacaccaggagatcctccgcaccgaaggattaagtaaatttttccccggcgtcaaagcgttagacaacgttgatttcagcctgcgccgtggcgaaatcatggcgctgctcggtgaaaacggggcgggaaaatcaacgctaatcaaagcattaactggtgtataccacgctgatcgcggcaccatctggctggaaggccaggctatctcaccgaaaaataccgcccacgcgcaacaactcggcattggcaccgtctatcaggaagtcaacctgctacccaatatgtcggtcgctgataatctatttataggccgcgaacccaaacgcttcggccttctacgccgcaaagagatggaaaagcgcgccaccgaactgatggcatcttacggtttctccctcgacgtgcgcgaaccgctcaaccgcttttcagtcgcgatgcagcaaatcgtcgctatttgccgggctatcgatctctctgccaaagtgctgatcctcgatgaacccaccgccagtctcgacacccaggaagtggagttactgtttgacctgatgcgtcagttgcgcgatcgcggcgtcagcctgatctttgtcactcactttctcgatcaggtctatcaggtcagcgatcggatcaccgtcttacgcaacggcagtttcgtaggctgtcgggaaacgtgcgagctaccgcagatcgaactggtaaaaatgatgctggggcgcgagctggatacccacgcgctacagcgtgccgggcgaacattgttgagcgacaaacccgttgccgcgttcaaaaattacggcaaaaaaggaacgatcgcaccgtttgatctcgaagtacgccccggcgagatcgtcggtctggctggattgctgggatcaggacgtaccgaaaccgccgaagtgatcttcggtatcaaacctgctgacagcggcacggcgttgatcaaaggcaaaccgcaaaacctgcgatcgccacatcaggcttcggtacttggcattggcttctgcccggaagacaggaaaaccgatggcatcatcgctgccgcctcggtgcgggaaaatatcatcctcgctctccaggcccggcgcggctggctacgtcccatttcccgcaaagaacagcaagagattgccgaacgctttatccgccagcttggcattcgcacaccttcaactgaacaaccgattgaatttctctccggcggcaatcagcaaaaagtgttgctttcacgttggctactgacccgaccgcaatttctgatcctcgatgagccaacccgcggcattgatgttggtgcccacgccgagatcatccgcctgattgaaacgctatgcgccgatggtctggcgctgctggtgatctcctccgaactggaagaactggtgggctatgccgaccgggtgatcatcatgcgcgatcgcaaacaggtggcggagatcccgctggcagagctttccgttccggcgatcatgaatgccattgcggcgtaa

SEQ ID NO: 39051 - protein, 500 aa, Escherichia coli O157
MTTDQHQEILRTEGLSKFFPGVKALDNVDFSLRRGEIMALLGENGAGKSTLIKALTGVYHADRGTIWLEGQAISPKNTAHAQQLGIGTVYQEVNLLPNMSVADNLFIGREPKRFGLLRRKEMEKRATELMASYGFSLDVREPLNRFSVAMQQIVAICRAIDLSAKVLILDEPTASLDTQEVELLFDLMRQLRDRGVSLIFVTHFLDQVYQVSDRITVLRNGSFVGCRETCELPQIELVKMMLGRELDTHALQRAGRTLLSDKPVAAFKNYGKKGTIAPFDLEVRPGEIVGLAGLLGSGRTETAEVIFGIKPADSGTALIKGKPQNLRSPHQASVLGIGFCPEDRKTDGIIAAASVRENIILALQARRGWLRPISRKEQQEIAERFIRQLGIRTPSTEQPIEFLSGGNQQKVLLSRWLLTRPQFLILDEPTRGIDVGAHAEIIRLIETLCADGLALLVISSELEELVGYADRVIIMRDRKQVAEIPLAELSVPAIMNAIAA

SEQ ID NO: 39052 - DNA, 23 bp, Artificial sequence
  Primer sequence
atgcaacagtctaccccgtatct

SEQ ID NO: 39053 - DNA, 24 bp, Artificial sequence
  Primer sequence
ttaggcaacagcctggctgacttt

SEQ ID NO: 39054 - protein, 556 aa, Artificial sequence
  Consensus
  Variant (2)..(5): Xaa in position 2 to 5 is any amino acid
  Variant (7)..(7): Xaa in position 7 is any amino acid
  Variant (9)..(9): Xaa in position 9 is any amino acid
  Variant (11)..(14): Xaa in position 11 to 14 is any amino acid
  Variant (15)..(16): Xaa in position 15 to 16 is any or no amino acid
  Variant (18)..(19): Xaa in position 18 to 19 is any amino acid
  Variant (21)..(23): Xaa in position 21 to 23 is any amino acid
  Variant (25)..(26): Xaa in position 25 to 26 is any amino acid
  Variant (28)..(28): Xaa in position 28 is any amino acid
  Variant (30)..(30): Xaa in position 30 is any amino acid
  Variant (33)..(33): Xaa in position 33 is any amino acid
  Variant (48)..(48): Xaa in position 48 is any amino acid
  Variant (50)..(55): Xaa in position 50 to 55 is any amino acid
  Variant (56)..(60): Xaa in position 56 to 60 is any or no amino acid
  Variant (62)..(62): Xaa in position 62 is any amino acid
  Variant (64)..(66): Xaa in position 64 to 66 is any amino acid
  Variant (68)..(77): Xaa in position 68 to 77 is any amino acid
  Variant (79)..(79): Xaa in position 79 is any amino acid
  Variant (80)..(84): Xaa in position 80 to 84 is any or no amino acid
  Variant (87)..(88): Xaa in position 87 to 88 is any amino acid
  Variant (94)..(94): Xaa in position 94 is any amino acid
  Variant (96)..(98): Xaa in position 96 to 98 is any amino acid
  Variant (102)..(102): Xaa in position 102 is any amino acid
  Variant (106)..(106): Xaa in position 106 is any amino acid
  Variant (109)..(113): Xaa in position 109 to 113 is any amino acid
  Variant (114)..(122): Xaa in position 114 to 122 is any or no amino acid
  Variant (124)..(130): Xaa in position 124 to 130 is any amino acid
  Variant (131)..(135): Xaa in position 131 to 135 is any or no amino acid
  Variant (137)..(138): Xaa in position 137 to 138 is any amino acid
  Variant (140)..(147): Xaa in position 140 to 147 is any amino acid
  Variant (148)..(152): Xaa in position 148 to 152 is any or no amino acid
  Variant (154)..(155): Xaa in position 154 to 155 is any amino acid
  Variant (157)..(157): Xaa in position 157 is any amino acid
  Variant (160)..(161): Xaa in position 160 to 161 is any amino acid
  Variant (171)..(175): Xaa in position 171 to 175 is any amino acid
  Variant (176)..(180): Xaa in position 176 to 180 is any or no amino acid
  Variant (192)..(194): Xaa in position 192 to 194 is any amino acid
  Variant (196)..(198): Xaa in position 196 to 198 is any amino acid
  Variant (200)..(201): Xaa in position 200 to 201 is any amino acid
  Variant (204)..(205): Xaa in position 204 to 205 is any amino acid
  Variant (207)..(209): Xaa in position 207 to 209 is any amino acid
  Variant (210)..(210): Xaa in position 210 is any or no amino acid
  Variant (212)..(213): Xaa in position 212 to 213 is any amino acid
  Variant (222)..(222): Xaa in position 222 is any amino acid
  Variant (225)..(226): Xaa in position 225 to 226 is any amino acid
  Variant (228)..(228): Xaa in position 228 is any amino acid
  Variant (230)..(230): Xaa in position 230 is any amino acid
  Variant (238)..(239): Xaa in position 238 to 239 is any amino acid
  Variant (241)..(251): Xaa in position 241 to 251 is any amino acid
  Variant (252)..(257): Xaa in position 252 to 257 is any or no amino acid
  Variant (260)..(261): Xaa in position 260 to 261 is any amino acid
  Variant (266)..(266): Xaa in position 266 is any amino acid
  Variant (268)..(281): Xaa in position 268 to 281 is any amino acid
  Variant (282)..(294): Xaa in position 282 to 294 is any or no amino acid
  Variant (296)..(296): Xaa in position 296 is any amino acid
  Variant (298)..(299): Xaa in position 298 to 299 is any amino acid
  Variant (301)..(305): Xaa in position 301 to 305 is any amino acid
  Variant (306)..(318): Xaa in position 306 to 318 is any or no amino acid
  Variant (320)..(322): Xaa in position 320 to 322 is any amino acid
  Variant (324)..(325): Xaa in position 324 to 325 is any amino acid
  Variant (332)..(332): Xaa in position 332 is any amino acid
  Variant (343)..(345): Xaa in position 343 to 345 is any amino acid
  Variant (347)..(347): Xaa in position 347 is any amino acid
  Variant (349)..(353): Xaa in position 349 to 353 is any amino acid
  Variant (354)..(357): Xaa in position 354 to 357 is any or no amino acid
  Variant (359)..(359): Xaa in position 359 is any amino acid
  Variant (361)..(361): Xaa in position 361 is any amino acid
  Variant (363)..(363): Xaa in position 363 is any amino acid
  Variant (365)..(366): Xaa in position 365 to 366 is any amino acid
  Variant (368)..(372): Xaa in position 368 to 372 is any amino acid
  Variant (373)..(380): Xaa in position 373 to 380 is any or no amino acid
  Variant (383)..(384): Xaa in position 383 to 384 is any amino acid
  Variant (387)..(388): Xaa in position 387 to 388 is any amino acid
  Variant (390)..(390): Xaa in position 390 is any amino acid
  Variant (395)..(395): Xaa in position 395 is any amino acid
  Variant (396)..(396): Xaa in position 396 is any or no amino acid
  Variant (399)..(403): Xaa in position 399 to 403 is any amino acid
  Variant (405)..(406): Xaa in position 405 to 406 is any amino acid
  Variant (409)..(409): Xaa in position 409 is any amino acid
  Variant (411)..(419): Xaa in position 411 to 419 is any amino acid
  Variant (420)..(426): Xaa in position 420 to 426 is any or no amino acid
  Variant (428)..(441): Xaa in position 428 to 441 is any amino acid
  Variant (442)..(442): Xaa in position 442 is any or no amino acid
  Variant (444)..(444): Xaa in position 444 is any amino acid
  Variant (447)..(452): Xaa in position 447 to 452 is any amino acid
  Variant (453)..(454): Xaa in position 453 to 454 is any or no amino acid
  Variant (456)..(457): Xaa in position 456 to 457 is any amino acid
  Variant (471)..(471): Xaa in position 471 is any amino acid
  Variant (473)..(477): Xaa in position 473 to 477 is any amino acid
  Variant (478)..(478): Xaa in position 478 is any or no amino acid
  Variant (495)..(495): Xaa in position 495 is any amino acid
  Variant (499)..(499): Xaa in position 499 is any amino acid
  Variant (502)..(503): Xaa in position 502 to 503 is any amino acid
  Variant (505)..(507): Xaa in position 505 to 507 is any amino acid
  Variant (508)..(508): Xaa in position 508 is any or no amino acid
  Variant (510)..(511): Xaa in position 510 to 511 is any amino acid
  Variant (520)..(520): Xaa in position 520 is any amino acid
  Variant (524)..(524): Xaa in position 524 is any amino acid
  Variant (526)..(526): Xaa in position 526 is any amino acid
  Variant (530)..(530): Xaa in position 530 is any amino acid
  Variant (533)..(534): Xaa in position 533 to 534 is any amino acid
  Variant (536)..(536): Xaa in position 536 is any amino acid
  Variant (538)..(538): Xaa in position 538 is any amino acid
  Variant (540)..(549): Xaa in position 540 to 549 is any amino acid
  Variant (550)..(554): Xaa in position 550 to 554 is any or no amino acid
LXXXXIXKXFXXXXXXLXXVXXXVXXGXVXALXGENGAGKSTLMKILXGXXXXXXXXXXXGXIXXXGXXXXXXXXXXAXXXXXXGIXXIHQELXLXXXLTVXENIXLGXXXXXXXXXXXXXXIXXXXXXXXXXXXLXXLXXXXXXXXXXXXXVXXLXVAXXQMVEIAKALXXXXXXXXXXVLIMDEPTAALXXXEXXXLXXIIXXLXXXXGXXIIYISHRLXEIXXIXDXITVLRDGXXVXXXXXXXXXXXXXXXXXLVXXMVGRXLXXXXXXXXXXXXXXXXXXXXXXXXXXXLXVXXLXXXXXXXXXXXXXXXXXXVXXXVXXGEILGIXGLVGAGRTELXXXLXGXXXXXXXXXGXIXLXGXXVXXXXXXXXXXXXXAIXXGIXXVXEDRKXXGLXXXXXVXXNIXLXXXXXXXXXXXXXXXXLXXXXXXXXXXXXXXXLXIKXXXXXXXXIXXLSGGNQQKVVLAKXLXXXXXXVLILDEPTRGIDVGAKXEIYXLIXXLXXXXGXXIIMISSELXEVLXMXDRIXVMXXGXIXGXXXXXXXXXXXXXXXIM

SEQ ID NO: 39055 - protein, 23 aa, Artificial sequence
  Consensus
  Variant (2)..(5): Xaa in position 2 to 5 is any amino acid
  Variant (6)..(6): Xaa in position 6 is Ile, Leu or Val
  Variant (7)..(7): Xaa in position 7 is any amino acid
  Variant (12)..(12): Xaa in position 12 is Ala, Cys, Ser or Thr
  Variant (16)..(16): Xaa in position 16 is Ser or Thr
  Variant (17)..(17): Xaa in position 17 is Phe, Leu, Met or Val
  Variant (18)..(22): Xaa in position 18 to 22 is any amino acid
  Variant (23)..(23): Xaa in position 23 is Ala or Gly
GXXXXXXGENGXGKSXXXXXXXX

SEQ ID NO: 39056 - protein, 25 aa, Artificial sequence
  Consensus
  Variant (2)..(2): Xaa in position 2 is Ile or Val
  Variant (3)..(4): Xaa in position 3 to 4 is any amino acid
  Variant (5)..(5): Xaa in position 5 is Ile or Val
  Variant (6)..(6): Xaa in position 6 is any amino acid
  Variant (9)..(10): Xaa in position 9 to 10 is any or no amino acid
  Variant (12)..(19): Xaa in position 12 to 19 is any amino acid
  Variant (20)..(21): Xaa in position 20 to 21 is any or no amino acid
  Variant (23)..(23): Xaa in position 23 is Ile, Leu or Met
  Variant (24)..(24): Xaa in position 24 is any amino acid
  Variant (25)..(25): Xaa in position 25 is Phe, Ile, Leu, Met or Val
GXXXXXQEXXLXXXXXXXXXXNXXX

SEQ ID NO: 39057 - protein, 16 aa, Artificial sequence
  Consensus
  Variant (2)..(6): Xaa in position 2 to 6 is any amino acid
  Variant (7)..(9): Xaa in position 7 to 9 is any or no amino acid
  Variant (11)..(11): Xaa in position 11 is any amino acid
  Variant (12)..(12): Xaa in position 12 is Ile, Leu or Val
  Variant (13)..(13): Xaa in position 13 is Ala, Glu or Gln
  Variant (15)..(15): Xaa in position 15 is any amino acid
  Variant (16)..(16): Xaa in position 16 is Lys or Arg
LXXXXXXXXQXXXIXX

SEQ ID NO: 39058 - protein, 56 aa, Artificial sequence
  Consensus
  Variant (2)..(2): Xaa in position 2 is any amino acid
  Variant (3)..(4): Xaa in position 3 to 4 is any or no amino acid
  Variant (9)..(9): Xaa in position 9 is any amino acid
  Variant (10)..(10): Xaa in position 10 is any or no amino acid
  Variant (12)..(12): Xaa in position 12 is Ala, Asp, Gly, Asn, Ser or Thr
  Variant (13)..(14): Xaa in position 13 to 14 is any amino acid
  Variant (15)..(15): Xaa in position 15 is Asp or Glu
  Variant (16)..(18): Xaa in position 16 to 18 is any amino acid
  Variant (19)..(19): Xaa in position 19 is Phe, Leu or Val
  Variant (20)..(22): Xaa in position 20 to 22 is any amino acid
  Variant (23)..(23): Xaa in position 23 is Ile, Leu, Met or Val
  Variant (24)..(25): Xaa in position 24 to 25 is any amino acid
  Variant (26)..(26): Xaa in position 26 is Phe, Ile, Leu, Met or Val
  Variant (27)..(33): Xaa in position 27 to 33 is any amino acid
  Variant (34)..(34): Xaa in position 34 is Ile, Leu, Met or Val
  Variant (35)..(35): Xaa in position 35 is any amino acid
  Variant (36)..(36): Xaa in position 36 is Ile or Val
  Variant (37)..(37): Xaa in position 37 is Gly, Ser or Thr
  Variant (39)..(39): Xaa in position 39 is any amino acid
  Variant (40)..(40): Xaa in position 40 is Phe, Ile, Leu or Met
  Variant (41)..(41): Xaa in position 41 is any amino acid
  Variant (42)..(42): Xaa in position 42 is Asp, Glu or Gln
  Variant (43)..(46): Xaa in position 43 to 46 is any amino acid
  Variant (47)..(47): Xaa in position 47 is Ala, Cys, Gly, Ser, Thr or Val
  Variant (48)..(52): Xaa in position 48 to 52 is any amino acid
  Variant (53)..(53): Xaa in position 53 is Phe, Ile, Leu, Met or Val
  Variant (54)..(54): Xaa in position 54 is Lys or Arg
  Variant (55)..(55): Xaa in position 55 is any amino acid
IXXXDEPTXXLXXXXXXXXXXXXXXXXXXXXXXXXXXHXXXXXXXXXXXXXXXXXG

SEQ ID NO: 39059 - protein, 23 aa, Artificial sequence
  Consensus
  Variant (2)..(2): Xaa in position 2 is Glu or Gln
  Variant (3)..(4): Xaa in position 3 to 4 is any amino acid
  Variant (5)..(5): Xaa in position 5 is Ala, Cys or Gly
  Variant (6)..(6): Xaa in position 6 is Phe, Ile, Leu, Met or Val
  Variant (7)..(7): Xaa in position 7 is any amino acid
  Variant (10)..(10): Xaa in position 10 is any amino acid
  Variant (12)..(12): Xaa in position 12 is Ala, Ser or Thr
  Variant (15)..(15): Xaa in position 15 is Ser or Thr
  Variant (16)..(16): Xaa in position 16 is Asp, Glu, Asn or Ser
  Variant (17)..(22): Xaa in position 17 to 22 is any amino acid
GXXXXXXGLXGXGRXXXXXXXXG

SEQ ID NO: 39060 - protein, 13 aa, Artificial sequence
  Consensus
  Variant (9)..(9): Xaa in position 9 is Ala or Val
  Variant (10)..(10): Xaa in position 10 is Ala, Ile, Leu or Val
  Variant (11)..(11): Xaa in position 11 is Phe, Ile, Leu or Val
  Variant (12)..(12): Xaa in position 12 is Ala, Gly or Ser
  Variant (13)..(13): Xaa in position 13 is Lys or Arg
LSGGNQQKXXXXX

SEQ ID NO: 39061 - protein, 19 aa, Artificial sequence
  Consensus
  Variant (5)..(5): Xaa in position 5 is Lys or Arg
  Variant (7)..(7): Xaa in position 7 is Ile or Val
  Variant (9)..(9): Xaa in position 9 is Ile or Val
  Variant (10)..(10): Xaa in position 10 is Ala, Glu, Gly, Asn or Ser
  Variant (11)..(11): Xaa in position 11 is Ala, Gly, Asn, Ser or Thr
  Variant (12)..(13): Xaa in position 12 to 13 is any amino acid
  Variant (14)..(14): Xaa in position 14 is Ala, Asp, Glu, Gly, Gln or Thr
  Variant (15)..(15): Xaa in position 15 is Phe, Ile, Leu or Val
  Variant (16)..(18): Xaa in position 16 to 18 is any amino acid
  Variant (19)..(19): Xaa in position 19 is Phe, Ile, Leu, Met or Val
DEPTXGXDXXXXXXXXXXX

SEQ ID NO: 39062 - protein, 24 aa, Artificial sequence
  Consensus
  Variant (2)..(5): Xaa in position 2 to 5 is any amino acid
  Variant (6)..(7): Xaa in position 6 to 7 is any or no amino acid
  Variant (10)..(10): Xaa in position 10 is Asp or Glu
  Variant (11)..(12): Xaa in position 11 to 12 is any amino acid
  Variant (14)..(14): Xaa in position 14 is Ile, Leu or Val
  Variant (15)..(17): Xaa in position 15 to 17 is any amino acid
  Variant (18)..(18): Xaa in position 18 is Ala, Cys, Ser or Thr
  Variant (19)..(19): Xaa in position 19 is any amino acid
  Variant (21)..(21): Xaa in position 21 is Ala, Ile, Leu or Val
  Variant (22)..(23): Xaa in position 22 to 23 is any amino acid
  Variant (24)..(24): Xaa in position 24 is Phe, Ile, Leu, Met or Val
GXXXXXXSSXXXEXXXXXXRXXXX

SEQ ID NO: 39063 - DNA, 192 bp, Escherichia coli; identical to SEQ ID NO: 14760
  CDS (1)..(192)

SEQ ID NO: 39064 - protein, 63 aa, Escherichia coli; identical to SEQ ID NO: 14761

SEQ ID NO: 39065 - DNA, 1140 bp, Escherichia coli O157:H7 EDL933; identical to SEQ ID NO: 14762
  CDS (1)..(1140): transl_table=11

SEQ ID NO: 39066 - protein, 379 aa, Escherichia coli O157:H7 EDL933; identical to SEQ ID NO: 14763

SEQ ID NO: 39067 - DNA, 1140 bp, Escherichia coli O157; identical to SEQ ID NO: 14764
  CDS (1)..(1140): transl_table=11

SEQ ID NO: 39068 - protein, 379 aa, Escherichia coli O157; identical to SEQ ID NO: 14765

SEQ ID NO: 39069 - DNA, 24 bp, Artificial sequence
  Primer sequence
atgcctgagactactaagctgttt

SEQ ID NO: 39070 - DNA, 28 bp, Artificial sequence
  Primer sequence
ttaaagtccatgatataaaaatgtctct

SEQ ID NO: 39071 - protein, 59 aa, Artificial sequence; identical to SEQ ID NO: 14768
  Consensus
  Variant (10)..(10): Xaa in position 10 is Gly or Ser
  Variant (11)..(11): Xaa in position 11 is any amino acid
  Variant (13)..(13): Xaa in position 13 is any amino acid
  Variant (15)..(15): Xaa in position 15 is any amino acid
  Variant (19)..(19): Xaa in position 19 is Trp or Tyr
  Variant (28)..(28): Xaa in position 28 is any amino acid
  Variant (30)..(30): Xaa in position 30 is Glu or Gly
  Variant (33)..(33): Xaa in position 33 is any amino acid
  Variant (37)..(37): Xaa in position 37 is Ile or Val
  Variant (46)..(46): Xaa in position 46 is Ile or Leu
  Variant (48)..(48): Xaa in position 48 is any amino acid
  Variant (50)..(50): Xaa in position 50 is Glu or Lys

SEQ ID NO: 39072 - DNA, 705 bp, Escherichia coli; identical to SEQ ID NO: 20641
  CDS (1)..(705)

SEQ ID NO: 39073 - protein, 234 aa, Escherichia coli; identical to SEQ ID NO: 20642

SEQ ID NO: 39074 - DNA, 26 bp, Artificial sequence
  Primer sequence
atgtttttagcatcattgttgagacg

SEQ ID NO: 39075 - DNA, 28 bp, Artificial sequence
  Primer sequence
ttaaatttttgctattagattttctgca

SEQ ID NO: 39076 - DNA, 1338 bp, Escherichia coli
  CDS (1)..(1338)
atgaaaaacattatccgtactcccgaaacgcatccgctgacctggcgtctgcgcgatgacaaacagccagtgtggctggacgaataccgcagcaaaaacggttacgaaggcgcgcgtaaggcgctgaccgggctgtctccggacgaaatcgttaatcaggtaaaagacgctggtctgaaagggcgcggcggcgcgggcttctcgactggcctgaaatggagcctgatgccgaaagacgaatccatgaacatccgttacctgctgtgtaatgccgatgaaatggagccgggcacctataaagaccgcctgttgatggagcaactgccgcacctgctggtggaaggtatgctcatctccgcgtttgcgctgaaagcttaccgtggctacatcttcctgcgtggcgaatatatcgaagcggcagttaatctgcgccgtgccattgccgaagccaccgaagcgggtctgcttggcaaaaacattatgggaacaggtttcgatttcgaactgttcgtccataccggggcagggcgctacatctgcggggaagaaacagcgttaatcaactccctggaaggacgtcgtgctaacccacgctcgaagccacccttcccggcaacctccggcgcatggggtaaaccgacctgtgtcaacaacgtcgaaaccctgtgtaacgttccggcgatcctcgctaacggcgtggagtggtatcagaacatctcgaaaagtaaagatgctggcaccaagctgatgggcttctccggtcgggtgaaaaatccgggactgtgggaactgccgttcggcaccaccgcacgcgagatcctcgaagattacgccggtggtatgcgtgatggtctgaaatttaaagcctggcagccaggcggcgcggggactgacttcctgaccgaagcgcaccttgatctgccgatggaattcgaaagtatcggtaaagcgggcagccgtctgggtacggcgctggcgatggcggttgaccatgagatcaacatggtgtcgctggtgcgtaacctggaagagtttttcgcccgtgagtcctgcggctggtgtacgccgtgccgcgacggtctgccgtggagcgtgaaaattctgcgtgcgctggagcgtggtgaaggtcagccgggcgatatcgaaacacttgagcaactgtgtcgattcttaggcccgggtaaaactttctgtgcccacgcacctggtgcagtggagccgttacagagcgccatcaaatatttccgcgaagaatttgaggcgggaatcaaacagccgttcagcaatacccatttgattaatgggattcagccgaacctgctgaaagagcgctggtaa

SEQ ID NO: 39077 - protein, 445 aa, Escherichia coli
MKNIIRTPETHPLTWRLRDDKQPVWLDEYRSKNGYEGARKALTGLSPDEIVNQVKDAGLKGRGGAGFSTGLKWSLMPKDESMNIRYLLCNADEMEPGTYKDRLLMEQLPHLLVEGMLISAFALKAYRGYIFLRGEYIEAAVNLRRAIAEATEAGLLGKNIMGTGFDFELFVHTGAGRYICGEETALINSLEGRRANPRSKPPFPATSGAWGKPTCVNNVETLCNVPAILANGVEWYQNISKSKDAGTKLMGFSGRVKNPGLWELPFGTTAREILEDYAGGMRDGLKFKAWQPGGAGTDFLTEAHLDLPMEFESIGKAGSRLGTALAMAVDHEINMVSLVRNLEEFFARESCGWCTPCRDGLPWSVKILRALERGEGQPGDIETLEQLCRFLGPGKTFCAHAPGAVEPLQSAIKYFREEFEAGIKQPFSNTHLINGIQPNLLKERW

SEQ ID NO: 39078 - DNA, 1479 bp, Danio rerio
  CDS (1)..(1479)
atgttgtcgtgtctcggctctccagctcttagccgggttctgagcagcggggcgtctcgtgctcctgtggcagtggctgtagctggagcctctcgcacctctgtgtcctccaactctgctccacaatgcaggactctgctccgctacagcagcacagctcaacaggaaacacccaagaagaccaagtttgggcctcttgctgaccaggacagaatattcactaacctgtatggacgccatgactggaggctgaagggtgccctgaggagaggcgactggtacaagaccaaggagattctggataaaggagtggactggatcctgaatgagattaagacctccgggctgcggggccgaggtggtgctggattcccaacagggatgaagtggagcttcatgaacaagcccagtgatggcaggcctaaatatctggtggtgaatgctgacgaaggagagcctgggacctgtaaggacagagagatcatgcgtaatgatccgcacaagctaatcgagggctgtctggtcgccggcagggccatgggcgctcgagctgcctacatctacatccgcggagagttttacaatgagtcctccaacctgcaggtggccattaatgaggcttatgctgccggtctgatcggtaaaaacgcatgcggctctggttatgattttgacgtgttcgtgatgcgtggagcaggagcttacatttgtggcgaggagacggctctgatcgagtccatcgaggggaaacagggaaaacctcgtctcaaaccccctttccctgctgatgtgggcgtgtttggctgtcccacgactgttgctaatgttgagaccgtagcggtggcaccaaccatctgccgtcgcggtggcacatggtttgcaggtttcggccgagaaagaaactccggcaccaagctcttcaacatttcaggccacgttaacaacccctgtacagtggaagaagagatgtccattccccttaaagagcttatcgaaagacatgcaggtggtgtccggggtggttgggataatctcctgtgtgtcattcctggaggatcgtccacaccactcatcccacaacacgtgtgcgacaccgttctcatggatttcgatgccctcattcaggctcagactggtctcggcactgcagcacttattgtcatggataaatcaactgacgttatccgagctatcgcccgtttgattgagttctacaagcatgagagctgcgggcagtgcactccttgcagagagggagtggactggatgaacaagatgatgtggcgctttgtgaaaggtgatgcgcggtcagcagagatcgacatgatctgggagatcagcaagcagattgagggacacaccatctgcgctttaggagacggagccgcatggcctgttcagggcttgattcgtcacttccgtcctttgatggagagcagaatcgcagacttccaacagaaacagcaggcacgcgcttga

SEQ ID NO: 39079 - protein, 492 aa, Danio rerio
MLSCLGSPALSRVLSSGASRAPVAVAVAGASRTSVSSNSAPQCRTLLRYSSTAQQETPKKTKFGPLADQDRIFTNLYGRHDWRLKGALRRGDWYKTKEILDKGVDWILNEIKTSGLRGRGGAGFPTGMKWSFMNKPSDGRPKYLVVNADEGEPGTCKDREIMRNDPHKLIEGCLVAGRAMGARAAYIYIRGEFYNESSNLQVAINEAYAAGLIGKNACGSGYDFDVFVMRGAGAYICGEETALIESIEGKQGKPRLKPPFPADVGVFGCPTTVANVETVAVAPTICRRGGTWFAGFGRERNSGTKLFNISGHVNNPCTVEEEMSIPLKELIERHAGGVRGGWDNLLCVIPGGSSTPLIPQHVCDTVLMDFDALIQAQTGLGTAALIVMDKSTDVIRAIARLIEFYKHESCGQCTPCREGVDWMNKMMWRFVKGDARSAEIDMIWEISKQIEGHTICALGDGAAWPVQGLIRHFRPLMESRIADFQQKQQARA

SEQ ID NO: 39080 - DNA, 1395 bp, Rattus norvegicus
  CDS (1)..(1395)
atgctagcagcacggcattttctcggcgggtcggttcccgtgcgggtatctgtgcgtctcagcagcggcacgacagcacccaagaaaacctcatttggctcgctgaaggatgaagaccggatcttcaccaacctgtatgggcgccatgactggaggctgaagggtgcccagaggcggggtgattggtacaagacaaaggagatcctgctgaaggggcctgactggatcttgggtgaaatgaagacatcgggtttacggggccgtggtggtgctggcttccccactggcctcaaatggagctttatgaataagccctcggatggcaggcccaagtacctggtggtgaatgctgacgagggtgagcccggcacctgtaaggaccgagagatcatgcgccatgaccctcacaagctggtggaaggctgcctggtgggaggccgggccatgggggcccgggctgcctatatctacatccgaggggaattctacaatgaggcctccaatttgcaggtagctatccgagaggcctatgaagcaggtctgattggcaaaaatgcctgtgactctgattatgattttgatgtgtttgtggtgcgtggggctggggcctacatctgtggagaagagactgcgcttattgagtccattgaaggcaagcagggaaagccacgcctgaagccgccctttccagcagatgtgggagtatttggatgccccacaactgtggccaatgtggagacggtggctgtgtcccccaccatctgccgtcgtggcggcacctggtttgctggctttggccgagaacgcaactcaggtaccaaactgttcaacatctctggccatgtcaaccacccctgcactgtggaggaagagatgtctgtgccactcaaagaactgattgagaaacatgctggtggtgtcttaggtggctgggacaacctccttgctgtgattcctggtggctcatccactccactgatccccaaatctgtgtgtgagacagtgctgatggactttgatgccctggtgcaggctcagacgggcctgggcacagctgcggttattgttatgaacagctcgacagacattgtgaaagccatcgctcgtctcattgagttctacaagcatgagagctgtggccagtgcaccccgtgccgggagggcgttgattggatgaacaaggtgatggcccgatttgtgaagggggatgcccggccagctgagatcgactccctgtgggagatcagcaagcagatagaaggccacaccatttgtgctctgggtgatggggccgcctggccagtacagggtctgatccgacatttccggcccgagcttgaggatcggatgcaacgatttgcccagcagcaccaggccaggcaggcggcctcctga

SEQ ID NO: 39081 - protein, 464 aa, Rattus norvegicus
MLAARHFLGGSVPVRVSVRLSSGTTAPKKTSFGSLKDEDRIFTNLYGRHDWRLKGAQRRGDWYKTKEILLKGPDWILGEMKTSGLRGRGGAGFPTGLKWSFMNKPSDGRPKYLVVNADEGEPGTCKDREIMRHDPHKLVEGCLVGGRAMGARAAYIYIRGEFYNEASNLQVAIREAYEAGLIGKNACDSDYDFDVFVVRGAGAYICGEETALIESIEGKQGKPRLKPPFPADVGVFGCPTTVANVETVAVSPTICRRGGTWFAGFGRERNSGTKLFNISGHVNHPCTVEEEMSVPLKELIEKHAGGVLGGWDNLLAVIPGGSSTPLIPKSVCETVLMDFDALVQAQTGLGTAAVIVMNSSTDIVKAIARLIEFYKHESCGQCTPCREGVDWMNKVMARFVKGDARPAEIDSLWEISKQIEGHTICALGDGAAWPVQGLIRHFRPELEDRMQRFAQQHQARQAAS

SEQ ID NO: 39082 - DNA, 1407 bp, Xenopus tropicalis
  CDS (1)..(1407)
atgctttccctaagacatatgctgagaattcctccttctactgcttccaccattgttattgccagattaaactctagtgggccagaacagactccaaaaaagtcaaaatttggacctcttagtgatgaagatcgaatatttactaacttatatggacgtcatgactggggattgaaaggtgctttaagtagaggagactggtacaagaccaaggagattttgttgaagggtgtagactggattctgggtgagattaaagcatctggcctgcgtggcagaggaggagctggattcccaacaggtcttaaatggagctttatgaataaaccatcagatgggaggcccaagtatcttgtagtcaatgcagatgaaggtgaacctggaacatgtaaggatcgggagatcatgagacacgacccccacaaacttgtggagggttgtctggttgctggacgtagcatgggagcacgtgcagcatacatctacattcggggagaattttacaatgaagcatccaatttacaggtagctgtgcgggaagcatattctgcagggcttattgggcgtaatgcctgtggctcggggtatgattttgatgtgtttgtggtgagaggtgctggggcatacatctgtggtgaagagactgcattgattgagagcattgaaggaaaacaaggaaaaccccgccttaagcctccttttcctgctgatgttggtgtcttcggttgtccaacaacagttgccaatgtggaaactgttgcagttgcaccaaccatttgcaggcgtggaggttcttggtttgctagctttggtcgtgaaagaaacgctggcaccaaactgttcaacatatcgggacatgtaaacaatccctgtactgtggaggaagagatgtctatacctcttaaagagcttattgaaaggcatgcaggaggagttactggtggctgggataatctgcttgcggtgatccctggaggctcctccacaccacttataccacaatctgtgtgtgaaacagttcttatggattttgatgctctagtccaggctcagactggtcttggtacagcagccattattgtcatgaataaatcaactgacattgtccgcgctattgctcgccttattgagttctacaaacatgagagctgtggtcagtgtactccctgcagggaaggtgttgactggatgaacaaagttatgtggcgtatgtgtcaaggtgatgcccgtgtagatgagattgacatgttgtgggagattagcaagcagattgaaggccacactatctgtgcacttggagatggggctgcctggcctgtccagggtttgattcgtcatttccgccctgagttggagaagcgtatgaaactttttgatacagtaaagagacagctagctagcagctga

SEQ ID NO: 39083 - protein, 468 aa, Xenopus tropicalis
MLSLRHMLRIPPSTASTIVIARLNSSGPEQTPKKSKFGPLSDEDRIFTNLYGRHDWGLKGALSRGDWYKTKEILLKGVDWILGEIKASGLRGRGGAGFPTGLKWSFMNKPSDGRPKYLVVNADEGEPGTCKDREIMRHDPHKLVEGCLVAGRSMGARAAYIYIRGEFYNEASNLQVAVREAYSAGLIGRNACGSGYDFDVFVVRGAGAYICGEETALIESIEGKQGKPRLKPPFPADVGVFGCPTTVANVETVAVAPTICRRGGSWFASFGRERNAGTKLFNISGHVNNPCTVEEEMSIPLKELIERHAGGVTGGWDNLLAVIPGGSSTPLIPQSVCETVLMDFDALVQAQTGLGTAAIIVMNKSTDIVRAIARLIEFYKHESCGQCTPCREGVDWMNKVMWRMCQGDARVDEIDMLWEISKQIEGHTICALGDGAAWPVQGLIRHFRPELEKRMKLFDTVKRQLASS

SEQ ID NO: 39084 - DNA, 1380 bp, Gallus gallus
  CDS (1)..(1380)
atggccgcctggcagctgagggcactgcgccgcctccccgccgccaccgccggcttctcgacagcgccgaagaagacgcagttcggctctctgaaggatgaggaccgcatcttcaccaacctctatgggcggcacgagtggaggctgcagggagcgctgcggcggggcgactggtacaagacaaaggagatcctgctgaagggcgtcgactggatcctgggtgagatcaaggcctcggggctgcggggccgcgggggggccggcttccccaccggcctcaagtggagcttcatgaacaaaccgcctgacggcagacccaagtacctggtggtgaacgcagatgagggggaacccggcacctgcaaggaccgtgagatcatgcggcacgacccgcacaagctggtggagggctgcctggtggccggccgtgccatgggcgcccgggccgcctacatctacatccgcggcgagttctacaatgaggcctccaacctgcaggtggccatcagggaagcgtacgaggctgggcttctggggaagaatgcctgcggttccgactatgcctttgatgtcttcgtggtgaggggtgccggggcgtacatctgtggcgaggagacggcactcatcgagtccatcgagggcaagcagggcaagccgcgcctcaagccgccctttcccgctgacgtgggagtcttcggctgtcccaccacggtggccaacgtggagacggtggctgtggcccccaccatctgccggcgcggtggtgcgtggttcgccggctttgggcgcgagcgcaactccgggacaaagcttttcaacatctctggccacgtcaaccacccctgcacagtggaggaggagatgtcagtgccgctgaaggagctcattgagaagcatgctgggggtgtccgtggtggctgggacaacctgctggctgtcatcccggggggctcctccaccccgctgctccccaagtcggtgtgtgagaccgtgttgatggactttgattccctggtgcaggcgcagagcgggctcggcacggctgccgtcatcgtcatggataaatcgaccgacatcgtcaaagcgatcgctcgtctcatcgagttctacaagcacgagagctgtgggcagtgcaccccgtgccgggaaggagtcgactggatgaacaaggtgatggcacgcttcgtgcggggcgacgcgcaggcagccgagatcgatgcactgtgggagatcagcaagcagatcgagggccacaccatctgtgcgctgggcgacggtgccgcgtggcccgtgcagggcctcatccgccactttcggccggagctggaggacaggatgcggcgctttggagaggccaaagcccgagcggcctcagcatga

SEQ ID NO: 39085 - protein, 459 aa, Gallus gallus
MAAWQLRALRRLPAATAGFSTAPKKTQFGSLKDEDRIFTNLYGRHEWRLQGALRRGDWYKTKEILLKGVDWILGEIKASGLRGRGGAGFPTGLKWSFMNKPPDGRPKYLVVNADEGEPGTCKDREIMRHDPHKLVEGCLVAGRAMGARAAYIYIRGEFYNEASNLQVAIREAYEAGLLGKNACGSDYAFDVFVVRGAGAYICGEETALIESIEGKQGKPRLKPPFPADVGVFGCPTTVANVETVAVAPTICRRGGAWFAGFGRERNSGTKLFNISGHVNHPCTVEEEMSVPLKELIEKHAGGVRGGWDNLLAVIPGGSSTPLLPKSVCETVLMDFDSLVQAQSGLGTAAVIVMDKSTDIVKAIARLIEFYKHESCGQCTPCREGVDWMNKVMARFVRGDAQAAEIDALWEISKQIEGHTICALGDGAAWPVQGLIRHFRPELEDRMRRFGEAKARAASA

SEQ ID NO: 39086 - DNA, 1305 bp, Mesorhizobium loti MAFF303099
  CDS (1)..(1305): transl_table=11
atgcttcaggataaagaccgcatcttcaccaacatctacggcctcttcgacaagtcgctggccggcgccatggctcgcggcgcctgggacaacacgcccggcatcgtcgccaaggggcgcgagtggatcgtcaacgagatgaaggcgtccggcctgcgcggccgtggcggcgcaggcttcccgacgggcctcaaatggtcgttcatgcccaagcagagcgacggccggccaagctacctcgtcatcaatgccgacgaatccgagcctggcacctgcaaggaccgcgacatcctgcgcaacgacccgcacacgctggtcgagggcgcgctgctcgccggcttcgccatgggcgcgattgccgcctacatctatgtgcgcggcgaattcatccgcgagcgcgaggcgctgcagcgtgccatcgacgaggcctatgaggccaagctgatcggcaagggcaacacgtcaggctacgatttcgacgtctacatgcatcacggcgccggcgcctatatctgcggcgaggagacggcgctgctcgaaagcctggaaggcaagaagggccagcccaggctgaagccgccattcccggccaatgtcggcctctatggctgcccgaccaccgtcaacaatgtcgagtcgatcgcagtggcgccaaccatcctgcgccggggcgcggcctggttctcgtccttcggccggcccaacaatgtcggcaccaagctgttctgcgtctccggccacgtcaacaatccgtgcaccgtcgaagaggcgatgtcgatcccgttccgcgagctgatcgagacgcattgcggcggcattcgcggcggctgggacaatctgctggcggtcattcccggcggtgcctcggtgccgctggtgccggccgagcagatcatcgacacgccgatggatttcgacgcgctgcgcgacctcaaatccggcctcggcaccgcggccgtcatcgtcatggacaagtcgaccgatgtcgtgaaggcgatcgcgcggctgtcctacttctacaagcatgagagctgcggccagtgcacgccgtgccgcgaaggcaccggatggatgtggcgggtgatggaacggctggtgcgcggcgaggcgcagaagcgcgagatcgacatgctgctcgacgtcaccaagcaggtcgagggccacacgatctgcgcgctgggcgatgcggcggcatggccgatccagggcctgatgcggcatttccgcggcgaggtggagcggcgcatcgacgagttttcgcgcaacgcgcatcgggccgaaccggtgatggtggcggcggaataa

SEQ ID NO: 39087 - protein, 434 aa, Mesorhizobium loti MAFF303099
MLQDKDRIFTNIYGLFDKSLAGAMARGAWDNTPGIVAKGREWIVNEMKASGLRGRGGAGFPTGLKWSFMPKQSDGRPSYLVINADESEPGTCKDRDILRNDPHTLVEGALLAGFAMGAIAAYIYVRGEFIREREALQRAIDEAYEAKLIGKGNTSGYDFDVYMHHGAGAYICGEETALLESLEGKKGQPRLKPPFPANVGLYGCPTTVNNVESIAVAPTILRRGAAWFSSFGRPNNVGTKLFCVSGHVNNPCTVEEAMSIPFRELIETHCGGIRGGWDNLLAVIPGGASVPLVPAEQIIDTPMDFDALRDLKSGLGTAAVIVMDKSTDVVKAIARLSYFYKHESCGQCTPCREGTGWMWRVMERLVRGEAQKREIDMLLDVTKQVEGHTICALGDAAAWPIQGLMRHFRGEVERRIDEFSRNAHRAEPVMVAAE

SEQ ID NO: 39088 - DNA, 1557 bp, Mesorhizobium loti MAFF303099
  CDS (1)..(1557): transl_table=11
atgatcccccgtatctacattcccggcgattccggcgcgttggcgcttggcgccgaaaaggtcgccaaggcgatcgccaaggaactcgcggagcgtggcatcgaggccaagatcgtgcgcaacgggtcgcgtggcgcctatttcctcgagccgatggtggaagtggcgaccgccaacggccgcgtcgcctacggaccggtcaagccttccgacgtcaagagcctgttcgacagcggcttcctcaccggtggccaccacaagcgctggctcggcgcgcccgacaagatcccgttcctggccaagcagacgcggctgacctttgcccgctgcggcatcaacgacccgctgtcgctcgacgcctacaagtcacttggcgggctcaagggcctgcagaacgccgtcgccatggcgccggccgacatcgtcaagcaggtgaccgagtcaggcctgcgtggccgtggtggcgccggcttcccgaccggcatcaaatggaagacggtgctggatacgacatccgagcgcaaatacatcgtctgcaacgccgacgagggcgacagcgcgactttcgccgaccgcatgatcatggaaggcgaccccttcgtgctgatcgaaggcatggcgatcgccggcatcgccaccggggcgaccaagggcttcgtttatatccgctcggaatatccgcatgccgtggcgacaatgaacaaggccgtcgagatcgcccgcaaggccggcgtcctcggcgtcaacgtgctgggttcgcccaatgccttcgacatggaaatccgcgtcggcgccggcgcctatgtctgcggcgaagaaacctcgctgttgaacagcctggaaggcaaacgcggcgtggtgcgcgccaagccgccgctgccggccattcagggcctgttcggcaagccgacggtgatcaacaacgtcatcagcctggcctcggtgccgatcatcatggacaagggcgccgccttctacaaggatttcggcatgggccgctcgcgcggcacgatcccgatccagatcgccggcaatgtcaggaacggcggcctgttcgagaccgccttcggcctgacgctgggcgagatcgtcgatgacatcggcggcggcacggcgactggccgtccagtgaaggcagtacaggtcggcggtccgcttggcgcctatttcccgcgcgccctgttcgacacgccgttcgactacgaggaattcgccaagcgcgacgggctgatcggccatgccggcatcaccgtgttcgacgacacggccgacatgctgaagcaggcgcgcttcgccatggagttctgcgccatcgaaagctgcggcaagtgcacgccctgccgcatcggctcgacgcgcggcattgagaccatcgacaggcttgccgccggcatcgagccggaaaagaacctcgctctggtcaccgacctctgcaacacgatgaagttcggttcgctgtgcgcactgggcggcttcacgccttatccggtgatgagttcgatcacgcatttccccgaagatttcaagcccgcgccagcgcgcgtggctgctgaatag

SEQ ID NO: 39089 - protein, 518 aa, Mesorhizobium loti MAFF303099
MIPRIYIPGDSGALALGAEKVAKAIAKELAERGIEAKIVRNGSRGAYFLEPMVEVATANGRVAYGPVKPSDVKSLFDSGFLTGGHHKRWLGAPDKIPFLAKQTRLTFARCGINDPLSLDAYKSLGGLKGLQNAVAMAPADIVKQVTESGLRGRGGAGFPTGIKWKTVLDTTSERKYIVCNADEGDSATFADRMIMEGDPFVLIEGMAIAGIATGATKGFVYIRSEYPHAVATMNKAVEIARKAGVLGVNVLGSPNAFDMEIRVGAGAYVCGEETSLLNSLEGKRGVVRAKPPLPAIQGLFGKPTVINNVISLASVPIIMDKGAAFYKDFGMGRSRGTIPIQIAGNVRNGGLFETAFGLTLGEIVDDIGGGTATGRPVKAVQVGGPLGAYFPRALFDTPFDYEEFAKRDGLIGHAGITVFDDTADMLKQARFAMEFCAIESCGKCTPCRIGSTRGIETIDRLAAGIEPEKNLALVTDLCNTMKFGSLCALGGFTPYPVMSSITHFPEDFKPAPARVAAE

SEQ ID NO: 39090 - DNA, 1461 bp, Arabidopsis thaliana
  CDS (1)..(1461)
atggcacccgtgagggggattcttggcttgcaaagggcagtgtccatttggaaggaaagtaacagactgactccagctttgagatcattcagcactcaagctgcatccacttccaccactccacagcctcctccacctcctccgcctccggaaaagactcatttcggtggtctcaaggatgaagatcggatttttactaatctctatggtctgcatgacccatttctcaaaggcgcgatgaagagaggtgattggcataggaccaaagatttggtgctcaagggtactgattggattgtcaatgaaatgaagaaatctggacttcgtggacgtggtggtgctggtttcccttctggtcttaagtggtcctttatgcctaaagtttctgatggccgtccctcctatttggttgtcaatgctgatgagagtgagcctggaacttgtaaagatagggagatcatgcgtcatgaccctcacaaattgttggaagggtgtttgattgctggtgttggaatgagagctagtgctgcgtatatttacatcaggggtgaatatgtgaatgagcgtttgaatctagagaaggctagaagagaagcgtatgcagctggtctcttggggaagaatgcatgtggttctggttatgattttgaagtttatatccactttggtgctggtgcgtacatttgtggtgaagagactgcgcttcttgaaagccttgaagggaagcaaggaaaacctaggttgaagcctccgttccctgctaatgctggtttatatggttgtcccacaactgttaccaatgtggaaacagtggctgtttcgcctaccattttaaggcgtggacctgagtggttttctagtttcggtaggaagaataacgctgggacaaagctcttttgtatatcaggccatgtaaacaagccatgcacggtggaagaggagatgagtatacctctcaaggaactgattgagaggcattgtggaggtgttaggggtggatgggacaatctacttgctatcatccctggtggttcatctgttcctctgatccctaagaacatttgcgaggatgtgctgatggatttcgatgcgctcaaggctgtccaatcagggttaggaactgcagcagtcattgtgatggataaatcaaccgatgttgtggatgcaattgcaaggctctcttacttctacaagcatgaaagctgtgggcagtgcactccttgcagagagggaacaggttggctttggatgatcatggagagaatgaaagttggcaatgcaaagctggaagagattgatatgctgcaggaggtaaccaaacagatcgaaggacacacaatctgtgcattgggtgatgcagctgcatggcctgtgcaaggtctgataagacactttaggccagagctcgagagaaggatcagggaacgcgctgaaagggagttgctacaggctgctgcttaa

SEQ ID NO: 39091 - protein, 486 aa, Arabidopsis thaliana
MAPVRGILGLQRAVSIWKESNRLTPALRSFSTQAASTSTTPQPPPPPPPPEKTHFGGLKDEDRIFTNLYGLHDPFLKGAMKRGDWHRTKDLVLKGTDWIVNEMKKSGLRGRGGAGFPSGLKWSFMPKVSDGRPSYLVVNADESEPGTCKDREIMRHDPHKLLEGCLIAGVGMRASAAYIYIRGEYVNERLNLEKARREAYAAGLLGKNACGSGYDFEVYIHFGAGAYICGEETALLESLEGKQGKPRLKPPFPANAGLYGCPTTVTNVETVAVSPTILRRGPEWFSSFGRKNNAGTKLFCISGHVNKPCTVEEEMSIPLKELIERHCGGVRGGWDNLLAIIPGGSSVPLIPKNICEDVLMDFDALKAVQSGLGTAAVIVMDKSTDVVDAIARLSYFYKHESCGQCTPCREGTGWLWMIMERMKVGNAKLEEIDMLQEVTKQIEGHTICALGDAAAWPVQGLIRHFRPELERRIRERAERELLQAAA

SEQ ID NO: 39092 - DNA, 1824 bp, Thermotoga maritima MSB8
  CDS (1)..(1824): transl_table=11
gtgccgctcacaacgaacacgatccttatctgtgcaggtggagcgtgtatttccgccggcgaaaagagtgtcaaagatgccttcgaagaagaattgagaaagtacggcctcgatgaagttgtcagggtgatagagaccggttgtatgggagcgtgtacattgggaccgattgccgtgatctacccggaaagtgtgttttaccagaaactcacaccagacgcagcaagagagatcgtcgaagaacacattttgaagggaaggatcgtggagaagtacctttacaaggcttccgaaggaaaacctgttccaagagttcatgaggaagtgcctttcttcaagaaacaggttaggatcgtcacaaggaatctcggtgtcatagatcccacgaagatagaggagtacatcgcaagagacggatattttgcccttgcgaaggctcttcagatgaaaccggaagacgtgataaaggagataaaggacagcggactcagaggaagaggaggagcgggttttccaacagggctcaagtgggaactcgcggcaaggcaaaaggccgagaagaaattcgttgtctgtaacgcggacgaaggagacccgggtgctttcatggacagatcggttcttgaaggagatccacacgccgtcatagaggggatggcaatagccgcctacgcgataggtgctcagaaggggttcgtttatgtcagggcggagtatcctctcgccattgaaaggctcaacatagcgctgaatcaggcaagagagtacggtttccttggaggaaacataatgggaacggatttttccttcgatatagagatcagaatcggtgcgggtgcgttcgtttgtggtgaggaaaccgctttgatggcctccatagagggtgagagaggccaaccgaaggtgaagcctccctatcccgttgagaagggactctggggataccccacagtgatcaacaacgttgaaacacttgcgaacgtaccctggatcatcagaaacggtgcgaaagagttcagaaaatacgggacggagaactctccgggaacgaaagtattcgctctcgccggtaaagtgaagaacacaggtcttgtggaagttcccatgggaatcacactcagagagctcatatacgagattggaggaggaatagccggagacaaaaagctgaaagccatccagactgggggaccgagcggagggtgtatccccgctgagtacgtagacacacctgttgatttcgaatccctccagaaactcggtgcaatcatgggttctggtggaatgatagtgatggacgaagacgactgtatggttgacgtcgcaaggttcttcctcgagttcaccgtggaagaatcctgtggaaaatgtacgccctgtagagaaggaacgaagaagatgctcgaaatcctggagaagatcacttccggagagggaacagaggaggacatagaagagctcgaaaagctggcgcatgtggtaaaggacacttccctctgtggacttggtcaaaccgcaccgaatcctgttctttccacactcagatacttcagagacgagtatctggcgcatgtcaaagagaagaggtgtccatccaagaagtgtaaagcgttgatcagctacgtgattgatcctgaaaaatgtgttggatgtaccgcgtgtgcgagggtctgtccggttcagtgtataagcggtcaggtgagacagcctcacgtgatagatcaggcggagtgtgtcaggtgtggtagctgtatcgaagtctgtagatttggagctataagcaaggttactccagctctgccggtggaggaggcggtagaatga

SEQ ID NO: 39093 - protein, 607 aa, Thermotoga maritima MSB8
MPLTTNTILICAGGACISAGEKSVKDAFEEELRKYGLDEVVRVIETGCMGACTLGPIAVIYPESVFYQKLTPDAAREIVEEHILKGRIVEKYLYKASEGKPVPRVHEEVPFFKKQVRIVTRNLGVIDPTKIEEYIARDGYFALAKALQMKPEDVIKEIKDSGLRGRGGAGFPTGLKWELAARQKAEKKFVVCNADEGDPGAFMDRSVLEGDPHAVIEGMAIAAYAIGAQKGFVYVRAEYPLAIERLNIALNQAREYGFLGGNIMGTDFSFDIEIRIGAGAFVCGEETALMASIEGERGQPKVKPPYPVEKGLWGYPTVINNVETLANVPWIIRNGAKEFRKYGTENSPGTKVFALAGKVKNTGLVEVPMGITLRELIYEIGGGIAGDKKLKAIQTGGPSGGCIPAEYVDTPVDFESLQKLGAIMGSGGMIVMDEDDCMVDVARFFLEFTVEESCGKCTPCREGTKKMLEILEKITSGEGTEEDIEELEKLAHVVKDTSLCGLGQTAPNPVLSTLRYFRDEYLAHVKEKRCPSKKCKALISYVIDPEKCVGCTACARVCPVQCISGQVRQPHVIDQAECVRCGSCIEVCRFGAISKVTPALPVEEAVE

SEQ ID NO: 39094 - DNA, 1638 bp, Thermotoga maritima MSB8
  CDS (1)..(1638): transl_table=11
atgaaaccgataacagttctggtttcggtggattcaaacagtgtgttgatgggtgctcgtcactttctcaattacttcagagatcttgtgaaggaacacaatctcgaagataccgtcgatgtgctggaaacgggcagcatgggaatttatccagaaggagtgattgtttccgttcttcccgacggtgttttctacgttgtgaggaatgaattggatgtgaggaggatcttcgaagagcacattctcaagggaaggagagtgctcgatcttgaaattcccgagagtcaaataaaaggaaccgttgaggtagagaaggtggccgaagaaactcgtatcgttctaaagaacgtaggagagatagatcccactcgtatagaggaatacatcgcaagagacggttactttgccctcgccaaggcgctccagatggaaccaggagagataatcgaagagataaagcgaagtgggctgagaggaagaggtggagccggttttccaacgggtctgaaatgggaattcacctacaaagcttctgccgaccagaaatatgttctgtgcaacgccgatgaaggagagcccggtacctttaaagacaggctcatcatggagggtgatcctcattctttgatagagggcatgatcatagcggggtacgcggttggtgcaacgaagggttacatatacataaggggagagtatcacagttcgatagaaatcttgaaaaaagctgtagaacaggcctacgagtacggattcctcggtgagaacatcctcggaagtggattcaacttcgatctgaaaataaggctcggggcgggagcttacgtggcgggagaggagacggcgttgatagagtccatagaggggaaacccgctcgacccaggctgaaacctccttaccctcccacttttggcctctttggaaaacccaccgttgtgaacaacgtggaaacttttgtgaacgttccaaggataataatgaacggtgcggagtggttcaaaaagttcggcaccgagtcttctcctgggacgaaagtgttctccctcgtgggtaatgtggtgagaaagggaatcgtggaagtgccaatgggagtgacggtgagagatctcattttcaaatttggtggggggattgagggtggcaggaagttgaaagtggtgcaaacgggtggtagtgcaggaacgttcatcggaccagacaaactcgacgttccactcgattttgattcttacgcaaagtacggagtttctctcggatcaggagtgattctcgttgctgacgagactcactgtgtggtggatctcgcactcaccgttatgaggttcttcgaacacgagtcgtgtgggaagtgtacaccgtgtcgggaaggtacgaggatgatcgtcaatattttggagagaataagcagaggagaaggcaaaaaagaggatctcgatacgttgagggagattgctcgaaacgcgggggaaacttctttctgcggactgggtcaaagcattccggttcctctgctctccatcgttgacaacttcgaggaagagttcaaagcccacataggtgctgataaatgtccagtgggtgtgtgtgagttcaagaagaagaaggaaaagaagaaaattggtgttagaaaaccataa

SEQ ID NO: 39095 - protein, 545 aa, Thermotoga maritima MSB8
MKPITVLVSVDSNSVLMGARHFLNYFRDLVKEHNLEDTVDVLETGSMGIYPEGVIVSVLPDGVFYVVRNELDVRRIFEEHILKGRRVLDLEIPESQIKGTVEVEKVAEETRIVLKNVGEIDPTRIEEYIARDGYFALAKALQMEPGEIIEEIKRSGLRGRGGAGFPTGLKWEFTYKASADQKYVLCNADEGEPGTFKDRLIMEGDPHSLIEGMIIAGYAVGATKGYIYIRGEYHSSIEILKKAVEQAYEYGFLGENILGSGFNFDLKIRLGAGAYVAGEETALIESIEGKPARPRLKPPYPPTFGLFGKPTVVNNVETFVNVPRIIMNGAEWFKKFGTESSPGTKVFSLVGNVVRKGIVEVPMGVTVRDLIFKFGGGIEGGRKLKVVQTGGSAGTFIGPDKLDVPLDFDSYAKYGVSLGSGVILVADETHCVVDLALTVMRFFEHESCGKCTPCREGTRMIVNILERISRGEGKKEDLDTLREIARNAGETSFCGLGQSIPVPLLSIVDNFEEEFKAHIGADKCPVGVCEFKKKKEKKKIGVRKP

SEQ ID NO: 39096 - DNA, 1881 bp, Thermotoga maritima MSB8
  CDS (1)..(1881): transl_table=11
atgtttaagaacgcgaaagagttcgtccagtacgcaaacaaactgaaaaccctgagagagaaaaaactgaacggtgtctctatatacgtctgcgtcggaactggctgtaccgcgaaaggtgctctcaaagtttacagcgctttcgaagaagagctcaaaaagagaaacctcctcggacaggtcacgctggaaaagatcgatgatgacaaagtcacgttgaacagaacagggtgctgtggaaggtgttcttccggtcccctcgtgaagatcatgccctacaggttcttctattcaaacgttgcacctgaagacgtcccggagatcgtggacagaaccgtcctcaagggtgaacccatagaaagactctttctgacggatcccctcacgggggaaaaggttcccagaatagaggacaccacgcttttcaaaaatcaggatttctacatcatggaggccataggtgagtccgagtgtgacagcatagaagactacatcgcacggagtggatacgaatctctcgtcaaagccctcacttcaatgacaccggaagaaatcatagaaacggtgaaggcatccggtctcagaggaagaggtggaggaggatttccaacaggtctcaaatgggaattcaccagaaaagcgcagggtgatataaagttcgtcgtctgcaacggtgacgaaggagatcccggagcgttcatgaacagaacccttctcgagagagacccccatctcgttctcgagggaatgataatagcgggttacgcggttggtgcacagaaaggctacgcttacataagggctgagtatccgttcgcagtcaaaatgttcaaaaaagccatagaagatgccagaaaactcggtcttcttggggaaaacatactcggtactggattctctttcgacctcgaggtgaaggaaggtgccggcgcgttcgtctgcggtgaagaaacagcactgctcgcttccatagaagggaaaagaggtatgcccagaccaaagccaccgttcccggctcagtctggtctctggggtaaacccaccctcataaacaacgtggaaacatacgcgaacataccaagaatactcagagacggtgtagaaaactacagaaaacgcggaacggaaaattcaccgggaaccaagatgttctccgttgccggtcccctcaaagccaccggtatcatcgaagttgaattcggcaccaccctgagagatatcatctacaacatatgtggaggattcgttgaaggagaagagttcaaagcggttcagattggaggaccgtccggagcgtgtctttccgaagatttcatcgacatgcccctcgattacgacacactgaaaaaagctgatgcgatggtaggatccggtggaatagtcgtgattacaaagaaaacgtgtatggtagaggttgcaaggttcttcctcgatttcaccaagagggaatcctgtggaaagtgcgtgccgtgcagggaaggaaccatgcaggcgtacaacatattggagaagttcacccacggaaaagccacatacgaggatctcaaaactctcgaacacctttcaaaaacaataaagaccgcttctctctgtggactcggaaagaccgctcccaaccccattctcagtacactgaagctcttcagagaggagtacattgcacacatcgaaggagaatgtccaagcggaatgtgcacggcgttcaagaaatacgtcatcaatccagatatctgtaaaggttgtggactctgtgccagatcctgtccacagaacgccataaccggagaaagaggaaaaccgtacacgatagatcaggaaaagtgtgtaaagtgcggtctctgtgcgagtaaatgtccgttcaaagccatagagcttgtctga

SEQ ID NO: 39097 - protein, 626 aa, Thermotoga maritima MSB8
MFKNAKEFVQYANKLKTLREKKLNGVSIYVCVGTGCTAKGALKVYSAFEEELKKRNLLGQVTLEKIDDDKVTLNRTGCCGRCSSGPLVKIMPYRFFYSNVAPEDVPEIVDRTVLKGEPIERLFLTDPLTGEKVPRIEDTTLFKNQDFYIMEAIGESECDSIEDYIARSGYESLVKALTSMTPEEIIETVKASGLRGRGGGGFPTGLKWEFTRKAQGDIKFVVCNGDEGDPGAFMNRTLLERDPHLVLEGMIIAGYAVGAQKGYAYIRAEYPFAVKMFKKAIEDARKLGLLGENILGTGFSFDLEVKEGAGAFVCGEETALLASIEGKRGMPRPKPPFPAQSGLWGKPTLINNVETYANIPRILRDGVENYRKRGTENSPGTKMFSVAGPLKATGIIEVEFGTTLRDIIYNICGGFVEGEEFKAVQIGGPSGACLSEDFIDMPLDYDTLKKADAMVGSGGIVVITKKTCMVEVARFFLDFTKRESCGKCVPCREGTMQAYNILEKFTHGKATYEDLKTLEHLSKTIKTASLCGLGKTAPNPILSTLKLFREEYIAHIEGECPSGMCTAFKKYVINPDICKGCGLCARSCPQNAITGERGKPYTIDQEKCVKCGLCASKCPFKAIELV

SEQ ID NO: 39098 - DNA, 1347 bp, Pseudomonas aeruginosa PAO1
  CDS (1)..(1347): transl_table=11
atgacccttacctccattggtccggccaaccgcatggcgcgttcggcggaaacccatccgctgacctggcgcctgcgcgaagacgcccagcccgtctggctcgaggaatatcagagcaaggacggctatgccgcggcgcgcaaggcgctgacccagatggcccaggacgacatcgtccagaccgtcaaggactccggcctcaagggccgcggcggcgcgggcttccccaccggagtgaagtggggcctgatgccgaaggacgagtcgctgaacatccgctacctgctgtgcaacgcggacgagatggagccgaacacctggaaggaccgcatgctcatggagcagctgccgcacctgctggtggaaggcatgctgatttccgcgcgcgcgctgaaggcctaccgcggctacatcttcctgcgcggcgaatacgtcgacgcggcgcgcaacctcaaccgcgccatcgacgaagccaaggccgccggcctgctcggcaagaacatcctcggcagcggcttcgatttcgagctgttcgtccacaccggtgccggccgctacatctgcggcgaagagaccgcgctgatcaactcgctggaaggccgccgcgccaacccgcgttccaaaccgcccttccctgccgccgtcggcgtctggggcaagccgacctgcgtgaacaacgtggagacgctgtgcaacgtgccggccatcgtcggcaacggcgtggactggtacaagaccctggcccgccccggcagcgaagacatgggcaccaagctgatgggcttctccggcaaggtgaagaaccccggcctgtgggaactgccgttcggcgtcagcgcccgcgagctgttcgaggactacgccggcggcatgcgcgacggcttccagctcaaggcctggcagcccggcggcgccggtaccggcttcctgctcccggagcacctggatgcgcagatgttcgccggcggcatcgccaaggtcggcacccggatgggcaccggcctggccatggcggtggacgacagcatcaacatggtttccctgctgcgcaacatggaagagttcttcgcccgcgagtcctgcggctggtgcaccccctgccgcgatggcctgccgtggagcgtgaagctgctgcgtgccctggagcggggcgaaggccagcccggcgacctcgagaccctcgagcagctggtcaacttcctcggcccaggcaagaccttctgcgcccacgcgccgggagccgtcgagccgctgggcagcgccctcaagtatttccgtgccgaattcgaggcgggcatctcccgccagccttcggccgcgccgcgcccggcaacggtcggcgcctga

SEQ ID NO: 39099 - protein, 448 aa, Pseudomonas aeruginosa PAO1
MTLTSIGPANRMARSAETHPLTWRLREDAQPVWLEEYQSKDGYAAARKALTQMAQDDIVQTVKDSGLKGRGGAGFPTGVKWGLMPKDESLNIRYLLCNADEMEPNTWKDRMLMEQLPHLLVEGMLISARALKAYRGYIFLRGEYVDAARNLNRAIDEAKAAGLLGKNILGSGFDFELFVHTGAGRYICGEETALINSLEGRRANPRSKPPFPAAVGVWGKPTCVNNVETLCNVPAIVGNGVDWYKTLARPGSEDMGTKLMGFSGKVKNPGLWELPFGVSARELFEDYAGGMRDGFQLKAWQPGGAGTGFLLPEHLDAQMFAGGIAKVGTRMGTGLAMAVDDSINMVSLLRNMEEFFARESCGWCTPCRDGLPWSVKLLRALERGEGQPGDLETLEQLVNFLGPGKTFCAHAPGAVEPLGSALKYFRAEFEAGISRQPSAAPRPATVGA

SEQ ID NO: 39100 - DNA, 1893 bp, Methanothermobacter thermautotrophicus str. Delta H
  CDS (1)..(1893): transl_table=11
atgatagaaaaaattgcaggggcttccctgaaggaatacatgtccctcttcaggggtgaaccgacaatatttataggctcagccacctgtggaaggtctgcaggggcccagaagatagaggagataatggggcagagggcagccgaactctcagttgagtgcaggatgatacacacaggctgcatgggtctctgctacgccgaacccatggtggtcgtcttcaatggtgacagccgtggttacatctacggtccggtgaaccgtaaactcgcaaagaggataatccaggagcacatcgtggagggcagggaggttgaacccattggttatgtggacatagccttcaatggcgactcatttgaaccagtttacgctctggaattcatggagggacagtcaaggaggatacttcgaagatgcggccttatagaccctgaaaacatgggacactatctggcaaccggaggctacaggggcctcatgagggcccttgaaatggaacccgatgaggtaattgaggaggtgaaggactccggcctgaggggccgcggaggcgcaggattcccgacatggcttaaatggagtctctgtcgccaggaggcctcagaggtgaagtacctcatatgcaacgccgatgagggagaccctggcgcattcatgaaccgttcactcatagagggggacccccatgcactgcttgaggggatactaatcgcctcatacgcggtgggggccagggaggcctacatctactgcagggcagagtacccacttgcccttgagaggctcagggtggccatatctgatctgaggaatctgggacttctcggtaaggatatcctcgggtcagggttcgacctggatataaagataaaggagggtgcaggggcatttgtctgtggagaggaaacagccctgatatcctcaattgagggtaagaggggaatgccaaggacaagacccccattcccaacaacacggggcctctggggcaagcccaccgttataaacaatgttgagacccttgcagctgtttcaatgataatgcagcacggcgcagactacttcaactcccttggcacccctgaaagtaggggaaccaagacattctcccttgtgggcgatgtcaggaggaccggcctcattgaggtccccctgggcacaaccctgagggaggtcatctttgatattggagggggggttgtggatggagagctgaaagctgtacagatagggggaccttcagggggatgcctccctgctgaacttatcgatacaggtatagactatgactccctcacatctgcaggggcaataatgggttcaggcggccttgttgttttatcggaccgcacatgcatggttgaacttgcaaggtacttccttgagttcacacagagggagtcctgtggaaaatgcgtaccctgccgcgtggggacaaggcagatgctcatgatactcaatgacatcgtagagggttcaggaagacctgaagaccctgatatactcagggatgtagctgaaagtgtcagggcagcctcactatgcggcctcggccagacatcaccaaacccggttctgacgacactcagatactttgaggacgagtaccatgaccacataaaaggcaggtgcacagccgcagcatgcagtgaactgatgcactacatgatagaccctgagaaatgtgatggatgcatggcatgcatcaagacgtgcccggcggaggccataaatggttcaagggacgaggtccatgttatagaccaggatgggtgcctcaagtgcgggtcctgtcttgatatatgtaagagggatgctgtcaggagggttcccggtgcctaccgtcagggaacctattcagcaaggattcctgagaaggatgggtggtag

SEQ ID NO: 39101 - protein, 630 aa, Methanothermobacter thermautotrophicus str. Delta H
MIEKIAGASLKEYMSLFRGEPTIFIGSATCGRSAGAQKIEEIMGQRAAELSVECRMIHTGCMGLCYAEPMVVVFNGDSRGYIYGPVNRKLAKRIIQEHIVEGREVEPIGYVDIAFNGDSFEPVYALEFMEGQSRRILRRCGLIDPENMGHYLATGGYRGLMRALEMEPDEVIEEVKDSGLRGRGGAGFPTWLKWSLCRQEASEVKYLICNADEGDPGAFMNRSLIEGDPHALLEGILIASYAVGAREAYIYCRAEYPLALERLRVAISDLRNLGLLGKDILGSGFDLDIKIKEGAGAFVCGEETALISSIEGKRGMPRTRPPFPTTRGLWGKPTVINNVETLAAVSMIMQHGADYFNSLGTPESRGTKTFSLVGDVRRTGLIEVPLGTTLREVIFDIGGGVVDGELKAVQIGGPSGGCLPAELIDTGIDYDSLTSAGAIMGSGGLVVLSDRTCMVELARYFLEFTQRESCGKCVPCRVGTRQMLMILNDIVEGSGRPEDPDILRDVAESVRAASLCGLGQTSPNPVLTTLRYFEDEYHDHIKGRCTAAACSELMHYMIDPEKCDGCMACIKTCPAEAINGSRDEVHVIDQDGCLKCGSCLDICKRDAVRRVPGAYRQGTYSARIPEKDGW

SEQ ID NO: 39102 - DNA, 1335 bp, Deinococcus radiodurans R1
  CDS (1)..(1335): transl_table=11
gtgaccgcgcccaccgccgaaaaaccgatcaccagtgcgctcgaccaccgctttgcgcccacgctctacgcgcaggtggggcagccacgaagctggacgctggacacctaccagcggggcggaggctaccagggcgtgcgccgggcctttgcgctcggtcccgacgccgtgattgaggaggtcaagaaatccggcctgcgcggacgcggcggcgcgggcttcgccactggcctgaaatggtcgttcatgccgctcaacgacggcaaaccgcacctcatcatctgcaacgccgacgagtccgagccgggcaccttcaaggaccgctacctgatgtcggaagacccgcaccagctcatcgaagggatgctcatcggcggatacgcgatgcgggcgagccgggggtacatctacattcgcggcgagtatgtgctggccgccgagcgcctctgggctgccattcacgaggcgcgggcggcgggactgctcggcaaggacattctgggcagcggcttcgacttcgacctgcaagttcaccggggcgcgggcgcctacatctgcggcgaggaaaccgcgctgatgaactcgctggaaggtctgcgggccaatccgcgcctcaagccgccctttcccgccgccgccgggctttacgggctgccgaccaccatcaacaacgtcgagaccttttgcgccgcgacgcacatcctcaagtacggcgccgactggcacgcgggcatgggcaccgagaagtccaagggcatgaaactctttcagatttccggccccgtcgcccggcccggcgtgtacgaactgccgctcggcacgccgtttcgcgaactcatctacgactgggcgggtggccccaccgaggacatcaaggcgattatccccggcgggatttcctgccaactcctgaagtggagcgaagacatcctcgacacgccgatggactacgagtcgctggcggcggcgggcagcagcctggggaccgggggcgtcaccctgattccggcggcggcgtccatcgtggacacgacctggaacgcggtgcgcttttacggccacgagtcgtgcggcaaatgcacgccctgccgcgaagggatttcgggctggatggttcgcatgtacgaaaaactcgctcgcgggcacgggcaacccggcgacaccaatctcattctggacatggccgacaacatcggcggcagaagcttctgcgccctggccgacgcctgtctggggccggtcctgagttccatccggctgttccgcgaggaatacgacgcggcggagcgcggagaggtgccgcgcgagctcgcggggcgctggagggacgcatga

SEQ ID NO: 39103 - protein, 444 aa, Deinococcus radiodurans R1
MTAPTAEKPITSALDHRFAPTLYAQVGQPRSWTLDTYQRGGGYQGVRRAFALGPDAVIEEVKKSGLRGRGGAGFATGLKWSFMPLNDGKPHLIICNADESEPGTFKDRYLMSEDPHQLIEGMLIGGYAMRASRGYIYIRGEYVLAAERLWAAIHEARAAGLLGKDILGSGFDFDLQVHRGAGAYICGEETALMNSLEGLRANPRLKPPFPAAAGLYGLPTTINNVETFCAATHILKYGADWHAGMGTEKSKGMKLFQISGPVARPGVYELPLGTPFRELIYDWAGGPTEDIKAIIPGGISCQLLKWSEDILDTPMDYESLAAAGSSLGTGGVTLIPAAASIVDTTWNAVRFYGHESCGKCTPCREGISGWMVRMYEKLARGHGQPGDTNLILDMADNIGGRSFCALADACLGPVLSSIRLFREEYDAAERGEVPRELAGRWRDA

SEQ ID NO: 39104 - DNA, 1335 bp, Xylella fastidiosa 9a5c
  CDS (1)..(1335): transl_table=11
atgggacatcctcacgtatccaagggaccggttggcccgacacctcagccgcaccaagtgatctataccacgttgcattatgaaattccgtggtcgtatgaaagctatttgaagaccggcggctacactgcgttacgcaagatttttgaggaaaagatccctccggagcaggtcatagacatggtcaagcagtcgaatctgcggggccgtggtggtgcaggttttccgacgggtctcaaatggtccttcatgccgaagggcaccatgcaaaaatatattctgtgtaactcggacgagtccgaaccggggacctgtaaagatcgtgacatcctgcgctataacccgcattccgtggtggaggggatggcgattgcatgttatgccactggttccactgtggcttacaactatttgcgtggggagttccaccacgagccgttcgaacattttgaacaggcgctggccgatgcttacacacatggttggcttggtaagaacgttttgggaagtggcgtagatatcgatatctacgcggtgcttggtgctggtgcctacatctgtggtgaagagactgcgctcatggagtctctggaaggcaagaaggggcagcctcgctacaagcccccctttcctgccaattttggcttgtacggcaagccatcaacgatcaacaacactgagacgtatgccgcagtgccagccattattcgcaatggtccggagtggtttttgtctctgagcaagactaaaaacggtggctctaagatcttctcggtctcggggtgcgtgcagcaagggggtaacttcgaggtacccttaggcaccacctttgatgaattgctggagatggccggtggcctgcggccaggtcgcgctctgaaagctgcaattccggggggtgtatccatgccggtattgaaagcggagcagttgcatggccttcagatggactacgacacactgcgtgtgctgggtagcggtttaggctcgggggggattgtggtgcttgatgacagtgtctgttgtgtccgttttgcctgccgcatctcgcagttttttcataaggaatcgtgtggccagtgtactccgtgccgtgaggggaccggttggatgcaccgcgttttggagcgtatcgttgctggccaggccacgatggaggatctgcaccagcttaaagtagtggcggggcagattgaggggcataccatttgtgcgtttggtgaagctgcagcttggccaatccaagggttcctgcgccaattctgggatgaatttgagtactacattgttcatggtcggtcgattgtggatgacaaggcgagagtggctgcatga

SEQ ID NO: 39105 - protein, 444 aa, Xylella fastidiosa 9a5c
MGHPHVSKGPVGPTPQPHQVIYTTLHYEIPWSYESYLKTGGYTALRKIFEEKIPPEQVIDMVKQSNLRGRGGAGFPTGLKWSFMPKGTMQKYILCNSDESEPGTCKDRDILRYNPHSVVEGMAIACYATGSTVAYNYLRGEFHHEPFEHFEQALADAYTHGWLGKNVLGSGVDIDIYAVLGAGAYICGEETALMESLEGKKGQPRYKPPFPANFGLYGKPSTINNTETYAAVPAIIRNGPEWFLSLSKTKNGGSKIFSVSGCVQQGGNFEVPLGTTFDELLEMAGGLRPGRALKAAIPGGVSMPVLKAEQLHGLQMDYDTLRVLGSGLGSGGIVVLDDSVCCVRFACRISQFFHKESCGQCTPCREGTGWMHRVLERIVAGQATMEDLHQLKVVAGQIEGHTICAFGEAAAWPIQGFLRQFWDEFEYYIVHGRSIVDDKARVAA

SEQ ID NO: 39106 - DNA, 1557 bp, Sinorhizobium meliloti 1021
  CDS (1)..(1557): transl_table=11
atgaccgtcaggatctacattccccgggatgcggcggcccttgcgcttggcgccgaaaaggtggtggaggcgatggccggcgagattgccgcacgcgggctcgacgccacgatcgtccgcaacggctcgcgcggcatgcactggcttgagccgctggtcgaagtcgaaacggccggagggcgcgtcgcctacggcccggtgaaggcgagcgacgtcgcctcgcttctcgatgccgggctgatttcgggtggcgcgcatccgctctgcctcggcaagaccgaggagattccatttctcaagcgacagacgcggcttacctttgcccgctgcggcgtcatcgatcctctctcgctcgaagattatcgcgctcatcggggcttgctcggtctcgagcgggcgatcgcaatgcaaccagcggcgatcgttgccgaggtcaccgaaagcggccttcgcggccgcggcggcgccggcttcccgaccggcatcaaatggaagaccgtcctggaggcgcgagggccgcggaaatacatcgtctgcaatgccgacgagggcgacagcgggacttttgccgaccggatgatcatggaaggtgatcccttcgtgctgatcgaaggcatggcgatcgccggtatcgcgaccggtgcgaccaagggctacatctatacccgttcggaatatccgcatgcgatcgcggtgatgagcgcggcgatcgagatcgcccgggccgccggtgtgctcggcgcttcggtgctcggctcggcgcacgccttcgacatggaagtgcgcaccggcgccggcgcctatgtctgcggcgaggagacctcgctcctgaacagcctcgaaggcaagcgcgggctcgtgcgcgccaagccgccgctgccggcacacaagggtcttttcgaccgcccgaccgtcatcaacaacgtcatctcgcttgcttccgtgccggtgatcctcgacaagggcgccggttactatcgcgatttcggcatgggccggtcgcgcggaacgatcccgctgcagatcgccggcaacgtcaagcatggagggctcttcgagaccgcattcggcctgacgctcggcgagatcgtcgacgagatcggcggcggcacggcgagcgcccggccggtcaaggccgtccaggtcggcggcccgctcggcgcctatttcccgcgggcgctgttcgatacgcccttcgactacgaggcatttgccgccagagacgggctcatcggtcatgccggcatcgtcgtcttcgacgacacggcagacatgctgaagcaggcgcgtttcgcgatggaattctgtgccgtcgaaagctgcggcaagtgcaccccctgccgcatcggttcgacacgcggcgtcgaggtggccgacaggattgccgccggcatcgagccggagaagaaccgcgaactgctcgccgatctctgcaacacgatgaagttcggttccctctgcgcccttggcggcttcacgccctatccggtgatgagcgcgatgacgcacttcccggaggatttttcaccggtgccggtggtggaggctgcggaatga

SEQ ID NO: 39107 - protein, 518 aa, Sinorhizobium meliloti 1021
MTVRIYIPRDAAALALGAEKVVEAMAGEIAARGLDATIVRNGSRGMHWLEPLVEVETAGGRVAYGPVKASDVASLLDAGLISGGAHPLCLGKTEEIPFLKRQTRLTFARCGVIDPLSLEDYRAHRGLLGLERAIAMQPAAIVAEVTESGLRGRGGAGFPTGIKWKTVLEARGPRKYIVCNADEGDSGTFADRMIMEGDPFVLIEGMAIAGIATGATKGYIYTRSEYPHAIAVMSAAIEIARAAGVLGASVLGSAHAFDMEVRTGAGAYVCGEETSLLNSLEGKRGLVRAKPPLPAHKGLFDRPTVINNVISLASVPVILDKGAGYYRDFGMGRSRGTIPLQIAGNVKHGGLFETAFGLTLGEIVDEIGGGTASARPVKAVQVGGPLGAYFPRALFDTPFDYEAFAARDGLIGHAGIVVFDDTADMLKQARFAMEFCAVESCGKCTPCRIGSTRGVEVADRIAAGIEPEKNRELLADLCNTMKFGSLCALGGFTPYPVMSAMTHFPEDFSPVPVVEAAE

SEQ ID NO: 39108 - DNA, 1320 bp, Caulobacter crescentus CB15
  CDS (1)..(1320): transl_table=11
atggtcggtatcctcgaagacaaggaccgcatcttcacgaacctctacggtctccacgattggggcctcgagggcgcgaagaagcgcggctgctggaatggcaccaaggacatcctggacgccgggcgcgactggatcatcgagaacatgaagaactccggcctgcgcggtcggggcggcgcgggtttctcgaccggcctgaagtggtcgttcatgcccaaggaagtgaaggacggtcgtcctcactacctggtggtcaacgccgatgagtccgagccgggcacctgcaaggaccgggagatcatgcggcatgacccgcacctcctgatcgagggctgcctgatcgcctcgcgcgcgatgctggcccacgcctgctacatctacatccgcggcgagtacgtcttcgagcgcgagcgcctggaagcggcgatcaagcaggcctacgaggccaagctggtcggcaagaacaatgtccacggctgggacttcgatatctacgtccaccacggcgccggcgcctatatctgcggcgaagagacggccctgctggaaagcctggaaggcaagaagggccagccgcgcctgaagccgccgttcccggcgggcgcaggcctctatggcatgccgaccacggtcaacaacgtcgagagcatcgccgtcgcgggcacgatcctgcgtcgcggcgcggcctggttcgcgggctttggccgtccgaacaacgccggcaccaagctcttctgcgtctcgggccatgtgaacctgccctgcaacgtcgaagaggcgatgagcatcccgttccgccagctggtcgaggaccactgcggcggcatccggggcggctggggcaaccttaaggccgtcattccgggcggctcgtcggtgccgatgatccccgccgagcagtgcgaagacctgccgatggacttcgacgccctgcggaacctgaaatcgggcctgggcacggctgcggtcatcgtcatggacaaggacaccgaccttgttcgcgccatcgcccgcctgtcgtacttctataagcacgagagctgcggccagtgcacgccgtgccgtgaaggcaccggctggatgtggcgcgtcatggagcgcatggtcaccggcgaggccgatcccaaagagatcgacacgctgctggacgtcacgacccaggtcgagggtcacaccatctgcgccctgggcgacgcggccgcctggccgatccagggtctgttccgccacttccgccacgaggtggaggagcggatcgcttcctatcgtagcggtcgcctgcacgtgcagggcgccaagctgatcgcggcggagtaa

SEQ ID NO: 39109 - protein, 439 aa, Caulobacter crescentus CB15
MVGILEDKDRIFTNLYGLHDWGLEGAKKRGCWNGTKDILDAGRDWIIENMKNSGLRGRGGAGFSTGLKWSFMPKEVKDGRPHYLVVNADESEPGTCKDREIMRHDPHLLIEGCLIASRAMLAHACYIYIRGEYVFERERLEAAIKQAYEAKLVGKNNVHGWDFDIYVHHGAGAYICGEETALLESLEGKKGQPRLKPPFPAGAGLYGMPTTVNNVESIAVAGTILRRGAAWFAGFGRPNNAGTKLFCVSGHVNLPCNVEEAMSIPFRQLVEDHCGGIRGGWGNLKAVIPGGSSVPMIPAEQCEDLPMDFDALRNLKSGLGTAAVIVMDKDTDLVRAIARLSYFYKHESCGQCTPCREGTGWMWRVMERMVTGEADPKEIDTLLDVTTQVEGHTICALGDAAAWPIQGLFRHFRHEVEERIASYRSGRLHVQGAKLIAAE

SEQ ID NO: 39110 - DNA, 1602 bp, Synechocystis sp. PCC 6803
  CDS (1)..(1602): transl_table=11
atggacattaaagaattaaaggaaattgccaccaaaagccgtgagaaacaaacaaaaattcgcattcgttgttgtagtgctgccggttgtctttcttctgaaggggagacggtgaaaaaaaatctcaccacggcgatcgccgcagcaggattggaagaaaaagtggaagtctgtggggtaggctgtatgaagttttgtggccggggccccctagtggcggtggatgaccggaatcaactctacgaatttgttaccccagaccaggtgggggatattgtcaaaaaattgcagaaacccgatgcagttgcagaaacaggcttaatcagtggtgatccccaccatcccttctacgccctgcaaaggaatattgctttggaaaattcaggccggattgatcccgaatccattgatgaatacatcgccctagggggctacgaacagcttcataaggttgtctatgaaatgaccccagaggaagtgatcgtggaaatgaacaaaagtggtctgcggggtcggggtgggggcggttatcccaccggcttgaaatgggccacagtggccaaaatgcccggccagcaaaaatatgtcatctgcaatgctgacgaaggcgatcccggtgctttcatggaccgcagtgtgttggaaagtgatccccatcgcatcctcgaaggtatggcgatcgccgcctatgcagtgggggctaaccatggttacatttatgtgcgggcggaataccccctagctatccaacgactgcaaaaagcgatccaacaggctaaacgttatggcctgatgggcacccaaatttttgactctcccattgatttcaagattgatatacgagtaggagccggtgcctttgtctgcggtgaagaaacagcattaattgcctcagtggaaggaaaacggggaacgccccgaccaagaccaccctatccagcccaatcgggtttgtggcaaagtcccaccctgattaacaatgtggaaacctacgccaacgttgtacccatcattcgggaagggggagattggtatggctccattggtacggaaaaaagtaaaggcaccaaggtttttgccctcacaggaaaagtggaaaacgctggtctgattgaagtgcccatgggaaccaccgtgcgacaagtggtggaggaaatggggggcggtgtacccaatggtggccaagtcaaagcagtgcaaactgggggcccttccggaggctgtatccccgccgataaattggatactcccatcgaatatgacaccctattagccctgggcaccatgatgggttccgggggcatgattgtcatggatgaaagcaccaatatggtggacgtggcccagttttatatggatttttgcaaatcggaatcctgtggcaaatgtattccctgccgagcgggcacagtgcaactttatgaccttttaacccgctttttagaaggggaagctacccaagaagacttgatcaaactagaaaatctttgccatatggttaaggaaactagcctttgtggattggggatgagtgcgcctaatccggtaataagtaccctgcgctattttcgtcatgaatatgaagaattactcaaagtctag

SEQ ID NO: 39111 - protein, 533 aa, Synechocystis sp. PCC 6803
MDIKELKEIATKSREKQTKIRIRCCSAAGCLSSEGETVKKNLTTAIAAAGLEEKVEVCGVGCMKFCGRGPLVAVDDRNQLYEFVTPDQVGDIVKKLQKPDAVAETGLISGDPHHPFYALQRNIALENSGRIDPESIDEYIALGGYEQLHKVVYEMTPEEVIVEMNKSGLRGRGGGGYPTGLKWATVAKMPGQQKYVICNADEGDPGAFMDRSVLESDPHRILEGMAIAAYAVGANHGYIYVRAEYPLAIQRLQKAIQQAKRYGLMGTQIFDSPIDFKIDIRVGAGAFVCGEETALIASVEGKRGTPRPRPPYPAQSGLWQSPTLINNVETYANVVPIIREGGDWYGSIGTEKSKGTKVFALTGKVENAGLIEVPMGTTVRQVVEEMGGGVPNGGQVKAVQTGGPSGGCIPADKLDTPIEYDTLLALGTMMGSGGMIVMDESTNMVDVAQFYMDFCKSESCGKCIPCRAGTVQLYDLLTRFLEGEATQEDLIKLENLCHMVKETSLCGLGMSAPNPVISTLRYFRHEYEELLKV

SEQ ID NO: 39112 - DNA, 1635 bp, Nostoc sp. PCC 7120
  CDS (1)..(1635): transl_table=11
atggaactgactgaattactagacattggcagacaagaacgctctcaacagaaacctgtgcagattcgctgctgtacggcggctggttgtctgtctgcgaattcgcaagcggttcaacaacagttagagcaggccgtcaaggctgaaggtttagagggagaggtacaagtctctggtgttggttgtatgcgcttgtgttgtcaggggcctttggttgaggtagaggggagtggggaagaaaaaacaaaacaaaggctttatgagaaggttacgcctgaagatgcgtcagcaattattggtgctttgaaggggaaagaggcacaattgtcagttgttaacttagaacagccattttttacttatcaagcaccaattgttttagagaatagtggcaaaattgacccagaaaggattcaagcttatattgcggctcagggttatcaggggctttaccaagtgttgcgggagatgacaccggcggcagttgtagacagtgttagtcgtagtggtttgcgggggcgtggtggtgctggttatcccacgggcttgaaatgggcgacggtggctaaggcgaagggagagcgcaaatttgtcatctgtaacgcagatgagggagatccaggggctttcatggataggagtgtgttggaaagtgatccgcatcgggtattggaaggaatggcgatcgctgcctatgctgtcggtgctagtcaaggttatatttatgtcagggcagaatatcccattgccatcaaacgcctacacactgccattcatcaagcccaaaggctcggtttgttaggtagtaatatatttgagtctccctttgattttaaaatcgatatccgcatcggtgcaggggcttatgtatgcggcgaagaaacagccttgatggcttccattgaaggtaaacgcggtgtccctcatccccgtcctccctacccggctgaatctggtttatggggttatcctactttaattaataacgtcgaaacattcgccaatattgcccccattattcgtaaaggtgcggactggtttgctagtatcggcacggctaaaagtaaagggacaaaagtatttgctctcgctggcaaaatccgcaacacaggcttaattgaagtgccaatgggtacatccttgcggcaaatagtggcagaaatgggtggtggtattcccgatggtggtgttgccaaagctgtacaaacaggtggcccttctgggggatgtattcccgcttcggcttttgatactcctgtagactacgaatctttaactaacttgggttccatgatgggttctggtgggatgattgtcatggatgacaccaccaacatggtagatgttgcccgattttttatggaattttgtatggatgaatcctgcggtaagtgtattccttgccgggtggggacggtacaactacatggattattgagcaagattcgggaaggtaaggcttcacttgctgacttagaactgttagaagaactgtgcgatatggtaaaaaataccagcttgtgcggtctaggtcagtctgcgcctaatccggtatttagtacattgcactatttccgcgatgaatatttggcgttgatagctgtaggagccgtttctctaaattcaacagattaa

SEQ ID NO: 39113 - protein, 544 aa, Nostoc sp. PCC 7120
MELTELLDIGRQERSQQKPVQIRCCTAAGCLSANSQAVQQQLEQAVKAEGLEGEVQVSGVGCMRLCCQGPLVEVEGSGEEKTKQRLYEKVTPEDASAIIGALKGKEAQLSVVNLEQPFFTYQAPIVLENSGKIDPERIQAYIAAQGYQGLYQVLREMTPAAVVDSVSRSGLRGRGGAGYPTGLKWATVAKAKGERKFVICNADEGDPGAFMDRSVLESDPHRVLEGMAIAAYAVGASQGYIYVRAEYPIAIKRLHTAIHQAQRLGLLGSNIFESPFDFKIDIRIGAGAYVCGEETALMASIEGKRGVPHPRPPYPAESGLWGYPTLINNVETFANIAPIIRKGADWFASIGTAKSKGTKVFALAGKIRNTGLIEVPMGTSLRQIVAEMGGGIPDGGVAKAVQTGGPSGGCIPASAFDTPVDYESLTNLGSMMGSGGMIVMDDTTNMVDVARFFMEFCMDESCGKCIPCRVGTVQLHGLLSKIREGKASLADLELLEELCDMVKNTSLCGLGQSAPNPVFSTLHYFRDEYLALIAVGAVSLNSTD

SEQ ID NO: 39114 - DNA, 1440 bp, Caenorhabditis elegans
  CDS (1)..(1440)
atggcttcggcagcagtctctcttggggctaggctaattggacagaacgtgccgaaggtggctgtgcgcggagtcgtgacatcagcccagaatgcgaacgctcaagtgaaacaagagaagacatcgttcggaaatttgaaggacagtgatcgtatcttcaccaatttgtatggtcgccatgattatcgattgaaaggagccatggctcgtggagactggcacaagacgaaggaaatcattctaaaaggatctgattggattctcggagaactcaaaacttctggtctccgtggaagaggaggagccggtttcccatccggaatgaagtggggattcatgaacaaaccattcgatggacgtccgaaatatctcgttgttaacgctgatgaaggagagccaggaacttgtaaagatcgtgaaattatgcgtcacgacccacataagctcatcgaaggatgcttgatcggaggagttgcaatgggagctcgtgccgcctatatttacatccgtggagagttctacaatgaagcttgtattcttcaagaggccatcaacgaggcctacaaggccggatatctcggaaaagactgcctcggaactggatacaactttgacgtcttcgttcatcgtggagctggagcctacatttgcggtgaagagactgctcttattgaatcgctcgaaggaaagcaaggaaaaccacgtctgaagcctccattcccagctgacattggacttttcggttgtccaacaactgtgaccaatgttgaaactgtagctgtggctccaacaatttgtcgtcgtggtggtgactggttcgcttcgtttggacgtgagagaaatcgcggaaccaagcttttctgcatctccggtcaagtcaacaatccatgcacggtcgaagaagagatgtccgttccattgaaagatcttatcgagcgtcattgtggtggagtcatcggtggatgggataaccttcttgccatcattccaggaggatcttctgtcccacttatgccaaagaacgtttgcgacacagttctcatggatttcgatgccctggttgctgctcaatctggtcttggaaccgccgcggttattgtgatgaacaagcaaactgatatcgttaaatgcatcgcccgattgtcacttttctataaacacgaatcttgcggacagtgtactccatgccgtgagggatgcaattggttgaacaagatgatgtggcgtttcgttgatggaaaagccaagccatcggagatcgatatgatgtgggaacttagtaaacagatcgagggacacactatttgtgctcttggagacgctgctgcatggccagttcagggactcattcgccacttccgaccagaactcgaacgccgaatggccgagttccacaagcaagttttggccgagcagggagccaagcagatcagtcaatga

SEQ ID NO: 39115 - protein, 479 aa, Caenorhabditis elegans
MASAAVSLGARLIGQNVPKVAVRGVVTSAQNANAQVKQEKTSFGNLKDSDRIFTNLYGRHDYRLKGAMARGDWHKTKEIILKGSDWILGELKTSGLRGRGGAGFPSGMKWGFMNKPFDGRPKYLVVNADEGEPGTCKDREIMRHDPHKLIEGCLIGGVAMGARAAYIYIRGEFYNEACILQEAINEAYKAGYLGKDCLGTGYNFDVFVHRGAGAYICGEETALIESLEGKQGKPRLKPPFPADIGLFGCPTTVTNVETVAVAPTICRRGGDWFASFGRERNRGTKLFCISGQVNNPCTVEEEMSVPLKDLIERHCGGVIGGWDNLLAIIPGGSSVPLMPKNVCDTVLMDFDALVAAQSGLGTAAVIVMNKQTDIVKCIARLSLFYKHESCGQCTPCREGCNWLNKMMWRFVDGKAKPSEIDMMWELSKQIEGHTICALGDAAAWPVQGLIRHFRPELERRMAEFHKQVLAEQGAKQISQ

SEQ ID NO: 39116 - DNA, 1296 bp, Ralstonia solanacearum GMI1000
  CDS (1)..(1296): transl_table=11
atgacctccctgcacgatcgacacatccagccgctgattctcgccggcctgaacggcgacaactggcacctcgaagactatgtcaagcgcggcggttaccagcagctcaagcgcatcctgacggaaaagatttcgcctgaacagatcatcgccgacgtgaaggcctcgggcctgcgcggccgtggcggcgcgggcttcccgaccggcctgaagtggagcttcatgccgcgccagttcccgggccagaagtacctggtctgcaacacggacgagggcgagcccggcacgttcaaggatcgcgacatcatccgctacaacccgcacgccttgatcgaaggcatggccatcggcggctacgcgatgggcatcaccgtgggctacaactacatccacggcgagatctggaacgagtacaagctcttcgagcaggcgctcgaagaggcgcgtgccgcaggtttgctgggcgacaacattctcggctccggcttcaacttccagctgcatgcgcaccatggctatggcgcgtacatctgcggcgaggaaaccgcgctgctcgaatcgctggaaggcaagaagggccagccgcgcttcaagccgccgttcccggccagcttcggcctgtacggcaagccgaccaccatcaacaacaccgaaacctttgccgcggtgccgttcctgctgtccatcggtccggacaactacctgaagatgggcaagccgaacaacggcggctcgaagatcttctcggtgtccggcgacgtggagcgcccgggcaactacgagattccgctcggcacgccgttctccaagctgctggaactggccggcggcatgcgtggcggcaagaagctcaaggcggtcatcccgggtggctcgtcggcgccggtggtgccggccgacctgatgatggcctccgacatggactacgactcgatcgccaaggccggctcgatgctgggttcgggcgccgtgatcgtgatggacgagacgcgctgcatggtgaagtcgctgctgcgcctgtcgtacttctacttcgaggagtcgtgcggccagtgcacgccgtgccgtgagggcaccggctggctgtaccgcgtggtcgatcgcatcgagcacggcaagggccgccaggaagatctggacctgctcaacaacgtggccgagaacatcatgggccggaccatctgcgcgctgggcgatgccgccgcgatgccggtccgcggcatgctcaagcactactgggacgagttcgcgtatcacgtcgagcacaagcagtgcatggtgcccacctacatctaa

SEQ ID NO: 39117 - protein, 431 aa, Ralstonia solanacearum GMI1000
MTSLHDRHIQPLILAGLNGDNWHLEDYVKRGGYQQLKRILTEKISPEQIIADVKASGLRGRGGAGFPTGLKWSFMPRQFPGQKYLVCNTDEGEPGTFKDRDIIRYNPHALIEGMAIGGYAMGITVGYNYIHGEIWNEYKLFEQALEEARAAGLLGDNILGSGFNFQLHAHHGYGAYICGEETALLESLEGKKGQPRFKPPFPASFGLYGKPTTINNTETFAAVPFLLSIGPDNYLKMGKPNNGGSKIFSVSGDVERPGNYEIPLGTPFSKLLELAGGMRGGKKLKAVIPGGSSAPVVPADLMMASDMDYDSIAKAGSMLGSGAVIVMDETRCMVKSLLRLSYFYFEESCGQCTPCREGTGWLYRVVDRIEHGKGRQEDLDLLNNVAENIMGRTICALGDAAAMPVRGMLKHYWDEFAYHVEHKQCMVPTYI

SEQ ID NO: 39118 - DNA, 1305 bp, Agrobacterium tumefaciens str. C58
  CDS (1)..(1305): transl_table=11
atgttaaaagatcaggatcgcatctttaccaatctctacggcctcaaggacaagtccctgaagggcgtgatggcgcgcggccactgggacggcaccaagcagatcatcgaaaagggccgtgactggatcatcaacgagatgaaggcttccggccttcgcggtcgcggcggcgctggcttcccgacgggtctcaaatggtccttcatgccgaaggaaaatgacggccgtccgcattacctcgtcgtcaacgccgacgaatccgaacccggcacctgcaaggaccgcgaaatcctgcgcaacgatccgcatacgctgatcgaaggctgcgtgatcgccggtttcgccatgggcgcgcacaccgcttacatttatgtgcgcggcgaatatatgcgcgaacgtgaagcgctgcaggcagctatcgacgaatgttacgatgccggcctgctcggcaagaacaacaagaacggctgggactacgacatctacgtccatcatggcgcgggtgcctatatctgcggcgaagagacggcgctgctcgaaagcctcgagggcaagaagggccagccacgtctgaaaccgccgttcccggccaatatgggtctctatggctgcccgacgaccgtcaacaacgtcgaatcgatcgccgttgcgccaaccatcctgcgccgcggtgcatcctggttctcgtccatcggccgtccgaacaatgtcggcaccaagctgttcatggtgtccggtcatgtcgagcgtccatgcaccttcgaagatgcgctgggcctgtccttccgcgagctgatcgagcaccattgcggtggcattcgcggcggctgggacaatctgctcggcgtcatcccgggcggcgcttcctgccccatcgttcgcggtgaggacatgaaggacgccatcatggactttgacggcatgcgcgaagtgaagtcttccttcggcaccggcggcatgatcgtcatggacaagtccactgacgtcatcaaggcgattgcgcgcatcgcggccttcttcaagcacgaaagctgtggccagtgcacgccgtgccgtgaaggcaccggctggatgtggcgcgtgctggaacgcatggtcaagggtaacgcccagaagcgtgaaatcgacatgctgttcgaggtgaccaagcagatcgagggccacaccatctgtgcgctcggcgacgccgccgcatggccggtacaggcgctgatccgcaatttccgtccggaaatcgaaaagcgcatcgaccaatatacctacagggccatggatgatggcgctgttctggaagccgctgaataa

SEQ ID NO: 39119 - protein, 434 aa, Agrobacterium tumefaciens str. C58
MLKDQDRIFTNLYGLKDKSLKGVMARGHWDGTKQIIEKGRDWIINEMKASGLRGRGGAGFPTGLKWSFMPKENDGRPHYLVVNADESEPGTCKDREILRNDPHTLIEGCVIAGFAMGAHTAYIYVRGEYMREREALQAAIDECYDAGLLGKNNKNGWDYDIYVHHGAGAYICGEETALLESLEGKKGQPRLKPPFPANMGLYGCPTTVNNVESIAVAPTILRRGASWFSSIGRPNNVGTKLFMVSGHVERPCTFEDALGLSFRELIEHHCGGIRGGWDNLLGVIPGGASCPIVRGEDMKDAIMDFDGMREVKSSFGTGGMIVMDKSTDVIKAIARIAAFFKHESCGQCTPCREGTGWMWRVLERMVKGNAQKREIDMLFEVTKQIEGHTICALGDAAAWPVQALIRNFRPEIEKRIDQYTYRAMDDGAVLEAAE

SEQ ID NO: 39120 - DNA, 1557 bp, Agrobacterium tumefaciens str. C58
  CDS (1)..(1557): transl_table=11
atgagtgtcaccgtttttattcccggcgattccgccgcacttgccgttggcgcaaaccgtgttgccgaagcgatcgctcgagaggcggccagccgcaacctcgacgtccagatcgtccgtaacggttcgcgcggcatgctctggctcgaggtgctggtggaagtgcgcaccgagcatggccgtatcgcctacgggccggtaaaggccgccgatgtcacgtcacttttcgatgcggattttcttgacggtggcgatcaccgtctctgtcttgggccgacgaaggacatccccttcctgaaaaaccagacgcgcctgacatttgcccggtgcggcgttaccgacccgctgtcgctagaggattaccgcaactatcagggcatgaaaggcctcgaaaaagccgtcaccatggagccgctcgccatcgttgcgcaggtgactgaaagcggcctgcgtggacgcggcggcgcgggtttcccgaccggcatcaaatggaagaccgtcgcagatgcgagggcagatcagaaatatatcgtctgcaatgccgatgaaggcgatagcggcaccttcgccgaccgcatgatcatggaaggcgaccccttcgtgctgatcgagggcatggcgattgccggccttgccgttggtgccaccaagggcttcatctacacccggtcggaatatccatacgccatcaaggtcatggaaaaggcgatcgagatcgcgaggcgtgagggcattcttgggtcctccgtcctcggttcaggccgcgctttcgatatggaagtacgcatgggcgccggcgcctatgtctgcggcgaggagacgtcgctcctgaacagcctcgaaggcaaacgcggcacggtgcgcgccaaaccgccgctgccggcattgcagggcctgttcggcaagccgaccgtcgtcaacaacgtgatttcgctggcgtccatcccggtcatcatggatcgcggtgccgctttctatcgcgatttcggcgtcggccggtcgcatggcaccatccccatccagctcgccggaaacatcagatatggcgggctttacgaaaccgccttcggtctgacgctcgggcaactggtgaacgatatcggcggcggcacgatcaccggccgccccgttaaggcggtgcaggtgggcggcccgcttggcgcctattttccggtgtcgttgttcgatacgatcttcgactacgaagcgttcacggcggctggcggtcttatcggacacgccgggatcgtggttttcgacgacaccgccgatatgctgcatcaggctcggttcgcccttgaattctgcgcggtcgaaagctgcggcaagtgcacgccctgtcgtatcggctcgacgcgcggcgtcgagactgtcgacaagatcgcgcttggcatcgagcgggagaaaaacacggcgctgctcgaagatctctgcgaaacgatgaaatttgggtcgctttgcgcgctgggcggtttcacgccctatcccgttatgagcgcgctcagacatttcccgcaagattttgcccccatcccacgtgttgaagcggcggagtaa

SEQ ID NO: 39121 - protein, 518 aa, Agrobacterium tumefaciens str. C58
MSVTVFIPGDSAALAVGANRVAEAIAREAASRNLDVQIVRNGSRGMLWLEVLVEVRTEHGRIAYGPVKAADVTSLFDADFLDGGDHRLCLGPTKDIPFLKNQTRLTFARCGVTDPLSLEDYRNYQGMKGLEKAVTMEPLAIVAQVTESGLRGRGGAGFPTGIKWKTVADARADQKYIVCNADEGDSGTFADRMIMEGDPFVLIEGMAIAGLAVGATKGFIYTRSEYPYAIKVMEKAIEIARREGILGSSVLGSGRAFDMEVRMGAGAYVCGEETSLLNSLEGKRGTVRAKPPLPALQGLFGKPTVVNNVISLASIPVIMDRGAAFYRDFGVGRSHGTIPIQLAGNIRYGGLYETAFGLTLGQLVNDIGGGTITGRPVKAVQVGGPLGAYFPVSLFDTIFDYEAFTAAGGLIGHAGIVVFDDTADMLHQARFALEFCAVESCGKCTPCRIGSTRGVETVDKIALGIEREKNTALLEDLCETMKFGSLCALGGFTPYPVMSALRHFPQDFAPIPRVEAAE

SEQ ID NO: 39122 - DNA, 1425 bp, Drosophila melanogaster
  CDS (1)..(1425)
atggctgcaattgtgcgatttaatttgttaacaaagccgcagattgttgcgactttgccggccagcctgcatgtgcagcgcttccagagcacccaggccccacctccgggcactcctccgccacagacgaagaccaaattcggtccgctggcggacgaagatcgcatcttcaccaacctctatggacgacatgactggaggctgaagggagctttgaagcgcggcgactggtacaaaaccaaggagattgtgctgaagggggcagactggatcgttaacgagatcaagacgtccggcctgcgcggacgtggaggagctggcttccccagcggtatgaagtggtccttcatgaacaagcccggagatggacgccccaagtacttggtggtgaatgccgatgagggagagcctggcacctgcaaggatcgcgagatcatgcgccacgatccacacaagctggtggagggctgtctgattgccggacgcgccatgggcgcccaggctgcctacatctacattcgtggcgagttctacaacgaggcttccaacatgcaactggccattgccgaggcctaccaggctggtctgattggaaagaatgcgtgcggaacaggctacgacttcgacgtcttcatgcaccgcggcgctggagcttacatttgcggcgaggagaccgctctgatcgaatcgctggaaggaaagcagggaaagccacgcttgaagccgccattcccagctgatgtgggtgtgttcggttgcccaaccacagttaccaatgtggagaccgtggccgttgcaccaaccatttgccgtcgtggcggtgtatggttcgccagcttcggtcgcacccgtaactcgggcaccaagctcttcaacatttcgggacatgtcaacaggccctgcactgtggaggaggaaatgtccatcccactcaaggagttgattgagcgccactgcggaggcgtcactggtggatgggataatctgctaggcgtcattcccggcggctcttccacccccatcatacccaaaaatgtctgcgacgatgttatcatggacttcgatggcctaattgccgctcagacttcgctgggtactgcggctatcatcgtaatggacaagtcgacggatgtgataaaggctattgccaggctaatttcattctataagcatgagagctgtggccagtgcacgccatgccgagagggaatcggttggatgaacaaaatcatgactcgatttgttaagggtgacgcccagcccgctgagatcgatatgctgtgggagatttccaaacaaattgagggacacactatttgtgcgcttggtgatggtgccgcctggccagtccagggcctcattcgtcacttccggcccgagatcgagaaacgtatgcaactgcatgcaaagcgcgtcagcaattaa

SEQ ID NO: 39123 - protein, 474 aa, Drosophila melanogaster
MAAIVRFNLLTKPQIVATLPASLHVQRFQSTQAPPPGTPPPQTKTKFGPLADEDRIFTNLYGRHDWRLKGALKRGDWYKTKEIVLKGADWIVNEIKTSGLRGRGGAGFPSGMKWSFMNKPGDGRPKYLVVNADEGEPGTCKDREIMRHDPHKLVEGCLIAGRAMGAQAAYIYIRGEFYNEASNMQLAIAEAYQAGLIGKNACGTGYDFDVFMHRGAGAYICGEETALIESLEGKQGKPRLKPPFPADVGVFGCPTTVTNVETVAVAPTICRRGGVWFASFGRTRNSGTKLFNISGHVNRPCTVEEEMSIPLKELIERHCGGVTGGWDNLLGVIPGGSSTPIIPKNVCDDVIMDFDGLIAAQTSLGTAAIIVMDKSTDVIKAIARLISFYKHESCGQCTPCREGIGWMNKIMTRFVKGDAQPAEIDMLWEISKQIEGHTICALGDGAAWPVQGLIRHFRPEIEKRMQLHAKRVSN

SEQ ID NO: 39124 - DNA, 2109 bp, Drosophila melanogaster
  CDS (1)..(2109)
atgatatcgtttctgttaaaacgccgagcttgtgatgcttacaagatttcattaggactaactcgtgcatatagagccttaacagaagtaaaaagccttcaaaatgccttacgacctggtaataaaactggaaatatcaagctggtaaacatataccgaacttctagcatacaaaatgtgaagaagaaccaactaagtgacgctgaaagcgttattccactcttattgcggccagccaaacctgtgctgattatgagagaaggatctcaaaccgattgtaacgacgatttgctgtcctctgagcaaagagccaaaaaaagggaaagcataaaaaaatccgaagtagattgcccaaaatttccagctgagaaacttccgcccacaacgaaatttcctattaatgaaaatgccaagaaggttttagatccagccgaccaaagagaactcgaggccaatttgttaaaaaggcttaaagatatggctaaaagaaagaaatctcgactagatgagaaagttgacgagctgagggataattttataggctggaattatgctgctctacaaggaagaactattgtgactgtggatgccaaggaatcaactccaccgaaaggatctgggccggccaccccggcaggctctcctccacctaaaaatgtttctgcaccgccgacgggcggttctccgcctgccaaaagcggcgctccaccacccccaaaggggccaccgcccggaactccaccaccgcagacgaaaactacttttggaccacttgctgatgctgatcgaatctttaccaatttatacggacggcacgattggcgattgaaggcagcaatgaagcgcggtgactggtacaagacgaaggagatcatagccaagggtgacaagtggatagtcaacgagattaagacatctggactgcgaggacgcggtggcgccggatttcccagtggacttaagtggtcatttatgcataaaccgcctgatggaagacccaagtttctggtggtcaatgcggatgaaggagagcccggtacttgcaaggatcgtgagataatgcgccatgatccacacaaactggtagagggatgtctcattgctggacgggctatgggtgccaacactggttttatttacattcgcggagagttttacaacgaagcttgcaatcttcagtatgccattattgaggcctataaggctggctacctgggaaagaatgcctgcggttctgggttcgatttcgatctttatgtgcaacgtggagcaggagcctatatttgcggtgaggaaacctctctgattgaatccctggagggcaaggcgggtaagccaaggaacaagcctccctttccggctgatatcggcgtctttggctgtccgtctacggtgaccaatgtggaaacggtggccgtgtctcccactatttgccggcgtggtggcaattggtttgccagctttggacgtacccgaaactctggcaccaagctgtttaatatctctggtcatgtttgcaacccttgtaccgtcgaggaggagatgtccatgccaaccagagagcttatcgaacgccatgctggcggagtgatcgggggctgggacaatctactggccatcattccgggtggctcctccactccctgcattaccaaggagcacgcctcgagtgcgattcacgactacgatgggctgatggcagtgcgttcgtccatgggaacgggtgccttaattgttatgaataaggatacggacattatcaaggccattgcccgattatcggctttctataagcacgagagctgcggccagtgcactccttgccgcgagggtctccactgggtgaacatgatcatgcatagatttgtgacaggacaggcgcaaattgcagagatcgatatgctgttcgaactgacgaagcagatcgagggacataccatttgtgccctggccgatggtgctgcttggccgccccaaggactcatccggaacttccgaccggtcatcgaggagaggatcaagaagcgggcggccgaggaccaagctaaagctgaagcactcgaagccgaacgtttcccttgtcaaacggtgactccttgtccagaataa

SEQ ID NO: 39125 - protein, 702 aa, Drosophila melanogaster
MISFLLKRRACDAYKISLGLTRAYRALTEVKSLQNALRPGNKTGNIKLVNIYRTSSIQNVKKNQLSDAESVIPLLLRPAKPVLIMREGSQTDCNDDLLSSEQRAKKRESIKKSEVDCPKFPAEKLPPTTKFPINENAKKVLDPADQRELEANLLKRLKDMAKRKKSRLDEKVDELRDNFIGWNYAALQGRTIVTVDAKESTPPKGSGPATPAGSPPPKNVSAPPTGGSPPAKSGAPPPPKGPPPGTPPPQTKTTFGPLADADRIFTNLYGRHDWRLKAAMKRGDWYKTKEIIAKGDKWIVNEIKTSGLRGRGGAGFPSGLKWSFMHKPPDGRPKFLVVNADEGEPGTCKDREIMRHDPHKLVEGCLIAGRAMGANTGFIYIRGEFYNEACNLQYAIIEAYKAGYLGKNACGSGFDFDLYVQRGAGAYICGEETSLIESLEGKAGKPRNKPPFPADIGVFGCPSTVTNVETVAVSPTICRRGGNWFASFGRTRNSGTKLFNISGHVCNPCTVEEEMSMPTRELIERHAGGVIGGWDNLLAIIPGGSSTPCITKEHASSAIHDYDGLMAVRSSMGTGALIVMNKDTDIIKAIARLSAFYKHESCGQCTPCREGLHWVNMIMHRFVTGQAQIAEIDMLFELTKQIEGHTICALADGAAWPPQGLIRNFRPVIEERIKKRAAEDQAKAEALEAERFPCQTVTPCPE

SEQ ID NO: 39126 - DNA, 1791 bp, Thermoanaerobacter tengcongensis MB4
  CDS (1)..(1791): transl_table=11
atgctttacaggtctcacgtaatggtatgtggtggaactggctgtacttcatcaggttctgacgaggtagctgaacgtttcatagaagagattaaaaaagcgggtttggacaaagaaatactggttgtgaggacaggatgctttggactctgcgagctgggtcctgttgtggtagtttacccggaaggggttttttacagcagagtaaagccagagtatgtgcctgagatcgtagaggagcatcttttaaagggaagacctgtcagaaagtacatctacggtgagagcctagaagaaaaggctataaagccgttggaggagacacctttcttcagaaaacagagaagaattgctcttagaaactgcggtgtgataaaccctgaagacataagagaagctattgcttttgacgggtataaagcgcttgcgaaggttcttacagagatgactcctgagcaagtaattgaagaggtcaaaaaatcaggattaaggggaagaggcggtggcggattcccaacaggtgtgaaatgggaatttgcttacaagcagaaagaaacccctaaatatgttgtgtgcaatgctgatgaaggagaccctggcgctttcatggatagaagcatactggaaggagacccccacagtgttttagaagcaatggcaatagctggatatgcaataggtgcaaatcacggttatatatacgtgagagcagagtatcctctggctgtaaaaaggcttaagattgcgattcagcaggcgagagagtacggacttttaggaaaggatatatttggcacagggtttgactttgacattgaaataaggcttggagcaggtgcttttgtctgcggtgaagagacagctcttttaaactctattatgggtaaaagaggagagccgaggccaagaccccccttcccggcggtgaagggtgtatggggcaaacccacaattataaataacgtggagacttttgcaaatattcctcccatcatattaaacggcggagaatggttcgcaagcattggaacagaaaaatctaaaggaacgaaagtttttgctctcaccggtaaggtgaataacaccggactcattgaagtgcctatgggtacaactttaagagaaatcatatacgaaataggcggaggaatacccggaggaaagaaattcaaagctgttcagataggcggtccttctggcggatgcataccggcagagcttttagatactccgattgattatgattctttaaccagtgcaggtgcgatgatgggttctggcggacttgttgtgatggatgaagacacatgtatggtcaatgtggcgaagttcttcctcgagtttactgtcgatgaatcctgcggtaagtgtgctccttgtaggattggtacgaagaggatgctggagcttttggataagataacttccggaaaaggagaagaaggagatattgaaaagttagaagaactggcaaagaccataaaggcaacggctctatgtggtcttggacagacagcacccaatcctgtactttctactttgagatatttcaggcacgaatatgaggcccacataaaagaaaaaaggtgccctgccggtgtatgtacagcgcttttaagctttgttatagatcctgaaaagtgcaaagcctgtggaatttgtgcaaagaactgtcctgttggagctatttctggtaagccaaagacgccttatgtgattgaccaagagaagtgtattaagtgcggaacatgtattgataagtgtccgtttggcgcaatatacaaaaaataa

SEQ ID NO: 39127 - protein, 596 aa, Thermoanaerobacter tengcongensis MB4
MLYRSHVMVCGGTGCTSSGSDEVAERFIEEIKKAGLDKEILVVRTGCFGLCELGPVVVVYPEGVFYSRVKPEYVPEIVEEHLLKGRPVRKYIYGESLEEKAIKPLEETPFFRKQRRIALRNCGVINPEDIREAIAFDGYKALAKVLTEMTPEQVIEEVKKSGLRGRGGGGFPTGVKWEFAYKQKETPKYVVCNADEGDPGAFMDRSILEGDPHSVLEAMAIAGYAIGANHGYIYVRAEYPLAVKRLKIAIQQAREYGLLGKDIFGTGFDFDIEIRLGAGAFVCGEETALLNSIMGKRGEPRPRPPFPAVKGVWGKPTIINNVETFANIPPIILNGGEWFASIGTEKSKGTKVFALTGKVNNTGLIEVPMGTTLREIIYEIGGGIPGGKKFKAVQIGGPSGGCIPAELLDTPIDYDSLTSAGAMMGSGGLVVMDEDTCMVNVAKFFLEFTVDESCGKCAPCRIGTKRMLELLDKITSGKGEEGDIEKLEELAKTIKATALCGLGQTAPNPVLSTLRYFRHEYEAHIKEKRCPAGVCTALLSFVIDPEKCKACGICAKNCPVGAISGKPKTPYVIDQEKCIKCGTCIDKCPFGAIYKK

SEQ ID NO: 39128 - DNA, 1941 bp, Streptomyces coelicolor A3(2)
  CDS (1)..(1941): transl_table=11
gtggacgccctgctcggcccgcccgagtcctcctgggagggcgcggaccgctccgacgcggacctcagatgggcccgcggcggccgggaggcccgggaccgccgcgaccagctcctgccggccctgcacgcgctcaacgaccgcgtcggatggatcagcgagggcgccctggactacgtgtgccgccgcctgaccgtccccccggcggaggcctacggcgtggccaccttctacgccatgttctccgtccgcccccgcccggccaccgtcctgcacgtctgcaccgacctggcctgcacggcggcgggggcgagccggctgtgcgcggccgtggagtcacgcctcggcccggagagcggggtgaagctcgagcgcagcccgtgcctgggcctgtgcgagcgtgccccggcgactttggtgatccgggcgggcgaatcagcccgtccggcgcaggaggacactccagcccgtccggcgtttgaggacgaggccgtccaggccgaaggggggtccgggggcgcagcccccggggacggtgggggcacctcccgctcgagcgaagccgagagtgggggagggaaggggcggcgggggcgaaacaccctccacgcgacggcgatatgcgcccccgcaacccccgacagggcgatcgcggcggccaccgcccccgaatccgcccccaccgagcccgcccccgaagccgccgtcccccaggccggcgaccccaccctcaccctcctccaccgcatcggcaccaccgaccccacctccctggacgactaccgcgcccacggcggctacaccgccctgcgccgcgccttcgccctcggccccgccgccgtcatccgcgaggtcaccgacgccggcctggtcggccgcggcggcgccgccttccccaccggccgcaagtggcaggccacggccgcccagcccgaccacccgcactacctcgtctgcaacgccgacgaatccgaaccgggcaccttcaaggaccgcgtcctgatggagggcgacccgtacgccctggtcgaggccatgacgatcgcggcctacgcgaccggcgcccaccggggctatctctacctccgcggcgagtacccccgcgccctcgcccgcctcacccacgccatcgagcaggcccgcacccgcggcctgctcggtgacgacgtcctcggccagggctacgccttcgacatcgagatccggcgcggcgcgggcgcgtacatctgcggcgaggagacggccctgttcaactccatcgagggccgccgcggcgagccacgctccaagccgccgttcccggtcgagaagggcctgttcggcaaacccacggtggagaacaacgtcgagacgctggtcaacgtcctgcccatcctcacgatgggcgcggaggcgtacgccgcgatcggcactccgacgtccaccggccccaagctgttctgcgtgtccggcacggtggcccgccccggcgtctacgaactccccttcggcgccacgctcggcgaactgctcgcactcgccggggtccgcgacaacctccgcgcggtcctgctcggcggcgccgccggcggtttcgtccgccccgacgaactggacatcccgctcaccttcgaaggcacccgcgaggcgggcacgaccctgggctccggcgtcgtcatggccttcgacgacacggtcccgctcccccgcctgctgctgcggatcgccgagttcttccgcgacgagtcgtgcggccagtgcgtgccgtgccgggtcgggaccgtccgccaggaggaggcgctgcaccggatcgccgaccgcacgggcgccgcggcggccgacgacatcgccctgctccgcgaggtgggccgcgcgatgcgggacgcctcgatctgcggtctggggcagaccgcgtggaacgccgtggaatccgccatcgaccgtctgggggcgtacgaatga

SEQ ID NO: 39129 - protein, 646 aa, Streptomyces coelicolor A3(2)
MDALLGPPESSWEGADRSDADLRWARGGREARDRRDQLLPALHALNDRVGWISEGALDYVCRRLTVPPAEAYGVATFYAMFSVRPRPATVLHVCTDLACTAAGASRLCAAVESRLGPESGVKLERSPCLGLCERAPATLVIRAGESARPAQEDTPARPAFEDEAVQAEGGSGGAAPGDGGGTSRSSEAESGGGKGRRGRNTLHATAICAPATPDRAIAAATAPESAPTEPAPEAAVPQAGDPTLTLLHRIGTTDPTSLDDYRAHGGYTALRRAFALGPAAVIREVTDAGLVGRGGAAFPTGRKWQATAAQPDHPHYLVCNADESEPGTFKDRVLMEGDPYALVEAMTIAAYATGAHRGYLYLRGEYPRALARLTHAIEQARTRGLLGDDVLGQGYAFDIEIRRGAGAYICGEETALFNSIEGRRGEPRSKPPFPVEKGLFGKPTVENNVETLVNVLPILTMGAEAYAAIGTPTSTGPKLFCVSGTVARPGVYELPFGATLGELLALAGVRDNLRAVLLGGAAGGFVRPDELDIPLTFEGTREAGTTLGSGVVMAFDDTVPLPRLLLRIAEFFRDESCGQCVPCRVGTVRQEEALHRIADRTGAAAADDIALLREVGRAMRDASICGLGQTAWNAVESAIDRLGAYE

SEQ ID NO: 39130 - DNA, 1335 bp, Xanthomonas axonopodis pv. citri str. 306
  CDS (1)..(1335): transl_table=11
atggcacatcatcacgcaccctcaggcccggtcggtccggcgccgcagccgcatcaggtcgtctacacgaccttgcactacgacactccgtggtcgtatgagagctatctgaaaaccggtggctacgccgcgctgcgcaagatcctcgaagagaagatcccgcccgccgatgtcatcgagatggtcaaggcgtccaacctgcgcggccgtggcggcgcaggcttcccgaccgggttgaagtggtcgttcatgcccaagggcacgatgcagaagtacatcctttgcaactcggacgaatccgagccgggcacctgcaaggaccgcgacatcctgcgttacaacccgcattcggtggtggagggcatggcgatcgcctgctacgccaccggttcgaccgtgggctacaactacctgcgtggcgaattccaccacgagccgttcgagaacttcgagctggcgctggccgacgcgtacgccaacggttggttgggcaagaacatcctcggcagcggcgtggatatcgacatctacggtgcgctgggtgccggcgcctacatctgcggcgaagaaaccgcattgatggagtcgctggaaggcaagaaaggccagccgcgctacaagccgccgttcccggcgaatttcggcctgtacggcaagccgaccaccatcaacaacaccgagacctacgcgtcggtgccggcgatcattcgcaacggcccggagtggttcctcggtttgagcaagaccaagaacggcggcccgaagatcttctcggtgtccggctgcgtgcagaagggcggcaacttcgaggtgccactcggcaccaccttcgacgaactgctggaaatggccggcgggctgcgcccgggtcgcaagctcaagggtgtggtgcccggcggcgtgtcgatgccggtgctgaaggccgaccaggtcgcgggcctgcagatggactacgacaccttgcgcgcgctcggcaccggtctgggttcgggtgccatcgtggtactggacgacagcgtctgctgcgtccgctttgcctgccgcatctcgcagttcttccacaaggaatcctgcggccagtgcaccccgtgccgcgagggcaccggctggatgcaccgcgtgctggagcgcatcgtcgccggcaaggccacgatggaagacctgcatcagctgcgcaccgtcgccggccagatcgaaggccacaccatctgtgcgttcggcgaagcggcggcatggccgattcagggctttctgcgccagttctgggacgagttcgagtactacatcgtcaacggtcgttcgatcgtcgatacgcaagtcggagtggctgcatga

SEQ ID NO: 39131 - protein, 444 aa, Xanthomonas axonopodis pv. citri str. 306
MAHHHAPSGPVGPAPQPHQVVYTTLHYDTPWSYESYLKTGGYAALRKILEEKIPPADVIEMVKASNLRGRGGAGFPTGLKWSFMPKGTMQKYILCNSDESEPGTCKDRDILRYNPHSVVEGMAIACYATGSTVGYNYLRGEFHHEPFENFELALADAYANGWLGKNILGSGVDIDIYGALGAGAYICGEETALMESLEGKKGQPRYKPPFPANFGLYGKPTTINNTETYASVPAIIRNGPEWFLGLSKTKNGGPKIFSVSGCVQKGGNFEVPLGTTFDELLEMAGGLRPGRKLKGVVPGGVSMPVLKADQVAGLQMDYDTLRALGTGLGSGAIVVLDDSVCCVRFACRISQFFHKESCGQCTPCREGTGWMHRVLERIVAGKATMEDLHQLRTVAGQIEGHTICAFGEAAAWPIQGFLRQFWDEFEYYIVNGRSIVDTQVGVAA

SEQ ID NO: 39132 - DNA, 1386 bp, Yersinia pestis KIM
  CDS (1)..(1386): transl_table=11
atgaccatcaattcaggaacgaccaaggaaattatccggacgccagaaatgcacccgctgacctggcgtttgcgcgatgacaaacagcccgtgtggctggatgagtatcgcagcaaaaacggctatgccggggcagaaaaagcgttaaaaggcatggcgcccactgatgttgttaacgttgtcaaagacgctggcctgaaagggcgtggcggcgcaggtttctccactggtttgaagtggagcctgatgcccaaagacgacagtatgaacatccgctatctgctgtgtaacgctgatgagatggagccaggcacctataaagaccgtctgctgatggagcaattgcctcatctgctggtggaggggatgctgatcagtgccttcgcgctgaaagcctaccgtggctatatcttcctgcgtggcgaatatattgaagcggcagtgcatttacgtcgggcgattgctgaggccaccgaagccggcttgctgggcaaaaacatcatgggcagtggttttgatttcgaactgattgtccataccggtgcgggtcgttatatctgtggtgaagaaacggcgctgattaactcactggaaggccgccgtgctaacccgcgttctaagccgccgttcccggcctcttccggtgtctggggcaaaccgacttgcgtgaataacgttgaaaccctgtgtaacgtaccggccattattgaacatggcgttgagtggtatcaggggatcactgccggtaagagtaacgatgccggaaccaaactgatgggcttctcgggtcgggtgaaaaatccgggtctgtgggaattgccgtttgggatcaccgcccgtgagattctggaagattacgctggcggtatgcgcgatggcttgaaatttaaagcctggcagccgggcggggcgggtaccgatttcctgactgctgaccatctggatttgccgatggattttgagaatattgctaaagcaggtagccggttaggcaccgcgttggcgatggcggtagatcacgaaatcggcatggtgtctttggtgcgcaatctggaagagttcttctcccgtgagtcttgtggctggtgtacaccgtgtcgcgatggtttgccatggagtgtgaagatcttacgtgcattagagcgtggtgaaggccagccgggtgatatcgaaacgctagagcaactgtgccgcttcttagggccgggtaaaaccttctgtgctcatgcgccaggtgcggttgaacccctacaaagtgcgattaaatatttccgggacgaattcgaagccgggatcgccgttaaggcctatgaatctggaatgacgagcggcaacacccgagccatagccggtattcaacctaatctattaaaagcgcgctggtag

SEQ ID NO: 39133 - protein, 461 aa, Yersinia pestis KIM
MTINSGTTKEIIRTPEMHPLTWRLRDDKQPVWLDEYRSKNGYAGAEKALKGMAPTDVVNVVKDAGLKGRGGAGFSTGLKWSLMPKDDSMNIRYLLCNADEMEPGTYKDRLLMEQLPHLLVEGMLISAFALKAYRGYIFLRGEYIEAAVHLRRAIAEATEAGLLGKNIMGSGFDFELIVHTGAGRYICGEETALINSLEGRRANPRSKPPFPASSGVWGKPTCVNNVETLCNVPAIIEHGVEWYQGITAGKSNDAGTKLMGFSGRVKNPGLWELPFGITAREILEDYAGGMRDGLKFKAWQPGGAGTDFLTADHLDLPMDFENIAKAGSRLGTALAMAVDHEIGMVSLVRNLEEFFSRESCGWCTPCRDGLPWSVKILRALERGEGQPGDIETLEQLCRFLGPGKTFCAHAPGAVEPLQSAIKYFRDEFEAGIAVKAYESGMTSGNTRAIAGIQPNLLKARW

SEQ ID NO: 39134 - DNA, 1308 bp, Brucella suis 1330
  CDS (1)..(1308): transl_table=11
atgctggctgacaaagatcgcatcttcaccaatatttacggcttcaaggatcagtccctgaagggtgccatggctcgtggccattgggacaataccaagggcctgatcgagaagggctgcgactggatcatcgaggagatgaaggcgtcgggcctgcgtggccgtggcggcgctggcttcccgacgggtctcaaatggtcgttcatgcccaagcagagcgatggtcgcccgcattacctcgtcgtcaatgccgacgaatcggagccgggcacctgcaaggaccgcgaaatcctgcgccacgatccgcatacgctgatcgaaggctgcgtgattgccggttgcgcgatgggcgcacacaccgcttatatttatattcgcggcgagttcatgcgtgagcgtgaggtgcttcaggctgcaatcgacgagtgctacgaagccggccttctcggcaagaacaacaagtgcggctgggatatggacatttatgtcacccacggcgctggcgcttatatctgcggtgaagaaacggctttgctcgaaagcctcgaaggcaagaagggtcagccgcgcctcaagcctccattcccggccaatatgggcctctacggttgcccgacgacggtcaacaacgtggaatcgattgccgttgcgccgacgatcctgcgtcgtggcgcggcatggttctcgtccatcggacgtccgaacaatgtcggcaccaagctgttccagatgtccggccatgtgaacacgccgtgcgtcgtggaagaggggctcggcattccgttccgcgagctgatcgaaaagcatggcggcggtatccgtggcggctgggacaatctgctggcggtcattcccggcggcgcgtcgtgcccggtcatcaaggccgaggacatgatggacgccgtcatggattttgatggcatgcgtgagaagaagtcgtccttcggcaccggcggcttgatcgtcatggacaagtccaccgacatcatcaaggcgattgcgcgcctgtctgccttcttcaagcatgagagctgcggccagtgcacgccgtgccgcgaaggcactggctggatgtggcgcgtgatggagcgcatggtcaagggtaacgcgcagaagcgtgaaatcgacatgctgttcgacgtcaccaagcagatcgaaggtcacacgatctgcgcgctcggtgatgcggccgcatggccgatccaggggctgattcgcaatttccgtccggaaattgaaaagcgcattgatgaatatactcgcaacgccgttcagagccgtaatatccgtctggaagcggctgaataa

SEQ ID NO: 39135 - protein, 435 aa, Brucella suis 1330
MLADKDRIFTNIYGFKDQSLKGAMARGHWDNTKGLIEKGCDWIIEEMKASGLRGRGGAGFPTGLKWSFMPKQSDGRPHYLVVNADESEPGTCKDREILRHDPHTLIEGCVIAGCAMGAHTAYIYIRGEFMREREVLQAAIDECYEAGLLGKNNKCGWDMDIYVTHGAGAYICGEETALLESLEGKKGQPRLKPPFPANMGLYGCPTTVNNVESIAVAPTILRRGAAWFSSIGRPNNVGTKLFQMSGHVNTPCVVEEGLGIPFRELIEKHGGGIRGGWDNLLAVIPGGASCPVIKAEDMMDAVMDFDGMREKKSSFGTGGLIVMDKSTDIIKAIARLSAFFKHESCGQCTPCREGTGWMWRVMERMVKGNAQKREIDMLFDVTKQIEGHTICALGDAAAWPIQGLIRNFRPEIEKRIDEYTRNAVQSRNIRLEAAE

SEQ ID NO: 39136 - DNA, 1332 bp, Leptospira interrogans serovar Lai str. 56601
  CDS (1)..(1332): transl_table=11
atggcagaaatgaaacttcttacgaaatacatcgacaatcctcagtccaccaaactggagttttacgaatccgtacacggatacgatggaatgaaaaaagcgcttcagatgaaaccagacgacatcatcgcagaagtcaaaaaatccggactgagaggaaggggtggagccggttttccgaccggtcttaaatggtcgtttattcccaaagacattccaaaaccgaaatatatcatttgcaacgcggacgaaggagaaccgggaacattcaaagatcgtaaactgattgagaatcttccacatcagattatagaaggaatgatcataggagcgcgcgcgatcggttccaacaaaggatttttttatattcgaggagaattccaaaaaggcgcaaaagccatgcaggcggcgatcgacgaggcctactccaaaggatatttaggaaagaatattttaggaagcggttttgattttgatctgattctttacgaaggagcgggcgcctatatctgtggagaagaaaccgcgctgatcaattcactcgaaggaagaaggggccatcctagattaaaaccccccttccccgccgtgtcgggactttatcgttctccgaccgtagtcaataacgtagaaactttttcggcgattcctcatattttagataagggagcggattggtattctaaaataggaacggaaaaatctccgggcacgagattattcagcgtatccggtcacgtaaaaaaaccgggcgtttacgaaatcgaattaggaactcctttattagaattagtgaatgatctttgtggtggaatcatagacgataaacctctcaaggcgatcattccgggaggatcctccgttccgattctcaccgcggaagaatgtaaaaccgcaaatatggattttgaatccatggccgctcataaaaccatgctcggctctggagcggtaatcgttcttgcggaaggaactgacattgtagaaaccacgtatcgattcgcccgtttttacgcacacgaatcctgcggtcagtgcactccttgtagagaaggaacacattgggtcagggacattctctataaaattagagaaggagaaggaacaaccgaagacatagatctgattttttctttatccagaaatatggaaggaggaaccacgatctgtccactttcagacgcttgtgtaggagcggtccgaccagcgttacaaaagttccgctccgagtttgacgcaaaattgaaagtaaaaccgatcgtacccgatcatcctcgaagaagaaaagaagataagatcgagtcgactgcaggagaaaagacaagtccatga

SEQ ID NO: 39137 - protein, 443 aa, Leptospira interrogans serovar Lai str. 56601
MAEMKLLTKYIDNPQSTKLEFYESVHGYDGMKKALQMKPDDIIAEVKKSGLRGRGGAGFPTGLKWSFIPKDIPKPKYIICNADEGEPGTFKDRKLIENLPHQIIEGMIIGARAIGSNKGFFYIRGEFQKGAKAMQAAIDEAYSKGYLGKNILGSGFDFDLILYEGAGAYICGEETALINSLEGRRGHPRLKPPFPAVSGLYRSPTVVNNVETFSAIPHILDKGADWYSKIGTEKSPGTRLFSVSGHVKKPGVYEIELGTPLLELVNDLCGGIIDDKPLKAIIPGGSSVPILTAEECKTANMDFESMAAHKTMLGSGAVIVLAEGTDIVETTYRFARFYAHESCGQCTPCREGTHWVRDILYKIREGEGTTEDIDLIFSLSRNMEGGTTICPLSDACVGAVRPALQKFRSEFDAKLKVKPIVPDHPRRRKEDKIESTAGEKTSP

SEQ ID NO: 39138 - DNA, 1386 bp, Shewanella oneidensis MR-1
  CDS (1)..(1386): transl_table=11
atgagcctaccacagagcaaagttctcacctcctttggcaccgccaaccgtacgccacgcgcggccgaaacccatccgctcacttggcggctacgggacgacggccagccagtgtggctagaggaatatcaaaccaagcaaggctatgacgccgtgcgcaaggcgctgggccagatgagtccggacgagattgtcagcacagtcaaagatgccgggcttaagggccgcggcggcgcgggcttccccactggtgttaagtggggactgatgcccaaagatgagagcatgaacatccgttacctgctctgcaacgccgatgagatggagcctaacacctggaaagacaggctactgatggagcagctaccccatctgttgatcgaggggatgatcatctccgccaaggctctcaaggcctatcgcggctacatcttcctgcgtggcgagtacgtggatgccgccatcaacctgcgccgggccgtagaagaggccaaggccgcgggcctgctcggtaagaacattctcggctcgggttttgacttcgagttgttcgtccataccggcgctggccgctacatctgcggagaagagacggcgctgattaactccctagaagggcgccgcgccaacccgcgcgccaagccccccttccccgccgtttccggcgtttggggcaaacccacctgcgttaacaacgtcgagaccctgtgcaacgtacccgccattatcggcaatggtgtggcttggtatcacaccctggcgctaccgggctcagaagatcacggcactaagctgatggggttttccggcaaggtcaacaaccctggcgtgtgggagctgccctttggcatcaccgcccgtgagctatttgaaggctatgccggcggcatgagaagcggttatcgcctgaaagcctggcaaccgggcggcgcaggtaccggctttttgctgcccgagcacctcgatgcccagatgtacacagcaggcataggtaaggtcggcacccgcatgggcacgggccttgcgatggcggtggatgattccatcagcatggtgagtttgctgcgcaatatggaagaattttttgcccgcgaatcctgcggctggtgtacgccttgccgtgacggtctgccttggagcgtcaagctgctgcgatcccttgagcgcggtgaagggcaagagggcgatttagcaacgctcgagcagctttgcaatttcctcggccccggcaagaccttctgcgcccacgccccgggcgccgttgagccgcttgccagcgccattaaatatttccgctccgagtttgaggccgggatcaagggcagcggtgataaccgcaagtccattaaagggatccagcccaatctgctgggcgagcgctggtaa

SEQ ID NO: 39139 - protein, 461 aa, Shewanella oneidensis MR-1
MSLPQSKVLTSFGTANRTPRAAETHPLTWRLRDDGQPVWLEEYQTKQGYDAVRKALGQMSPDEIVSTVKDAGLKGRGGAGFPTGVKWGLMPKDESMNIRYLLCNADEMEPNTWKDRLLMEQLPHLLIEGMIISAKALKAYRGYIFLRGEYVDAAINLRRAVEEAKAAGLLGKNILGSGFDFELFVHTGAGRYICGEETALINSLEGRRANPRAKPPFPAVSGVWGKPTCVNNVETLCNVPAIIGNGVAWYHTLALPGSEDHGTKLMGFSGKVNNPGVWELPFGITARELFEGYAGGMRSGYRLKAWQPGGAGTGFLLPEHLDAQMYTAGIGKVGTRMGTGLAMAVDDSISMVSLLRNMEEFFARESCGWCTPCRDGLPWSVKLLRSLERGEGQEGDLATLEQLCNFLGPGKTFCAHAPGAVEPLASAIKYFRSEFEAGIKGSGDNRKSIKGIQPNLLGERW

SEQ ID NO: 39140 - DNA, 1446 bp, Drosophila melanogaster
  CDS (1)..(1446)
atgttgcggcagaagcttaaaaactatttaccgtctgtttgggaacagcaactgcgtctcgtccaaactgccaagaaagcgggaggtagcaaaaagctgggtcccgataggcctcccattatcgatccgcccaagggatatgagcccaattgcaagaccaaatttggtccgctggacgattgtgatcgtgtgtttcagaatctctatggacgccacgattggcgcttgcatggagcatgccaacgtggggattggcatcgcaccgctgagttgctggagcagggtcccgaatggatcatgaagcaggtaagcaagagtggattgcgcggacggggaggagctggcttctatgccggactgaagtgggaatttctacgccagaccaagtccgagaaggtgcccaaaatggtcatcgtgaactgtgcagagggagagcccggaacctgcaaggaccgtgatatcctgcgacatgaaccccacaaactgatagaaggtatccttctggtaggtgtggccatgggatgcggtagagccattgtgtacattcgaaatcgcttctacaacgaggcctgcaacctgcactttgccttggcggaggcctatcatcatggtttgttgggaaacagtgtctgtggcacgggcatcaaattcgatgtgatggtccagcgtggagatcgttacttatgtggcgaggaaaccgccatgatcaactgtttgatgggtaaactgggaagaccacgacgtcgtccgcccttccttacggaaaagggctacttcgagcatccctgtttggtgatcaatgccgagtcgattgcagtagtgcccacaattctgcgaagaggttcccagtggtgggctggattgggtcgcagttacaacacgggaaccaaactttactgtctcagcggtcaggtgaataatccctgcactgtggaggaagagatgtccatacccctgaaagaccttatagaacgacatgctggtggagtaaaaggtggttgggacaatctcgcagcagtatttccaggtggtttgtccacaccattgttggatccatcaacagccggaaaggttctcatggatttcgatagtttgacggatgcaggcagtggtttcgggtgcggagcggttattgtgatgaccaaggactgtgatcctctggcaataatgttgcgatcaattcagtttttcgagaagcacacttgcaaacagtgctcctattgtcgcgatggtgccatatggctgccggagatattcgcccgctttgttaagggtcagacacatccccacgagatcgattggacgctggtcattgccgataaaatgaggaatagtaagcccatttgcgcactcgcttatagccaagtcagcgtggccgagagtttggttcgaatgtttagccggaagatcgaggaacgccttttaaaatatgccaagggttcttaa

SEQ ID NO: 39141 - protein, 481 aa, Drosophila melanogaster
MLRQKLKNYLPSVWEQQLRLVQTAKKAGGSKKLGPDRPPIIDPPKGYEPNCKTKFGPLDDCDRVFQNLYGRHDWRLHGACQRGDWHRTAELLEQGPEWIMKQVSKSGLRGRGGAGFYAGLKWEFLRQTKSEKVPKMVIVNCAEGEPGTCKDRDILRHEPHKLIEGILLVGVAMGCGRAIVYIRNRFYNEACNLHFALAEAYHHGLLGNSVCGTGIKFDVMVQRGDRYLCGEETAMINCLMGKLGRPRRRPPFLTEKGYFEHPCLVINAESIAVVPTILRRGSQWWAGLGRSYNTGTKLYCLSGQVNNPCTVEEEMSIPLKDLIERHAGGVKGGWDNLAAVFPGGLSTPLLDPSTAGKVLMDFDSLTDAGSGFGCGAVIVMTKDCDPLAIMLRSIQFFEKHTCKQCSYCRDGAIWLPEIFARFVKGQTHPHEIDWTLVIADKMRNSKPICALAYSQVSVAESLVRMFSRKIEERLLKYAKGS

SEQ ID NO: 39142 - DNA, 1578 bp, Pseudomonas putida KT2440
  CDS (1)..(1578): transl_table=11
ttgccgggaggactcagcatgctgaagctgtatattccctgtgattcggtagcccgtgccgtgggtgccgaccaggttgccgaggccctgctgcgcgaggccgagcgccgccagttgccgctggacatccagcgcaccagctcgcgtgggctttactggctggagccgctgatcgagtgcgacagtgcgcaagggcgcctgggtttcggcccgattacgccacacgatgtgccatcactgcttgatgccctggcgggcgaacccggtggccactcgctggcactggggccggtcgaagaaataccctatctcaagacccagcaacgcttgctgttcgctcgcgctggcattacccgcccattgtcgctggacgactatcgcgccaacggcggtttcgcaggcctggaggccgctgtggcgctggacggtgccgaagtggttgccgcagtactcgactccggcctgcgtggccgtggtggtgcggcgttcccggccggcatcaagtggcgtaccgtgcgtgatgctggcgccgggcagaagtacgtggtgtgcaacgccgacgagggtgactcgggcacgttcgctgatcgcatgctgatggaaggcgaccccttcctgctgatcgagggcatgatcattgccggcctcgccgtgggtgccgacaagggctatatctatgtgcgctcggagtatcccgatgccatccgggtactcgaccaggccttcgccatcgcacgtgacgctggctacctgggtgctgacgtagccggcagcggccaggcgttcgacctggaggtgcgggtgggcgccggtgcctatatttgcggcgaagaaaccgcgctgctcgaatccatcgaaggcaagcgtggcatcgtccgcgccaagccaccgctgcctgcgctgcaagggcttttcggcctgccgacgctggtgcacaacgtgcttaccctggcttcggtgcccatcattctggccaagggtgcagcgttctatcgcgatttcgggatgggtcgctcgctgggcaccatgccgttccagctggccggcaacattcgccagggtggccttgtcgagcgcgcgttcggcctgaccctgcgcgagctggtggaaggctatggcggtggtacggccagtggccgcccgctgaaggccgcgcaggtcggtggcccgctcggtgcctgggtacctcccagccatttcgacaccccattggactatgaagcgtttgctgccgtgggcgcgatgctcggccacggcggtgtggtggtggccgacgatacgttgaacatggccagcatggcgcgtttcgccctgcagttctgtgccgaggagtcctgcggcaagtgcaccccgtgccgtatcggttccacccggggcatggaagtggtcgaccggctgatcgccagcagcgacatcaccgagcgccatgaccaggcgctgttgctgcgcgacctgtgcgacaccctgcagtacggttcgctgtgcgccatgggcggtatgactgcctatccggtggccagcgcgctcaagtacttccccgccgatttcgggctgaccaccacggaggccgcacagtga

SEQ ID NO: 39143 - protein, 525 aa, Pseudomonas putida KT2440
MPGGLSMLKLYIPCDSVARAVGADQVAEALLREAERRQLPLDIQRTSSRGLYWLEPLIECDSAQGRLGFGPITPHDVPSLLDALAGEPGGHSLALGPVEEIPYLKTQQRLLFARAGITRPLSLDDYRANGGFAGLEAAVALDGAEVVAAVLDSGLRGRGGAAFPAGIKWRTVRDAGAGQKYVVCNADEGDSGTFADRMLMEGDPFLLIEGMIIAGLAVGADKGYIYVRSEYPDAIRVLDQAFAIARDAGYLGADVAGSGQAFDLEVRVGAGAYICGEETALLESIEGKRGIVRAKPPLPALQGLFGLPTLVHNVLTLASVPIILAKGAAFYRDFGMGRSLGTMPFQLAGNIRQGGLVERAFGLTLRELVEGYGGGTASGRPLKAAQVGGPLGAWVPPSHFDTPLDYEAFAAVGAMLGHGGVVVADDTLNMASMARFALQFCAEESCGKCTPCRIGSTRGMEVVDRLIASSDITERHDQALLLRDLCDTLQYGSLCAMGGMTAYPVASALKYFPADFGLTTTEAAQ

SEQ ID NO: 39144 - DNA, 1362 bp, Pseudomonas putida KT2440
  CDS (1)..(1362): transl_table=11
atgaccattacttccttcggcccggccaaccgcatcgcgcgctcggccgaaacccacccgctgacctggcgcctgcgtgacgacggcgagccggtctggctggccgagtacgaatcgaagaacggctacgccgcagcccgcaaggcgctggcgcaaatgtccgccgacgacatcgtgcagagcgtcaaggactccggcctcaaaggccgtggcggtgcaggtttccccactggcgtgaagtggggcctgatgcccaaagacgaatccatgaacatccgctacctgctgtgcaacgcggacgaaatggagccgaacacctggaaggaccgcatgctgatggagcaacagccccatctgctggtcgagggcatgctgatcagcgcccgcgccctgaaggcctaccgcggctacatcttcctgcgtggcgagtacaccaccgcagcgaaaaacctcaaccgcgccatcgatgaagccaaggccgccggcctgctgggcaagaacatcctgggcagcggtttcgatttcgagctgttcgtgcacaccggtgcaggccgctacatctgcggtgaagaaaccgcgctgatcaactcgctggaaggccgccgcgccaacccgcgctccaagccgcccttccctgccgccgttggcgtgtggggcaagccgacgtgcgtgaacaacgtcgagaccctgtgcaacgtcccggccatcgtcgccaacggcaacgactggtacaagtcgctggcccgcgaaggcagcgaggaccacggcaccaagctgatgggcttctccggcaaggtgaagaacccaggcctgtgggaactgccatttggcgttaccgcccgcgaattgttcgaagactacgccggtggcatgcgcgatggcttcaagctcaagtgctggcagccaggcggcgccggtaccggcttcctgctgcctgagcacctcgatgcgcaaatgtacgccggtggcatcgccaaggtcggcacccgtatgggtactggcctggccatggcggtcgacgacagcatcaacatggtgtcgctgctgcgcaacatggaagagttctttgcccgcgaatcgtgcggctggtgcaccccatgccgtgacggcctgccgtggagcgtgaagatgctgcgcgcgctggaaaacggccaaggccgcgccgaggacatcgagacgctgctggggctggtcaacttcctcggcccgggccgtaccttctgtgctcacgcaccgggtgccgtcgagccgctgggcagtgccatcaaatacttccgctcggagttcgaggccggcgtggcgccagaaagcgctgccaccctgcgccccgacctggcgaagccgatcgtggtcggcgcataa

SEQ ID NO: 39145 - protein, 453 aa, Pseudomonas putida KT2440
MTITSFGPANRIARSAETHPLTWRLRDDGEPVWLAEYESKNGYAAARKALAQMSADDIVQSVKDSGLKGRGGAGFPTGVKWGLMPKDESMNIRYLLCNADEMEPNTWKDRMLMEQQPHLLVEGMLISARALKAYRGYIFLRGEYTTAAKNLNRAIDEAKAAGLLGKNILGSGFDFELFVHTGAGRYICGEETALINSLEGRRANPRSKPPFPAAVGVWGKPTCVNNVETLCNVPAIVANGNDWYKSLAREGSEDHGTKLMGFSGKVKNPGLWELPFGVTARELFEDYAGGMRDGFKLKCWQPGGAGTGFLLPEHLDAQMYAGGIAKVGTRMGTGLAMAVDDSINMVSLLRNMEEFFARESCGWCTPCRDGLPWSVKMLRALENGQGRAEDIETLLGLVNFLGPGRTFCAHAPGAVEPLGSAIKYFRSEFEAGVAPESAATLRPDLAKPIVVGA

SEQ ID NO: 39146 - DNA, 1704 bp, Bradyrhizobium japonicum USDA 110
  CDS (1)..(1704): transl_table=11
atgagccatgacgtgcacgaggtccgctcgttcgaacatccgggcgaggggcggaagcgagccaaggccacgcccaaggggcggcaggtcgatcccaccgccgcacacgagatcgagcagctgctcggcgatcgcccgcggcggcgcgacctcctgatcgaatatctccacctgatccaggacaaatatcaccagatctcggcggcgcatcttgcggccctcgccgacgagatgaagctcgccttcgccgaggtgttcgagaccgcgaccttctacgcgcatttcgacatcgtgaaggaaggtgagcctgatatcgcgccgctgacgatccgcgtctgcgattcgttgacctgtgagatgctcggcggtgggcagctgttgcaggatctccagcgcagcgccggtcccggtattcgcgtcgtacgcgcgccctgtgtcggattgtgcgacgcggccccggtcgcggaagtcggccatcatttcgtgcatcaggctacggccgccgaggtgctggccacggcagcgcgcggcgacgttcacgcgcacattcctgcttatgtcgactacgacgcctatgtgcaggacggcggatacaagctgctggagcggctgcgctccggggcggtcagcaaggacgatatcctcaggcttctcgaggattccagcctgcgtggtctcggcggcgcgggcttcccgacgggacgcaaatggcgcgcggtgcttggcgagcccggcccgcggctgatggcggtcaacggcgacgagggcgagccgggcaccttcaaggaccgcgtctacctcaacaacgacccgcatcgcttcatcgagggcaccctgatcggtgcgcatatcgttgaggcgtccgacgtctacatctacatccgcgacgaatatccggccgcacgcgagatcctggagcgcgagatcgcaaagctgccgccgggcggcccgacgttgcacatgcgccgcggcgccggcgcctacatctgcggcgaggaatcttcgctgctcgagagcatcgagggcaagcgcggcctgccccggcacaagccgccttatccgttccaggtcggcctgttcggactgccgacgctgatcaacaacgtcgagacgctgtggtgggtgcgcgacatcgtcgagaagggcgccgactggtggaagggccacggccgccacgagcgtcatggcctgcgcagcttctcggtctccggccgcgtgaagaatcccggcatgaagctcgcgccgtcaggcatcaccgtgcgcgagttgatcgacgaatattgcggcggcatggccgacggccacaccttctacgcttatcttccgggtggcgcctcgggcggcatcctgccggcgtcgatggacgacatcccgctcgatttcggtacgctggagaaatacggctgcttcatcggctcggccgcgatcgtgatcctgtcgcagaaggacagcgtgcgagcagcggccctgaacctgatgaaattcttcgaggacgagagctgcggccagtgcacgccgtgccgcgttggaacccagaaggcggcgctgctgatgcagaagccagtctggaaccgcgcgttgctggaagaattgagccaggcgatgcgcgatgcctcgatctgcgggctcgggcaggcggcatcgaatccgcttaccaccgtgatcaaatatttccctgacgagttcaaggaagcggccgaatga

SEQ ID NO: 39147 - protein, 567 aa, Bradyrhizobium japonicum USDA 110
MSHDVHEVRSFEHPGEGRKRAKATPKGRQVDPTAAHEIEQLLGDRPRRRDLLIEYLHLIQDKYHQISAAHLAALADEMKLAFAEVFETATFYAHFDIVKEGEPDIAPLTIRVCDSLTCEMLGGGQLLQDLQRSAGPGIRVVRAPCVGLCDAAPVAEVGHHFVHQATAAEVLATAARGDVHAHIPAYVDYDAYVQDGGYKLLERLRSGAVSKDDILRLLEDSSLRGLGGAGFPTGRKWRAVLGEPGPRLMAVNGDEGEPGTFKDRVYLNNDPHRFIEGTLIGAHIVEASDVYIYIRDEYPAAREILEREIAKLPPGGPTLHMRRGAGAYICGEESSLLESIEGKRGLPRHKPPYPFQVGLFGLPTLINNVETLWWVRDIVEKGADWWKGHGRHERHGLRSFSVSGRVKNPGMKLAPSGITVRELIDEYCGGMADGHTFYAYLPGGASGGILPASMDDIPLDFGTLEKYGCFIGSAAIVILSQKDSVRAAALNLMKFFEDESCGQCTPCRVGTQKAALLMQKPVWNRALLEELSQAMRDASICGLGQAASNPLTTVIKYFPDEFKEAAE

SEQ ID NO: 39148 - DNA, 1557 bp, Bradyrhizobium japonicum USDA 110
  CDS (1)..(1557): transl_table=11
atgagcatgcgtctcttcgtctcacgcgacgcgggtgcgttggccgtcggcgccgacgaggttgcgctggcgctggaacaggctgcggccaagcgcggcgtcgccgtcgagatcatcaggaccggctcgcggggcatgtactggctggagccgctggtcgaggtcgcgacgccgcagggccggatcgcgttcggcccggtcaccgagaccgatgtaccctccctgctcgacgccctcgccagcaatacgccgcatctgctgcggttaggggcgaccgacgagattccctggctgaagcgccagacccgcctcaccttcgcccgctgcggcgtgatcgatccgcgctcgctcgaggactaccgcgcccacggtggctacaaagggctggagcgcgcgctgtcgctcggctcggaggccatcctcaccgaggtcaccgcatcgggcctgcgcggccgcggcggcgcgggctttccgaccggcatcaaatggaagacggttgcccaggccaaggccgaccgcaagttcatcgtctgcaacgccgacgaaggcgacagcggtaccttcgccgaccgcatgatcatggaaggcgatcccttcctggtgatcgagggcatgaccaccgccggcatcaccgtcggcgcgaccaagggctacatctacattcgcagcgaatatccgcacgcggtcgaggcgatgaaggccgcgatccaggctgcgaagcgcggcggttatctcggcgacaagatcggcggctcgacctacagcttcgacctcgaagtccgcgtcggcgccggagcctatgtctgcggcgaggaaacgtcgctgctggagagcctcgaaggccgccgcggcatcgtgcgcgccaagccgcccctgccggcccatcacggcctgttcggcaagccgaccgtgatcaacaacgtgctgtcgttcgcggcgatccccttcatcctcgccgaaggcgccaaggcctatgccgatttcggcatgggccgctcgcgcggcacgatgccgatccagctcgccggcaatatccgccatggcggcctgtacgagaccgccttcggcgtgacgctgggcgagcttgtcgacgacatcggcggcggcacgttcacgggccgcccggtccgtgcggtgcaggtcggcgggccccttggcgcttacttcccccgcgcgctgttcgacacgccgttcgactacgaggcctttgctgcgcgtgacgggctgatcggccacggcggcatcgtcgtgttcgacgacagcgtcgacatgcgcaggcaggcgcgcttcgcgatggaattctgcgccgtcgaatcctgcggcaagtgcacgccctgccggatcggctcgacccgcggcgtcgagaccatcgagaagatcatcaacggcgaacgcgtcagcgaaaacctcgcgctcgtcgaagacctctgcaacaccatgaaattcggctcgctctgcgcgctcggcggcttcacgccctatcctgtgctcagcgcattgaagcacttccgggaggacttcgtcccggcgccgaccacgcttcaggccgcggaatag

SEQ ID NO: 39149 - protein, 518 aa, Bradyrhizobium japonicum USDA 110
MSMRLFVSRDAGALAVGADEVALALEQAAAKRGVAVEIIRTGSRGMYWLEPLVEVATPQGRIAFGPVTETDVPSLLDALASNTPHLLRLGATDEIPWLKRQTRLTFARCGVIDPRSLEDYRAHGGYKGLERALSLGSEAILTEVTASGLRGRGGAGFPTGIKWKTVAQAKADRKFIVCNADEGDSGTFADRMIMEGDPFLVIEGMTTAGITVGATKGYIYIRSEYPHAVEAMKAAIQAAKRGGYLGDKIGGSTYSFDLEVRVGAGAYVCGEETSLLESLEGRRGIVRAKPPLPAHHGLFGKPTVINNVLSFAAIPFILAEGAKAYADFGMGRSRGTMPIQLAGNIRHGGLYETAFGVTLGELVDDIGGGTFTGRPVRAVQVGGPLGAYFPRALFDTPFDYEAFAARDGLIGHGGIVVFDDSVDMRRQARFAMEFCAVESCGKCTPCRIGSTRGVETIEKIINGERVSENLALVEDLCNTMKFGSLCALGGFTPYPVLSALKHFREDFVPAPTTLQAAE

SEQ ID NO: 39150 - DNA, 1326 bp, Bradyrhizobium japonicum USDA 110
  CDS (1)..(1326): transl_table=11
atgctcgaggacaaggaccgcatcttcaagaacctctacggcctccatgactgggggctcgagggtgcgcggcgccgcggcgcctgggatggtacgaagaacatcatcgacaagggccgcgactggatcatcaacgagatgaaggcctcgggcctgcgcggccgcggcggcgccggcttcccgaccggcctgaaatggtccttcatgccgaaggaatcgaccgacggccggccgagctatctcgtcgtcaacgccgacgaatccgagcccggcacctgcaaggatcgcgagatcatgcggcacgacccgcatctcctgatcgagggctgcctgatcgccagctgcgcgatgaacgcgcatgcctgctacatctatgtccgcggcgagttcatccgcgagcgcgagcatctccaggccgcgatcgaccaggcctacgaggccaagctggtcggcaaggacaatgtcaacggatggccgttcgacatctacgtcgcgcacggcgccggcgcctatatctgcggtgaggagaccgcgctgctcgaaagcctcgagggcaagaagggccagccgcgcctgaagccgccgttcccggcgaatgtcggcctgttcggctgcccgaccaccgtcaacaacgtcgagtcgatcgcggtggcgccggatatcctgcgccgtggcgcggcgtggttcgccggcatcggccgtccgaacaatgtcggcaccaagctgttctgcatctccggccatgtcgagcggccctgcaacgtcgaagaagccatgggcattccgttccgcgagctgatcgagaagcattgcggcggcatccgcggcggctgggacaacctcaaggccgtgatccccggcggctcgtcggtgcgcatggtgccggccgagcagatcatcgatacgccgatggatttcgacagcctgagcaagctgcgctcgggtctcggcaccgcggccgtgatcgtgatggacaagtccaccgatttgatccgcgccatcgcccgcatctcgtacttctacaagcatgagagctgtggccagtgcacgccgtgccgcgagggcacggggtggatgtggcgcgtcctgacccgcatggccgaaggccgcgcccacaagcgcgagatcgacatgctgctggaggtcaccaagcaggtcgaaggccacaccatctgcgcgctcggcgacgcagccgcctggccgatccagggcctgatcgcgcatttccgtcatgagatcgaagcgcgcatcgaccagtattcgcataagtccgacatcgacgatatcggcgtccgcgatcccgtgaacatggtcgcggcggagtaa

SEQ ID NO: 39151 - protein, 441 aa, Bradyrhizobium japonicum USDA 110
MLEDKDRIFKNLYGLHDWGLEGARRRGAWDGTKNIIDKGRDWIINEMKASGLRGRGGAGFPTGLKWSFMPKESTDGRPSYLVVNADESEPGTCKDREIMRHDPHLLIEGCLIASCAMNAHACYIYVRGEFIREREHLQAAIDQAYEAKLVGKDNVNGWPFDIYVAHGAGAYICGEETALLESLEGKKGQPRLKPPFPANVGLFGCPTTVNNVESIAVAPDILRRGAAWFAGIGRPNNVGTKLFCISGHVERPCNVEEAMGIPFRELIEKHCGGIRGGWDNLKAVIPGGSSVRMVPAEQIIDTPMDFDSLSKLRSGLGTAAVIVMDKSTDLIRAIARISYFYKHESCGQCTPCREGTGWMWRVLTRMAEGRAHKREIDMLLEVTKQVEGHTICALGDAAAWPIQGLIAHFRHEIEARIDQYSHKSDIDDIGVRDPVNMVAAE

SEQ ID NO: 39152 - DNA, 1395 bp, Bos taurus
  CDS (1)..(1395)
atgctggcggcacggcggctgctcggcgggtcgctccccgcgcgggtgtctgtgcgattcagcggcgacacgacagcgcccaagaaaacctcatttggctcgctgaaggacgaagaccggatcttcaccaacctgtatggccgccatgactggaggcttaaaggtgcccagagtcgaggtgactggtacaagacgaaggagattctgctgaaggggcctgactggatcctgggtgaggtcaagacgtcgggcttgcggggccgtggaggtgctggcttccccactggccttaaatggagcttcatgaataagccctcagatggcaggcccaagtatctggtggtgaacgcggatgagggggagccaggcacgtgcaaggaccgagagatcatccgccacgacccccacaagctggtggaaggctgcctagtagggggccgggccatgggcgctcgtgccgcctacatctacatccgcggggagttctacaacgaggcctccaatctgcaggtagccatccgagaggcctacgaggctggtctgattggcaagaatgcctgcggctccggctacgatttcgacgtgtttgtggtgcgtggggccggggcctacatctgcggggaggagacggcgctcatcgagtccatcgagggcaaacagggcaagccccgcctgaagccgcctttccctgcagacgtgggagtgtttggctgccctacaactgtggccaatgtggagactgtggccgtgtcccctaccatctgccgccgtgggggtgcctggtttgccagcttcggccgagagcgcaactcaggcaccaaactgttcaacatctctggccacgtcaacaacccctgcaccgtggaggaggagatgtctgtgccgctgaaggagctgattgaaaagcacgccgggggtgtcacgggtggctgggacaacctccttgctgtgatccctggcggctcgtccaccccgctgatccccaagtccgtgtgtgagacggtgctgatggacttcgacgcgctgatccaggcgcagacggggctgggcacggctgccgtgatcgtcatggaccgctcgacggacattgtgaaagccatcgcccgcctcatcgagttctacaagcatgagagctgtggccagtgtaccccgtgccgcgagggtgtggactggatgaacaaggtgatggcccgctttgtgaggggagatgcccggccggcagagatcgactctctgtgtgagatcagcaagcagatcgagggccacaccatctgcgccctgggcgatggggctgcgtggcccgtgcagggcctgatccgacacttccggccggagctcgaggagcggatgcagcagtttgcccagcagcaccaggccaggcaagcagctttctga

SEQ ID NO: 39153 - protein, 464 aa, Bos taurus
MLAARRLLGGSLPARVSVRFSGDTTAPKKTSFGSLKDEDRIFTNLYGRHDWRLKGAQSRGDWYKTKEILLKGPDWILGEVKTSGLRGRGGAGFPTGLKWSFMNKPSDGRPKYLVVNADEGEPGTCKDREIIRHDPHKLVEGCLVGGRAMGARAAYIYIRGEFYNEASNLQVAIREAYEAGLIGKNACGSGYDFDVFVVRGAGAYICGEETALIESIEGKQGKPRLKPPFPADVGVFGCPTTVANVETVAVSPTICRRGGAWFASFGRERNSGTKLFNISGHVNNPCTVEEEMSVPLKELIEKHAGGVTGGWDNLLAVIPGGSSTPLIPKSVCETVLMDFDALIQAQTGLGTAAVIVMDRSTDIVKAIARLIEFYKHESCGQCTPCREGVDWMNKVMARFVRGDARPAEIDSLCEISKQIEGHTICALGDGAAWPVQGLIRHFRPELEERMQQFAQQHQARQAAF

SEQ ID NO: 39154 - DNA, 1335 bp, Xylella fastidiosa Temecula1
  CDS (1)..(1335): transl_table=11
atgggacatcctcacgtatccaagggaccggttggcccggcacctcagccgcaccaagtgatctataccacgttgcattatgaaattccttggtcgtatgaaagctatttgaagaccggcggctacactgcgttacgcaagatttttgaggaaaagatccctccggagcaggtcatagacatggtcaagcagtcgaatctgcggggtcgtggtggtgcaggttttccgacgggtctcaaatggtccttcatgccgaagggcaccatgcaaaaatatattctgtgtaactcggacgagtccgaaccgggaacctgtaaagatcgtgacatcctgcgctataacccgcattccgtggtggaggggatggcgattgcatgttatgccactggttccactgtggcttacaactatttgcgtggggagttccaccacgagccgttcgaacattttgaacaggcgctggccgatgcttacacacatggttggcttggtaagagcgttttgggaagtggcgtagatatcgatatctatgcggtgcttggtgctggtgcctacatctgtggtgaagagactgcgctcatggagtctctggaaggcaagaaggggcagcctcgctacaagcccccctttcctgccaattttggcttgtacggcaagccatcaacgatcaacaacactgagacgtatgccgcagtgccagccattattcgcaatggtccggagtggtttttgtctctgagcaagactaaaaacggtggctctaagatcttctccgtctcggggtgcgtgcagcaagggggtaacttcgaggtacccttaggcaccacctttgatgaattgctggagatggctggtggcctgcggccaggtcgcgctctgaaagctgcaattccggggggagtatccatgccggtattgaaagccgagcagttgcagggccttcagatggactacgacacactgcgtgtgctgggtagcggtttaggctcgggggggattgttgtgcttgatgacagtgtctgttgtgtccgttttgcctgccgcatctcgcagttttttcataaggaatcgtgtggccagtgtactccgtgccgtgaggggaccggttggatgcaccgcgttttggagcgtatcgttgctggccaggccacgatggaggatctgcaccagcttaaagttgtggcggggcagattgaggggcataccatttgtgcgtttggtgaagctgcagcttggccaatccaagggttcctgcgccaattctgggatgaatttgagtactacattgttcatggtcggtcgattgtggatgacaaggcgagagtggctgcatga

SEQ ID NO: 39155 - protein, 444 aa, Xylella fastidiosa Temecula1
MGHPHVSKGPVGPAPQPHQVIYTTLHYEIPWSYESYLKTGGYTALRKIFEEKIPPEQVIDMVKQSNLRGRGGAGFPTGLKWSFMPKGTMQKYILCNSDESEPGTCKDRDILRYNPHSVVEGMAIACYATGSTVAYNYLRGEFHHEPFEHFEQALADAYTHGWLGKSVLGSGVDIDIYAVLGAGAYICGEETALMESLEGKKGQPRYKPPFPANFGLYGKPSTINNTETYAAVPAIIRNGPEWFLSLSKTKNGGSKIFSVSGCVQQGGNFEVPLGTTFDELLEMAGGLRPGRALKAAIPGGVSMPVLKAEQLQGLQMDYDTLRVLGSGLGSGGIVVLDDSVCCVRFACRISQFFHKESCGQCTPCREGTGWMHRVLERIVAGQATMEDLHQLKVVAGQIEGHTICAFGEAAAWPIQGFLRQFWDEFEYYIVHGRSIVDDKARVAA

SEQ ID NO: 39156 - DNA, 1359 bp, Pseudomonas syringae pv. tomato str. DC3000
  CDS (1)..(1359): transl_table=11
atgaccatcacgtccttcggccctgccaaccgcattgcgcgcacggcagaaacccatccgctgacctggcgtttgcgcgatgacggcgagccggtctggctcgacgagtatcagaccaaagacggctatgcggcggcgcgcaaggcgctgacccagcaggcccctgacgatatcgtccagtcggtcaaggactccggcctcaagggtcgcggcggtgcgggcttccccaccggcgtgaagtggggcctgatgcccaaagacgaatccatgaacatccgctacctgctatgcaacgcggacgagatggagcccaacacctggaaagaccgcatgttgatggagcaactgccccatctgctgattgagggcatgctgatcagtgcccgcgccctgaaagcctatcgcggctatatcttcctgcgtggcgaatacgtgacggcagcgaagcacttgaaccgtgccgtggctgaagccaaggccgccggtttgctgggcaagaacattcttggcaccggcttcgatttcgagctgttcgtgcacaccggcgccggtcgttacatctgcggtgaagaaaccgcactgatcaactcgctggaaggtcgccgcgccaacccccgctccaagccgcccttccctgctgcggtaggcgtgtggggcaagccgacctgtgtcaacaacgtcgaaaccctgtgcaacgtgccggccatcgtcaacaacggcaacgactggtacaagtcgctggctcgcgaaggcagtgaagatcacggcaccaagctgatgggcttctccggcaaggtgaaaaaccctggcctgtgggagctgccgtttggtgttcaggcccgcgaactgttcgaagactacgccggtggcatgcgcgacggcttcacactcaagtgctggcagcccggtggtgcagggactggtttcctgttgccggagcacctggacgcgcagatgtacgcaggcggtatcgccaaggttggcacccggatgggcacaggcctggcaatggccgtcgacgactcggtcaacatggtatcgctgctgcgcaacatggaagagttcttcgctcaggagtcctgtggcttctgcaccccatgtcgcgatggcctgccatggagcgtgaaaatactgcgtgccatcgagaacggtcacggccagccgggtgatatcgaaaccctgctcggcctagtcaacttcctcggccctggcaagacgttctgtgctcatgcaccaggtgccgttgaaccgttgggcagtgcgatcaagtatttccgttcggagttcgaagccggtattgcgcccgccagcgcagccatgcttgttccgggtaaaagtccgaccgtggtcggcgcataa

SEQ ID NO: 39157 - protein, 452 aa, Pseudomonas syringae pv. tomato str. DC3000
MTITSFGPANRIARTAETHPLTWRLRDDGEPVWLDEYQTKDGYAAARKALTQQAPDDIVQSVKDSGLKGRGGAGFPTGVKWGLMPKDESMNIRYLLCNADEMEPNTWKDRMLMEQLPHLLIEGMLISARALKAYRGYIFLRGEYVTAAKHLNRAVAEAKAAGLLGKNILGTGFDFELFVHTGAGRYICGEETALINSLEGRRANPRSKPPFPAAVGVWGKPTCVNNVETLCNVPAIVNNGNDWYKSLAREGSEDHGTKLMGFSGKVKNPGLWELPFGVQARELFEDYAGGMRDGFTLKCWQPGGAGTGFLLPEHLDAQMYAGGIAKVGTRMGTGLAMAVDDSVNMVSLLRNMEEFFAQESCGFCTPCRDGLPWSVKILRAIENGHGQPGDIETLLGLVNFLGPGKTFCAHAPGAVEPLGSAIKYFRSEFEAGIAPASAAMLVPGKSPTVVGA

SEQ ID NO: 39158 - DNA, 1908 bp, Bacteroides thetaiotaomicron VPI-5482
  CDS (1)..(1908): transl_table=11
atgaaaatactatctatccatgatttgcaaataatcaggaagagagcggagcaccatctttcattgcgcgaagaaagtaatgaaaaggtttccgaaaaatgttgcgggctggcgtccggaacaacacacctccagattcttatttgcggaggtaccggttgtaaagcctcttccagtcagggcatcactgaaaatcttcaaaaagccatcgaaagaaacgggattaccgacaaagtagacgtcatcacagtaggctgcttcggcttctgcgaaaagggccccatcgtaaagatcattcctgacaatacgttctatacccaagtcactcccgaagatgcggaggaaatcatcagcgaacacatcatcggaggacgaagaatcgaacggctgctctacatagacccgaagaccgaacaaactgtcagtgactccaaacacatggacttctaccggaaacaactccgcatcgccttgcgcaactgcggattcatcgactccgaaaatatagaagaatacatcgcccgtgaaggatacttcgcactggccgactgccttctcaacaaacagcctgccgacgtcatcgacatcatcaaacgctccggactgcggggacgtggcggtggcggtttccccaccggcttgaaatgggaatttgccagtaagcaggtatcgaacgtaaagtacgttgtctgcaacgccgacgaaggcgaccccggcgccttcatggaccgctccatcatggaaggcgacccgcactctattgtagaagcgatgtgcatctgcggttactccatcggttcctccaaaggactggtctacatccgcgccgaatatccgctggccatcaaccgcctcaaaaaagcgattgagcaagcccgtgaatacggattactgggggaccacatcctggggacagatttcagcttcgacatagagatccgttacggagcaggcgcattcgtctgcggcgaggaaaccgccctcatccactcgatggaaggaaaacggggagagccgaccctgaaacctcctttccccgccgaatccggttatctgggcaaaccgaccaatgtgaacaatgtggaaaccctcgccaatattcccattatcctgaccaaaggcgccgaatggttcgcctccatcggaacagaacgctccaaaggcaccaaagtcttcgctcttgccggaaagatcaacaatgtcggactgatcgaagtaccgatgggaactaccctgcgggaagtaatctacgaaatcggcggaggcatcaagggaggaaagaaattcaaagccgtacagacaggcggtccgtcagggggctgtctgacggagaaacatctggatactcccattgacttcgacaacctgctggcagccggttccatgatgggatcgggaggcatgatcgtgatggacgaagatgactgtatggtatccgtcgcccgtttctatctcgactttaccgtcgaagaatcctgcggtaaatgtaccccatgccgtatcggcaacaaacgcctgctggaactgctgaacaagataacggaaggacggggcacggaaaaagacctggacacgcttgccaccctcggacgggtgataaaagacacggcactctgcggactgggacagacgtccccgaatccggtgttgtctaccctcgacaacttccgtgacgaatatctggaacatgtcagagacaagacctgccgcgccaaacaatgcaagtccctgctgacctataccattaatccggaactttgtatcggttgccacctgtgtgccaagaattgtccggcggatgccatcagcggcttggtacgcaaacctcatgtcatccaccccgagaaatgtatcaagtgcggcatgtgtatggcacgctgtaaattcaaagctattcttgtctgttaa

SEQ ID NO: 39159 - protein, 635 aa, Bacteroides thetaiotaomicron VPI-5482
MKILSIHDLQIIRKRAEHHLSLREESNEKVSEKCCGLASGTTHLQILICGGTGCKASSSQGITENLQKAIERNGITDKVDVITVGCFGFCEKGPIVKIIPDNTFYTQVTPEDAEEIISEHIIGGRRIERLLYIDPKTEQTVSDSKHMDFYRKQLRIALRNCGFIDSENIEEYIAREGYFALADCLLNKQPADVIDIIKRSGLRGRGGGGFPTGLKWEFASKQVSNVKYVVCNADEGDPGAFMDRSIMEGDPHSIVEAMCICGYSIGSSKGLVYIRAEYPLAINRLKKAIEQAREYGLLGDHILGTDFSFDIEIRYGAGAFVCGEETALIHSMEGKRGEPTLKPPFPAESGYLGKPTNVNNVETLANIPIILTKGAEWFASIGTERSKGTKVFALAGKINNVGLIEVPMGTTLREVIYEIGGGIKGGKKFKAVQTGGPSGGCLTEKHLDTPIDFDNLLAAGSMMGSGGMIVMDEDDCMVSVARFYLDFTVEESCGKCTPCRIGNKRLLELLNKITEGRGTEKDLDTLATLGRVIKDTALCGLGQTSPNPVLSTLDNFRDEYLEHVRDKTCRAKQCKSLLTYTINPELCIGCHLCAKNCPADAISGLVRKPHVIHPEKCIKCGMCMARCKFKAILVC

SEQ ID NO: 39160 - DNA, 1254 bp, Enterococcus faecalis V583
  CDS (1)..(1254): transl_table=11
atgcaatctgcgaccgatgttgctgaatattgtaaatacgatggatttgatggtttaaaaagagcaatttcactatcggatgaagaaattttaaacgaactggatattgcgcacttaagaggtcgcggtggagcagcctatcctttaggaaaaaaatggcgccatctttatcatgcaaaaggaaccacaaagtacattgtttgtaatgctgatgaaggcgaaccagggacctttaaggataaagtacttttatctgaagatccattgagtgtgattgaaggaatgattattgctggctatttattttcagcaaaagcaggttatatttatatgcgaggagaatatcgcagaatccaaaaaacatttcaagaagcactcgataatgcacgacaagctggctttttaggggaaaacattttaggaattgaaggattcaattatgatattacgattatttctggtgctggcgcctatatttgtggggaaaattcagcacttttaaattcaattgaaggaaaaacggggcggccgcgtgtcaaaccaccacacttagcagatgttggtttatatttgcaaccaacattagtaaataatgttgaatcatttgcaagtgttcctgtaattttaagagaaggtggacaagcctttttagagatgggtactgccgatggtggcggaacaaagctaatttgtttgtctggacatattaaaaatcggggcttatacgaggtcaaccttggaacaccattagaagaaataatttatggcgagcaatacggcggaggctctgcaactggtcgagcattgaaatttattcacttcggtggacaatccggtccaattggtgctgtcgcaacgttaagggattgtttgtattcctacgaagatttatgggcccatgacttatctgtcggctctggtgcaattgtagtaatggatgattcagttaatgttgtggactatttagtacacgtggcggccttttttgctcatgagtcctgtggtaaatgcaccccttgtcgattgggaacaactaggattttggaattattgagtaaattcaatcggaacgaggcaacagctagtgatttgccgcgattggaaaagatgctcacacatgtcacgcgattatcagcttgtggtttgggccaatccgtcgcaaatccaatgaagagtgcattggctttgtttccagaagaatttgaaacgactgctgaaacagaaatctatgccaccagcaaaggaggttggtaa

SEQ ID NO: 39161 - protein, 417 aa, Enterococcus faecalis V583
MQSATDVAEYCKYDGFDGLKRAISLSDEEILNELDIAHLRGRGGAAYPLGKKWRHLYHAKGTTKYIVCNADEGEPGTFKDKVLLSEDPLSVIEGMIIAGYLFSAKAGYIYMRGEYRRIQKTFQEALDNARQAGFLGENILGIEGFNYDITIISGAGAYICGENSALLNSIEGKTGRPRVKPPHLADVGLYLQPTLVNNVESFASVPVILREGGQAFLEMGTADGGGTKLICLSGHIKNRGLYEVNLGTPLEEIIYGEQYGGGSATGRALKFIHFGGQSGPIGAVATLRDCLYSYEDLWAHDLSVGSGAIVVMDDSVNVVDYLVHVAAFFAHESCGKCTPCRLGTTRILELLSKFNRNEATASDLPRLEKMLTHVTRLSACGLGQSVANPMKSALALFPEEFETTAETEIYATSKGGW

SEQ ID NO: 39162 - DNA, 1269 bp, Coxiella burnetii RSA 493
  CDS (1)..(1269): transl_table=11
atgctgactaatgcggtttgttatcgaacattgcatttagaaaaaccgtggacgctagaatcctacgaaagcgttggtggttatcaagtgttacgaaaaattttaaaagaaaaaacgccgccggaaaatatcattaatgaaattaaagaatcctcattgcgtggtcgcggcggcgctggatttcccaccggtttaaaatggagttttattccgcgcgataaacctggcgaaaaatacgtaatttgtaattccgatgaaagtgagccaggcacttttaaagaccgcgatattttacgatttaacccccaccaagtattagaaggcatcgctattgcctgttacacgcttggcgcgaccgtcggctataattttttgcgcggtgaattttgggagccgtttgatcgttgcgaacaagccttagcacaagcgcgcgaggcggggttgattggaaaaaatgttttaaactccggtgtggatattgaaatatttaatcattttagcgccggtgcctatatttgcggcgaagaaaccgcactcatgaattcattggaaggcaagcgcggctggccacgatttaagccgccttttccggctaattttgggttatatgaacgccccagtaatattaataataccgaaacgtatgcctccgtgccggttattttagaaaaaggtgggaaatggtttgcggatttaggtcctccaaaaaatggcggtacaaaaatattttccgtcagcggtcatgtggcaaaaccgggtaattatgaagttcccttgggaattcctttcgcggatttattagcattggctggcggaatgcgggaggggagcgagttaaaggctgtgattcccggtggaagttcgatgcccgtattgcctgccgaggtaatgatgaaagcgatcatgagctttgacggtttggttgaagcaggttcgatgctaggttctggcggcgtgatggtgatggatcaatcaacgtgcatggtgaaagtccttgagcgcatttcaaaattttatatgcacgaatcgtgcggccaatgcacgccttgccgtgaaggaacaggatggctttatcgattagttcatcgaattgaaaaaggcgaagggacgaaacgcgacatagaacagttaagcagagtcgcaaagggcatcgaaggccgcaccatttgtgcgtttggcgaggcggctgcatggcccgtcagcggaatgttgaaacatttttacgatgaatttgaataccatgtaacgcatgggaaatgtatggtgtaa

SEQ ID NO: 39163 - protein, 422 aa, Coxiella burnetii RSA 493
MLTNAVCYRTLHLEKPWTLESYESVGGYQVLRKILKEKTPPENIINEIKESSLRGRGGAGFPTGLKWSFIPRDKPGEKYVICNSDESEPGTFKDRDILRFNPHQVLEGIAIACYTLGATVGYNFLRGEFWEPFDRCEQALAQAREAGLIGKNVLNSGVDIEIFNHFSAGAYICGEETALMNSLEGKRGWPRFKPPFPANFGLYERPSNINNTETYASVPVILEKGGKWFADLGPPKNGGTKIFSVSGHVAKPGNYEVPLGIPFADLLALAGGMREGSELKAVIPGGSSMPVLPAEVMMKAIMSFDGLVEAGSMLGSGGVMVMDQSTCMVKVLERISKFYMHESCGQCTPCREGTGWLYRLVHRIEKGEGTKRDIEQLSRVAKGIEGRTICAFGEAAAWPVSGMLKHFYDEFEYHVTHGKCMV

SEQ ID NO: 39164 - DNA, 1824 bp, Streptomyces avermitilis MA-4680
  CDS (1)..(1824): transl_table=11
atggatctgcacttcggtgacagcaaaccgtcggacgaggagcgggcggccgtcgacgcgctgctcggtcccccggagtcctcgtgggagggcgccgaccggtccgacgccgacctcaggtgggcccgcggcgggcgcgcggcccgggaccgccgcgacctgctgctgccggggctgcacgcggtcaacgaccggatcggctggatcagcgagggcgccctcgactacctgtgccggcggctgacggtgccgcccgcggaggcgtacggcgtcgccacgttctactcgatgttcgcggtgaaaccgcgccccgcgaccgtcctgcatgtgtgcacggacctcgcgtgcgcgtccgccggggcggctgagctgtgcgccggtgtcgaggcccggctcgggcccggcagcggcgtcggagtggaacgcggcccctgtctgggcctgtgcgagcgggctccggccgcactggcggtcagggccggggatccggtgcgtacggcggtgtcggcgcccgcgaccgtcgaggccgcggtgctggcggcgagcgcgcccgactcggcgcccgaggagccgtccgccgccctcgcggtcccccaggcgggtcaggacgggctggttctcctgcgccgcgtcggcgtggtcgaccccgcgtcgctcgacgactaccgggcgcacggcggttacgcggcgctgcggcgggccttcgagctcgggccggccgaggtcatccgggaggtcaccgacgcgggcctggtcgggcgcggcggcgccgccttccccaccggccgcaaatggcaggcgacggcgtcccggcccgaccgtccgcaccacctcgtctgcaacgccgacgaatccgagcccggcaccttcaaggaccgggtgatcatggagggcgacccgtacgcgctcgtcgagtcgatgacgatcgccgcgtacgccgtcggggcgcaccagggctatctgtatctgcgcggggagtacccgcgcgccctggagcgcatgagccacgccatcgagcaggcacgcgcgcgtgggctgctcggcgacgacgtcctcggtcagggctacgccttcgacatcgagatccggcgcggcgcgggcgcgtacatctgcggtgaggagaccgccctcttcaactcgatcgaggggtaccggggggagccgcggtcgaagccgcccttccccgtggagaagggcttgttcggccggcccactgccgagaacaatgtcgagacgctggtcaacgtgttgcccgtcctcacgatgggggcgcaggcgtacgcggcgatcggcacggcgaagtccaccgggcccaagctcttctgcgtgtcgggcagcgtggaccggcccggcgtctacgagctgccgttcggcgcgacgctgggcgagctgctggagctggccggagtgcgggaacggctgcgcgcggtcctgctcggcggcgcggccggcggcttcgtacggcccgacgaacgggacatcccgctcaccttcgaaggcacccgtcaggcgggcaccacgctcggctcgggagtcgtcatggccttcgacgacaccgtcccgctcccccggctcctcctgaggatcgccgagttcttccgcgacgagtcgtgcggccagtgcgtgccgtgccgggtcgggaccgtgcgccaggaggaggcgctgcaccggatcgtggcgcggacgggggcggcggccgccgacgacatcgccctgctcagagaggtgggccgggcgatgcgggacgcctcgatctgcggtctgggccagagcgcgtggaacgccgtggaatctgccatcgaccgtctgggggcgtacgaatga

SEQ ID NO: 39165 - protein, 607 aa, Streptomyces avermitilis MA-4680
MDLHFGDSKPSDEERAAVDALLGPPESSWEGADRSDADLRWARGGRAARDRRDLLLPGLHAVNDRIGWISEGALDYLCRRLTVPPAEAYGVATFYSMFAVKPRPATVLHVCTDLACASAGAAELCAGVEARLGPGSGVGVERGPCLGLCERAPAALAVRAGDPVRTAVSAPATVEAAVLAASAPDSAPEEPSAALAVPQAGQDGLVLLRRVGVVDPASLDDYRAHGGYAALRRAFELGPAEVIREVTDAGLVGRGGAAFPTGRKWQATASRPDRPHHLVCNADESEPGTFKDRVIMEGDPYALVESMTIAAYAVGAHQGYLYLRGEYPRALERMSHAIEQARARGLLGDDVLGQGYAFDIEIRRGAGAYICGEETALFNSIEGYRGEPRSKPPFPVEKGLFGRPTAENNVETLVNVLPVLTMGAQAYAAIGTAKSTGPKLFCVSGSVDRPGVYELPFGATLGELLELAGVRERLRAVLLGGAAGGFVRPDERDIPLTFEGTRQAGTTLGSGVVMAFDDTVPLPRLLLRIAEFFRDESCGQCVPCRVGTVRQEEALHRIVARTGAAAADDIALLREVGRAMRDASICGLGQSAWNAVESAIDRLGAYE

SEQ ID NO: 39166 - DNA, 1350 bp, Streptomyces avermitilis MA-4680
  CDS (1)..(1350): transl_table=11
gtgatgaccttggcacccgagatcaacgagaccagtcccgagaagctgctcgcacccgtgctgtccgccttctgggacgaggagaagtcctggacgctggacgtctaccgaaggcacgaggggtacgagggcctgcgcaaggcgctcgccatgtcgccggacgacctcatcgcgtacgtcaaggactccggtctgcgcggccgcggcggtgccggattccccacgggaatgaaatggcagttcattcctcagggcgatggaaagccgcactatctagttgtcaacgccgacgaatcggaaccgggaacctgtaaggacatcccgctcctcttcgcgaacccgcatagcctcatcgagggcatggtgatcgcgtgctatgccatccggtcgtcgcatgccttcatctatctgcgcggtgaagtggtccccgtgttgcggcggttgcacgaggccgtacgagaggcctacgcggcgggctacctcggcaagaacatcctgggcagtggcctcgacctcgaaatcaccgtgcacgcgggcgcgggcgcgtacatctgcggtgaggagaccgcactgctcgactcgctcgaaggccgccgtggtcaaccgcggctccgtcccccctttcctgctgtcgcgggcctctatgcgtgcccgactgttgtaaataacgtcgagtcgatcgcgtcagttcccgcaattctgcacaagggcaaggaatggttcaggtcgatgggcagcgagaagtccccgggcttcacgctctactcgctcagcggccacgtcgccagccccggccagtacgaggccccgctcggcatcacactccgccaactcctcgacatgagcggcgggatgcggccgggccaccggctgaagttctggacgccgggcggctcctcgacgccgatgttcaccgacgagcacctcgacgtgccccttgactacgagggcgtgggcgcggccggttccatgctcggcaccaaggcgctccagtgcttcgacgagaccacctgcgtcgtccgggcggtcacccgctggaccgagttctacgcccacgagtcctgcggcaagtgcacgccgtgccgtgaagggacgtactggctcgtgcagttgctgcgcgacatcgaggccggcaagggcgtcatgaccgacctcgacaagctgaacgacatcgccgacaacatcaacggcaagtccttctgcgccctcggcgacggcgccgcctcgccgatcttctcctcgctcaagtacttccgtgaggagtacgagcagcacatcacgggccgcggctgcccctttgacccggccaggtcgacggcctgggccgaccgcacggaggtgaacgcatga

SEQ ID NO: 39167 - protein, 449 aa, Streptomyces avermitilis MA-4680
MMTLAPEINETSPEKLLAPVLSAFWDEEKSWTLDVYRRHEGYEGLRKALAMSPDDLIAYVKDSGLRGRGGAGFPTGMKWQFIPQGDGKPHYLVVNADESEPGTCKDIPLLFANPHSLIEGMVIACYAIRSSHAFIYLRGEVVPVLRRLHEAVREAYAAGYLGKNILGSGLDLEITVHAGAGAYICGEETALLDSLEGRRGQPRLRPPFPAVAGLYACPTVVNNVESIASVPAILHKGKEWFRSMGSEKSPGFTLYSLSGHVASPGQYEAPLGITLRQLLDMSGGMRPGHRLKFWTPGGSSTPMFTDEHLDVPLDYEGVGAAGSMLGTKALQCFDETTCVVRAVTRWTEFYAHESCGKCTPCREGTYWLVQLLRDIEAGKGVMTDLDKLNDIADNINGKSFCALGDGAASPIFSSLKYFREEYEQHITGRGCPFDPARSTAWADRTEVNA

SEQ ID NO: 39168 - DNA, 1278 bp, Nitrosomonas europaea ATCC 19718
  CDS (1)..(1278): transl_table=11
atgacccagcctactcaagtcatcatggcaggtgtggatactgcggattcggataattggcggctaaagaattatcttaagcgtgatggttatgccgcgttgaaaaaaattctttcacagaaaatttctcccgaggcagtaattgatgaagtcaagaaatctgcactgcgcggccgcggtggcgcgggctttccgacgggactgaaatggagtttcatgccgaaacagtatacgggtgagaagtatctcgtctgtaattctgatgagggtgagccgggtacattcaaggaccgtgatatcatgcgttacaatccccatatcctgatcgagggtatgttgattgccgcctatgcgatgggtatccgtaccggctacaactatgtacacggggaaatatgggatgtttacgagcgaatggaggaggccgtcgaggaggcgaatgtcgcaggtttcctgggggataacatcttgggttccggctttagtttccgactttataaccatcatggatacggtgcctatatttgtggagaagagaccgccctcctggaatccatagaaggaaaaaagggtcagccacgctttaagccgccatttcctgccaattttggtttgtacggtaaacctacgacaatcaacaatacagaaacatttgcttctgttccctggatcatccgtaacggaggggagcgttatctgcagctcggtaaaccaaacaacggtggtactaaaatattttcagtttccggacatgtcaataagccgggtaactatgaggtacccatgggaacaccctttgcaaagctgttggaacttgctggcgggatgcgtggtggcagaaagctgaagggatgtattccgggtggatcgtcaatgccggttctgcctggtgacatcatgatggaaactgacatggactatgattcaatagcaaaagcaggctccatgctgggctcgggcgcggtgatcatcatggatgacacgacctgtatggtgcgtgcgctggagcggctttcttatttttactatgaggaatcctgtggccagtgtactccgtgccgggaaggaacaggctggctttaccggatcatcaaccggatcgagcacggaaaggggcgggttgaagatctggatttgcttgataatctagcggataacatccagggtagaacgatctgtgcgctgggtgatgctgccgcaatgccggtaagagcaatgctgcagcatttccgggatgaatttgttttccatatcgaacataaaaagtgcatggtctag

SEQ ID NO: 39169 - protein, 425 aa, Nitrosomonas europaea ATCC 19718
MTQPTQVIMAGVDTADSDNWRLKNYLKRDGYAALKKILSQKISPEAVIDEVKKSALRGRGGAGFPTGLKWSFMPKQYTGEKYLVCNSDEGEPGTFKDRDIMRYNPHILIEGMLIAAYAMGIRTGYNYVHGEIWDVYERMEEAVEEANVAGFLGDNILGSGFSFRLYNHHGYGAYICGEETALLESIEGKKGQPRFKPPFPANFGLYGKPTTINNTETFASVPWIIRNGGERYLQLGKPNNGGTKIFSVSGHVNKPGNYEVPMGTPFAKLLELAGGMRGGRKLKGCIPGGSSMPVLPGDIMMETDMDYDSIAKAGSMLGSGAVIIMDDTTCMVRALERLSYFYYEESCGQCTPCREGTGWLYRIINRIEHGKGRVEDLDLLDNLADNIQGRTICALGDAAAMPVRAMLQHFRDEFVFHIEHKKCMV

SEQ ID NO: 39170 - DNA, 1338 bp, Candidatus Blochmannia floridanus
  CDS (1)..(1338): transl_table=11
atgatattggaaaaatattgttatagcccagaaagacaaccattaacgtggagaattcgtgcagatagaaaaccagtgtggttttctgagtatcaatctaaaaatgggtatatggcttttcgtaaagctattgttaatttatctcaatctaatattattgagttaattaataaatctggattgagaggtcgaggaggaggtggatttttaactggattaaaatggtctatgatgacacaaaataaatcagggttagtacgttatttggtatgtaatgctgatgagatggaaccaggaacatataaggatcgttttttaatggaaagattacctcatttgttgttagagggtatattaattgcgggatatgctttgggcgtatcagttgcttatatttttttgcgttatgagtatatgactgcagcagagtatttaagaattgctattaatgaaattagatcggcaggattattgggaaaaaatattttaaatactgaatttaatttagagttatttatacatacaggagcaggaagatatatttgtggagaagaaacagctttgcttagttctttagaaggtaatcgggccattcctagagctaaacctccttttccagctcagtcaggtttatggggtaaacctacatgtgttaataatgtagaaactttatgtaatattcctggaattatagaacatggagtaagttggtacaaaaatatttccgttaaatatagtaatgattctggtacgaagttaatgggattttctggtaaagtaaaaaatcctggaatttgggaattgccatttggaataactgctagagaaattttagaagattatgcgtatggtatgtgtaatggtttttatttaaaagcgtggcaaccgggtggagctagtacggattttttaattgaaaatcatttagatacacctatggattttgataatattaaatctgttggtagtagatttggaacaggaatagcagtagcagtagataatactgttaatatggttggattagtgcgtaatttagaggagtttttttctcgagaatcttgtggttggtgtacgccatgtcgagatgggttgccatgggtagtaaaattgcttattgcattggaaaaaaatagtggatatcctgaagatttaataatgttagagcatttatgtaatttattgggtccaggcaaaactttttgtgcgcatgctcctggagctatggagcctttaaaaagtgctttaaaatattttcgcgatgaatttgaattgggtgttaatttaaataatttgcatacgcgtgataacaatattaaatgcattcaaattatttaa

SEQ ID NO: 39171 - protein, 445 aa, Candidatus Blochmannia floridanus
MILEKYCYSPERQPLTWRIRADRKPVWFSEYQSKNGYMAFRKAIVNLSQSNIIELINKSGLRGRGGGGFLTGLKWSMMTQNKSGLVRYLVCNADEMEPGTYKDRFLMERLPHLLLEGILIAGYALGVSVAYIFLRYEYMTAAEYLRIAINEIRSAGLLGKNILNTEFNLELFIHTGAGRYICGEETALLSSLEGNRAIPRAKPPFPAQSGLWGKPTCVNNVETLCNIPGIIEHGVSWYKNISVKYSNDSGTKLMGFSGKVKNPGIWELPFGITAREILEDYAYGMCNGFYLKAWQPGGASTDFLIENHLDTPMDFDNIKSVGSRFGTGIAVAVDNTVNMVGLVRNLEEFFSRESCGWCTPCRDGLPWVVKLLIALEKNSGYPEDLIMLEHLCNLLGPGKTFCAHAPGAMEPLKSALKYFRDEFELGVNLNNLHTRDNNIKCIQII

SEQ ID NO: 39172 - DNA, 1368 bp, Bordetella parapertussis 12822
  CDS (1)..(1368): transl_table=11
atgaacgcgcctgacctgtacaagcgcctggcgcaggggctggaccccaatccgctgaacgatctgtcgatttcgatgtgcctgcatggccggcacatcgcgccgcagatcatggccgacgtcgatggcgagaactggcgcctgcaggagtacgtcaagcgcggcggctacgaggcgctgcgcaagatcctcaccaccggcatgacgccggaagacgtgatcgcggaagtcaaggcctcgggcctgcgcggccgcggcggcgcgggctttcccaccgggctgaagtggagcttcatgccgcgcgcgttcccgggtcagaagtacctggtgtgcaactcggacgagggcgagcccggcacgttcaaggatcgcgacatcctgcgcttcaatccccatatcgtgatcgaaggcatggtgatcgccgcctacgcgatggggatcagcgtgggctacaactacatccacggcgaaatcttcgaggtgtacgaacgcttcgaggaagcgctcgaagaggcgcgcgccgcgggctttctgggcgacaagctgctgggctcggatttcagcttccagctgcacgcgttccatggctacggcgcctacatctgcggcgaggaaaccgcgctgctcgaatcgctggaaggcaagaaaggccagccgcgcttcaagccgccgttcccggccagcttcggcctgtacggcaagccgaccacgatcaacaacaccgaaaccttcgcggcggtcccctggatcatccgcaacggcgggcaggcctacctcgaagtgggcaagcccaacaacggcggcaccaagctgttctcgatttccggcgacgtcgagcgtcccggcaactacgagatcccgatgggcacgccgttctcgaagttgctggaactggccggcggcatgcgcggcggccgcaagctgaaggcggtgattcccggcggctcgagcgcgccggtgctgcccgccgacatcatgatggactgcacgatggactatgacgccatcgccaaggccggctcgatgctgggttcgggcgcggtgatcgtcatggacgagacgcgctgcatggtcaagtcgctgctgcggctgtcgtatttctatttcgaggaaagctgcggccagtgcacgccgtgccgcgaaggcaccggctggctctaccgcatggtgcaccgtatcgagaatggccagggccgccccgaggacctggacatgctcgacagcgtggcgggcaacatcatggggcgcaccatctgcgccctgggcgatgccgctgccatgcccgtgcgcagcttcatcaagcattttcgcgacgaattcgcgcaccacatcgagcacaagtcttgtgtggtcccgcaatatctgtag

SEQ ID NO: 39173 - protein, 455 aa, Bordetella parapertussis 12822
MNAPDLYKRLAQGLDPNPLNDLSISMCLHGRHIAPQIMADVDGENWRLQEYVKRGGYEALRKILTTGMTPEDVIAEVKASGLRGRGGAGFPTGLKWSFMPRAFPGQKYLVCNSDEGEPGTFKDRDILRFNPHIVIEGMVIAAYAMGISVGYNYIHGEIFEVYERFEEALEEARAAGFLGDKLLGSDFSFQLHAFHGYGAYICGEETALLESLEGKKGQPRFKPPFPASFGLYGKPTTINNTETFAAVPWIIRNGGQAYLEVGKPNNGGTKLFSISGDVERPGNYEIPMGTPFSKLLELAGGMRGGRKLKAVIPGGSSAPVLPADIMMDCTMDYDAIAKAGSMLGSGAVIVMDETRCMVKSLLRLSYFYFEESCGQCTPCREGTGWLYRMVHRIENGQGRPEDLDMLDSVAGNIMGRTICALGDAAAMPVRSFIKHFRDEFAHHIEHKSCVVPQYL

SEQ ID NO: 39174 - DNA, 1581 bp, Bordetella bronchiseptica RB50
  CDS (1)..(1581): transl_table=11
atgaacgcgccgctgaccacccccatcaccgtctacgtgccgcgcgatgccgcggcgctggccatggacgccgacgccgtggcgcaggccatcgcgcaacaggccgcggccctggacctgccggtgcgcatcgtgcgcaacggctcgcgcggcatgctgtggctggagccgctggtcgaagtggccacgccggccggccgcatcgcctacggcccggtgcagcccgaagacgtggccgcgctgttcgaggccggctggctggacggcggcgcgcatccgctgcggctgggcctgaccgacgagatcccgtacctcaagcaccaggaacgcctgacgttcgcccgcgtcggcgtgatcgacccgctgtcgctgcaggactatgccgcgcacggcggactggccgggctgaaccgggcgctggccatgagcgccgagcagatcgtcgacgaagtcagcgcctcgggcctgcgcgggcgcggcggcgcggcgtttccgaccggcatcaagtggaagaccgtgctgaccacgccggcgccgcgcaagtacatcgtctgcaacgccgacgagggcgactcgggcaccttcgccgaccgcctgctgatggaaggcgatccctactcgctgatcgaaggcatgaccatcgccggcctggcggtgggcgccacgtacggctatatctacgtgcgctcggagtatccgcacgccatcgccacgctgcggcaggccatcgcgcgcgcccgcgaggtcggctggctgggcgacgatatccacggcagcgggcagcgcttcgacctggaagtccgcgagggcgccggcgcctatatctgcggcgaggagacctcgctgctggaaagcctggaaggcaagcgcggcgtggtgcgcgccaagccgccgctgccggccatcgccggcctgttcggcctgcccacggtcatcaacaacgtgatttcgctggccacggtgcccaccatcatggcgcgcggcgcggcccattaccgcgacttcggcgtgggccgctcgcacggcacgctgccgttccagctggccggcaatctcaagcacggcggcctggtcgagaaggccttcggcctgacgctgcgcgacctgctctatggcttcggcggcggcagcgccagcggccggccgctgcgcgcggtgcaggtgggcggcccgctgggcgcctacctgcccgaatcgcaatgggatgtgccgctggactacgaggcctatgtgcagatctcggccatggtcggccatggcggcctggtggccttcgacgacacggtcgacatggcgcgcatggcccgctacgcgatggagttctgcgccatcgaatcgtgcggcaaatgcacgccctgccgcatcggctcgacccgcggcgtggaaaccatcgacaagatcgtcgccggcgggccgcaacgcgaacagcgcgtgcatctgctgcgcgacctgtgcgacaccatgctggccggctcgctgtgcgcgctgggcggcatggccccctatccggtgctgtcggccctgaaccacttccccgaagacttcgggctcgccccgcaacccgccgcgcagccggcctga

SEQ ID NO: 39175 - protein, 526 aa, Bordetella bronchiseptica RB50
MNAPLTTPITVYVPRDAAALAMDADAVAQAIAQQAAALDLPVRIVRNGSRGMLWLEPLVEVATPAGRIAYGPVQPEDVAALFEAGWLDGGAHPLRLGLTDEIPYLKHQERLTFARVGVIDPLSLQDYAAHGGLAGLNRALAMSAEQIVDEVSASGLRGRGGAAFPTGIKWKTVLTTPAPRKYIVCNADEGDSGTFADRLLMEGDPYSLIEGMTIAGLAVGATYGYIYVRSEYPHAIATLRQAIARAREVGWLGDDIHGSGQRFDLEVREGAGAYICGEETSLLESLEGKRGVVRAKPPLPAIAGLFGLPTVINNVISLATVPTIMARGAAHYRDFGVGRSHGTLPFQLAGNLKHGGLVEKAFGLTLRDLLYGFGGGSASGRPLRAVQVGGPLGAYLPESQWDVPLDYEAYVQISAMVGHGGLVAFDDTVDMARMARYAMEFCAIESCGKCTPCRIGSTRGVETIDKIVAGGPQREQRVHLLRDLCDTMLAGSLCALGGMAPYPVLSALNHFPEDFGLAPQPAAQPA

SEQ ID NO: 39176 - DNA, 1368 bp, Bordetella bronchiseptica RB50
  CDS (1)..(1368): transl_table=11
atgaacgcgcccgacctgtacaagcgcctggcgcaggggctggaccccaatccgctgaacgatctgtcgatctcgatgtgcctgcatggccggcacatcgcgccgcagatcatggccgacgtcgatggcgagaactggcgcctgcaggagtacgtcaagcgcggcggctacgaggcgctgcgcaagatcctcaccaccggcatgacgccggaagacgtgatcgcggaagtcaaggcctcgggcctgcgcggccgcggcggcgcaggctttcccaccggcctgaagtggagcttcatgccgcgcgcgttcccgggccagaagtacctggtgtgcaactcggacgagggcgagcccggcacgttcaaggatcgcgacatcctgcgcttcaatccccatatcgtgatcgagggcatggcgatcgccgcctacgcgatggggatcagcgtgggttacaactacatccacggcgaaatcttcgaggtgtatgaacgcttcgaggaagcgctcgaagaggcgcgcgcggcgggctttttgggcgacaagctgctgggctcggatttcagcttccagctgcacgcgttccatggctacggcgcctacatctgcggcgaggaaaccgcgctgctcgaatcgctggaaggcaagaaaggccagccgcgcttcaagccgccgttcccggccagcttcggcctgtacggcaagccgaccacgatcaacaacaccgaaaccttcgcggcggtcccctggatcatccgcaacggcgggcaggcctacctcgaagtgggcaagcccaacaacggcggcaccaagctgttctcgatttccggcgacgtcgagcgtcccggcaactacgagatcccgatgggcacgccgttctcgaagttgctggaactggccggcggcatgcgcggcggccgcaagctgaaggcggtgattcccggcggctcgagcgcgccggtgctgcccgccgacatcatgatggactgcacgatggactatgacgccatcgccaaggccggctcgatgctgggttcgggcgcggtgatcgtcatggacgagacgcgctgcatggtcaagtcgctgctgcggctgtcgtatttctatttcgaggaaagctgcggccagtgcacgccgtgccgcgaaggcaccggctggctctaccgcatggtgcaccgtatcgagaatggccagggccgccccgaggacctggacatgctcgacagcgtggcgggcaacatcatggggcgcaccatctgcgccctgggcgatgccgctgccatgcccgtgcgcagcttcatcaagcattttcgcgacgaattcgcgcaccacatcgagcacaagtcttgtgtggtcccgcaatatctgtag

SEQ ID NO: 39177 - protein, 455 aa, Bordetella bronchiseptica RB50
MNAPDLYKRLAQGLDPNPLNDLSISMCLHGRHIAPQIMADVDGENWRLQEYVKRGGYEALRKILTTGMTPEDVIAEVKASGLRGRGGAGFPTGLKWSFMPRAFPGQKYLVCNSDEGEPGTFKDRDILRFNPHIVIEGMAIAAYAMGISVGYNYIHGEIFEVYERFEEALEEARAAGFLGDKLLGSDFSFQLHAFHGYGAYICGEETALLESLEGKKGQPRFKPPFPASFGLYGKPTTINNTETFAAVPWIIRNGGQAYLEVGKPNNGGTKLFSISGDVERPGNYEIPMGTPFSKLLELAGGMRGGRKLKAVIPGGSSAPVLPADIMMDCTMDYDAIAKAGSMLGSGAVIVMDETRCMVKSLLRLSYFYFEESCGQCTPCREGTGWLYRMVHRIENGQGRPEDLDMLDSVAGNIMGRTICALGDAAAMPVRSFIKHFRDEFAHHIEHKSCVVPQYL

SEQ ID NO: 39178 - DNA, 1296 bp, Chromobacterium violaceum ATCC 12472
  CDS (1)..(1296): transl_table=11
atggctgtcttcgctaatggcgtgattttcgacggcgtcgacaccgcgcagcccgactgctggcgtctggacgcctacgtggcccgcggcggctaccaggcgctgcgccgcatcctcgactccaagatgacgcaagaggacgtgatcgcggaagtgaagaactccggcctgcgcggccgcggcggcgcgggcttcccgaccggcctgaaatggagcttcatgccgcgctcgttcccgggcgacaaatacgtcgtctgcaacaccgacgagggcgagccgggcaccttcaaggaccgcgacatcatccgctacaacccgcactcgctgatcgagggcatgatcatcgccggttacgcgatgggcaccaaggcgggttacaactacatccacggcgaaatcttcgaagactacctgctgttcgaggaagcgctggaagaggcgcgcaaggcgggcttcctgggtcagaacatcctgggctccggcttcaacttcgagctctacgcccatcacggctacggcgcctacatctgcggcgaggaaaccgcgctgctggagtcgctggaaggcaagaagggccagccgcgcttcaagccgccgttcccggccagcttcggcctgtacggcaagccgaccaccatcaacaacaccgaatcgttcgcctcggtgccgttcatcatccgcgacggcgcgcagaccttcctcgagaagggcaagccgaacaacggcggcaccaagctgttctcggtttccggccacgtcaaccgtccgggcaactacgagatcgcgctgggcaccccgttctccgagctgctggaaatggccggcggcatgcgcgacggcaagaagctgaaggcggtgatcccgggcggctcgtccgctccggtgctgccggccgacatcatgatgcagtgcaccatggactacgacagcatcgccaaagccggttcgatgctgggttcgggcgccgtgatcgtgatgaacgaggacgtgtgcatggtcaaggcgctggagcgtctggcctatttctaccacgaagaatcctgcggccagtgcacgccgtgccgcgaaggcaccggctggctgtacaaggtgatccatcgcatcgccagcggccagggccgcaagggcgatctggagctcctggattccgtgggcaacaacatggccggccgcaccatctgcgcgctggccgacgccgcggtgttcccggttcgcagtttcaccaagcatttccgcaacgagttcgagtacgcgatcgaacacggaaagaccttggtggatcacaaatggtgttga

SEQ ID NO: 39179 - protein, 431 aa, Chromobacterium violaceum ATCC 12472
MAVFANGVIFDGVDTAQPDCWRLDAYVARGGYQALRRILDSKMTQEDVIAEVKNSGLRGRGGAGFPTGLKWSFMPRSFPGDKYVVCNTDEGEPGTFKDRDIIRYNPHSLIEGMIIAGYAMGTKAGYNYIHGEIFEDYLLFEEALEEARKAGFLGQNILGSGFNFELYAHHGYGAYICGEETALLESLEGKKGQPRFKPPFPASFGLYGKPTTINNTESFASVPFIIRDGAQTFLEKGKPNNGGTKLFSVSGHVNRPGNYEIALGTPFSELLEMAGGMRDGKKLKAVIPGGSSAPVLPADIMMQCTMDYDSIAKAGSMLGSGAVIVMNEDVCMVKALERLAYFYHEESCGQCTPCREGTGWLYKVIHRIASGQGRKGDLELLDSVGNNMAGRTICALADAAVFPVRSFTKHFRNEFEYAIEHGKTLVDHKWC

SEQ ID NO: 39180 - DNA, 1365 bp, Photorhabdus luminescens subsp. laumondii TTO1
  CDS (1)..(1365): transl_table=11
atgacagcatattcaggaataaaagaaattattcttactgaggaaaaccatcctcttacttggcgattgcgtgatgacaaacaaccggtatggttggatgagtaccgtagcaaaagtggttatcgtggtgctgaaaaagcactgaaaagcatgtccccagatgaagtggtttctctggtaaaagacgccgggctgaaaggccgtggcggtgcaggtttctctactggtctgaagtggagcctgatgccaaaagatgaaagcatgaatatccgttatctgctatgtaacgcagatgaaatggagccgggtacctacaaagatcgcttgctgatggaacaacttcctcatttgctggtggaaggaatgttgatcagtgcatttgccctgaaagcttatcgtggctatatcttcctgcgtggtgaatatgtggaagcggctgtgcatctgcgtaaagccatcgaagaagctaaagcagcgggtttgttgggtaaaaacatcatgggcagcggctttgattttgagttgtttgttcataccggcgcggggcgttatatctgtggtgaagagaccgcactgattaactcactggaaggtcgccgagctaatcctcgttcaaaaccgccatttcctgccacttccggcgcatggggtaaacctacttgtgtcaacaatgttgaaaccttgtgcaacgttccttcaattctcgaatacggcaaagagtggtatatcggcctgagtgcaggcaagagtaaagatgccggcactaaactgatgggtttctctggtcgggtgaaaaatccgggcttgtgggagttgccatttggtacgactgcccgtgaaattcttgaagattatgctggtggtatgcgtgacggcttgaaattcaaagcatggcagcccggtggggcagggactgacttcctgactgctgaacatctggatctgccaatggatttcgaaaatattgctaaagcgggcagccgtttgggcacggccttggcaatggcagttgaccatgaaattaatatggtttcgttgacgcgtaatcttgaagaattctttgcccgtgaatcttgcggttggtgtactccatgtcgtgacgggttgccgtggagcgtaaaaatcctgcgcgcaatagagcgtggggaagggcaacccggggatattgaaacattggaacagctctgtcgtttccttgggccaggcaatacattctgtgctcatgcaccaggggccgtggaaccactacagagtgccatcaaatatttccgtgatgaattcgaagctggaattgtgaccaaagactatgggaacacccatttcattgcgggtatccagtcaaacctgttaaagcagcgttggtaa

SEQ ID NO: 39181 - protein, 454 aa, Photorhabdus luminescens subsp. laumondii TTO1
MTAYSGIKEIILTEENHPLTWRLRDDKQPVWLDEYRSKSGYRGAEKALKSMSPDEVVSLVKDAGLKGRGGAGFSTGLKWSLMPKDESMNIRYLLCNADEMEPGTYKDRLLMEQLPHLLVEGMLISAFALKAYRGYIFLRGEYVEAAVHLRKAIEEAKAAGLLGKNIMGSGFDFELFVHTGAGRYICGEETALINSLEGRRANPRSKPPFPATSGAWGKPTCVNNVETLCNVPSILEYGKEWYIGLSAGKSKDAGTKLMGFSGRVKNPGLWELPFGTTAREILEDYAGGMRDGLKFKAWQPGGAGTDFLTAEHLDLPMDFENIAKAGSRLGTALAMAVDHEINMVSLTRNLEEFFARESCGWCTPCRDGLPWSVKILRAIERGEGQPGDIETLEQLCRFLGPGNTFCAHAPGAVEPLQSAIKYFRDEFEAGIVTKDYGNTHFIAGIQSNLLKQRW

SEQ ID NO: 39182 - DNA, 1557 bp, Rhodopseudomonas palustris CGA009
  CDS (1)..(1557): transl_table=11
atgagtttgcgcatcttcatcccgcgcgattccggcgcgctcgcggtcggcgccgacgaggtcgcggccgcgctggtcgatcaggcgcacgcgcgcgagctgccggtcgatctggtccgccccggctcgcgcgggctgtactggctcgaaccgatgctggaggtcgacacgccagagggccgcgtcgcctatgggccggtgacgccggccgatgtgccgtcactgctcgatgcgatcgtggccggcgggccgcatccgctgcagcaggggctcacagaggagatcccgtggctgaagcggcagactcggttgaccttcgcgcgctgcggcatcgtcgatccgcgctcgatcgatgattatcgcgcccatggcggctatcgcgggctcgaacgcgcgctgaagatgagctctgatgcgatcatcgatgatgtcgtcaaatccggcctgcgtggccgcggcggtgccggtttcccgaccggcaccaaatggcgcaccgtggcccaggccggccgcggccagaaatatatctgctgcaatgccgacgagggcgacagcggcaccttcgccgaccggatgctgatggagggcgatcccttcatgatcatcgagggcatgacgatcgccggcatcgcggtcggcgcgaccaagggctacatctacattcgctcggaatatccgcatgccgtcgaggcgatgaacgccgcgatcgaggcggcgcggcgcaccggctatctcggcgagcacatctgccattcgaccgattcgttcgacatcgaagtccgggtcggtgccggggcctatatctgcggcgaagaaacctcgatgctggagagcctcgaaggcaagcgcggcacggtgcgggccaagccgccgctgccggcccacaagggactgtttggccggccgacggtgatcaacaacgtgctcaccttctcggcggtgccctacatcctcgacggcggcgcgcaggcctatgccgattgcggcatgggcaagtcgcgcggcaccaagccgatccagctcggcggcaacatcaagcacggcgggctattcgaggtggcgttcggcatcaccctcggcgaattggtcgacgagatcggcggcggcacgctgagcggccgcccggtgcgcgccgtccaggtcggcggcccgctcggcgcttacttcccgcgcgcgctgttcgacacgccgttcgattacgaggcgttcgcagcgcgcagcggcatggtcgggcacggcggcgtggtggtgttcgacgacaccgtcgacatggctaagcaggcgcggttcgcgatggagttctgcgcccacgaatcttgcggcaagtgcacgccatgccggatcggttcgacccgtggcgccgagacggtcgacaagatcatcgccggcgaccggcccgcggcgaacatcgccgtgctcgaagacctctgcaacaccatgaagttcggctcgctgtgcgcgctgggcggcctcgcgccgatcccggtgctcagcgcgctgacgcacttcccggaagatttcggcctcgcgccgcgccgcctgcaggccgcggaataa

SEQ ID NO: 39183 - protein, 518 aa, Rhodopseudomonas palustris CGA009
MSLRIFIPRDSGALAVGADEVAAALVDQAHARELPVDLVRPGSRGLYWLEPMLEVDTPEGRVAYGPVTPADVPSLLDAIVAGGPHPLQQGLTEEIPWLKRQTRLTFARCGIVDPRSIDDYRAHGGYRGLERALKMSSDAIIDDVVKSGLRGRGGAGFPTGTKWRTVAQAGRGQKYICCNADEGDSGTFADRMLMEGDPFMIIEGMTIAGIAVGATKGYIYIRSEYPHAVEAMNAAIEAARRTGYLGEHICHSTDSFDIEVRVGAGAYICGEETSMLESLEGKRGTVRAKPPLPAHKGLFGRPTVINNVLTFSAVPYILDGGAQAYADCGMGKSRGTKPIQLGGNIKHGGLFEVAFGITLGELVDEIGGGTLSGRPVRAVQVGGPLGAYFPRALFDTPFDYEAFAARSGMVGHGGVVVFDDTVDMAKQARFAMEFCAHESCGKCTPCRIGSTRGAETVDKIIAGDRPAANIAVLEDLCNTMKFGSLCALGGLAPIPVLSALTHFPEDFGLAPRRLQAAE

SEQ ID NO: 39184 - DNA, 1326 bp, Rhodopseudomonas palustris CGA009
  CDS (1)..(1326): transl_table=11
atgctggacgacaaggaccgcatcttccggaacctgtacggtctcgacgactggacgctgaagggcgcacgccgtcgcggcgggtgggaaggtaccaaggcgatcatcgacaagggccgcgactggatcatcaacgagatgaaggcgtcgggcctgcgcggccgcggcggcgccggcttcccgaccggcctgaagtggtctttcatgccgaaggacaatgccgacggccggccgagctatctcgtcgtcaatgccgacgagtccgagcccggcacctgcaaagaccgcgagatcatgcgccacgacccgcacacgctggtcgaaggctgtctgctcgcgggctgcgcgatgggggcccacaccggctacatctacgtccgcggagagttcatccgcgagcgcgagcggctgcaggcggcgatcgaccaggcctatgaggccaagctgatcggcaaggacaacgttcacggctatccgttcgacctctacgtcgctcacggcgccggcgcctacatctgcggtgaagaaaccgcgctgctcgaaagcctcgagggcaagaagggccagccgcggctgaagccgccgttcccggcgaacgtcggtctgttcggctgcccgaccacagtcaacaacgtcgagtcgatcgcggtcgccccggacatcctgcgccgcggcgcagcgtggttctcctcgatcggccgggccaacaacgttggtaccaagctttacggcatctccggccacgtcaacacgccctgcgtcgtcgaagaggcgatgagcattccgttccgcgagctgatcgagaagcacggcggcggcattcgtggcggctgggacaatctgctggcgatcatacccggcggcgcgtcgtgcccgctgatcccggcggcggattgcgaagagctgatcatggacttcgacggcacccgcgcggtgaagtcgagcttcggcaccgccggcgtgatcgtgatggacaagtcgaccgacgtcgtcgccgcgatcgcgcgcatcagctacttcttcaagcacgaaagctgcggccagtgcacgccgtgccgcgaaggcaccggctggatgtggcgcgtgctcgaccgcatggtcgaaggccgcgcccataagcgcgaaatcgacatgctgctggaagtgaccaagcaggtcgaaggccacaccatctgcgcgctcggcgatgccgcggcctggccgatccagggcctgatccgcgccttccgccccgagatcgagcgccgcatcgacgacttctcgcgcaaggccacgctcgacgatcagggcgtgctcgatccggcgcacatgcaagcggcggagtga

SEQ ID NO: 39185 - protein, 441 aa, Rhodopseudomonas palustris CGA009
MLDDKDRIFRNLYGLDDWTLKGARRRGGWEGTKAIIDKGRDWIINEMKASGLRGRGGAGFPTGLKWSFMPKDNADGRPSYLVVNADESEPGTCKDREIMRHDPHTLVEGCLLAGCAMGAHTGYIYVRGEFIRERERLQAAIDQAYEAKLIGKDNVHGYPFDLYVAHGAGAYICGEETALLESLEGKKGQPRLKPPFPANVGLFGCPTTVNNVESIAVAPDILRRGAAWFSSIGRANNVGTKLYGISGHVNTPCVVEEAMSIPFRELIEKHGGGIRGGWDNLLAIIPGGASCPLIPAADCEELIMDFDGTRAVKSSFGTAGVIVMDKSTDVVAAIARISYFFKHESCGQCTPCREGTGWMWRVLDRMVEGRAHKREIDMLLEVTKQVEGHTICALGDAAAWPIQGLIRAFRPEIERRIDDFSRKATLDDQGVLDPAHMQAAE

SEQ ID NO: 39186 - DNA, 1287 bp, Rhodopseudomonas palustris CGA009
  CDS (1)..(1287): transl_table=11
atgagcgacaagccgctcaccggccgcgcgcgcgccgaccgtcagccgcacagcctcgctgcctggcgcgggctcggcggctatgcggcgctgtcgctcgcgctcaagcggcacagcccggaagcgatcatcgcgatggtcgaggctgctggcctgcgcggccgcggcggcgccggcttcccgaccgccaacaaatggcgcttcatgcgcaccggcagtgagagagccggtccaggcgcgcgctatctctgcgtcaacggcgatgagaccgagcccggctcgttcaaggaccggctgttgatggaggcgttgccacatcaactgatcgagggcgcgaccatcgcggcctatgcgatcggcgccaccgaagtgatcattctggtgcgcgacgaatatcgcgccgccgccgctgcgctgagccgcgcgattgcggaagccgaagccgccgggctgctcggccgcgacattctcggctccggcttcgaccttacgatgcgggtgcatgcctccgccggccgctacattgtcggcgaggagaccgcgctgatcgctgcgatcgagggcgaacgtccggtgccgcggcatcgtccgccttatccggccgtcagcggattgtgggggcgaccgacgaccgtcaacaacgtcgagaccctgtcttcggtgccgtcgatcatcgagaatggcgccgagtggtaccgatcgctgtcattcaccgacgaaggtggcaccaagctgtatggcatttccggctgcgtcgagcgtccgcaactgatcgaagcgccgatgggctcgaccgcgcgtgagctactgcatcgtgccggcggcattcgcaatggtcgcgggctgctggcattccagccaggcggcggcgccaccgcgttcttcgagaaggccgaactcgacgtgccgctcgatttcaccagcaccaagaaggccggcagttcgctcggcaccggcgcgctgattgtgctcgacgatcgcgcctgtccggtggcggcgatcgggcgtcacatgcggttctacgcgcgtgagagctgcgggctgtgcacgccgtgccgcgatggcctgccgtgggtgtcgaagctgctcgatgcgctcgaagccggcaagggcacacaaggcgatatcgaggtgttgcaccagcacgtcgcgctgtccggtccgtctgggcgctcctattgcgacctcaacaccggcgcgctcacgccgctgcgcagcggtctcgagcgcttcggcgacatcttcacggcccacctgcagggcttctgtccggtgggccgcgcatga

SEQ ID NO: 39187 - protein, 428 aa, Rhodopseudomonas palustris CGA009
MSDKPLTGRARADRQPHSLAAWRGLGGYAALSLALKRHSPEAIIAMVEAAGLRGRGGAGFPTANKWRFMRTGSERAGPGARYLCVNGDETEPGSFKDRLLMEALPHQLIEGATIAAYAIGATEVIILVRDEYRAAAAALSRAIAEAEAAGLLGRDILGSGFDLTMRVHASAGRYIVGEETALIAAIEGERPVPRHRPPYPAVSGLWGRPTTVNNVETLSSVPSIIENGAEWYRSLSFTDEGGTKLYGISGCVERPQLIEAPMGSTARELLHRAGGIRNGRGLLAFQPGGGATAFFEKAELDVPLDFTSTKKAGSSLGTGALIVLDDRACPVAAIGRHMRFYARESCGLCTPCRDGLPWVSKLLDALEAGKGTQGDIEVLHQHVALSGPSGRSYCDLNTGALTPLRSGLERFGDIFTAHLQGFCPVGRA

SEQ ID NO: 39188 - DNA, 1776 bp, Geobacter sulfurreducens PCA
  CDS (1)..(1776): transl_table=11
atgggcgaagcgataaagattctgatctgtcaggggaccggtggtgtctcagcgggtgctaaaaaggttgaggcggagttcctccgtgttatcggtgaaaagggcgtcgatgccaccgtcggcaaacgatgtgacgtcatcaagaccggctgtcgcggcctgtgtgcaaacgatgttcttgtggatattgtagatcccgagcttgggcgtgtaacttacgatttcgttctgccagaagaagtcgaaaagattgtggccgagcatatcgtcaaccggaccccccttgagaagcgcaaagcaaaaccgtactacaacacgttcgtagaccagcagatgagggttgttatgaccgggtgcggtcagatcgacccggaaagtctcgatgcgtatctagaagaggacggcttcaaggcaattgaaaaatgcgttaaggaaatgactcccgctgcagttatcgacgaagtcaagaagtctggacttcgaggtagagggggcggtggcttcccgacgggcatgaagtggtctttctgtgctgcgacgcccggcaaactgaagtatgtcatctgcaatgcggacgaaggtgaccccggtgctttcatggaccggtcgattctcgagggtgacccttactgcatcattgaaggaatgatgatagcggcatacgcaatcggctgtactgctggctatgtgtacgtacgggcagagtacccacttgctattgagcgtctgcagaaggctctcgatgtttgctacgaaaagggctacctcggcaagaacgtcatgggctggggattcgacttcgaccttcggatcaagaagggtgcgggggcctttgtgtgcggtgaggaaaccgcgctcatggcttcgatcgaaggcgagcggggaatgcctcgccctcgtccgccgttccccgctgtcaaaggtctgtgggggaagcctaccaacattaacaacgttgagacgttcgccaacgtgcgtcacatcatcctgaagggtgctgactggtacgcatctctcggtactgataccacaaaagggacaaagatcttcgcggtcaccggtaaagtaaagcacacgggacttgtggaagtcccggcgggtatgagcgtgcgcgaagttatctataacgtttgcggcggcatcgccaacaaccggaagttcaaagcagttcaggcaggtggaccatcaggcggatgtattccctcagaagttctcgatacaccggttgattatgactcgcttatcaaggccggtgccatgatgggctccggtggtctcgtcgtcatggacgaaactacctgcatggtcgacgtagcacgcttcttccttaccttcacgcggatggaatcatgcggtaaatgcgttccgtgccgcattggactcaaggcgatgttggacatcctcgaacgcatcaccgaaggaagaggccaagctggtgacattgagacactgcttgagatggggagcaccatcaaaaaggcctcactctgcggtctgggccagacagcacccaacccgatcctctccacgatcaagtatttccgtgaggagtatgaagcgcatatcaatgatcggcgttgcccgtcgaactgctgtaaagagcttctgttgtggcaagtagtcgaggaaaagtgcgttaagtgcggagcctgcttcaaggcatgccctgttgacgcaattatctgggagaaggggcaaattgcaatcctagataaagagaaatgcaccaaatgcaaatcctgctacgacgcctgccggttcatggccatcgagtag

SEQ ID NO: 39189 - protein, 591 aa, Geobacter sulfurreducens PCA
MGEAIKILICQGTGGVSAGAKKVEAEFLRVIGEKGVDATVGKRCDVIKTGCRGLCANDVLVDIVDPELGRVTYDFVLPEEVEKIVAEHIVNRTPLEKRKAKPYYNTFVDQQMRVVMTGCGQIDPESLDAYLEEDGFKAIEKCVKEMTPAAVIDEVKKSGLRGRGGGGFPTGMKWSFCAATPGKLKYVICNADEGDPGAFMDRSILEGDPYCIIEGMMIAAYAIGCTAGYVYVRAEYPLAIERLQKALDVCYEKGYLGKNVMGWGFDFDLRIKKGAGAFVCGEETALMASIEGERGMPRPRPPFPAVKGLWGKPTNINNVETFANVRHIILKGADWYASLGTDTTKGTKIFAVTGKVKHTGLVEVPAGMSVREVIYNVCGGIANNRKFKAVQAGGPSGGCIPSEVLDTPVDYDSLIKAGAMMGSGGLVVMDETTCMVDVARFFLTFTRMESCGKCVPCRIGLKAMLDILERITEGRGQAGDIETLLEMGSTIKKASLCGLGQTAPNPILSTIKYFREEYEAHINDRRCPSNCCKELLLWQVVEEKCVKCGACFKACPVDAIIWEKGQIAILDKEKCTKCKSCYDACRFMAIE

SEQ ID NO: 39190 - DNA, 1713 bp, Geobacter sulfurreducens PCA
  CDS (1)..(1713): transl_table=11
atgaaccccgccgatctccatgccatggcccgggaagaacaggcccgccaggaggcgctgcggtgccgtatcatggtctgtgccggtaccccctgtctttccgccggcgcactggcggtcctggacgcgctgcgccaggcggtggaggagagccggctcgatgcggagatcgaggccgtcagcaccggctgcatggggccgtgcagccgcggtcccctcgtgaaagtggcagttcaggggaaacccgagatcgtctacgagcgcgtcacccccgaactggcccgccagattctctactcggtggtgaaggggcgccggccgccgacggcctcgccgctgccgccggatcacccctatttcacccgccagatgaagatcgtcttggccaactgcggttccatcgaccccgagcggatcgaggagtatgtggccacggggggctacgatgcccttgcccacgccctgcacgagatgacccccgaggatgtctgtcgcgagatctccgcttcgggactgcgggggcgggggggggccggctatccggccggcgtcaagtggaacctggcccgcaaggcgccgggcgagcggaaatacgtggtggccaacggcgacgagggggacccgggcgcctacatggaccgctccgtcatggagtcggacccccaccgcatcctggaaggaatggccattgccggctacgccatcggcgcggatcagggctacatctacgtccggggcgagtactacctggccggaaggcggctcgaggccgccatccgcgacgccgagcgcaaggggctcctgggaagccgggtgctcggcagcaacttcagtttccgcatcgacatccgcaccggcgccggcgcctttgtctgcggcgaggaaacctcgctcatggcttccatcatggggcggcgcggacagccctggcaccggccgccctatccggcccagcgggggctctgggggtgtccgaccctcatcaataacgtggagacccttgccaccgtcccggctatcatcggacgcggggccacctggtacgccggcatcggctcgacccggagcccgggaaccaaggtctatgccctggccggccaggtggagaccgccggcctgatcgaagtccccatgggtaccacgctgcgggaggtggtgttcgacatcggcggcggaatccccggcggcaagcgcttcaaggctgcccagtcgggcggcccttcgggcggctgcattccggccgaacacctggacacccccctcgattacgaaagtatggagcggatcggcaccatcatgggctccggcggacttatcatcatggacgagacgagctgcatgcccgacgtcgcctcgtttttcctcgatttctgccgggacgagagctgcggcaagtgcatcccgtgccgcgtcggcagcatggagatgcaccggctgctgcgccgcataacctccggcaccgcttggccggacgacctgcgccggctggaggagctctgcgatctgatgggcgccacgagcctctgtggtctcggccagaccgcgcccaacccggtggtgagcaccctgcgctacttccggcacgaatacgaggcccacatccgcgagcgccgctgcccggcgggccgctgcaccatggctgccgagcaggagcccggacccggcggcaaggcactcctgcacgccgtcggcgtccctggggaggtaggctga

SEQ ID NO: 39191 - protein, 570 aa, Geobacter sulfurreducens PCA
MNPADLHAMAREEQARQEALRCRIMVCAGTPCLSAGALAVLDALRQAVEESRLDAEIEAVSTGCMGPCSRGPLVKVAVQGKPEIVYERVTPELARQILYSVVKGRRPPTASPLPPDHPYFTRQMKIVLANCGSIDPERIEEYVATGGYDALAHALHEMTPEDVCREISASGLRGRGGAGYPAGVKWNLARKAPGERKYVVANGDEGDPGAYMDRSVMESDPHRILEGMAIAGYAIGADQGYIYVRGEYYLAGRRLEAAIRDAERKGLLGSRVLGSNFSFRIDIRTGAGAFVCGEETSLMASIMGRRGQPWHRPPYPAQRGLWGCPTLINNVETLATVPAIIGRGATWYAGIGSTRSPGTKVYALAGQVETAGLIEVPMGTTLREVVFDIGGGIPGGKRFKAAQSGGPSGGCIPAEHLDTPLDYESMERIGTIMGSGGLIIMDETSCMPDVASFFLDFCRDESCGKCIPCRVGSMEMHRLLRRITSGTAWPDDLRRLEELCDLMGATSLCGLGQTAPNPVVSTLRYFRHEYEAHIRERRCPAGRCTMAAEQEPGPGGKALLHAVGVPGEVG

SEQ ID NO: 39192 - DNA, 1272 bp, Geobacter sulfurreducens PCA
  CDS (1)..(1272): transl_table=11
atggaacaggttctcttccgacataaccgtcccggccggtgcgtaacctttgccgagtaccgggcggagggaggcttcgcggccctggagaaggccctttccggcatgtcgcccaacgatgtccagcaggtggtgatcgacgccaatctgcggggccggggcggggccgggttccccaccgggaagaagtggtccttcgtgccgcgggacatcccaggcccccgttatctcatctgtaactgcgacgagatggagccgggcacctacaaggaccggatactcctggaggcgaacccctattctctggtggaggggatgaccctggccgcttatgccatcggtgtggcccatgccttcatcttcatccgccgcggctacgaagaggcggcggagaattgccggcgcgccattgccgaggcaaaggaagcgggcctgctggggaagaacatcctcggctccggtttctccctggacctggacgtccaccagtccgccgggcgttacatctgtggcgaggaaacagccctcatgaacgcgctggaggggaggcgggccaacccgcggagcaaaccccccttcccggcagtgaaagggctctgggggcgccccacggtggtgaacaacgtggagaccctggccaacatcccggctatcgtggccaacggcgccgcctggttcaaggggctggcgagaatctccgaagcggccggtaccaagctcttctgcgtgagcggacatgtgaacaacgccgcctgcttcgagcttcccctggggatgagcctgggcgagatcatcgacggcccctgcggcggcatgctgccggggcgggagttcaaggcgtgcatacccggcggggcgtccacgccgttctttacccgggagcactggaacgtccccatggacttcgatgccgtggcaagggccggctcccggctcggcaccggcggcatcgtggtcttcgaccggaacacctgcatggtggcggcaaccctgaacctggtgtccttttacgctcgggagtcgtgcggctggtgtaccccctgccgggaagggctcccctttgtgaaggacgtcctggcccggatcgaggcgggcgccgggcgggaggagcacatcgccatcctgcgggagcatgtccagtacctgaactacgccttctgtcccctggcccccggtgccatggggccggtggaggggctcctgcggctcttcgaggacgagatccgggagcacatcgtgatggggcgctgccccctcggaggaaagggatga

SEQ ID NO: 39193 - protein, 423 aa, Geobacter sulfurreducens PCA
MEQVLFRHNRPGRCVTFAEYRAEGGFAALEKALSGMSPNDVQQVVIDANLRGRGGAGFPTGKKWSFVPRDIPGPRYLICNCDEMEPGTYKDRILLEANPYSLVEGMTLAAYAIGVAHAFIFIRRGYEEAAENCRRAIAEAKEAGLLGKNILGSGFSLDLDVHQSAGRYICGEETALMNALEGRRANPRSKPPFPAVKGLWGRPTVVNNVETLANIPAIVANGAAWFKGLARISEAAGTKLFCVSGHVNNAACFELPLGMSLGEIIDGPCGGMLPGREFKACIPGGASTPFFTREHWNVPMDFDAVARAGSRLGTGGIVVFDRNTCMVAATLNLVSFYARESCGWCTPCREGLPFVKDVLARIEAGAGREEHIAILREHVQYLNYAFCPLAPGAMGPVEGLLRLFEDEIREHIVMGRCPLGGKG

SEQ ID NO: 39194 - DNA, 1362 bp, Mycobacterium avium subsp. paratuberculosis K-10
  CDS (1)..(1362): transl_table=11
atgacaacgacttcggagacttcggaggcctccggggccccgcaggcgacgccgctgacgccggtgatcagccgcttctgggacgatcccgagtcgtggacgctgcagacgtaccaccggcacggcggctacacggcgatgaagaaggcgctggcgatggagcccgacgcggtcatcgggatggtcaaggactccgggctgcgcgggcgcggcggcgcgggcttctcgaccggcaccaagtggtcgttcatcccgcagggcgacaccggcgcggccgccaagccgcactacctggtggtcaacgccgacgagtcggaacccggtacgtgcaaagacattccgttgatgctggccaccccgcacgtcctgatcgagggggtgatcatcgcggcgtatgcgatccgggccaaccacgcgttcatctatgtgcgcggcgaggtgctgccggtgctgcgccggctgcagaacgccgtcgccgaggcctacgccgccggctacctgggccgcgacatcgacggctccggcttcgatctggagctggtggtgcacgccggcgccggcgcctacatctgcggcgaggagaccgcgctgctggactcgctggagggccgccgcggccagccccggctgcggccgccgttcccggcggtggccgggctgtacggctgccccacggtgatcaacaacgtcgagaccatcgccagcgtgccgtccatcatcggcaacggcgtggactggttccgctcgatgggcagtgagaaatcgccgggtttcacgctgtattcgctgtccggccacgtcactcggcccggccagtacgaggcgccgctgggaatcacgttgcgcgagttgctcgattacgccggcggggtgcgggccgggcaccggctcaagttctggacccccggcggctcgtcgaccccgctgctgaccgacgaacacctcgacgtgccactggattacgagggcgtgggcggggtcggctcgatgctgggcaccaaggcgctggagatcttcgacgagaccacctgcgtggtgcgtgcggtgcgccgctggacctacttctacaagcacgagtcgtgcggcaagtgcacgccgtgccgcgagggcacgttctggctcgaccagatctacgaacggctggagaccggtaagggcacggccgaggacatcgacaagctgctggacatctccgacaccatcctgggaaagtcgttctgcgcgttgggcgatggcgccgccagcccggtgatgtcgtcgatcaagtacttccgcgacgagtacgtcgcccacgtcgagaacggcagatgcccgttcgacccgcgagactccatgctgacaccgaacgggagcgactcgtga

SEQ ID NO: 39195 - protein, 453 aa, Mycobacterium avium subsp. paratuberculosis K-10
MTTTSETSEASGAPQATPLTPVISRFWDDPESWTLQTYHRHGGYTAMKKALAMEPDAVIGMVKDSGLRGRGGAGFSTGTKWSFIPQGDTGAAAKPHYLVVNADESEPGTCKDIPLMLATPHVLIEGVIIAAYAIRANHAFIYVRGEVLPVLRRLQNAVAEAYAAGYLGRDIDGSGFDLELVVHAGAGAYICGEETALLDSLEGRRGQPRLRPPFPAVAGLYGCPTVINNVETIASVPSIIGNGVDWFRSMGSEKSPGFTLYSLSGHVTRPGQYEAPLGITLRELLDYAGGVRAGHRLKFWTPGGSSTPLLTDEHLDVPLDYEGVGGVGSMLGTKALEIFDETTCVVRAVRRWTYFYKHESCGKCTPCREGTFWLDQIYERLETGKGTAEDIDKLLDISDTILGKSFCALGDGAASPVMSSIKYFRDEYVAHVENGRCPFDPRDSMLTPNGSDS

SEQ ID NO: 39196 - DNA, 1254 bp, Wolbachia endosymbiont of Drosophila melanogaster
  CDS (1)..(1254): transl_table=11
atgctaaaagaacaagacaaaatattcaccaacctaaatggtaaaggaactccactacttgagggtgcaaaaaaacgtggtagctggcaaaaaacaaaggaattactggatttaggatcagaaaagatcattgatgaagtaaagaaatctggtttgagaggtcgagggggtgcaggattttccaccggccttaagtggagctttatgcccaaaaatctcccaaaagcatatttagtagtcaatgcagatgagtcagaacctggtacatgtaaagatagagatatattgcgatatgagccacataagttacttgagggaattctcctggccggcaaagcgatcagcgcatcagttgcatatatttatatcaggggtgaattttataatgaatatttagttctaaaaaaagcacttgaggaagcctataaagaaggtttaattggaaaaaatgcctgcaaatcaggttatgatcttgatgtgtttatccataggggcgcaggagcttacatatgtggggaagaaacagctcaactcgaatcaattgaaggaaaaaagggctttcctcgcatgaagcctccatttcccgcaggtgttggactttttggctgcccaaccacaataaacaacgttgaaactatagccatggttccagatattctgaatcgcggaggagaatggtttgcatctcttggtaaaccaaataatactggtaccaaggtcttttgtatttcagggcacgtaaacaacccgtgtaatgttgaagaagagctcggaattccattacgtgaattaattgaaaaatacgcaggtggagtgcgaggaggttgggataatttacttgctgtaatacctggtgggtcttcagtgccattaattccaaaatctatatgtgatactattgaaatggattttgattcattaagaactgcacaatcagggcttggtactgctgctgtaatagtgatgaataaatcaactgatataatagctgcaatagagaggttatcacacttttatatgcatgagtcctgtggacaatgcacaccatgccgtgaaggtactggatggatgtggaggattatgaagaggatggtggcaggagatattaagcctgatgaaatagataagctgcttgaccttacaactcaaatagaaggacatacaatttgcgcacttggcgatgctgcagcttggccgattcaaggattaataagacattttcgccatgttatcaaagagagagcgataatttaa

SEQ ID NO: 39197 - protein, 417 aa, Wolbachia endosymbiont of Drosophila melanogaster
MLKEQDKIFTNLNGKGTPLLEGAKKRGSWQKTKELLDLGSEKIIDEVKKSGLRGRGGAGFSTGLKWSFMPKNLPKAYLVVNADESEPGTCKDRDILRYEPHKLLEGILLAGKAISASVAYIYIRGEFYNEYLVLKKALEEAYKEGLIGKNACKSGYDLDVFIHRGAGAYICGEETAQLESIEGKKGFPRMKPPFPAGVGLFGCPTTINNVETIAMVPDILNRGGEWFASLGKPNNTGTKVFCISGHVNNPCNVEEELGIPLRELIEKYAGGVRGGWDNLLAVIPGGSSVPLIPKSICDTIEMDFDSLRTAQSGLGTAAVIVMNKSTDIIAAIERLSHFYMHESCGQCTPCREGTGWMWRIMKRMVAGDIKPDEIDKLLDLTTQIEGHTICALGDAAAWPIQGLIRHFRHVIKERAII

SEQ ID NO: 39198 - DNA, 1293 bp, Bdellovibrio bacteriovorus HD100
  CDS (1)..(1293): transl_table=11
atgtctgaagtaaaaatgcttacagaattctaccacctgcctgaatatcaaactctggcgggctacaaagccaagggtggttacgaaactcttcataaagcttttaaaatgcaacctcaggccatcatcgatgaagtgaaagcttcgggtttgcgtggtcgtggtggtgcgggtttcccgaccggtatgaagtggggctttttgccgaaaaatggcgagccacgctatcttctttgcaacgccgatgaaggtgaaccggggactttcaaggatcgtatgatgatggagcgtgctccacatcagttgatcgagggcatgatcatttctgctttcgcgatcggttcccacaaaggttacatctatgttcgtggtgaatacgtattcccgatcgaatgcctgaacaaggcaatcaaagaggcttacgctgccggcctgctgggtaaaaacatcctgggttctggttttgacttcgatctggatgtttaccgtggcgcaggcgcttacatctgcggtgaggaaacaggcatgatttcttctttggaaggtctgaaaggccagccaaaactgaaaccgccattcccggcagttcagggttacctgagaaagccgaccatcgtgaacaacgtggagactctggctgcagtaacatacatcattaaagacggcgctcaggcctaccgcaaacacggtactgagaaatccgctggtactaaattgttctctttgtccggtaacgtgatgactccaggcaacttcgaagttccactgggttacccgttgatggacctgatcatgaaagagggcggcggtatgaagccgggccgcaaactgaaagcggttattccgggtggttcttccgctccggttctgacagctgaagaagtggcgaaagcaaacttggattacgaatccctggcgggtctgggcacaatgcttggttccggcgcggtgatcgtgatcgacgattcccagtgcatggttgatatgctgggtgttttgactcacttctatgctcacgaatcttgtggtcagtgcacgccttgccgtgagggtacaggctggctgaataaagttcttcattcgattctggaaggccgcggccgtttgcaggacatcgatttgttgatcaaagtggctgacaacatgaaaggtaaaaccatctgcgcgctttccgatgcagcggctttgccggttctcagctttgtaactaaattccgtgatgagtttgaattctacgttcgcgaaggacgctctaaggtaaaaggaacgacatatgccgaaatgcaccattaa

SEQ ID NO: 39199 - protein, 430 aa, Bdellovibrio bacteriovorus HD100
MSEVKMLTEFYHLPEYQTLAGYKAKGGYETLHKAFKMQPQAIIDEVKASGLRGRGGAGFPTGMKWGFLPKNGEPRYLLCNADEGEPGTFKDRMMMERAPHQLIEGMIISAFAIGSHKGYIYVRGEYVFPIECLNKAIKEAYAAGLLGKNILGSGFDFDLDVYRGAGAYICGEETGMISSLEGLKGQPKLKPPFPAVQGYLRKPTIVNNVETLAAVTYIIKDGAQAYRKHGTEKSAGTKLFSLSGNVMTPGNFEVPLGYPLMDLIMKEGGGMKPGRKLKAVIPGGSSAPVLTAEEVAKANLDYESLAGLGTMLGSGAVIVIDDSQCMVDMLGVLTHFYAHESCGQCTPCREGTGWLNKVLHSILEGRGRLQDIDLLIKVADNMKGKTICALSDAAALPVLSFVTKFRDEFEFYVREGRSKVKGTTYAEMHH

SEQ ID NO: 39200 - DNA, 1473 bp, Candida albicans SC5314
  CDS (1)..(1473): transl_table=12
atgcttagcaattttaaaataaaaccacgcacattactacgtggattagccactgctgctgctgacccagctgccaatcctaatagagtacatggtggattaaaagatcaagatcgtatatttcaaaatgtttatggaacttatggtcatgatttgaaatctgctcaaaaaatgggtgattggtataaaactaaagaaattatattaaaaggagataaatggattattgatgagatgaaaaaatccggattaagaggtcgtggaggtgctggtttcccctcaggtttaaaatggtcatttatgaatccgccaggttgggaaaaaaatgttggaccaagatatttggtggttaatgctgatgaaggggaaccaggtacttgtaaagatagagaaatcattagaaaagatcctcataaattagttgaaggttgtttattagctggtagagctatgaatgccactgctgcttatatttatattagaggtgaattttataatgaaacagttgttttacaaaatgccattaatgaagcttataaagcaggattgataggtaaaaatgcatgtggatcaggttatgattttgatatttatattcatcgtggtatgggtgcctatatttgtggtgaagaaaccgctttgattgaatccatcgaaggtaaagctggtaaaccaagattgaagccacctttcccagctggtgttggtttatttggtagaccaactactgttgccaatgttgaaagtgtatcagttgctcctactattttaagaagaggtggtgattggtttgcttcatttggtcgtgaaagaaatgccggtaccaaattgttttgtatttctggacatgttaatgaaccatgtactgttgaagaagaaatgtcgatcccattgaaagaattgttagaaaaacattgtggtggtattgttggtggttgggataatttattaggagttattcctggtggatcctcagtgcctattatgcctaaagaaacatgtgacaatgttttaatggattatgatgccttgagagatgttggctccgggttaggtactgctgctgttattgtcatgaataaacaaacagatattataagggcaattcaaagattttctcatttctataaacatgaatcttgtggtcaatgtactccatgtcgtgaaggtaccacttggttacaaagaatgatggatagattttacactggtcaagccactgaaaaggaaattgatcaaatttttgaattgactaaagaaattgaaggtcacactatttgcgccttgggtgatgctgctgcttggccagttcaaggtttaatcaaatcatttagaccagttatggtagatagaattaaagaattccaacaaaaacacgctggtgaacaccttgaatatggtggatgggttgatggtggtaaagtaaagaatggtgttgttattgacaatccattaccatctggccatcattag

SEQ ID NO: 39201 - protein, 490 aa, Candida albicans SC5314
MLSNFKIKPRTLLRGLATAAADPAANPNRVHGGLKDQDRIFQNVYGTYGHDLKSAQKMGDWYKTKEIILKGDKWIIDEMKKSGLRGRGGAGFPSGLKWSFMNPPGWEKNVGPRYLVVNADEGEPGTCKDREIIRKDPHKLVEGCLLAGRAMNATAAYIYIRGEFYNETVVLQNAINEAYKAGLIGKNACGSGYDFDIYIHRGMGAYICGEETALIESIEGKAGKPRLKPPFPAGVGLFGRPTTVANVESVSVAPTILRRGGDWFASFGRERNAGTKLFCISGHVNEPCTVEEEMSIPLKELLEKHCGGIVGGWDNLLGVIPGGSSVPIMPKETCDNVLMDYDALRDVGSGLGTAAVIVMNKQTDIIRAIQRFSHFYKHESCGQCTPCREGTTWLQRMMDRFYTGQATEKEIDQIFELTKEIEGHTICALGDAAAWPVQGLIKSFRPVMVDRIKEFQQKHAGEHLEYGGWVDGGKVKNGVVIDNPLPSGHH

SEQ ID NO: 39202 - DNA, 1332 bp, Leptospira interrogans serovar Copenhageni str. Fiocruz L1-130
  CDS (1)..(1332): transl_table=11
atggcagaaatgaaacttcttacgaaatacatcgacaatcctcagtccaccaaactggagttttacgaatccgtacacggatacgatggaatgaaaaaagcgcttcagatgaaaccagacgacatcatcgcagaagtcaaaaaatccggactgagaggaaggggtggagccggttttccgaccggtcttaaatggtcgtttattcccaaagacattccaaaaccgaaatatatcatttgtaacgcggacgaaggagaaccgggaacattcaaagatcgtaaactgattgagaatcttccacatcagattatagaagggatgatcataggagcgcgcgcgatcggttccaacaaaggatttttttatattcgaggagaattccaaaaaggcgcaaaagccatacaggcggcgatcgacgaagcctactccaaaggatatttaggaaagaatattttaggaagcggttttgattttgatctgattctttacgaaggagcgggcgcttatatctgtggagaagaaaccgcgctgatcaattcactcgaaggaagaaggggccatcctagattaaaaccccccttccccgccgtgtcgggactttatcgttctccgaccgtagtcaataacgtagaaactttttcggcgattcctcatattttagataagggagcggattggtattctaaaataggaacggaaaaatctccgggcacgagattattcagcgtatccggtcacgtaaaaaaaccgggcgtttacgaaatcgaattaggaactcctttattagaattagtgaatgatctttgtggtggaatcatagacgataaacctctcaaggcgatcattccgggaggatcctccgttccgattctcaccgcggaagaatgtaaaaccgcaaatatggattttgaatccatggccgctcataaaaccatgctcggctctggagcggtaatcgttcttgcggaaggaactgacattgtagaaaccacgtatcgattcgcccgtttttacgcacacgaatcctgcggtcagtgcactccttgtagagaaggaacacattgggtcagggacattctctataaaattagagaaggagaaggaacaaccgaagacatagatctgattttttctttatccagaaatatggaaggaggaaccacgatctgtccactttcagacgcttgtgtaggagcggtccgaccagcgttacaaaagttccgctccgagtttgacgcaaaattgaaagtaaaaccgatcgtacccgatcatcctcgaagaagaaaagaagataagatcgagtcgactgcaggagaaaagacaagtccatga

SEQ ID NO: 39203 - protein, 443 aa, Leptospira interrogans serovar Copenhageni str. Fiocruz L1-130
MAEMKLLTKYIDNPQSTKLEFYESVHGYDGMKKALQMKPDDIIAEVKKSGLRGRGGAGFPTGLKWSFIPKDIPKPKYIICNADEGEPGTFKDRKLIENLPHQIIEGMIIGARAIGSNKGFFYIRGEFQKGAKAIQAAIDEAYSKGYLGKNILGSGFDFDLILYEGAGAYICGEETALINSLEGRRGHPRLKPPFPAVSGLYRSPTVVNNVETFSAIPHILDKGADWYSKIGTEKSPGTRLFSVSGHVKKPGVYEIELGTPLLELVNDLCGGIIDDKPLKAIIPGGSSVPILTAEECKTANMDFESMAAHKTMLGSGAVIVLAEGTDIVETTYRFARFYAHESCGQCTPCREGTHWVRDILYKIREGEGTTEDIDLIFSLSRNMEGGTTICPLSDACVGAVRPALQKFRSEFDAKLKVKPIVPDHPRRRKEDKIESTAGEKTSP

SEQ ID NO: 39204 - DNA, 1317 bp, Thermus thermophilus HB27
  CDS (1)..(1317): transl_table=11
atgacgggccccatcgtttccggactagaccctaggtttgaacggaccctctacgcccacgtggggaaggaggggtcctggaccctggactactacctccggcacggggggtacgagacggcgaagcgggtgctcaaggagaagaccccggacgaggtcatagaggaggtgaagcgctccgggcttaggggccggggcggggcgggcttccccacggggcttaagtggagcttcatgcccaaggacgacgggaagcagcactacctcatctgcaacgccgacgagtccgagcccgggagcttcaaggaccgctacatcctggaggacgtcccccacctcctcattgaggggatgatcctcgccgggtacgccatccgggccacggtgggctacatctacgtccgcggggagtaccgcagggcggcggaccggctagaacaagccatcaaggaggcccgggcccggggctacctggggaagaacctcttcggcacggacttctcctttgacctccacgtccaccggggggccggggcctacatctgcggcgaggagacggccctcatgaactccctggagggcctaagggcgaacccccgcttgaagccccccttccccgcccagtcgggcctttggggcaagcccaccaccatcaacaacgtggagaccttggcctccgtggtgcccatcatggaacggggcgccgactggttcgcccagatgggcacggagcagtccaaggggatgaagctctaccagatctccgggcccgtgaagcgccccggggtgtacgagctccccatgggcaccacgttccgcgagctcatctacgagtgggcgggcgggcccctggagcccatccaggccatcatccccggggggtcctccaccccgcctctgcccttcaccgaggaggtcctggacacccccatgagctacgagcacctccaggccaagggctccatgctgggaacggggggcgtgatcctcatccccgagcgggtgagcatggtggacgccatgtggaacctcacccgcttctacgcccacgagtcctgcggcaagtgcaccccctgccgcgagggcgtggcggggttcatggtgaacctcttcgccaagatcggcaccggccagggggaggagaaggacgtggagaacctggaagccctcctccccctcattgaggggcggagcttctgccccttggcggacgcggcggtgtggccggtgaagggctcgctaaggcacttcaaggaccagtacctggccctggcgcgggagaagcgccccgtgcccaggccttccctctggaggtga

SEQ ID NO: 39205 - protein, 438 aa, Thermus thermophilus HB27
MTGPIVSGLDPRFERTLYAHVGKEGSWTLDYYLRHGGYETAKRVLKEKTPDEVIEEVKRSGLRGRGGAGFPTGLKWSFMPKDDGKQHYLICNADESEPGSFKDRYILEDVPHLLIEGMILAGYAIRATVGYIYVRGEYRRAADRLEQAIKEARARGYLGKNLFGTDFSFDLHVHRGAGAYICGEETALMNSLEGLRANPRLKPPFPAQSGLWGKPTTINNVETLASVVPIMERGADWFAQMGTEQSKGMKLYQISGPVKRPGVYELPMGTTFRELIYEWAGGPLEPIQAIIPGGSSTPPLPFTEEVLDTPMSYEHLQAKGSMLGTGGVILIPERVSMVDAMWNLTRFYAHESCGKCTPCREGVAGFMVNLFAKIGTGQGEEKDVENLEALLPLIEGRSFCPLADAAVWPVKGSLRHFKDQYLALAREKRPVPRPSLWR

SEQ ID NO: 39206 - DNA, 1299 bp, Parachlamydia sp. UWE25
  CDS (1)..(1299): transl_table=11
atgtctgaaatgcgtattttaacagcttacatggatgatccacatcaatgtaagatcgaaacttatgagcgtaatggcggttatcaagcactcaaaaaagcaatttcttctatttcctcggatcagctaattgaaatggtaaaacaatcttggttgagaggtagaggtggaggtggttttcaaacaggcttgaaatggagttttgtccccaaagattgtcaaatttctaaatatctcgtttgcaattgtgatgaaagtgaacctggtacatttaaagatcgatatatcattgaaaatgatcctcatcaattaattgaaggaataattttagcttgttacgcaataggggcaaagcaggcttttatttattgcagaggagaattttttgaaggaaataaaaagttgcgattagctattcaagaagctaaaaaaagaggttatttagaagctccattaggagaagcaaatttttctgttagtattattgttcatccaggcgcaggagcctatattgcaggcgaagaaactgctcaattgaattcacttgaaggctatcgtgcaactcctcgtttaaaacccccttttccagcagtttctggcttatatgaaaaaccgactgtcgttaataatgttgaaacattatgtaacgttgttcacattgtgaatcgtggagttgaatggtatcaaagtattggtaaaccaaaaaatacaggaacaaaaatcttccaagttagcggtcatgttcaaaatccaggatgttttgaatttcctttgggaattcctttaaaagaagttttagaaagagctggttggatgctaccaggccatcaatttaaagcttgttatccggggggatcatcttgttcattattgactgaacgggatttagatactcctatggattttgatagtgttgcagcaaaaaaatccatgttgggaacggcatcaattattgttatggatgattcgacggatatggtgaaagttgccaatcgtttgatggaattctatcaaaatgagtcttgtggaaaatgtactccttgtcgcgaagggacgcgttggacaaaacaaatccttactcgtatcttagcgggtaggggaacagttggggatttaaaaacgatagagcgaatttgtcaacaaatggaaatggattcgttttgcccgttggctccaggagctgctcttccaattgtcagtgcgattagagaattcagaggcgaatttgaatcttatattatgcgtaacattcatgctgataaacctcctgaaatgaaaattacttatccttatttgtag

SEQ ID NO: 39207 - protein, 432 aa, Parachlamydia sp. UWE25
MSEMRILTAYMDDPHQCKIETYERNGGYQALKKAISSISSDQLIEMVKQSWLRGRGGGGFQTGLKWSFVPKDCQISKYLVCNCDESEPGTFKDRYIIENDPHQLIEGIILACYAIGAKQAFIYCRGEFFEGNKKLRLAIQEAKKRGYLEAPLGEANFSVSIIVHPGAGAYIAGEETAQLNSLEGYRATPRLKPPFPAVSGLYEKPTVVNNVETLCNVVHIVNRGVEWYQSIGKPKNTGTKIFQVSGHVQNPGCFEFPLGIPLKEVLERAGWMLPGHQFKACYPGGSSCSLLTERDLDTPMDFDSVAAKKSMLGTASIIVMDDSTDMVKVANRLMEFYQNESCGKCTPCREGTRWTKQILTRILAGRGTVGDLKTIERICQQMEMDSFCPLAPGAALPIVSAIREFRGEFESYIMRNIHADKPPEMKITYPYL

SEQ ID NO: 39208 - DNA, 1308 bp, Bartonella quintana str. Toulouse
  CDS (1)..(1308): transl_table=11
atgctggctgataaagatcgcattttcaccaatatttatggtttgaaagacaaatcattaaaggctgcgatgtcgcgtgggcattgggatggtataaaggcgattattgataaaggtcgtgattggatcattgatgaggtgaaagcatcggggttacgtggccgtggtggagctggttttcctactggaatgaagtggtcttttatgccaaaacaaaatgatggccgtcctcattatttggttgtaaatgcagatgaatcagagccgggaacttgtaaagaccgcgatattttgcggcatgatccccatactttgattgaagggtgtgcacttgctacttttgcaatgggagccaatgtcgcttttatttatgttcgtggtgaatatattcgtgagcgtgaagcgcttcaagctgccgttgatgaatgttatgatgcaggtttacttggcaaaaaaacgaaatatgggcatgtttgcgatattattattcatcatggtgctggtgcttatatttgtggcgaagaaacagctcttctcgaaagtcttgaggggaaaaaaggacaacctcgacttaaaccaccattccctgcgaatgtggggatttatggctgtccaacaacagttaataatgtagagtccattgccgttattccaacgattttgcgtcgtggtgcttcgtggttttcatcaatcggacgtgcaaataataccggaacaaaattatttatggtttctgggcatgttaatgcaccttgtacatttgaagaagctctaggtgtttcttttcgcgaattaattgaaaagcataccggtggtattcgtggtggatggagtaatcttttagcagttattccaggtggagcttcttgtccggttgttcgtggtgaggatatggttgatgcgatcatggattttgatgggatgcgcgatgttggatcttcttttggcacaggtggtgtgattgttatggataaatcaaccgatattatcaaggcaatttggcgtataacagcttttttcaagcatgagagttgtggtcaatgtacaccgtgtcgtgaaggcacaggttggatgatgcgtcttttagggcgtatggttgagggaagagcgcaaaaacgtgaaattgatcttttgtttgaagtttctgaacaagttgaaggacacactatatgtgcactgggtgatgctgccgcatggcctatacaggggttgatacgtaattttcgtccagaaattgagcgtagaattgatgattatacgcgaagtgtcatccaaagcaaaaatattgctttgggagcagtaggatag

SEQ ID NO: 39209 - protein, 435 aa, Bartonella quintana str. Toulouse
MLADKDRIFTNIYGLKDKSLKAAMSRGHWDGIKAIIDKGRDWIIDEVKASGLRGRGGAGFPTGMKWSFMPKQNDGRPHYLVVNADESEPGTCKDRDILRHDPHTLIEGCALATFAMGANVAFIYVRGEYIREREALQAAVDECYDAGLLGKKTKYGHVCDIIIHHGAGAYICGEETALLESLEGKKGQPRLKPPFPANVGIYGCPTTVNNVESIAVIPTILRRGASWFSSIGRANNTGTKLFMVSGHVNAPCTFEEALGVSFRELIEKHTGGIRGGWSNLLAVIPGGASCPVVRGEDMVDAIMDFDGMRDVGSSFGTGGVIVMDKSTDIIKAIWRITAFFKHESCGQCTPCREGTGWMMRLLGRMVEGRAQKREIDLLFEVSEQVEGHTICALGDAAAWPIQGLIRNFRPEIERRIDDYTRSVIQSKNIALGAVG

SEQ ID NO: 39210 - DNA, 1308 bp, Bartonella henselae str. Houston-1
  CDS (1)..(1308): transl_table=11
atgctggctgataaggatcgcattttcaccaatctttatggtttaaaagacaaatcattaaaggctgcgatatcacgtggacattgggatggtaccagggcaattatcgataaaggtcgtgattggattattgatgagatgaaggcatcgggtttgcgtggccgtggtggtgcgggttttcctactggaatgaagtggtcttttatgccaaaacagagcgatggtcggcctcattatttggttgtaaatgcagatgaatcagagcctggtacatgtaaagatcgcgatattttgcgacatgatccccatactttaattgaaggatgtgtacttgctacttttgcgatgggagcaaatgtcgcttttatttatattcgtggtgaatatattcgtgaacgtgaagcgcttcaagctgccgttgatgaatgttatgatgctggtttgcttggcaaaaaaacgaaatatgggcatgcttgtgatattattattcatcatggtgctggtgcttatatctgtggggaagaaaccgctcttcttgaaagtcttgaaggaaaaaaaggacaacctcggcttaaaccgccatttcctgcaaatatgggaatttatggctgtccaaccacagtcaataatgtagagtccattgctgttgtgccaacaattttgcgtcgcggtgcttcatggttttcatcaattgggcgtgcaaataatgttggaacgaaattgtttatggtttctgggcatgtgaatgcaccttgtacatttgaagaagctcttggagtttcttttcgtgaattaattgaaaaacataccggcggtattcgtggtgggtggaataatcttttagcagttattccaggaggggcttcttgcccggtcgttcgtggtgaggatatggtggatgcgattatggattttgatggaatgcgcgatgtcggatcttcttttggtacaggaggtatgattgttatggataaatcgaccgatattatcaaggcaatttggcgtatagcagctttttttaagcatgaaagttgtggtcagtgcacaccatgtcgtgaaggaacgggttggatgatgcgtcttttaggacgtatggttgagggaaaggcgcaaaaacgcgagattgatcttttatttgaggtttctaaacaagttgaagggcacactatttgtgcacttggtgatgctgccgcgtggcctatacaggggttaatacgtaattttcgtccagaaattgagcgtagaattgatgattatacgcgtaatgtagtccaaagaaaaaatattgctttagaagcagtagaatag

SEQ ID NO: 39211 - protein, 435 aa, Bartonella henselae str. Houston-1
MLADKDRIFTNLYGLKDKSLKAAISRGHWDGTRAIIDKGRDWIIDEMKASGLRGRGGAGFPTGMKWSFMPKQSDGRPHYLVVNADESEPGTCKDRDILRHDPHTLIEGCVLATFAMGANVAFIYIRGEYIREREALQAAVDECYDAGLLGKKTKYGHACDIIIHHGAGAYICGEETALLESLEGKKGQPRLKPPFPANMGIYGCPTTVNNVESIAVVPTILRRGASWFSSIGRANNVGTKLFMVSGHVNAPCTFEEALGVSFRELIEKHTGGIRGGWNNLLAVIPGGASCPVVRGEDMVDAIMDFDGMRDVGSSFGTGGMIVMDKSTDIIKAIWRIAAFFKHESCGQCTPCREGTGWMMRLLGRMVEGKAQKREIDLLFEVSKQVEGHTICALGDAAAWPIQGLIRNFRPEIERRIDDYTRNVVQRKNIALEAVE

SEQ ID NO: 39212 - DNA, 1332 bp, Acinetobacter sp. ADP1
  CDS (1)..(1332): transl_table=11
atgaatactgaaccaaaaccgatttatggcgacggaaaccctgaaactcatccgctgacttggcgtttgagtaagcaggagcatgtacgtagtgctgatgattacgaagcactagacggttatgcaggttttaaaaaagccattggcatgacacctgctgaagtccttgatgtcgtaaaagccgcaacagtcaaaggccgtggtggtgctggtttccctgccgggatcaaatggtcattgatggcgccaaatgatggtggtcctcgctacctgatttgtaatgccgatgaaatggaaccagggacttttaaagaccgtctattgatggaaaagttacctcaccagctgattgaaggtatgttgattgcagcatatacacttgaagcgactcagggttacatctttatccgtggtgaatatattgaagctgcccagtacttaaatgaagcactggaacaggctcgtgccaaaggttatcttggcgataatattcttggaacaggctggaatttcgagctttacgtccatacgggtgcggggcgttatatttgtggtgaagaaactgcattgattaactcactggaaggccgtcgtgccaacccacgtaccaaaccaccatttccacaggttgcaggtgcttggggtcgtccaaccatcgtcaataacgtagaaacctataataacttaccagcgatcatgttacgtggtcctgagtggtatatcggattgtctgctggcaagtcaaaagacccaggtaccaagatttatggtgcatcgggtaaagttaaattcccaggtttatgggagcttccatttggtacaactgcgcgcgaagtgattgaagagcatgcaggtggtatgcgtgatggattaaagctgaaagcatggttaccaggtggtgcatcaacagactttttggctgctgagcacattgatctgcctatggattcagaaagcattatgaaggcgggttctcgtttgggaacatgcttgctgatggtggtggatgaaacccaatgtatggtttcagcaacacgtaatctggaagaattctttgcacgtgaatcatgtggttggtgtacaccctgtcgtgatggtttgccttgggctgtgaaagcattaaaagcgctcgagaatggtgaagggaagatggaagatattcagcatcttcaggaactgactcgaaagttatggattggtaagactttctgtgctcacgcaccaggtgcgatggagccactgatgggcgcactcaaatatttccgtagcgagtttgaagcgaaagtggcaaaaagcccagtcgttcaaactagccacgtagcacaagcttaa

SEQ ID NO: 39213 - protein, 443 aa, Acinetobacter sp. ADP1
MNTEPKPIYGDGNPETHPLTWRLSKQEHVRSADDYEALDGYAGFKKAIGMTPAEVLDVVKAATVKGRGGAGFPAGIKWSLMAPNDGGPRYLICNADEMEPGTFKDRLLMEKLPHQLIEGMLIAAYTLEATQGYIFIRGEYIEAAQYLNEALEQARAKGYLGDNILGTGWNFELYVHTGAGRYICGEETALINSLEGRRANPRTKPPFPQVAGAWGRPTIVNNVETYNNLPAIMLRGPEWYIGLSAGKSKDPGTKIYGASGKVKFPGLWELPFGTTAREVIEEHAGGMRDGLKLKAWLPGGASTDFLAAEHIDLPMDSESIMKAGSRLGTCLLMVVDETQCMVSATRNLEEFFARESCGWCTPCRDGLPWAVKALKALENGEGKMEDIQHLQELTRKLWIGKTFCAHAPGAMEPLMGALKYFRSEFEAKVAKSPVVQTSHVAQA

SEQ ID NO: 39214 - DNA, 1350 bp, Erwinia carotovora subsp. atroseptica SCRI1043
  CDS (1)..(1350): transl_table=11
atgagtaaagacattgttctgactgctgagcagcaccctctgacctggcgtttacgcgcagacaaacagccggtgtggctggatgaatatcgcagtaaaaatggttatgtcgccgcgcaaaaagcgttaacgggtatggcgcaggatgaagtggtctcgctggttaaagacgccggcctgaaagggcgtggcggtgcgggcttttcaacaggcttgaagtggagcctgatgccgaaagacgaaagcatgaacatccgctatctgctatgtaacgcagatgagatggagccaggtacttataaagaccgcctgttgatggagcaagagcctcatctgctggttgaaggcatgctaatcagcgcctttgcgctgaaagcctaccgcggttacatcttcctgcgtggagaatacatcgaagctgctgttcacttgcgtcgtgcaattgaagaagcaaaagccgctggcttgctaggcaagaatatcctgggcagcggattcgatttcgagctgttcgtgcatacgggcgcagggcgttacatctgcggcgaagaaactgcactgattaactcgctggaaggccgtcgtgctaaccctcgctccaagccgccgttccctgcgtctgcgggtgcttggggcaaaccgacttgcgtcaataacgtcgaaacgctgtgtaacgtgcccgcgattatcgagcacggtgcggcgtggtatcagggattgtctgcgggtaaaagtaaagatgccggcacgaaactgatgggcttttctggccgcgtcaagaatccgggcctgtgggaactgccttttggcaccacggcgcgtgagattttggaagattacgcgggcggcatgcgcgatggtctgaaactgaaagcttggcagccgggcggtgcaggtacagatttcctaacggaaagccatctcgatctgccgatggactttgagcacattgcaaaagcaggtagccgtatgggtaccgcgctggcgatggctgtcgatcacgaaatcaatatggtctcgttgacgcgcaatttggaagagttcttctcccgtgaatcctgtggctggtgtacaccgtgccgtgatggtctgccgtggagtgtgaagattctgcgtgcgctggaaaatggtgaaggtcagcctggcgatatcgaaacgctggagcagctttgccgtttcctcggaccgggtaacaccttctgtgcgcatgcgccgggtgcggtcgagccgctgcaaagtgccatcaagtatttccgggaagaattcgaagcgggtatctctaaacagtatttaggcaacctcaaagcgattggcggtattcagcctaacctgttgaaagagcgctggtaa

SEQ ID NO: 39215 - protein, 449 aa, Erwinia carotovora subsp. atroseptica SCRI1043
MSKDIVLTAEQHPLTWRLRADKQPVWLDEYRSKNGYVAAQKALTGMAQDEVVSLVKDAGLKGRGGAGFSTGLKWSLMPKDESMNIRYLLCNADEMEPGTYKDRLLMEQEPHLLVEGMLISAFALKAYRGYIFLRGEYIEAAVHLRRAIEEAKAAGLLGKNILGSGFDFELFVHTGAGRYICGEETALINSLEGRRANPRSKPPFPASAGAWGKPTCVNNVETLCNVPAIIEHGAAWYQGLSAGKSKDAGTKLMGFSGRVKNPGLWELPFGTTAREILEDYAGGMRDGLKLKAWQPGGAGTDFLTESHLDLPMDFEHIAKAGSRMGTALAMAVDHEINMVSLTRNLEEFFSRESCGWCTPCRDGLPWSVKILRALENGEGQPGDIETLEQLCRFLGPGNTFCAHAPGAVEPLQSAIKYFREEFEAGISKQYLGNLKAIGGIQPNLLKERW

SEQ ID NO: 39216 - DNA, 1335 bp, Propionibacterium acnes KPA171202
  CDS (1)..(1335): transl_table=11
gtgaccgatccactgaccccggttctgtcggccaattgggatgaagagcgcagttggaagctgcttaactacgagcgacagggcggatacaccggccttcgtaaggctttgacgatgccgcctgacgacgttgtctcgctggttaaggacgctaacctgcgtggccgtggtggcgccgggttccccaccggcatgaagtggtccttcgtgcctaaggacaatcccaacccgacctacctcgttgtcaacggcgacgagtctgagccgggcacgtgcaaggacatgccgctcatgatggcctccccgcacaccctcgtcgagggcgtcatcattgcctcctacgccatcaaggccaagatggccttcatctacatccgcggtgaggtgctgcacgtcgtccgacgcgtgcagcaggccgtgcgggaggcctactcggctggttacattggcaaaaacatcctcggttccgggtacgaccttgacgttgtcgtccatgccggcgcaggcgcctacatctgtggcgaggagacggctctgctggattccttggaggggcgtcgtggtcagcctcgtctgcgcccgcctttcccggccgttgccggcctgtacgccagtccgacggtcattaacaacgtcgagtccatctcgacggtgccgtcgatcctgcgcaacggcaaggaatggttcaagtccatgggcaccgagaagtccgatggtttcaccatctactctttgtctgggcacttggctcaccctgggcagtatgaggccccgatgggcactacgctgcgtcagctcctcgacatctccggtggcatgcgacagggacatgaactgaagttcttcacccccggtggttcctcgaccccgatcctgaccaaggacgacatcgacctcccgctcgactacgaggggatggctggggccaagacgatgctcggcacgaaagctctgcagtgcttcgacgagacgacctcggtggttcgcgtcacgttgcggtggttggagttttacaagcacgaatcctgcggtaaatgcaccccgtgccgtgagggcacctggtgggttgtccagatgttgcgtcgcatcgaggctggtgagggccaagagggtgacgtcgacaagttgatggacattgccgacaatatcggtggccgttctttctgcgctttggccgacggtgccgtgggctgtttgcgcggggctattggccacttccgtgacgagttcgaagctggatgtcgggggattcccgcttggcagtatctgccctatgagcgcagctcgatcttcaacgacgccgatcgccgagtcctggagggggccggagcatga

SEQ ID NO: 39217 - protein, 444 aa, Propionibacterium acnes KPA171202
MTDPLTPVLSANWDEERSWKLLNYERQGGYTGLRKALTMPPDDVVSLVKDANLRGRGGAGFPTGMKWSFVPKDNPNPTYLVVNGDESEPGTCKDMPLMMASPHTLVEGVIIASYAIKAKMAFIYIRGEVLHVVRRVQQAVREAYSAGYIGKNILGSGYDLDVVVHAGAGAYICGEETALLDSLEGRRGQPRLRPPFPAVAGLYASPTVINNVESISTVPSILRNGKEWFKSMGTEKSDGFTIYSLSGHLAHPGQYEAPMGTTLRQLLDISGGMRQGHELKFFTPGGSSTPILTKDDIDLPLDYEGMAGAKTMLGTKALQCFDETTSVVRVTLRWLEFYKHESCGKCTPCREGTWWVVQMLRRIEAGEGQEGDVDKLMDIADNIGGRSFCALADGAVGCLRGAIGHFRDEFEAGCRGIPAWQYLPYERSSIFNDADRRVLEGAGA

SEQ ID NO: 39218 - DNA, 1905 bp, Desulfotalea psychrophila LSv54
  CDS (1)..(1905): transl_table=11
ttgaccagaaggaagaggccaatgacgattaaagagatacgacagcaggcagaggcgaactggcagtcacttataaagggcaccgttatctatattggagctgcaacctgtggacgttccgccggcgccctaaaaaccaaaaaagcctttgagacagagctggcaaaacaaaatgttaaggctgaaattgtcgaggtgggttgctttggcccctgttacacagagcccctgatctgtattgccagacccggcaagaccaagctcttctttcaaaatgtcgacggagagagggcggaagaactggtgactggctacctgcaaacaggagagattccccgtgactatctctttgctgccgtcccagaagatggcattgaacgggaaaaggaattgccataccttgatgaaaagccagaatttgcccggcaaaaaagaattctctttgccagcttcggctttaccgaccccaccaatatagagcactacctcgtccatgatggctacctggccctggaaaagtccctgcaagagggccctgacatggtacttaccgagataaaaaaatctgccctacgcggtcgcggcggtggcggcttccctgctgcccgcaagtgggaggcgggcaggaaagctacaggtcaccctaaatatgtggtctgtaacgcagatgaaggtgaccccggagccttcatggatcgatccgtgctcgagggtgatccccatgcagttcttgagggcatggccattgccggcctcaccattggttctgaaaaaggctatatctatgtccgggcagaatacccccttgccattgcccgattgcaaaatgccatcgatcaggccaaggagaaaaacctcctcggagccaacatcctcggcacagacttctcctttgacatcgaactattccagggagcaggggcctttgtctgcggggaatcgacggcactcacccaatccatccagggctaccgcggcatgcccaaggcctctccccgcccccgtaccaccgacgagggtctctttgacaagccaaccctgctcaataacgtaaagacctttgcctatgtccccaagattatcaacagcggcggtgaaagctttgccgccatcggtaccgagaagagcaagggtaccgctgtctttgccctgaccggaatggtcaagcactgcggactcatcgaagtccccatgggcaccaccctgcgtgaaatcgtctttgagctgggtggtgggatggtcggtgaaagtcccttcaaggccattcaatccggtggcccctccggtggctgccttcccgcccacacccttgatacccctgtggattatgactctctggtttctgccggggccatgatgggctccggtggactggtggtcatggatgagtcaacctgtatggtggacattgcccgatattttctcgatttcacccaaaaagagtcctgcggccagtgcaccctctgcaagcttggcaccaaacagatgctcaacatccttgaagatattgtcgccggtcgcggcaaagagggagacatagagctacttcttgaggtgggcgaggcagttaacgctggttctctctgcggactgggcaagagtgcagcaaaccccgttctcaccaccattaaatattttagagacgagtacgaggctcatatccgcgacaaggcctgtcccgcatgtgcatgcaaagaccttatctcttttcacatcgaccctgaaaaatgcacaggctgtactgcctgcgccagggcctgccctgtctcggccatcagtggcgaaaagagacaggtacatcaaatcgaccaagcactctgtatccgttgcggagtttgtctggaaaaatgtccgaaaaaatgggccgcagttagctgcatccccggtaatgggttgggagaataa

SEQ ID NO: 39219 - protein, 634 aa, Desulfotalea psychrophila LSv54
MTRRKRPMTIKEIRQQAEANWQSLIKGTVIYIGAATCGRSAGALKTKKAFETELAKQNVKAEIVEVGCFGPCYTEPLICIARPGKTKLFFQNVDGERAEELVTGYLQTGEIPRDYLFAAVPEDGIEREKELPYLDEKPEFARQKRILFASFGFTDPTNIEHYLVHDGYLALEKSLQEGPDMVLTEIKKSALRGRGGGGFPAARKWEAGRKATGHPKYVVCNADEGDPGAFMDRSVLEGDPHAVLEGMAIAGLTIGSEKGYIYVRAEYPLAIARLQNAIDQAKEKNLLGANILGTDFSFDIELFQGAGAFVCGESTALTQSIQGYRGMPKASPRPRTTDEGLFDKPTLLNNVKTFAYVPKIINSGGESFAAIGTEKSKGTAVFALTGMVKHCGLIEVPMGTTLREIVFELGGGMVGESPFKAIQSGGPSGGCLPAHTLDTPVDYDSLVSAGAMMGSGGLVVMDESTCMVDIARYFLDFTQKESCGQCTLCKLGTKQMLNILEDIVAGRGKEGDIELLLEVGEAVNAGSLCGLGKSAANPVLTTIKYFRDEYEAHIRDKACPACACKDLISFHIDPEKCTGCTACARACPVSAISGEKRQVHQIDQALCIRCGVCLEKCPKKWAAVSCIPGNGLGE

SEQ ID NO: 39220 - DNA, 1653 bp, Desulfotalea psychrophila LSv54
  CDS (1)..(1653): transl_table=11
atgaccctgacgcttgaagatcttaaccatatcgcggccatagaaaaagaacaccagcacagttttcaacatcagctgaatatttgtgttgctgcaggttgtctctcctgcggaagcggggagcttaaaacagcactgcaagaagaggtggctcgacgcgggctggataaacaggtctgcgtcaaaggggttggatgccttggactgtgttcagctggaccgcttgttgcccttgcctcgaagaatgtactttatcagggatgcggccctgctgatgtggagacaatcctcgatgctttggggggggcacctgcgaagcatttactctgttccagtgatattccctttttcaacaagcagcgcaaggttgtacttgagtactgtggtaaaatagaccctgaacgtattgaggaatatatcgcggtaggggggtaccagtccctatatactgcgttgcgtcaaatgacgcccaaggaagttatcgatgaggtcaccgcatctggcttacgtggtcgcggtggcgctggatatcccacaggcctcaaatggtctacggtgtccaaagcaatcaatgccgtgaagtatgttgtttgtaacgcagatgaaggcgaccctggtgcattcatggatcgaagtgtcttggaaagtgacccccaccgagtgatcgagggcatggctattggtgcttacgctgttggtgccaggcagggaattatttatgttcgagccgagtatccgctggcggtaaaacggctacaaaaggccattacccaggctaagcgcataggcattttggggaatggtatttttaacagcgactttcaatttgatattcaaatcaggttgggggcaggcgcttttgtctgcggagaagaaacagcgctgattgcctctattgaaggccgagtaggaaaaccgtgtccgcgccctccttatcctgccgaatcagggttaaaacaatgtcccaccttaatcaataatgtggaaacctttgccaatattgcacctattatccgcaatggcggtcagtggctggccagtatcggcaccagcaagagcaaaggaaccaaggtttttgctcttgccggtaaggtgcaacagaagggattgattgaagtggccatgggcacaaccctgggggagattgtttttgatatcggcggtggtatcgctgatggcggtacattcaaagccgtacagacaggcggcccctcgggtggttgtattccaaagcagtttcttgatatgggggtggattatgagtctcttgccaaggttggctcgattatggggtcaggaggcatgattgttatggatcaaggctcatgtatggtggatgttgccaggttttttgttgaattttgtatgagtgaatcgtgtgggaagtgtgtcccctgtcgggtggggaccaggcagatgcatgatgtgctgggcaagatcgcaagcggccggggggaggcgtctgatctcaccttgcttgaagagttgtgtgatttggtgaaaaataccgctctgtgcggtcttggccaggcatcggttaacccgatattgagcaccctatgctactttaaagatgagtacctggctcatattgaggagaagcggtgtattgctcattcctgcacactaccagtaaacaaggagggcaaatga

SEQ ID NO: 39221 - protein, 550 aa, Desulfotalea psychrophila LSv54
MTLTLEDLNHIAAIEKEHQHSFQHQLNICVAAGCLSCGSGELKTALQEEVARRGLDKQVCVKGVGCLGLCSAGPLVALASKNVLYQGCGPADVETILDALGGAPAKHLLCSSDIPFFNKQRKVVLEYCGKIDPERIEEYIAVGGYQSLYTALRQMTPKEVIDEVTASGLRGRGGAGYPTGLKWSTVSKAINAVKYVVCNADEGDPGAFMDRSVLESDPHRVIEGMAIGAYAVGARQGIIYVRAEYPLAVKRLQKAITQAKRIGILGNGIFNSDFQFDIQIRLGAGAFVCGEETALIASIEGRVGKPCPRPPYPAESGLKQCPTLINNVETFANIAPIIRNGGQWLASIGTSKSKGTKVFALAGKVQQKGLIEVAMGTTLGEIVFDIGGGIADGGTFKAVQTGGPSGGCIPKQFLDMGVDYESLAKVGSIMGSGGMIVMDQGSCMVDVARFFVEFCMSESCGKCVPCRVGTRQMHDVLGKIASGRGEASDLTLLEELCDLVKNTALCGLGQASVNPILSTLCYFKDEYLAHIEEKRCIAHSCTLPVNKEGK

SEQ ID NO: 39222 - DNA, 1266 bp, Rickettsia typhi str. Wilmington
  CDS (1)..(1266): transl_table=11
atgctaaaagaagaagataaaatttttattaatttgtatggacagcaaagctatgatttaaaatctagcaaaaagcgaggagattggtataatactaaggcattgcttgataaaggtagagacttcattattgacgaggttaagaaatcagggcttagaggacgcggtggtgctggattttctactggtatgaaatggtcatttatgcctaaaaattcagagaagccttgttatttagtagtaaatgcagacgaatctgagcctggtacttgtaaagatcgtgatatattaagatttgaaccgcacaaattaatagaaggttgtttgattgcaagctttgctataggagcgaataattgttatatctatattagaggtgaattttataatgaagcttctaatatgcagcgtgccttagatgaagcttatacagaagggttaataggcaaaaatgcttgtggttcaggttttgattgtaatatttatttacatcgtggtgcaggtgcttatatttgcggggaagaaactgcgttacttgagagcttagaaggtaaaaaaggtatgccacgacttaagccaccttttcctgctgggtttggtttatatggttgtccaactactataaataatgttgaatctattgcagtagtgccgacaattttaagacgaggggcaagttggtttgctgcaatcggtaagcctaacaatactggtactaagattttttgcatatctggtcatgttaataagccttgcaatattgaagaagcaatggggattccattaaaagaattgattgagaaatatgctggcggtgtgcgtggtggatgggataatcttaaagcaataatcccaggtggtgcttctgtgcctttgctacctaaatcattatgtgaagtagagatggattttgatagtttaagaacagtaggttctggacttggtacaggtggtattattgttatggatagatctactgacattatttatgcaatagcacgcctgagtaaattttatatgcatgaatcatgtgggcaatgtaccccttgccgagagggtactggttggatgtggcgagttatgatgcgcttagttaatggtaatgcaaaaaaaaccgaaatagaaactttgttgaatgttacaaaagaaatagaggggcatactatttgtgccttgggtgatgctgcagcttggccaatccaagggttgatacgacattttagagatgaaattgaggagaggatcaagaattttggcatagcttaa

SEQ ID NO: 39223 - protein, 421 aa, Rickettsia typhi str. Wilmington
MLKEEDKIFINLYGQQSYDLKSSKKRGDWYNTKALLDKGRDFIIDEVKKSGLRGRGGAGFSTGMKWSFMPKNSEKPCYLVVNADESEPGTCKDRDILRFEPHKLIEGCLIASFAIGANNCYIYIRGEFYNEASNMQRALDEAYTEGLIGKNACGSGFDCNIYLHRGAGAYICGEETALLESLEGKKGMPRLKPPFPAGFGLYGCPTTINNVESIAVVPTILRRGASWFAAIGKPNNTGTKIFCISGHVNKPCNIEEAMGIPLKELIEKYAGGVRGGWDNLKAIIPGGASVPLLPKSLCEVEMDFDSLRTVGSGLGTGGIIVMDRSTDIIYAIARLSKFYMHESCGQCTPCREGTGWMWRVMMRLVNGNAKKTEIETLLNVTKEIEGHTICALGDAAAWPIQGLIRHFRDEIEERIKNFGIA

SEQ ID NO: 39224 - DNA, 1278 bp, Symbiobacterium thermophilum IAM 14863
  CDS (1)..(1278): transl_table=11
atgatccagtttgaacctgtgctgacgaaaggcatcgggaaggtcgacctgaccaacatcgatgtgtacgaagcgcagggcgggtatcaggctctccgcaaggccctcgccatggagccccaggcgatcgtggaggaggtcaagaaggcgaacctccgcggccgcggcggcgccggcttcccggccggggtcaagtggagcttcctgcccaacgacggccggccccgctacctcacggtgaacgcggacgagtccgagcccggcacctgcaataaccgcaccctgatctacgccaatccccaccagctcatcgaggggatcctcatcaccgcgtatgccaaccggatcacgcagtcgttcatctacatccgcggcgagttcaagcggggcgccgagatcctgatgaaggccatcgaggacgcccggcggaagggctatgtcggccagaacatcctgggtaccggcttcagccaggagatcaccgtgcaccggggcgccagcgcctacatctgcggcgaggagtccgcgctgctcaactcgctggagggccggcgcggcgagccgcgggtgaagccgccgttcccggcggtggtgggcctgtacggctgcccgaccatcatcaacaacgtggagaccatctccaacgtgccgcacatcatcaagaacggctgggagtggtacacgaagatcaccgccaatcccgacaaccccaagtcctgcggcccgaagatcttcacggtgtcgggctgcgtgcagcgccccggcaactacgagttgccgatgggcgtgaagctgcgggacgtgatcgagatcgccggcggcctccggcccggtcgcaagctgaaggcggtgcagcccggcggctcgtcgaccccgatgctcacgcctgaccacctggacgtgcccatggactttgagtcggtggcggcggcgggctcgctgctgggcaccgcggcggtgatcgtctacgacgacaccgtcgacctggtggacgtggcgctgtactgggcccggttctactcccacgagtcctgcggccagtgcacgccttgccgagagggcacccactggctggagcgggtcttcacccggatcaaggaaggcggcggcacggagggcgacctgaagatgatcgccgacatgcagacccagatggcggggaccaccatctgcgtcctgtccgacgccgcggtcgccttcccggcctcgctgctgaagctgttccccgaggagctcgaccgctacatcaaccgcgtgaaggaggtgcggccggcgtga

SEQ ID NO: 39225 - protein, 425 aa, Symbiobacterium thermophilum IAM 14863
MIQFEPVLTKGIGKVDLTNIDVYEAQGGYQALRKALAMEPQAIVEEVKKANLRGRGGAGFPAGVKWSFLPNDGRPRYLTVNADESEPGTCNNRTLIYANPHQLIEGILITAYANRITQSFIYIRGEFKRGAEILMKAIEDARRKGYVGQNILGTGFSQEITVHRGASAYICGEESALLNSLEGRRGEPRVKPPFPAVVGLYGCPTIINNVETISNVPHIIKNGWEWYTKITANPDNPKSCGPKIFTVSGCVQRPGNYELPMGVKLRDVIEIAGGLRPGRKLKAVQPGGSSTPMLTPDHLDVPMDFESVAAAGSLLGTAAVIVYDDTVDLVDVALYWARFYSHESCGQCTPCREGTHWLERVFTRIKEGGGTEGDLKMIADMQTQMAGTTICVLSDAAVAFPASLLKLFPEELDRYINRVKEVRPA

SEQ ID NO: 39226 - DNA, 1857 bp, Symbiobacterium thermophilum IAM 14863
  CDS (1)..(1857): transl_table=11
gtgcgggcccggcgtgcgggcgccatcgccctgcgccaggccgaggccgtgaacctggcggaagcgcccgaggtgcacatcctcgtctgtgcgggcacgggctgccaatccaacaagtccctgaacaccgtcgcggccctccagcaggcggtggaggaccacggcgtggctgaccgggtgaaggtcgtgcccgtcgggtgtttcggcttctgccggatggggccggtggtggtggtgtatcccggccagaccttctactgcgaggtgcagccgcagcacgcaccggtcatcatccagcagcacgtgctgggcggccagcccgtcgaggcgctgctgtacgcgcccaatccgcgggagaagcaccgcatcgccaagatgatggaccagcccttctacaaggggcagcaccgcacggccctcagccactgcggcctcatcaaccccgagtgcatcgaggaggccatcgctgcggaccgctacttcgccctggccaaggccctgctggagatgaccccggcccaggtgatcgaagaggtgaagcgctcgggcctgcggggccggggcggcggcggcttccccacgggccgcaagtgggaactggcggccgcggtggagggcgacgtgaagtacgtcctctgcaacgccgacgagggggatcccggcgcgttcatggaccgctccatcatcgagggcgacccgcacgccatcctggaagccatggccatcgccgggtacgccatcggggcacagcacggctacatctacgtgcgcgccgagtacccggtcgcggtgcaccggctggagatcgccatccggcaggcccgcgagctcggcctcctgggcgagaacattctcggcacgggcttcagcttcgacatcgacatccgtctcggcgccggcgccttcgtctgcggcgaggagacggctctgatcgcctcgattgaaggccagcgcggcctgccccggccccggcctcccttcccggcgcagaaggggctgtggggcaagccgacgctgaacaacaacgtcgaaacctacgccaacgtgccgtacatcatcctccacggcgctgaggccttccgtagcgtgggcacggagaagtcgccgggcaccaaggtgtttgccgtggccggcaacgtgatgaacaccggcctggttgaggtgcccatcggcaccaccctccgggagatcgtctacggcatggccggcggcatcccgaaggggcggccgttcaaggcggcccagaccggcggcccctccggcgggtgcattcccgcccacctgctggatatccccatggattacgagccgctcaacgaggtcggctccatgatggggtccggcgggctcatcgtgatggacgaccagtcctgcatggtcgacgtggcacgcttctacctgcagttcacccaggacgagtcctgcgggaagtgcccgccctgccgcatcggcaccaagcggatgctggagatcctggaccgcatcgtcgagggcgagggcacgatggaggacctggacgagctggagcggctggccaacgggatcaaggccacggcgctgtgcggcctcggccagaccgcgccgaacccggtcctgtccaccctgcgctacttccgtgaggagtacgaggcgcacgtgcgggacaagcactgcccggcggggcgctgcaaggccctgacggacttccggatcgaccaggagcggtgcaaggcgtgcaacgtctgcgcccggaactgcccggtggacgccgtccacggcgaggtgcgcaagccggagacgttctacatcgacgccgaggcgtgcatcaagtgcgggacgtgcgccaccgtctgcaagttcaacgccgttgtatggtaa

SEQ ID NO: 39227 - protein, 618 aa, Symbiobacterium thermophilum IAM 14863
MRARRAGAIALRQAEAVNLAEAPEVHILVCAGTGCQSNKSLNTVAALQQAVEDHGVADRVKVVPVGCFGFCRMGPVVVVYPGQTFYCEVQPQHAPVIIQQHVLGGQPVEALLYAPNPREKHRIAKMMDQPFYKGQHRTALSHCGLINPECIEEAIAADRYFALAKALLEMTPAQVIEEVKRSGLRGRGGGGFPTGRKWELAAAVEGDVKYVLCNADEGDPGAFMDRSIIEGDPHAILEAMAIAGYAIGAQHGYIYVRAEYPVAVHRLEIAIRQARELGLLGENILGTGFSFDIDIRLGAGAFVCGEETALIASIEGQRGLPRPRPPFPAQKGLWGKPTLNNNVETYANVPYIILHGAEAFRSVGTEKSPGTKVFAVAGNVMNTGLVEVPIGTTLREIVYGMAGGIPKGRPFKAAQTGGPSGGCIPAHLLDIPMDYEPLNEVGSMMGSGGLIVMDDQSCMVDVARFYLQFTQDESCGKCPPCRIGTKRMLEILDRIVEGEGTMEDLDELERLANGIKATALCGLGQTAPNPVLSTLRYFREEYEAHVRDKHCPAGRCKALTDFRIDQERCKACNVCARNCPVDAVHGEVRKPETFYIDAEACIKCGTCATVCKFNAVVW

SEQ ID NO: 39228 - DNA, 1287 bp, Legionella pneumophila subsp. pneumophila str. Philadelphia 1
  CDS (1)..(1287): transl_table=11
gtgtttgccatggttgaactaaatcaagtttgttaccgaacatttcatttaccagagtcctggtcgctatcaacttatgaaagtattggtggctatagcgcatggcgaaaaattttaaaagagcaaacatcacctcaattaataattgaagagttgaaaacttctgccttgcgcggacgaggaggggctggattcccaaccggtttaaaatggagttttatgaatagaaactcccctgttcaaaaatacgtagtatgtaattctgatgaaggtgaaccgggtacttgtaaggacagagagattcttactttaaatcctcaccaattaatcgaaggaatggccatagctgggtatgttatgggcgccacggttggttacaactacataagaggagaattctggctaccttttgagcgtactgaggctgcaataaaagaagcatacgatgctggcttgctaggtaaaaatatattaggctccggctttgattttgatttatataatcatttaggcgctggtgcttacatttgcggtgaagaaactgcattgcttaactcaattgaaggaaaaaagggaatgcctcgttttaaaccaccattcccggcaaattatggcttgtatggtaaaccgacaaccataaataacacggaaacatttgcgtctgttccggttattatggaaaaaggtggagaatggtttttaaaattaggtaaaccgaacaatggcggtgccaaatgctttagtgttagcggccatgttaacaaacctggtaactatgaaattcccttgggcacgccattcaaaacgctacttgatctggctggcggcgtgattaaaggccgaaaaatcaaagccgtgattcctggtggttcctctatgccagtgctcccaggcgacgtcatgctggggctggatatggattatgacagtatacagaaagccggctcaggcttgggttcaggcgcagtcattatcatggatgaaaccacctgcatggtggatgctttgtatcgtatttctgagttctacatggatgaatcctgtggacaatgcacaccttgtcgggaaggcacaggttggttagtcaggttattacacagaattataaacggtcatggcgagccgggagacgtggagaaattagtgaatgtggcgaataacatagagggaagaaccatttgtgcattaggcgaggcagcagcttggccagtacagagttttgttaaacatttctatgatgaatttgaatatttcataaagcataaacgctcgatcgtcgcagcataa

SEQ ID NO: 39229 - protein, 428 aa, Legionella pneumophila subsp. pneumophila str. Philadelphia 1
MFAMVELNQVCYRTFHLPESWSLSTYESIGGYSAWRKILKEQTSPQLIIEELKTSALRGRGGAGFPTGLKWSFMNRNSPVQKYVVCNSDEGEPGTCKDREILTLNPHQLIEGMAIAGYVMGATVGYNYIRGEFWLPFERTEAAIKEAYDAGLLGKNILGSGFDFDLYNHLGAGAYICGEETALLNSIEGKKGMPRFKPPFPANYGLYGKPTTINNTETFASVPVIMEKGGEWFLKLGKPNNGGAKCFSVSGHVNKPGNYEIPLGTPFKTLLDLAGGVIKGRKIKAVIPGGSSMPVLPGDVMLGLDMDYDSIQKAGSGLGSGAVIIMDETTCMVDALYRISEFYMDESCGQCTPCREGTGWLVRLLHRIINGHGEPGDVEKLVNVANNIEGRTICALGEAAAWPVQSFVKHFYDEFEYFIKHKRSIVAA

SEQ ID NO: 39230 - DNA, 1566 bp, Burkholderia mallei ATCC 23344
  CDS (1)..(1566): transl_table=11
atgagcacgcgcattcatgtgccgcgcgattcggccgcgctcgcggtcggcgccgacgcgctcgcgcgcgcgatcgaggcgcaggcggccgcgcgcggcatcgcgatcgagctcgtgcgcaacggctcgcgcgggctgctgtggctcgagccgctcgtcgaagtgagcaccccggcgggccgcatcggctatgcgaacctcacggcagccgacgtccccgcgctcttcgacgcgggctggctcgacggcgccgcgcatccggcgtgcgtcggcatcgtcgacgagattccctatctgaagcgccagcagcggctcacgttcgcgcgcatcggcatcaccgatccgctgtcgatcgacgattacgtcgcgcacggcggcctcgaaggcctgaggaacgcgctcgcactcgacggcgccgccgcatgcgagacgctcgtcgaatcgggcctgcgcgggcgcggcggcgccgcattcccggcgggcgtcaaatggcggaccgtgcgcgaggccgcggccgcgcagaaatacgtcgtctgcaatgcggacgaaggcgactccggcaccttctccgatcgcctcgtgatggaaagcgatccgtactgcctgatcgaaggaatgatcatcgcgggcatcgcgacgggcgcgaccgtcggccatatctacgtgcgcagcgaatatccgcacgcgatcgcggcgctcggcgaggcgatcgcccgcgcgcgcgcggccggctggctcggcgcgagcgtgctcggcaccgcgcatgcgttcgagctgcacgtcgcgaaaggcgcgggcgcctacgtctgcggcgaagagaccgcgctcctcgaatcgctcgaaggcaagcgcggcgtcgtgcgcgcgaagccgccgctgcccgcgctatcgggactcttcgcaaaaccgaccgtcatcaacaacgtgatcacgctcgcgaccgtaccgatcatcttcgcgcgcggcgcggcgttctatcgcgattacggcatgggccgctcgcgcggcacgctgccgttccagctcgcaggcaacgtgaagcgcggcgggctcgtcgagctcgcgttcggcgtcacgctgcgcgagctgctgttcgatttcggcggcggcaccgcgagcgggcgccccgcgcgcgccgcgcaggtcggcggcccgctcggcacctacctgcccgagggccagtgggacatcccgctcgattacgaggcgtacgcggctgtcggcgccgtcgtcgggcacggcggcatcgtgctgcacgacgacacgtcgaacctggccgagctcgccgaatacgcgatgcacttctgcgcgctcgaatcgtgcggcaagtgcacgccgtgccggatcggctcgacgcgcggcgtcgagacgatcgcgaggatccgcgcgggcgacacgtcggagcgacaggtgcgcctgctgcgcgacctgtgcgacacgatgaccgcgggctcgctctgcgcgatgggcggcatgacgccgtacccggtgctgtccgcgctcgaccatttccccgaagatttcggcctcgccgcgcacgcgagccacgcggcacccgccgcctga

SEQ ID NO: 39231 - protein, 521 aa, Burkholderia mallei ATCC 23344
MSTRIHVPRDSAALAVGADALARAIEAQAAARGIAIELVRNGSRGLLWLEPLVEVSTPAGRIGYANLTAADVPALFDAGWLDGAAHPACVGIVDEIPYLKRQQRLTFARIGITDPLSIDDYVAHGGLEGLRNALALDGAAACETLVESGLRGRGGAAFPAGVKWRTVREAAAAQKYVVCNADEGDSGTFSDRLVMESDPYCLIEGMIIAGIATGATVGHIYVRSEYPHAIAALGEAIARARAAGWLGASVLGTAHAFELHVAKGAGAYVCGEETALLESLEGKRGVVRAKPPLPALSGLFAKPTVINNVITLATVPIIFARGAAFYRDYGMGRSRGTLPFQLAGNVKRGGLVELAFGVTLRELLFDFGGGTASGRPARAAQVGGPLGTYLPEGQWDIPLDYEAYAAVGAVVGHGGIVLHDDTSNLAELAEYAMHFCALESCGKCTPCRIGSTRGVETIARIRAGDTSERQVRLLRDLCDTMTAGSLCAMGGMTPYPVLSALDHFPEDFGLAAHASHAAPAA

SEQ ID NO: 39232 - DNA, 1311 bp, Burkholderia mallei ATCC 23344
  CDS (1)..(1311): transl_table=11
atgacgtcccttcacgatcgtcacatcaaaccgctgatcctcgccggcctgaccggcgagaactggcatctcgaagactacgtcgcgcgcggcggctacaagcagttgcgccgcatcctcgaagaaaagattccgcccgagcaggtgatcgccgacgtgaaggcgtcggggctgcgcggccgcggcggcgcgggcttcccgaccggcctgaagtggagcttcatgccgcgccagttcccgggccagaagtatctcgtctgcaactcggacgagggcgagccgggcacgttcaaggatcgcgacatcctgcgctggaacccgcatgcgctgatcgaaggcatggcgatcggcgcgtacgcgatgggcatcaccgtcggctacaactacatccacggcgagatcttcgaagtgtatcggcgcttcgaggcggcgctcgacgaagcgcgccgcgcgggcttcctcggcgagaagatcatgggctcggatttctcgttccagttgcatgcgcaccacggctacggcgcgtacatctgcggcgaggaaaccgcgctgctcgagtcgctcgaaggcaagaagggccagccgcgcttcaagccgccgttcccggcgagcttcggcgtatacggcaagccgacgacgatcaacaacaccgagacgttcgcggcggtgccgttcctgctggcggtcggcccgcagaactacctcgagatgggcaagccgaacaacggcggcacgaagatcttctcggtgtcgggcgacgtcgagcgtccgggcaactacgagattccgctcggcacgccgtttgcgacgctgatggagctcgcgggcgggatgcgcggcggcaagaagatcaaggcggtgatcccgggcggttcgtccgcgccggtgatcccgggcgacatcatgatgcagaccgatatggactacgactcgatcgcgaaggcgggctcgatgctcggctccggcgcggtgatcgtgatggacgagacgcgctgcatggtgcgctcgctgctgcgcctgtcgtacttctattacgaagagtcgtgcggccagtgcacgccgtgccgcgaaggcacgggctggctgtatcgcgtcgtgaaccgcatcgagcacggcgaggggcgccaggaagacctggacctgctgaactcggtcgcggagaacatcatgggccgcacgatctgcgcgctcggcgacgcggcggtgatgccggtgcgcgggatgctcaagcactactgggacgaattcgcgtaccacgtcgagcacaagcactgcatggtcggcggccacgcgcatgcggccgtcgcctga

SEQ ID NO: 39233 - protein, 436 aa, Burkholderia mallei ATCC 23344
MTSLHDRHIKPLILAGLTGENWHLEDYVARGGYKQLRRILEEKIPPEQVIADVKASGLRGRGGAGFPTGLKWSFMPRQFPGQKYLVCNSDEGEPGTFKDRDILRWNPHALIEGMAIGAYAMGITVGYNYIHGEIFEVYRRFEAALDEARRAGFLGEKIMGSDFSFQLHAHHGYGAYICGEETALLESLEGKKGQPRFKPPFPASFGVYGKPTTINNTETFAAVPFLLAVGPQNYLEMGKPNNGGTKIFSVSGDVERPGNYEIPLGTPFATLMELAGGMRGGKKIKAVIPGGSSAPVIPGDIMMQTDMDYDSIAKAGSMLGSGAVIVMDETRCMVRSLLRLSYFYYEESCGQCTPCREGTGWLYRVVNRIEHGEGRQEDLDLLNSVAENIMGRTICALGDAAVMPVRGMLKHYWDEFAYHVEHKHCMVGGHAHAAVA

SEQ ID NO: 39234 - DNA, 1311 bp, Burkholderia pseudomallei K96243
  CDS (1)..(1311): transl_table=11
atgacgtcccttcacgatcgtcacatcaaaccgctgatcctcgccggcctgaccggcgagaactggcatctcgaagactacgtcgcgcgcggcggctacaagcagttgcgccgcatcctcgaagaaaagattccgcccgagcaggtgatcgccgacgtgaaggcgtcggggctgcgcggccgcggcggcgcgggcttcccgaccggcctgaagtggagcttcatgccgcgccagttcccgggccagaagtatctcgtctgcaactcggacgagggcgagccgggcacgttcaaggatcgcgacatcctgcgctggaacccgcatgcgctgatcgaaggcatggcgatcggcgcgtacgcgatgggcatcaccgtcggctacaactacatccacggcgagatcttcgaagtgtatcggcgcttcgaggcggcgctcgacgaagcgcgccgcgcgggcttcctcggcgagaagatcatgggctcggatttctcgttccagttgcatgcgcaccacggctacggcgcgtacatctgcggcgaggaaaccgcgctgctcgagtcgctcgaaggcaagaagggccagccgcgcttcaagccgccgttcccggcgagcttcggcgtatacggcaagccgacgacgatcaacaacaccgagacgttcgcggcggtgccgttcctgctggcggtcggcccgcagaactacctcgagatgggcaagccgaacaacggcggcacgaagatcttctcggtgtcgggcgacgtcgagcgtccgggcaactacgagattccgctcggcacgccgtttgcgacgctgatggagctcgcgggcgggatgcgcggcggcaagaagatcaaggcggtgatcccgggcggttcgtccgcgccggtgatcccgggcgacattatgatgcagaccgatatggactacgactcgatcgcgaaggcgggctcgatgctcggctccggcgcggtgatcgtgatggacgagacgcgctgcatggtgcgctcgctgctgcgcctgtcgtacttctattacgaagagtcgtgcggccagtgcacgccgtgccgcgaaggcacgggctggctgtatcgcgtcgtgaaccgcatcgagcacggcgaggggcgccaggaagacctggacctgctgaactcggtcgcggagaacatcatgggccgcacgatctgcgcgctcggcgacgcggcggcgatgccggtgcgcgggatgctcaagcactactgggacgaattcgcgtaccacgtcgagcacaagcactgcatggtcggcggccacgcgcatgcggccgccgcctga

SEQ ID NO: 39235 - protein, 436 aa, Burkholderia pseudomallei K96243
MTSLHDRHIKPLILAGLTGENWHLEDYVARGGYKQLRRILEEKIPPEQVIADVKASGLRGRGGAGFPTGLKWSFMPRQFPGQKYLVCNSDEGEPGTFKDRDILRWNPHALIEGMAIGAYAMGITVGYNYIHGEIFEVYRRFEAALDEARRAGFLGEKIMGSDFSFQLHAHHGYGAYICGEETALLESLEGKKGQPRFKPPFPASFGVYGKPTTINNTETFAAVPFLLAVGPQNYLEMGKPNNGGTKIFSVSGDVERPGNYEIPLGTPFATLMELAGGMRGGKKIKAVIPGGSSAPVIPGDIMMQTDMDYDSIAKAGSMLGSGAVIVMDETRCMVRSLLRLSYFYYEESCGQCTPCREGTGWLYRVVNRIEHGEGRQEDLDLLNSVAENIMGRTICALGDAAAMPVRGMLKHYWDEFAYHVEHKHCMVGGHAHAAAA

SEQ ID NO: 39236 - DNA, 1284 bp, Methylococcus capsulatus str. Bath
  CDS (1)..(1284): transl_table=11
atggacaagccgctcacccgcaacatcaaatccgacggctcgaccgtgactctggccgagtatctcgccagcggcggctacgaaggattgaaaaaaaccctcgccgaattcgcccctctcgacgtacaacaacgggtcaaagactccggactgcgcggccgcggcggcgccggcttcccgaccggcctgaaatggagcttcgtgccgatgggcgagggcgcaccccggaccaaatacctggtggtcaacggcgacgagatggaacccggtgcgttcaaggaccggctgttactggagggcgatccgcaccagctgatcgaaggcgtggtcatcgcagcttacgccatccaggccaatatcgcctacgtcttcctccgcggcgaataccggctggcggcggcgcggctgcggcaggcgatcgccgaagccgaagcccaggggctgctcggcgaagacatcctcggctcgggattcagcctggacctgcgcctgcacaccagcgccgggcgctacatctgcggcgaggaaaccgccctgctcaactcgctggaaggcaagcgcgccaacccccgcgccaagccgccgtttccgcaagtctccggcctgttcggcaagcccaccatcgtcaacaacgtcgagaccctctgcaacctgccgcacatcctccgcaacggggtggagtggtacaaaggactcagccggaccggcgaaccgggcaccaagatctacggcgtcagcggccgggtcaggtcccccggcgcctgggagctgcccatgggcacgacggcgcgcgagatcatcgaggagcacgccggcggcatgcgcgacggctaccgtttgaagggctacctgccgggaggggcctctaccgacttcctgctgcccgaacacctggacattcccatggactacggctccatcggcaaggccggcagccggctcggtaccggcacgatgatcttgctggatgataagacctgcccggtgcagatggtgctcaacctcgaacggttcttcgctcaggaatcctgcggctggtgcaccccttgccgggatggcctgccctggaccgtcagcctgctcgaagggctgatcgaagggcgcggccggccggaggacctcgagactctggagcgcttgtgcggcctgctcggcccgggcaacaccttctgcgccctcgcgcccggtgcaatggaaccgctgcagagcgccctcaagcacttccgcgccgatttcgagcgctatctccagccgcaaaccacccgcggaggcatgtatgcctga

SEQ ID NO: 39237 - protein, 427 aa, Methylococcus capsulatus str. Bath
MDKPLTRNIKSDGSTVTLAEYLASGGYEGLKKTLAEFAPLDVQQRVKDSGLRGRGGAGFPTGLKWSFVPMGEGAPRTKYLVVNGDEMEPGAFKDRLLLEGDPHQLIEGVVIAAYAIQANIAYVFLRGEYRLAAARLRQAIAEAEAQGLLGEDILGSGFSLDLRLHTSAGRYICGEETALLNSLEGKRANPRAKPPFPQVSGLFGKPTIVNNVETLCNLPHILRNGVEWYKGLSRTGEPGTKIYGVSGRVRSPGAWELPMGTTAREIIEEHAGGMRDGYRLKGYLPGGASTDFLLPEHLDIPMDYGSIGKAGSRLGTGTMILLDDKTCPVQMVLNLERFFAQESCGWCTPCRDGLPWTVSLLEGLIEGRGRPEDLETLERLCGLLGPGNTFCALAPGAMEPLQSALKHFRADFERYLQPQTTRGGMYA

SEQ ID NO: 39238 - DNA, 1551 bp, Methylococcus capsulatus str. Bath
  CDS (1)..(1551): transl_table=11
atgattacggtctacgtcccccgtgattccagcgccctcggtctcggtgccgagcgggtggccaatgccatccagctcgaggccgccaggcgcggcacggcgatcaagctggtccgcaacggttcacgcggcctgtactggctcgaacccctggtagaggtcgtcacccccggcgggcgtgtcgcctatggtccggtgcggccgggcgacgtcgccggcctgttcgaagccggcttcttggaaggcaaggcacatcccttgtatcaaggattgacggaggaaataccttacctcaagaatcaggaacgcctgacgttcgcccgcgtcggcatcaccgatccggtctgcctggaagattatctggctcacggaggctaccgcggactgcgtaacgccttggcgatggagcccgccgcgatcgtcgaggaagtcaccgcttccggcctgcggggtcgcggcggtgcggccttccccaccggtatcaaatggaagacggtgctcaatgcccccgccggccagaagtacgtcgtctgtaacgccgatgagggtgattccggtaccttctccgaccgcatgatcatggaaggtgaccccttcgtgctgatcgagggcatgaccatcgccggtctcgcagtgggggcaacccagggctacatctatctccgcatcgaatatccccatgccggggtggccttgaatcaggccatcgaggccgctatccaggccggctacctgggcgatgacatcctcggcagcggcaagcgcttccagctcgaagtccgtctgggcgccggcgcctatgtctgcggcgaggaaaccgccctgctggaaagcctcgaaggcaagcgcggcatggtgcgcttcaagccgccgctgcccgccatcgagggcctattcggccagcccacggtcatcaacaacgtgatctcgctggcctcggtgccgatcatcctggacaagggcggcaaatactacgccgactatggcatgggccgctcacgtggtaccctgccgctgcagcttgccggcaacgtcaagcggccaggcctgatcgagaaggccttcggcatgaccctgcgcgagctgctgtacgactatggcggcggttccgccagcgggcgcccgatccgggctgtgcaggtcggcggcccgctgggttcctacatgccggaatcgcagttcgacacaccgctggactatgagtcgttcagcgccatctgggccgtgctcggccatggcggtgtcgtggtattcgacgacacggtcgacatggcgaagatggcgcgctacgccatggaattctgcgcgctcgagtcctgcggcaaatgcacaccctgccggatcggttcgacccgaggcgtggaagtcatcgaccgcatcatcgacgaccgggaccgggcgaagaatctggcgctgctgcgggatttgggcgacaccatgctggccggttcgctctgcgcactgggaggcatgacgccctaccccgtcctcagcgccctcaatcatttcccggaagatttcggcgagaagagtgtggcgcaggttgcctga

SEQ ID NO: 39239 - protein, 516 aa, Methylococcus capsulatus str. Bath
MITVYVPRDSSALGLGAERVANAIQLEAARRGTAIKLVRNGSRGLYWLEPLVEVVTPGGRVAYGPVRPGDVAGLFEAGFLEGKAHPLYQGLTEEIPYLKNQERLTFARVGITDPVCLEDYLAHGGYRGLRNALAMEPAAIVEEVTASGLRGRGGAAFPTGIKWKTVLNAPAGQKYVVCNADEGDSGTFSDRMIMEGDPFVLIEGMTIAGLAVGATQGYIYLRIEYPHAGVALNQAIEAAIQAGYLGDDILGSGKRFQLEVRLGAGAYVCGEETALLESLEGKRGMVRFKPPLPAIEGLFGQPTVINNVISLASVPIILDKGGKYYADYGMGRSRGTLPLQLAGNVKRPGLIEKAFGMTLRELLYDYGGGSASGRPIRAVQVGGPLGSYMPESQFDTPLDYESFSAIWAVLGHGGVVVFDDTVDMAKMARYAMEFCALESCGKCTPCRIGSTRGVEVIDRIIDDRDRAKNLALLRDLGDTMLAGSLCALGGMTPYPVLSALNHFPEDFGEKSVAQVA

SEQ ID NO: 39240 - DNA, 1686 bp, Methylococcus capsulatus str. Bath
  CDS (1)..(1686): transl_table=11
atgcccgaataccaggccgtttcctcggatgagcagaggcgcaggctgggaaagccgaaggggcgtcccgtcgacgcccatgtgcttgaggagatacaacgattgctgggggcggaaccgcgccgcgccgacctgctgatcgaacacctgcacaagatccaggaccactacggccatgtgtccgcccgccacatcgccgccttggccttcgagatgaagctctcccaggcggaggtctacgaggtcgccaccttctaccatcacttcgatgtggtcgcggaaggcgaatcgccgcccccgccgctcaccgtccgggtgtgcgagtccctgagttgcgccatggccggcgcccacgccctgatgccggcgctgaaagacgccctgggggagggcgtgcggatacagccggtgccctgcgtcgggcgctgccagcacgcgccggtggcggtggtgggccagaaccccgtggaccgggccacgcctgcggcggtgagcgccgcggtggagcaggggcagaccctgcccgcgcccgccgcctaccgcagctatgccgcctatcaggccgatggcggttaccagctatatcaggactgccgttccggtcaccgcagtcccgaggaggtcatcgccctgctggaaagctccggcctgcgcggtctgggcggggccggtttcccggtgggacgcaagtggcgcatcgtcagagcccagcccgcaccgcgcctcatggcggtcaatatcgacgagggcgagcccggcaccttcaaggatcgccactatctggaacgcgatccccaccgcttcctggaaggcatgctgatcgccgcctgggcggtgggcatcgaatccatctacatctatctgcgggacgaatacgccggctgccggcagatattgctgcgggaattgcagcaactgcgggaggccgtgcccggaccgctgccggaaatccagctgcgccggggcgccggggcctatatctgcggcgaggagtcggccatgatcgagtccatcgaaggcaagcgcggcatgccccggctgcgtccccctttcgtggcgcaggtcggcctgttcggccggccgaccctggaacacaacatggagtcgctgtactgggtgcgggacatcgtcgaacgcgggccggactggttcaccggccatgggcggcgcgatcgcaagggcttgcgctcgttctcggtgagcggccgggtgcggaaacccggcgtacacctggccccggccggcatcagcgtgcgcgaactgatcgccgagtattgcggcggcatggcggaggggcatgaattctacggctactttccgggcggggcttccgggggcatcctgcccgccagcctgggcgatctgcccctcgacttcgataccctcaccccctacggctgtttcataggatccgccgccgtcgtggtgttctccacgcaggacaaggcccgcgacctggcgctcaatgccatgcgctttttcgccgaggaatcctgcggccagtgcaccccttgccgggtcggcaccgccaaggccgccgcgctcatggcccagccccagtgggatcggccattgctggaggagctggccggcgccatgagcgatgcgtccatctgtggactgggccaggccgcggccaatccgctgcgctgcgccatgaagtattttccggaggaatttcgatga

SEQ ID NO: 39241 - protein, 561 aa, Methylococcus capsulatus str. Bath
MPEYQAVSSDEQRRRLGKPKGRPVDAHVLEEIQRLLGAEPRRADLLIEHLHKIQDHYGHVSARHIAALAFEMKLSQAEVYEVATFYHHFDVVAEGESPPPPLTVRVCESLSCAMAGAHALMPALKDALGEGVRIQPVPCVGRCQHAPVAVVGQNPVDRATPAAVSAAVEQGQTLPAPAAYRSYAAYQADGGYQLYQDCRSGHRSPEEVIALLESSGLRGLGGAGFPVGRKWRIVRAQPAPRLMAVNIDEGEPGTFKDRHYLERDPHRFLEGMLIAAWAVGIESIYIYLRDEYAGCRQILLRELQQLREAVPGPLPEIQLRRGAGAYICGEESAMIESIEGKRGMPRLRPPFVAQVGLFGRPTLEHNMESLYWVRDIVERGPDWFTGHGRRDRKGLRSFSVSGRVRKPGVHLAPAGISVRELIAEYCGGMAEGHEFYGYFPGGASGGILPASLGDLPLDFDTLTPYGCFIGSAAVVVFSTQDKARDLALNAMRFFAEESCGQCTPCRVGTAKAAALMAQPQWDRPLLEELAGAMSDASICGLGQAAANPLRCAMKYFPEEFR

SEQ ID NO: 39242 - DNA, 1833 bp, Methylococcus capsulatus str. Bath
  CDS (1)..(1833): transl_table=11
atggatcgacacgagtacgaacaccggatcataaaccgcatcgtcgaaaaccacggccgcgacacccgccagctcttgtccatcttgcgggaggtccagcacgaattccggcaggtatcacccgaagctcaacagaaggtcgccgagtctctcggcgtttgcatcacgcaggtgagggcggtggtggatttctacagtttcctgtcgaccgtcccattggggaaattcgacatccggatcagcgactccatcaccgatcacatgctcggcagccgggaggtcgccgcgggtctgtgccgcaagctcggcatccagccgggcgagccccgccaggatgggcgagtcggcctttcctttacgtcctgtaccggcctgtgcgaccaggggccggccggactgatcaacggttatgccatcccacgactcacggaagaccgtaccgaccagattgccaggttgatcaatgatgacatcccgctaggcgagtggcccgaggaattcttcgccatcaaggaaaacatccggctggcggaccggctgctcggcaatcctgtccggcccggagaggcactggaacgcactcttgcgctggacagggagacgatgttcggggaaatcgaaacttcccagcttcgcggcaggggaggcgcgggcttcaacaccgcatggaaatggcgtttctgctacgaagggccggaaacggcggcggtttgcccgcctggccagccggccgccggaatcgagcgttacgtcgtctgcaacgcggacgaaggggaacccggcacattcaaggaccgtgtcctgctgcaaagctgcgccgaccaggttttcgaaggcatgacggtctgcgcatacttggtgggggcgaagcaaggattcctctatttgagaggcgaatacctctacttgcatgatcagctcgaagccgtgctggcggcacggcggcggcacggcttgctcgggaaatccattttgggaagagagggcttcgatttcgacatcgaaatccggctgggcgccggcgcctatatctgcggcgaggagtccgccttgatcgagtcgctggaaggcaatcggggcgtgccacgcaaccgcccgccgtaccccgtcacccacggctatctcggcaagcccaccgtcgtgaacaacgtggagaccttctttgcggccgcggccatcgccgtccacggcggagaatggtttgccgaggtcggcaccgaaaaatccaagggcacgaaactgctgagcatctgcggcgactgcgcccggccgggcatctacgaataccccttcggcgtcacgatcaggcaggtcctcgaagactgcggcgcggcggacgtcctgggcgtacagataggaggcccctccggaacctttctgtccgacaaggaatgcgaccgcaagctggcttacgaggatctcgccaccggcggctcattcatcgtgttcgaccggacccgcgatgtgatcgggatcgcccgcaacttcacccatttctttgcccacgagagctgtgggttctgcacgccctgccgggtcggcaccgccttgctcaagaatctgctggacaagatcgccgaaggacacggcgcgacgggcgatcttgccgagctgtcccggctggggcggttcgtgcgcagcgccagccattgcggactcggccagacggccgccaatccgatcctgagcactctggaacgttatcccgaaatctatcaggcgcgactcaagacgatcgacttcgaacccggcttcgatctggatggcgcactcgccaccgcccggcgcctgagcggccgggacgatgccaatgcccatctgtcacagtcgtaa

SEQ ID NO: 39243 - protein, 610 aa, Methylococcus capsulatus str. Bath
MDRHEYEHRIINRIVENHGRDTRQLLSILREVQHEFRQVSPEAQQKVAESLGVCITQVRAVVDFYSFLSTVPLGKFDIRISDSITDHMLGSREVAAGLCRKLGIQPGEPRQDGRVGLSFTSCTGLCDQGPAGLINGYAIPRLTEDRTDQIARLINDDIPLGEWPEEFFAIKENIRLADRLLGNPVRPGEALERTLALDRETMFGEIETSQLRGRGGAGFNTAWKWRFCYEGPETAAVCPPGQPAAGIERYVVCNADEGEPGTFKDRVLLQSCADQVFEGMTVCAYLVGAKQGFLYLRGEYLYLHDQLEAVLAARRRHGLLGKSILGREGFDFDIEIRLGAGAYICGEESALIESLEGNRGVPRNRPPYPVTHGYLGKPTVVNNVETFFAAAAIAVHGGEWFAEVGTEKSKGTKLLSICGDCARPGIYEYPFGVTIRQVLEDCGAADVLGVQIGGPSGTFLSDKECDRKLAYEDLATGGSFIVFDRTRDVIGIARNFTHFFAHESCGFCTPCRVGTALLKNLLDKIAEGHGATGDLAELSRLGRFVRSASHCGLGQTAANPILSTLERYPEIYQARLKTIDFEPGFDLDGALATARRLSGRDDANAHLSQS

SEQ ID NO: 39244 - DNA, 1326 bp, Nocardia farcinica IFM 10152
  CDS (1)..(1326): transl_table=11
atgaccgccctcgcgcccgtcctcacccgctactgggacgacccgcagtcgtggaccctcgacacctaccgccgccacgacgggtacgagggcctgcggatcgcgctgggcatggagccggaccaggtgatccagacggtcaaggacgcgggcctgcgcggccgcggcggcgccggcttccccaccggcatgaagtgggggttcatcccgcagggccccggaccggacggcaccgtgaaaccgcactacctggtggtcaacgccgacgagtccgaacccggcacgtgcaaggacatcccgctgctgatggccaccccgcacgcgctggtggagggcgcgatcatcgcctcctacgccatccgcgccaacaccgccttcatctacctgcgcggcgaggtggtgccggtgctgcggcggctgcgcgccgcggtcgaccaggcctatgcggcgggtctgctcggccgcgacatcctcggctccggcttcgatctggagctgatcgtgcacgcgggcgcgggcgcctacatctgcggcgaggagaccgcgctgctggattcgctggagggtcgccgcggccagccccggctgcgcccgccgttccccgccgtcgccggtctgtacgcctgcccgaccgtggtcaacaacgtggagtccatcgccagcgtgcccccgatcctgcggtacggcaccgactggttccggtcgatgggcagcgagaagtcgcccgggttcacgatctactcgctgtccggtcacgtcacccggcccggccagtacgaggcgccgctcggcatcaccctgcgcgagctgctcgactacgccgacggcgtgcgcgccggacaccggctgaagttctggacacccggcggctcgtccacgccgctgttcaccgacgagcacctggacgtgccgctggactacgagggcgtcgccgcggcgggctcgatgctgggcaccaaggcgctgcagatcttcgacgagaccacctgcgtggtgcgggcggtgctgcgctggacggagttctacgcccacgagtcgtgcggtaagtgcacaccgtgccgcgaaggcacctactggctggtgcagttgctgcggcggatcgagaccggcgggggcaccgaggccgatctggacaccctgctcgacatcaccgacagcatcaacggcaaatcgttctgcgcgctcggcgacggcgcggcgagcccgatcgtgtcctcggtgaagtacttccgcgacgagtacctcgcgcacatgcgcggcgacggctgtccgttcgacccggcgcggtcgacggcgtgggccgaggcaggagaaggggttcgatga

SEQ ID NO: 39245 - protein, 441 aa, Nocardia farcinica IFM 10152
MTALAPVLTRYWDDPQSWTLDTYRRHDGYEGLRIALGMEPDQVIQTVKDAGLRGRGGAGFPTGMKWGFIPQGPGPDGTVKPHYLVVNADESEPGTCKDIPLLMATPHALVEGAIIASYAIRANTAFIYLRGEVVPVLRRLRAAVDQAYAAGLLGRDILGSGFDLELIVHAGAGAYICGEETALLDSLEGRRGQPRLRPPFPAVAGLYACPTVVNNVESIASVPPILRYGTDWFRSMGSEKSPGFTIYSLSGHVTRPGQYEAPLGITLRELLDYADGVRAGHRLKFWTPGGSSTPLFTDEHLDVPLDYEGVAAAGSMLGTKALQIFDETTCVVRAVLRWTEFYAHESCGKCTPCREGTYWLVQLLRRIETGGGTEADLDTLLDITDSINGKSFCALGDGAASPIVSSVKYFRDEYLAHMRGDGCPFDPARSTAWAEAGEGVR

SEQ ID NO: 39246 - DNA, 1278 bp, Legionella pneumophila str. Lens
  CDS (1)..(1278): transl_table=11
atggttgaactaaatcaagtttgttaccgaacatttcatttaccagagccctggtcgctatcaacttatgaaagtattggtggctatagcgcatggcgaaaaattttaaaagagcaaacatcacctcaattaataattgaagagttgaaaacttctgccttacgcggacgaggaggggctggattcccaaccggtttaaaatggagttttatgaatagaaactcccctgttcaaaaatacgtagtatgtaattctgatgaaggtgaaccgggtacttgtaaggacagagagattcttactttaaatcctcaccaattaatcgaaggaatggccatagctgggtatgttatgggcgctacggttggttacaactacataagaggagaattctggctgccttttgagcgtactgaggctgcaataaaagaagcatacgatgctggcttgctaggtaaaaatatattaggctccggcgttgattttgatttatataatcatttaggagcgggagcttacatttgcggtgaagaaactgcattgcttaactcgattgaaggaaaaaagggaatgcctcgttttaaaccaccattcccggcaaattatggcttgtatggaaaaccgacaaccataaataatacggaaacatttgcgtctgttccggttattatggaaaaaggtggagaatggtttttaaaattaggcaaaccgaacaatggcggtgccaaatgctttagtgttagcggccatgttaacaaacctggtaactatgaaatccccttgggcactccattcaaaacgctgcttgatctggctggcggcgtcattaaaggccgaaaaatcaaagcagtgattcctggtggttcctctatgccagtgctcccgggtgacgtcatgctggggctggatatggattatgacagtatacagaaagccggctcaggcttgggttcaggcgcagttattatcatggatgaaaccacctgcatggtggatgctttgtatcgtatttctgagttctacatggatgaatcctgtggacaatgcacgccttgtcgagaaggcacaggctggttagtcaggttattacacagaattataaacggtcatggcgagccgggagacgtggagaagttagtgaatgtggcgaataacatagagggaagaaccatttgtgcattaggcgaggcagcagcttggccagtacagagttttgttaaacatttctatgatgaatttgaatatttcataaagcataaacgctcgatcgtcgcagcataa

SEQ ID NO: 39247 - protein, 425 aa, Legionella pneumophila str. Lens
MVELNQVCYRTFHLPEPWSLSTYESIGGYSAWRKILKEQTSPQLIIEELKTSALRGRGGAGFPTGLKWSFMNRNSPVQKYVVCNSDEGEPGTCKDREILTLNPHQLIEGMAIAGYVMGATVGYNYIRGEFWLPFERTEAAIKEAYDAGLLGKNILGSGVDFDLYNHLGAGAYICGEETALLNSIEGKKGMPRFKPPFPANYGLYGKPTTINNTETFASVPVIMEKGGEWFLKLGKPNNGGAKCFSVSGHVNKPGNYEIPLGTPFKTLLDLAGGVIKGRKIKAVIPGGSSMPVLPGDVMLGLDMDYDSIQKAGSGLGSGAVIIMDETTCMVDALYRISEFYMDESCGQCTPCREGTGWLVRLLHRIINGHGEPGDVEKLVNVANNIEGRTICALGEAAAWPVQSFVKHFYDEFEYFIKHKRSIVAA

SEQ ID NO: 39248 - DNA, 1293 bp, Anaplasma marginale str. St. Maries
  CDS (1)..(1293): transl_table=11
gtgaaaagcgaggatgcggcgtttaccaaccttgccggccgagagtctccgtatcttggggcggctaagaagcgtggcgcatgggatggtacaaaacggatactggagctgggccccgacaaaataatccaggaggttaaggattctgggttgagagggaggggcggtgctgggtttcccacgggaactaaatggagctttatgcccaaaacacgtcctgaaggccgtccagcgtacttggtaattaatgctgatgagtcagagccagggacctgtaaggatagagacataatcagatatgagccgcataagatcatagagggaattctaatagccggcttcgccatgggcgtcaccgctgcgtacatttacataaggggtgagttctataatgagtacctagtgctgtcccaagctttggatgaggcgtacaaacacggattggttggaaagaatgcgtgctcgtctggctacgatttggatattttcatccacagaggcgccggtgcgtacatctgtggggaggaaagcgcgcagctagaatccctggaagggagaaagggcatgcccaggttaaagcccccgttccccgcggctgtgggtctatacggctgtcctacaaccataaacaatgttgagaccgtcgctgtggttgcggacatcatgcgcagggggtccaaatggttttcctctttaggtaggccaaacaacactgggacaaaggttttttgtatttcggggcacgtgaacaagccgtgtaacgtggaagaagagcttgggatcccgatgcgagaattaatagaaaaatacgccggtggcgttattggtggttgggataacctcttggctgtcatacccggtggttcgtctgttcccatgttgcccaaatctgtttgtgacgatgtgctgatggattttgactccctcaaggccgtacaatctggcctcggtacagccgggctgatagtgatggataagtctacagacttggtggaggcaattgagcgaatttcgcgcttctatatgcatgagtcatgtggtcaatgtactccatgccgggagggcaccggatggatgtggagaatgatgaaaaaaatggtcgatggaacggcaaaagatggtgaaatagacaaactgcttgacgttgcatcccagattgaaggccatacaatctgcgcgcttgcggacgctgcggtgtggcctatacaaggcctgtttcgccacttcaggcacgtggttgaagatcggattggtaacaagggaaagaaaaagcgccgggtcgcggcttcatga

SEQ ID NO: 39249 - protein, 430 aa, Anaplasma marginale str. St. Maries
MKSEDAAFTNLAGRESPYLGAAKKRGAWDGTKRILELGPDKIIQEVKDSGLRGRGGAGFPTGTKWSFMPKTRPEGRPAYLVINADESEPGTCKDRDIIRYEPHKIIEGILIAGFAMGVTAAYIYIRGEFYNEYLVLSQALDEAYKHGLVGKNACSSGYDLDIFIHRGAGAYICGEESAQLESLEGRKGMPRLKPPFPAAVGLYGCPTTINNVETVAVVADIMRRGSKWFSSLGRPNNTGTKVFCISGHVNKPCNVEEELGIPMRELIEKYAGGVIGGWDNLLAVIPGGSSVPMLPKSVCDDVLMDFDSLKAVQSGLGTAGLIVMDKSTDLVEAIERISRFYMHESCGQCTPCREGTGWMWRMMKKMVDGTAKDGEIDKLLDVASQIEGHTICALADAAVWPIQGLFRHFRHVVEDRIGNKGKKKRRVAAS

SEQ ID NO: 39250 - DNA, 1758 bp, Azoarcus sp. EbN1
  CDS (1)..(1758): transl_table=11
gtgagcacgagcatgatcggtgagaaagagcgcagcgcgggcgcacgcccgggcaaaggatcccgcgaacgatcggcggaccggccgcgagggcgcgagccgctgccggcgtcggcacggctcgccgcatcggctgcgctcgccggcgagacgccgcgcgccgaccgcctgatcgaatacctgcaccgcctgcaggacgagcacggcgcgctccacgccgaccaccttgccgcgctcgccgaggcgatgaagctcgcgcgcgccgaggtgttcgaggttgcgaccttctatcaccatttcgacttcgtccccgccggcgggaaagcgccgccggcgctgaccgtgcgcgtgtgcgaatcgctcggctgcgcgatggccggtggcgccgaactcgccgcgtcgctcgcgagccagctcggggcggaggtgcgcgtgcagcgcgtgccgtgtgtcgggcgttgcgacagtgccccggtcgcagtcgtcgggcagcgcccggtgctgcacgccgatgccgatcgcgtcgccgcagtagtcgcgggcggcgagcgcgacgagccgctgcctgaggcgatccgtttcgacgcgtaccgcgcggccgccggctaccggctgtgggatgcggtgcgcagcggtgaaatcgcaggtgatgcggtcgtcgccgcgctcgacgccgccggcctgcgcggcctcggcggcgcaggcttcccggctgcgcgcaagtggcgcacggtggccgcacagcccgcaccgcggttcatggcagtcaatatcgacgaaggcgagccgggcacgttcaaggaccgccattacctcgagaccgatccgcaccgcttcattgaaggcatgctgatcgctgcgcacgtcgtcggcatcgacggcatctggatctacatccgcgacgaatacccggcgctgcgccggctgctcgcggaggaactcgaccgcgtgcgcgccgcgtggccggatgtgccgtcgatcgagatccgccgcggcgccggcgcgtatgtctgcggcgaagagtcggcgatgatcgagtcgatcgaaggcaagcgcggcatgccgcggctgcgcccgccgtacgtcgccgaagtgggcctcttcggccgcccgacgctcgaacacaacctcgagacgctgtggtgggtgcgcgacatcgtcgcccccgcgctcgcgggcgagcccggcccgttcgcgagccgcggccgcaacggtcgcaaggggctgcgcagcttctccgtcagcggccgcgtcgcgaagcccggcgtcgtcgtcaccgacgccggcatcacgctgcgcgaactcgtcgaggagcactgcggcggcatgctgccaggccacgagctgtacggctatttccccggcggcgcgtccggcggcatgctgccggcgcgcctcgccgatatgccgctcgacttcgacacccttggcgaatacggctgcttcatcggctcggcggcgatcgtcgtgttctcgcagcacgaccgcgcgcgcgtgctcgccgaaaacgcgatggaattcttcgcccacgaatcctgcggccaatgcacgccgtgccgtgtcggcactgcgaaagcggccgaactgatgaaacagccggcgtgggacgctgcgctgctgaccgaactcggaacagtgatgatggacgcttcgatctgcggcctcggccaagccgcgccgaacccgatgcaatcggtgctgcgcttcttcccgcacgaagtgggtgtggccggcaagaacgaggagggcgcggcatga

SEQ ID NO: 39251 - protein, 585 aa, Azoarcus sp. EbN1
MSTSMIGEKERSAGARPGKGSRERSADRPRGREPLPASARLAASAALAGETPRADRLIEYLHRLQDEHGALHADHLAALAEAMKLARAEVFEVATFYHHFDFVPAGGKAPPALTVRVCESLGCAMAGGAELAASLASQLGAEVRVQRVPCVGRCDSAPVAVVGQRPVLHADADRVAAVVAGGERDEPLPEAIRFDAYRAAAGYRLWDAVRSGEIAGDAVVAALDAAGLRGLGGAGFPAARKWRTVAAQPAPRFMAVNIDEGEPGTFKDRHYLETDPHRFIEGMLIAAHVVGIDGIWIYIRDEYPALRRLLAEELDRVRAAWPDVPSIEIRRGAGAYVCGEESAMIESIEGKRGMPRLRPPYVAEVGLFGRPTLEHNLETLWWVRDIVAPALAGEPGPFASRGRNGRKGLRSFSVSGRVAKPGVVVTDAGITLRELVEEHCGGMLPGHELYGYFPGGASGGMLPARLADMPLDFDTLGEYGCFIGSAAIVVFSQHDRARVLAENAMEFFAHESCGQCTPCRVGTAKAAELMKQPAWDAALLTELGTVMMDASICGLGQAAPNPMQSVLRFFPHEVGVAGKNEEGAA

SEQ ID NO: 39252 - DNA, 1314 bp, Azoarcus sp. EbN1
  CDS (1)..(1314): transl_table=11
atgagcgcacgcggacttattctcgccggcgtcgacggcgaccgcacctggcggttacaggactatatcgggcgcggcggttattccgctctgaaaaaaatcattgcggaaaagattccggccgaaacggttatcgccgaattgaaggcttcttcgctgcgcggacgcggcggtgcgggtttccccaccgggctcaaatggagcttcatgccgcgttcattcccgggagcgaaatatctcgcctgcaattccgacgagggcgagccgggtactttcaaggaccgcgacattctccgctacaacccgcacagcgtcatcgagggcatgacgatcgcggcgtatgcgatgggatgcgagcggggctacaactacatccacggcgagattttcgagatctacgagcgcttcgaggaggcgctggccgaagcgcgtgaagcgggcctgctcgggcagaaaatcctgggttcggatttttcgttcgagttgttcgcacaccacggctacggtgcctacatctgtggtgaagagaccgcgttgctcgagtcgatcgaaggcaagaaagggcagccgcgcttcaagccgccgtttccggcaagctatggcctttacggcaagcccacgacgatcaacaacactgaaactttcgcctcggtgccgttcatcatcaatatgggcggcgagagttttctcaacctcgggaagccgaacaacggcggcacgaagttgttctcgatttcgggacacgtcaatcgtccggggaattacgagatcggaatgggcactcccttcgcggagttgctcgaaatggctggcggaatgcgcggcgggggcaagctcaaagccgtcattcccggcggctcgtcatcgcccgtgttgccggcagccgtgatgatggactgcacgatggactacgactccatcgccaaggcagggtcgatgctcggttcaggcgcggtgatcgtcatggatgagaccacgtgcatggtgaaggcgctcgaacgcctgtcgtatttctacttcgaggagtcctgcgggcagtgcacgccgtgccgtgagggaaccggttggctttatcgggtggttcatcggatcgagaacgggttgggacgtcgcgacgatctcgatctgctcaactcggtgaccggcaatatcatgggacgcaccatttgcgccctcggtgatgccgcgtcgatgccggtgcagagtttcatcaagcacttcggctcggagttcgagtaccacatcgaaaacaagaaatgtctagtgccgcccgaggttcagtaccagggcagccaaatctacgtgagtccgtga

SEQ ID NO: 39253 - protein, 437 aa, Azoarcus sp. EbN1
MSARGLILAGVDGDRTWRLQDYIGRGGYSALKKIIAEKIPAETVIAELKASSLRGRGGAGFPTGLKWSFMPRSFPGAKYLACNSDEGEPGTFKDRDILRYNPHSVIEGMTIAAYAMGCERGYNYIHGEIFEIYERFEEALAEAREAGLLGQKILGSDFSFELFAHHGYGAYICGEETALLESIEGKKGQPRFKPPFPASYGLYGKPTTINNTETFASVPFIINMGGESFLNLGKPNNGGTKLFSISGHVNRPGNYEIGMGTPFAELLEMAGGMRGGGKLKAVIPGGSSSPVLPAAVMMDCTMDYDSIAKAGSMLGSGAVIVMDETTCMVKALERLSYFYFEESCGQCTPCREGTGWLYRVVHRIENGLGRRDDLDLLNSVTGNIMGRTICALGDAASMPVQSFIKHFGSEFEYHIENKKCLVPPEVQYQGSQIYVSP

SEQ ID NO: 39254 - DNA, 1704 bp, Silicibacter pomeroyi DSS-3
  CDS (1)..(1704): transl_table=11
atggcaccattggacagcaaatctgcgggcggcgaaccgggcgtatggaagagtggacgtggtcgtgggcgtcgattgccgaagggtcgtgtttacagcgatgaggcgttggcggctgttcggggtgtgttgggggatcgtcctcggcggcgggatttgctgatcgagttcctgcatctgatccaggacgtttacgggcatctttcggcggatcatcttgcggccttggcgttcgagatgaagctggggcaggcggaggtttacgagaccgcaaccttttacgcgcattttgacgtggtgaaggagggcgagacaccgccgccggcgctgacgatccgggtctgcgattcgctgagctgcgcgctggccggggccgagcagctgcgcgcggcgctggaagaggggctcgatccgggccaggtgcgggtgttgcgggcgccctgcatggggcgctgcgacacggcgccggtgctggagctgggccataaccatatcgatcacgccacgccggaaaaggtgcgggcggcgattgcggcgggcgacacccatgcgcatctgcccgattacgaggggttcgatgcctatgcggcggcgggcggttacgcggtgctcaaggggctgcgcgcgggcggcgactgggaagcggtgcaggacagcgtgctggcggcgggcctgcgcggcctgggcggcgcgggtttcccctcggggcgcaaatggggctttgtgcgggccaatccgggtccgcgttacctggcggtgaatggcgacgagggcgagccgggcaccttcaaggaccgctattacctggagcgggtgccgcatctgttcctcgagggcatgctgatcgcggcctgggcggtcgaggccgagacctgctatatctacatgcgcgacgaataccccgccgtgctggagatcctgcggcgcgagatcgcggcgctggaggcggccgggatcgtggccaaaggctatatcgacctgcgccggggcgcgggcgcctatatctgcggcgaagaaagcgcgatgatcgagagcatcgagggcaagcgtggcctgccccggcaccggccgccctttgtggcgcaggtggggctgttcggccgtccgacgctggtccataatatcgagacattgcattgggttgcgcgggtctgccgcgaggggccggaggttctgaattcgatcgagaagaacggccgcaagggcctgcgcagctattcggtctcgggccgggtggccaggccgggggtgcatctgctgccggcgggctcgaccatccgcgacgtgatcgcggcggcgggcggcatggcggcgggccatgtgttcaaggcctatcagccgggcggcccgtcctcgggcctgctgccggcgagcatggacgacattccgctcgacttcgacacattgcaaccccatggcagcttcatcggctcggcggcggtggtggtgctgagccagcaggacagcgcgcgcgacgcggcgctgaacatgctgcgcttcttcgaggacgagagctgtggccagtgcaccccctgccgggcgggctgcgaaaaggcggtcaagctgatgcaggccgaacactgggaccagccgctgctggaagagctgtgccaggtgatggcggatgcctcgatctgcggtctgggccaggcggcgccgaacccgatccggctgaccatgaaacacttcgcggaggagatctga

SEQ ID NO: 39255 - protein, 567 aa, Silicibacter pomeroyi DSS-3
MAPLDSKSAGGEPGVWKSGRGRGRRLPKGRVYSDEALAAVRGVLGDRPRRRDLLIEFLHLIQDVYGHLSADHLAALAFEMKLGQAEVYETATFYAHFDVVKEGETPPPALTIRVCDSLSCALAGAEQLRAALEEGLDPGQVRVLRAPCMGRCDTAPVLELGHNHIDHATPEKVRAAIAAGDTHAHLPDYEGFDAYAAAGGYAVLKGLRAGGDWEAVQDSVLAAGLRGLGGAGFPSGRKWGFVRANPGPRYLAVNGDEGEPGTFKDRYYLERVPHLFLEGMLIAAWAVEAETCYIYMRDEYPAVLEILRREIAALEAAGIVAKGYIDLRRGAGAYICGEESAMIESIEGKRGLPRHRPPFVAQVGLFGRPTLVHNIETLHWVARVCREGPEVLNSIEKNGRKGLRSYSVSGRVARPGVHLLPAGSTIRDVIAAAGGMAAGHVFKAYQPGGPSSGLLPASMDDIPLDFDTLQPHGSFIGSAAVVVLSQQDSARDAALNMLRFFEDESCGQCTPCRAGCEKAVKLMQAEHWDQPLLEELCQVMADASICGLGQAAPNPIRLTMKHFAEEI

SEQ ID NO: 39256 - DNA, 1683 bp, Silicibacter pomeroyi DSS-3
  CDS (1)..(1683): transl_table=11
atgtcactggatgacgcgggcgtatggaagagtggacgtggtcgtggacgtcgattgccgaagggtcgtgtttacagcgatgaggcgttggcggctgttcggggtgtgttgggggatcgtcctcgtcggcgggatttgctgatcgagttcctgcatctgatccaggacgcttgcgggcatctttcggcggatcatcttgcggctctggcgttcgagatgaagctggggcaggcggaggtttacgagaccgcaaccttttacgcgcattttgacgtggtgaaggagggcgagacaccgccgccggcgctgacgatccgggtttgcgattcgctgagctgcgagctggccggggccgagcagctgcgcgcggcgctggaagaggggctcgatccgggccaggtgcgggtgttgcgggcgccctgcatggggcgctgcgacaccgcgccggtgctggagctgggccataaccatatcgatcacgccacgccggaaaaggtgcgggcggcgatcgcggcgggcgatacccatgcgcatctgcccgcatacgagacgttcgatgcctatgcggcggcgggcggttacgcggtgctcaaggggctgcgcgcgggcggcgactgggaagcggtgcaggacagcgtgctggcggcgggcctgcgcggcctgggcggcgcgggtttcccctcggggcgcaaatggggctttgtgcgggccaatccgggtccgcgctacctggcggtgaatggtgacgagggcgagccgggcaccttcaaggaccgctattacctggagcgggtgccgcatctgttcctcgagggcatgctgatcgcggcctgggcggttgaggccgagacctgctatatctacatgcgcgacgaataccccgccgtgctggagatcctgcggcgcgagatcgcggcgctggaggcggccgggatcgtggccaaaggctatatcgacctgcgccggggcgcgggcgcctatatctgcggcgaagaaagcgcgatgatcgagagcatcgagggcaagcgtggcctgccccggcaccggccgcccttcgtggcgcaggtggggctgttcggccgtccgacgctggtccataatatcgagacattgcattgggttgcgcgggtctgccgcgaggggccggaggttctgaattcggtcgagaagaacggccgcaagggcctgcgcagctattcggtctcgggccgggtggccaggccgggggtgcatctgctgccggcgggctcgaccatccgcgacgtgatcgcggcggcgggcggcatggcggcgggccatgtgttcaaggcctatcagccgggcggcccgtcctcgggcctgctgccggcgagcatggatgacattccgctcgacttcgacacattgcagccccatggcagcttcatcggctcggcggcggtggtggtgctgagccagcaggacagcgcgcgcgacgcggcgctgaacatgctgcgcttcttcgaggacgagagctgtggtcagtgcaccccctgccgggcgggctgcgaaaaggcggtcaagctgatgcaggccgaacattgggaccagccgctgctggaagagctgtgccaggtgatggcggatgcctcgatctgcggtctgggccaggcggcgccgaacccgatccggctgaccatgaaacacttcgcggaggagatctga

SEQ ID NO: 39257 - protein, 560 aa, Silicibacter pomeroyi DSS-3
MSLDDAGVWKSGRGRGRRLPKGRVYSDEALAAVRGVLGDRPRRRDLLIEFLHLIQDACGHLSADHLAALAFEMKLGQAEVYETATFYAHFDVVKEGETPPPALTIRVCDSLSCELAGAEQLRAALEEGLDPGQVRVLRAPCMGRCDTAPVLELGHNHIDHATPEKVRAAIAAGDTHAHLPAYETFDAYAAAGGYAVLKGLRAGGDWEAVQDSVLAAGLRGLGGAGFPSGRKWGFVRANPGPRYLAVNGDEGEPGTFKDRYYLERVPHLFLEGMLIAAWAVEAETCYIYMRDEYPAVLEILRREIAALEAAGIVAKGYIDLRRGAGAYICGEESAMIESIEGKRGLPRHRPPFVAQVGLFGRPTLVHNIETLHWVARVCREGPEVLNSVEKNGRKGLRSYSVSGRVARPGVHLLPAGSTIRDVIAAAGGMAAGHVFKAYQPGGPSSGLLPASMDDIPLDFDTLQPHGSFIGSAAVVVLSQQDSARDAALNMLRFFEDESCGQCTPCRAGCEKAVKLMQAEHWDQPLLEELCQVMADASICGLGQAAPNPIRLTMKHFAEEI

SEQ ID NO: 39258 - DNA, 1299 bp, Silicibacter pomeroyi DSS-3
  CDS (1)..(1299): transl_table=11
atgctgaaggatcaggaccggatctttaccaatctctacgggatgcacgaccgcacgctgaaaggcgcaatggcacgcggccattgggacggaaccgccggcatcatcggcaaggggcgggactggatcatccagcagatgaaggacagcgggctgcgcgggcgcggcggcgcgggctttccgaccggtctgaaatggtccttcatgcccaaggaaagcgatggccgcccgtcctatctggtggtcaatgccgacgaatccgagccgggcacctgcaaggaccgcgagatcatgcgccacgatccgcatacgctgatcgaaggctgcctgatcgccagtttcgcgatgaacgcaaacgcctgctatatctacattcgcggcgaatacatccgcgagcgcgaggcgctgcaggccgcgattgacgaggcctatgacgcgggtctcttgggcaagaatgccgccaaatccggctgggatttcgacctctacctgcatcacggtgcgggcgcctatatctgcggcgaggaaaccgcgctgatcgaaagcctcgagggcaagaagggcatgccccggatgaaaccgccctttccggcgggtgcggggctttatggctgcccgaccacggtcaacaacgtcgaatccatcgccgtcgtgcccaccatcctgcggcgcggaccggaatggttcgcgggctttggccgccagaacaacgccggcaccaagctgtttgccatctcgggccatgtgaacaacccctgcgtggtcgaagaggcgatgtcgatctcgttcgaggaactgatcgagacccattgcggcggcattcgcggcggctgggacaacttgctggccgtgatcccgggcggctcctcggttccctgcgtgcgcggggaaaagatgaaggacgcgatcatggatttcgattacctgcgcggcgaactgggctcgggcctgggcacggcggcggtgatcgtgatggacaaatccaccgatatcgtgaaggcgatctggcgcctcagcaaattctacaagcatgaaagctgcggccagtgtaccccctgccgcgagggcaccggctggatgatgcgggtgatggaccgtctggtgcgcggcgaggccgagccggaagagatcgacatgctctgggacgtgaccaagcaggtcgagggccacaccatctgcgccctgggcgatgcggcggcctggccgatccagggcctgatccgcaacttccgcgacgagatcgaggatcgcatcaaggcacagaaatcgggccgcatgggcgcgatggcggcggagtga

SEQ ID NO: 39259 - protein, 432 aa, Silicibacter pomeroyi DSS-3
MLKDQDRIFTNLYGMHDRTLKGAMARGHWDGTAGIIGKGRDWIIQQMKDSGLRGRGGAGFPTGLKWSFMPKESDGRPSYLVVNADESEPGTCKDREIMRHDPHTLIEGCLIASFAMNANACYIYIRGEYIREREALQAAIDEAYDAGLLGKNAAKSGWDFDLYLHHGAGAYICGEETALIESLEGKKGMPRMKPPFPAGAGLYGCPTTVNNVESIAVVPTILRRGPEWFAGFGRQNNAGTKLFAISGHVNNPCVVEEAMSISFEELIETHCGGIRGGWDNLLAVIPGGSSVPCVRGEKMKDAIMDFDYLRGELGSGLGTAAVIVMDKSTDIVKAIWRLSKFYKHESCGQCTPCREGTGWMMRVMDRLVRGEAEPEEIDMLWDVTKQVEGHTICALGDAAAWPIQGLIRNFRDEIEDRIKAQKSGRMGAMAAE

SEQ ID NO: 39260 - DNA, 1275 bp, Francisella tularensis subsp. tularensis SCHU S4
  CDS (1)..(1275): transl_table=11
atggcaaatgaagtttgttttcgtactctacatttagataagccatacagtttggagtcttatttatctgtgggagggtattcctactggaataaaatattgacagaaaaaattccacctgagcaaattattgaagagctcaaaatatctgggcttaggggtcgtggtggtgctggtttccctacgggattgaaatggagttttatgccacgtaatgctccggggcagaaatacgttgtatgcaactctgatgagggtgagcctggtacatgtaaggatagagaaattcttaggaataatcctcatcaattgattgaaggtatagctattgctggatatgttgttggggctactgcaggctataactatactagaggcgagttctatgagccaatagctaggtttgaagacgcgcttattgaggcatatcaagcaggtttattgggtacaaatatcaaatcatcaggaatctcttttgatttatactcagctattggtgctggtgcttatatctgtggtgaagaaacagcattgcttaactcacttgagggtaaaaaaggtcgcccaagatttaagccaccatttcctgcatttaaaggtctttatgacaagccaacaaatataaataatacagaaacatatgcttcagtgccggcaatattacaatatggcggtgagtggtttaagaaattgggtactgagaaaagtggcggtactaagttattctgtgtctctggacatgtacagcagcaaagagttgttgaaataggtttaggtatgccgtttaaagagcttttagacatgtgcggaggcgttcgcaatggtaataagcttaaggcagtaatccctggtggcagctcatctaagatcttgacagctgatgagatgatggctgttactatggattatgagtcaatagcagcggcaggttcaatgcttggttcaggagcagttgtagtgttggatgagactacatgtattgttagaactctagcaaggcttgctgatttctattatgaagagtcttgtggtcaatgtacgccttgtagagagggtactgggtggttagcacgaactttacatagaattgttgctggtgaaggaagaccggaggatattgatactttagttagagtagcaacaaatatagagggtaatactatttgtggtttgggtgatgcagctgcatggccagtccagagttatatagataaatttaggcatgagtttgtttatatgatcgagaataatggtagaagtatagtggatcaatag

SEQ ID NO: 39261 - protein, 424 aa, Francisella tularensis subsp. tularensis SCHU S4
MANEVCFRTLHLDKPYSLESYLSVGGYSYWNKILTEKIPPEQIIEELKISGLRGRGGAGFPTGLKWSFMPRNAPGQKYVVCNSDEGEPGTCKDREILRNNPHQLIEGIAIAGYVVGATAGYNYTRGEFYEPIARFEDALIEAYQAGLLGTNIKSSGISFDLYSAIGAGAYICGEETALLNSLEGKKGRPRFKPPFPAFKGLYDKPTNINNTETYASVPAILQYGGEWFKKLGTEKSGGTKLFCVSGHVQQQRVVEIGLGMPFKELLDMCGGVRNGNKLKAVIPGGSSSKILTADEMMAVTMDYESIAAAGSMLGSGAVVVLDETTCIVRTLARLADFYYEESCGQCTPCREGTGWLARTLHRIVAGEGRPEDIDTLVRVATNIEGNTICGLGDAAAWPVQSYIDKFRHEFVYMIENNGRSIVDQ

SEQ ID NO: 39262 - DNA, 1605 bp, Synechococcus elongatus PCC 6301
  CDS (1)..(1605): transl_table=11
atggattgggaagatttggggcgtttggctaacgaggaactgacttgccagaagccgattcgtctgcgctgttgtacagccacgggttgtcgtgccaacggtgctgaggccgtttttaaagcagtacagcagacgatcgccgatcaaaatttgggcgatcgctgcgaggctgtcagcgtcggttgcttgggactctgtggtgcggggccactggtgcagtgtgatcccagcgatcgcctctacagtgacatccgtcctgatcaggcagcggatctcgttgcggcggctcaaggtgcagcgatggatctacccgaagttgatcaggctcagcccttctttagccaacaactgaaaatcgtcaatcgccacagcggcttgatcaatcccgatcgcctcgaaagctatctggcagcgggcggctatcgggctttgatgcacaccatctttgacttaacaccaacagaagtcgccgagattattcgccttagtgggctgcgcgggcgcggcggtggcggctatcccaccggcttgaaatgggcgaccgtcgccaaaatgcccagcgatcgcaagtttgtggtttgcaacggcgatgagggcgaccccggcgcttttatggatcgcagcgtcctagagagcgacccccatcaagtcatcgagggcatggcgatcgcggcctatgcggtgggtgcgaactttggctacctttacgtgcgggcggaatatccactagcgatcgcacgactcaatcaagccattcgccaagcccgccgccgtgggctgctgggcaacagtgtcttggatagccgcttcagctttgatctcgaggtgcggatcggtgcgggtgcctttgtctgcggcgaagaaacggcgctgattcactcaattcaaggggagcgcggtgtgcctcgggtgcgtccgccttatccggcagagtcgggcctctggggtcatccaacgctgatcaataacgtcgaaacctttgccaatattgccccgattgtggagcaaagcgctgactggtttgcggcgatcggcacgccgaccagcaaggggacgaaagtttttgcattgactggtaagctgcgcaacaacggcctgattgaagtgccgatgggcattccgctgcgatcgatcgtcgatggcatgggtattcccgaaagccctgtgaaagcggtgcaaaccggcgggccttccggcggctgcattcctttagcgcaattggatacaccggtcgactacgactcactcatacaactgggatcaatgatgggttccggcggcatggtagtcatggacgagaacaccgatatggtggcgatcgcccgcttctacatggaattttgccgctccgaaagctgtggcaaatgcattccctgtcgggcaggcacagtgcaactgcatgagctcctcgggaagttatctagcggtcaaggcaccgcgatcgatctccaacagctcgaagacctttgctatttggtcaaagacaccagtctctgtggcttgggaatgtctgctcccaacccaattcttagtacgctgcgctggttccgtcaggagtacgagtcacgcctgattccagaacgggcgatcgcactgactcattag

SEQ ID NO: 39263 - protein, 534 aa, Synechococcus elongatus PCC 6301
MDWEDLGRLANEELTCQKPIRLRCCTATGCRANGAEAVFKAVQQTIADQNLGDRCEAVSVGCLGLCGAGPLVQCDPSDRLYSDIRPDQAADLVAAAQGAAMDLPEVDQAQPFFSQQLKIVNRHSGLINPDRLESYLAAGGYRALMHTIFDLTPTEVAEIIRLSGLRGRGGGGYPTGLKWATVAKMPSDRKFVVCNGDEGDPGAFMDRSVLESDPHQVIEGMAIAAYAVGANFGYLYVRAEYPLAIARLNQAIRQARRRGLLGNSVLDSRFSFDLEVRIGAGAFVCGEETALIHSIQGERGVPRVRPPYPAESGLWGHPTLINNVETFANIAPIVEQSADWFAAIGTPTSKGTKVFALTGKLRNNGLIEVPMGIPLRSIVDGMGIPESPVKAVQTGGPSGGCIPLAQLDTPVDYDSLIQLGSMMGSGGMVVMDENTDMVAIARFYMEFCRSESCGKCIPCRAGTVQLHELLGKLSSGQGTAIDLQQLEDLCYLVKDTSLCGLGMSAPNPILSTLRWFRQEYESRLIPERAIALTH

SEQ ID NO: 39264 - DNA, 1278 bp, Ehrlichia ruminantium str. Welgevonden
  CDS (1)..(1278): transl_table=11
atgttagaagataaagacaaagtttttactaatcttagtggtcaaggttctccatttttaaaatctgcaaaaagtagaggtatttggagtaatatcttagatatattaaatttaggctcagaacacattattcaagaagtaaaaaaatctggattacgtggtaggggtggtgcaggtttttctacaggacttaagtggagttttatgccaaaaaccagaaaagaaggacagccagcgtatttagttgttaatgctgatgagtcggaacctggtacatgtaaagatcgtgatatattaaggtatgaaccacataggcttattgaaggaatattaatagctgggtttgctatgagagtgactacagcttatatttatattcgtggtgaattttataatgaatatttaatattatctgaggcacttaaggaggcatataaagcaaaattaattggtaaaaatgcatgtaagtctggttatgacatagatatatttattcatagaggtgctggtgcatatatttgtggggaggaaactgctcagcttgaatctttggaaggtagaaaggggatgccaaggttaaaaccaccatttcctgctgcaataggattatatggatgtcctactacgattaataatgttgaaactattgcaacaattggtgaaattttaagaagaggtagtaattggtttgcatctcttggaaaggagaataatactggtactaaaatcttctgcatatcaggacatgttaataatccgtgtaatgtagaagaggaattaggtattcctatgagagagttaatagagaaatatgcaggaggtgttcgtggtggatgggataatttattagcagtaataccaggtggttcttcagttcctgtgcttccaaaatctatttgtgatactattactatggattttgattctttaagggctgtgcaatctggtttgggtactgcaggtttgatagtgatggataaatcaacagatataattgcagctatagaaaggttatcacatttttacatgcatgaatcttgtgggcagtgtacaccatgccgtgagggtactggttggatgtggaaaatcatgaggaagctagtaaaaggaactgctacatatgatgatattgatttattattaagtattagttatcagatagaaggacatacaatttgtgctcttggtgatgctgcagcttggccagtacaaggtttaattagacattttagaggtgttattgaagagagaatagataattgtattagaaaatcatag

SEQ ID NO: 39265 - protein, 425 aa, Ehrlichia ruminantium str. Welgevonden
MLEDKDKVFTNLSGQGSPFLKSAKSRGIWSNILDILNLGSEHIIQEVKKSGLRGRGGAGFSTGLKWSFMPKTRKEGQPAYLVVNADESEPGTCKDRDILRYEPHRLIEGILIAGFAMRVTTAYIYIRGEFYNEYLILSEALKEAYKAKLIGKNACKSGYDIDIFIHRGAGAYICGEETAQLESLEGRKGMPRLKPPFPAAIGLYGCPTTINNVETIATIGEILRRGSNWFASLGKENNTGTKIFCISGHVNNPCNVEEELGIPMRELIEKYAGGVRGGWDNLLAVIPGGSSVPVLPKSICDTITMDFDSLRAVQSGLGTAGLIVMDKSTDIIAAIERLSHFYMHESCGQCTPCREGTGWMWKIMRKLVKGTATYDDIDLLLSISYQIEGHTICALGDAAAWPVQGLIRHFRGVIEERIDNCIRKS

SEQ ID NO: 39266 - DNA, 1254 bp, Dehalococcoides ethenogenes 195
  CDS (1)..(1254): transl_table=11
atgcaagacattaagattattacccgtcatctgaataccgccagctcagctgatattgatgtatatatggctgacggcggctaccaggcccttaaaaaagccctgtccatgactccggacgaagtaattgccgaagtcaaacgctcaaagctggtgggtcggggtggagcggcctttcctaccgggctcaagtgggagcttacccgcaaggaaaaggctaatccgaaatatatcgtctgtaatgccagcgagggtgaaccgggcacttttaaagaccggctgatacttaaaaacgacccccacatggtgctggaaggttttattattgccgcttatgcggtgggtacttcccagggctttatccatgcccgtgaggtttataccgaagaaatagagctgttccagaaagccatagaccaggcaaccgaacgcggttttctggggcagaatatcatggggagcaatttctcgctggatatccagttttacaagagcgccggtgcttatatctgcggtgaggaaaccgccctttttgaatcccttgaagggcacagaggtattcccgccgcccgcccgccgtatccggtgcaggtggggcttatggataaacccaccactgttaataacgtagaaactctctgcaatgtgcctgccattataaataacggggcagactggtttgctgcaatcggccatccggactatcccggcaccaagctcttctgcctttcgggtaacgtgaaagagccgggtgtttttgaaatgccgctgggaaccaaccttaaggacttgcttgaggccgggggaggcgtagacggcaagttcaaggcggttttgccggggggcatatcttccagcctgcttaccgaaatggacgtcaatctggactttaagacgctggccaaggctggtactatgctggggtcaggtgcagttattgtgataaactccgataccagcatggtaaatgtagcttccaacgtagcccacttctttgacgaagagggttgcggcaagtgctctatctgccgtgaaggcacccgccgggcggctgaaatccttagccgcttttcccgcgggcagggcaaccgcaacgaactggagtggctgctggaactgcacgaagtaatgaaagataccgcttcctgcggtctgggacaggtagccttaaatgtggctgccagtgccattcgcaacttcaagggtgaattcttggcgcaggtgcgtaaggaggaaggcgtatggttacgctaa

SEQ ID NO: 39267 - protein, 417 aa, Dehalococcoides ethenogenes 195
MQDIKIITRHLNTASSADIDVYMADGGYQALKKALSMTPDEVIAEVKRSKLVGRGGAAFPTGLKWELTRKEKANPKYIVCNASEGEPGTFKDRLILKNDPHMVLEGFIIAAYAVGTSQGFIHAREVYTEEIELFQKAIDQATERGFLGQNIMGSNFSLDIQFYKSAGAYICGEETALFESLEGHRGIPAARPPYPVQVGLMDKPTTVNNVETLCNVPAIINNGADWFAAIGHPDYPGTKLFCLSGNVKEPGVFEMPLGTNLKDLLEAGGGVDGKFKAVLPGGISSSLLTEMDVNLDFKTLAKAGTMLGSGAVIVINSDTSMVNVASNVAHFFDEEGCGKCSICREGTRRAAEILSRFSRGQGNRNELEWLLELHEVMKDTASCGLGQVALNVAASAIRNFKGEFLAQVRKEEGVWLR

SEQ ID NO: 39268 - DNA, 1872 bp, Dehalococcoides ethenogenes 195
  CDS (1)..(1872): transl_table=11
atgattaatacagcaattaaaaagtttaacagtgtagccgaacttgaggccaaacggcaggaaatccttaaagacaggaattcccaaaagacggttattgctatttgctgcggtaccggctgccaggcttacggggctaaaaaagttgccgatgcctttgaggaagagctttccaaagccggtttgggagataaggttgaggtcagaactactggctgtcacggcttttgcgaacgcggcccgctggtagttatccgcccccagaatattttttatcagcgcctgaagatttcagatataccagaaatcattgaaaaaaccataaaaaacaatgaagttattgaacgcctgctgtatgttgaccccatgaccaaagacaaaaaggtgcatgaacatgatgtgcctttctataaaaaacagatgcgtctggttttcggcaacaacggcaatatagaccctacctctatagatgactatctggcggtgggcggctataaatccttggccaaggctatatctggcctgaagccggaagaaattgtggaagaggttatcaaatccggactgcgcggacggggcggcggcggtttccccaccggctggaaatggaagtcctgccgggacgcccatgacccggtaaaatatgtaatctgcaactgtgacgagggtgacccgggtgcgtttatggaccgctcacttatggagggcaatccccatagcgttatagaaggcatgattatcggtgcttatgctattggctctcatgaagcttatatttatatccgtgatgaatatcctatggctgtaaagcacgcccttttggctataaaacaggccgaagactatggtctgctgggtgaaaacatactgggcagcggctttgacctgaaaatccatatcaaccggggtggcggtgcctttgtctgcggtgagtccacggcccttatggcctctctggagggcaaggtcggcgaaccccgtgccaagtatgttcatacctctgaaaagggtctgcatgacaagcctaccaccctgaataatgtggaaacctgggctaatatacccctgattatagaaaaaggagcagactggtttaacaaaataggtacagagggcagcaagggaaccaagatattctcactggtgggtaaggtaaacaataccggcctgattgaggttcccatgggtattacccttcgggaaattgtatatgatataggcggcggcattcccaaaggcaaaaaattcaaggctattcagaccggcggcccttcaggcggctgtctgcccgaaagtatgctggatttgccggtagactttgatgaacttaccaaggccggttctatgatgggttcgggtgccatgattgttatggacgaagataactgcatggtggagattgcccgttacttcctgagcttccttgaaggagaatcctgcggcaaatgtgtaccctgccgtgagggtgtcaagcgtatgcgccagattctggaaagaataaccaagggcgaaggcgaagagggagatatagagcttctggagcagctttcacaagcgatacaggacgcttctttatgtgctttgggcggcagtgctcctaatccggttttatctaccattaaatacttccgtgatgagtacgaagcccatatccgccagaagacctgtccggctaaggaatgtaaagcccttataacttataacatcattgatgccaattgccccggctgcggtttatgttacaaagcctgtccgacaggggctattatttcacagggtaaaaagatgccggtcatacttgaccagagcaaatgtactaaatgcggtgcgtgttttgatgcttgtaagctccacgccgtagaaatcagataa

SEQ ID NO: 39269 - protein, 623 aa, Dehalococcoides ethenogenes 195
MINTAIKKFNSVAELEAKRQEILKDRNSQKTVIAICCGTGCQAYGAKKVADAFEEELSKAGLGDKVEVRTTGCHGFCERGPLVVIRPQNIFYQRLKISDIPEIIEKTIKNNEVIERLLYVDPMTKDKKVHEHDVPFYKKQMRLVFGNNGNIDPTSIDDYLAVGGYKSLAKAISGLKPEEIVEEVIKSGLRGRGGGGFPTGWKWKSCRDAHDPVKYVICNCDEGDPGAFMDRSLMEGNPHSVIEGMIIGAYAIGSHEAYIYIRDEYPMAVKHALLAIKQAEDYGLLGENILGSGFDLKIHINRGGGAFVCGESTALMASLEGKVGEPRAKYVHTSEKGLHDKPTTLNNVETWANIPLIIEKGADWFNKIGTEGSKGTKIFSLVGKVNNTGLIEVPMGITLREIVYDIGGGIPKGKKFKAIQTGGPSGGCLPESMLDLPVDFDELTKAGSMMGSGAMIVMDEDNCMVEIARYFLSFLEGESCGKCVPCREGVKRMRQILERITKGEGEEGDIELLEQLSQAIQDASLCALGGSAPNPVLSTIKYFRDEYEAHIRQKTCPAKECKALITYNIIDANCPGCGLCYKACPTGAIISQGKKMPVILDQSKCTKCGACFDACKLHAVEIR

SEQ ID NO: 39270 - DNA, 1923 bp, Dehalococcoides ethenogenes 195
  CDS (1)..(1923): transl_table=11
atgccaaggctgaatactccggctgagctggaaaccctgcggaaaaaactggtcaaaaaccagtctgcctcccgcccctgcataacggtatgctgcggtacaggatgccgggcattgggttcggttaaactggtagatgctttccgggccgagcttgccaagcagggcctggaaagttcagttgatattaaagaaaccggctgccatggtttttgtgaaaaaggttcggtggttgttatctatccccaaaatatctgctatttccatgtaaaacctgaagacgccgcagacgttgtcgctaaaacaataaaaaccggcgaactggtagaccatttgctttacaaagaccctgccagcggcgaaaagctggtttatcatcaggatattcccttttacaagtaccaggaacggactgtactgggcgataacgagcatataaatccccagaatatagaggattatattcagcggggcggttattccgccctggttaaagcccttttccagatgaccccggaatctgtactggaagaagtagatacagccaatctgcgcggacgcggcggcgacggtttccctgccggtaaaaagtggcgcaccacccgtgatgctcctgacccggtcaaatacgtgctggttaactgtgacgagggtgacccaggggcatttatggaccgctccatcatggagggtaacccccactgcgtgctggaaggtctggctataggggcttttgcagtcggcgccaaagagggttatatatatgtacgtgccgaatacccattggcggtggaaaacctgtacgctgccataaggcaggcagaggagtatggtctgctgggcaaaaatatacttggctccggatttgattttattgtcaaagtccacgaaggagccggggcttttgtatccggcgaatcgtccgcactgatgactgctattgaagggcgggttggtgaaccccgccccaaatatatccgcactgcgatcaaggggctctgggataaaccctcaaatctaaataacgtggagacctgggctaacgtaccccatattataaacaaaggggcggagtggttcaggtctatcggtaccgaaggcagcaaaggcaccaaaatatttgctttggttggcaaggttaacaataccggactggtagaagtacctatgggtactaccctccgggatattatatttaaaataggcggcggcctgcgtgacggcaaaaaaataaaagctgtccagacaggcggcccctcaggcggctgcatacccgaaaacctgctggattcgcctgttgattatgatgtgctgagtaaactgggttctatggtaggttcaggcgggcttatcataatggacgaagaaacctgcatggtagatattgcccgctattttataaactttttgtcagatgaatcctgcggcaaatgcctgccctgccgcgagggactccgccagctggtagaaatacttacccgtattaccgaaggcaaaggcactatggcagatatggacactctggaagacctgagcggggtaatgagtgaagcctgcctgtgcgctttgggacagcaagccccaaatcccctgctgaccacccttaaatatttccgtcacgaatacattgaccatattaaaaacaaacactgtgaagccggcgtctgcaaagccttgcttactttctatattgaccctgacaaatgcaaagcctgcatgatttgcgcccgaaactgccctactgatgccataaagggcggcaaagggcttattcatactatagaacaggataaatgcatcaagtgcggagcctgtctggatacctgcccggccaaattttatgcggtcaggaaaatatccggcatacctataccggacaacgtaccgtctgaacctattcctttaaaccggaaggcagaataa

SEQ ID NO: 39271 - protein, 640 aa, Dehalococcoides ethenogenes 195
MPRLNTPAELETLRKKLVKNQSASRPCITVCCGTGCRALGSVKLVDAFRAELAKQGLESSVDIKETGCHGFCEKGSVVVIYPQNICYFHVKPEDAADVVAKTIKTGELVDHLLYKDPASGEKLVYHQDIPFYKYQERTVLGDNEHINPQNIEDYIQRGGYSALVKALFQMTPESVLEEVDTANLRGRGGDGFPAGKKWRTTRDAPDPVKYVLVNCDEGDPGAFMDRSIMEGNPHCVLEGLAIGAFAVGAKEGYIYVRAEYPLAVENLYAAIRQAEEYGLLGKNILGSGFDFIVKVHEGAGAFVSGESSALMTAIEGRVGEPRPKYIRTAIKGLWDKPSNLNNVETWANVPHIINKGAEWFRSIGTEGSKGTKIFALVGKVNNTGLVEVPMGTTLRDIIFKIGGGLRDGKKIKAVQTGGPSGGCIPENLLDSPVDYDVLSKLGSMVGSGGLIIMDEETCMVDIARYFINFLSDESCGKCLPCREGLRQLVEILTRITEGKGTMADMDTLEDLSGVMSEACLCALGQQAPNPLLTTLKYFRHEYIDHIKNKHCEAGVCKALLTFYIDPDKCKACMICARNCPTDAIKGGKGLIHTIEQDKCIKCGACLDTCPAKFYAVRKISGIPIPDNVPSEPIPLNRKAE

SEQ ID NO: 39272 - DNA, 1803 bp, Thermococcus kodakarensis KOD1
  CDS (1)..(1803): transl_table=11
atgtctgagatcaaggccatagcggtcggcatgaactcctgtggtatagcggccggtgccagggagacctacgaggcaattaaggcggagctggagaagaggaacctcaacatcaagctcaagatagtcggctgcgtcggtatgtgctaccgcgagcccctcgtggacataatcactgaggacgaaatcataacctacggccacgttgacccaaagaaggttccgaggatcatagaggagcacgtcatcaacgggaggcccataaaggagtggatagtcaagcgcgactggtgggagaacggcgagaggaagacgtgggacgtggatggttacttcgccaagcagaagaagatagtcctcgagaactctggctacatcgaccccgagaacatagacgagtacatccaggcaggcggctacgaggcgcttaaaaaggcccttaagatggatccggaggagataattgaaataatcaccaagtctggcctgaggggtaggggaggcgcgggcttccccaccggcctgaagtggaagttcactcgccaagccccgggagacgagaagtacgttatctgcaacgccgacgaaggcgatcctggggcatttatggacaggaacgtccttgaaggggatccacaccgcgtgatcgagggaatgataatcggcgcctacgcgatcggggcaacgaagggcttcatatacgtccgtgccgagtacccgctggcgataagaaggctaaagatagccctgaaacaggctagggagaggggcttcctcggcgagaacatcctcgggagcggtttctccttcgacatcgtcatcaaagagggcgccggtgccttcgtttgcggtgaggagactgccctgattgcctccatagagggcaagcgcggaatgccgaggccgaggccgccttatcctgcccagaagggcctgtggggcaaaccaaccaacataaacaacgtggagacttgggcgaacgtgccctggataataaggcatggctgggaggcctacgcctcacttgggacggagaagagcaagggcaccaaggtcttcgcgctgtcgggcaagataaagcacggcggcaacgttgaggttccgatgggaatcacgcttagggagatactctacgagataggcggcgggacgaagacgggtaagaggattaaagctgttcagctcggcgggccttccggcggctgcataccagaggagctcttcgacactcccgttgactacgagagcgtgaatgcaacgggagcgataatgggaagcggcggaatggtggttatggacgaggacacctgtatggttgacgtcgccaagttcttcctcgacttcacggtcaaggagtcctgcggtaagtgcaccttctgccgcataggcaccaagaggatgtgggaaatccttgacaggttcactaggggagaggcgaccgaggaggaccttgaaaagcttgagcggctcgcctatcaggttaaggccggctcgctctgcggtctcgggcagaccgccccgaacccggttctaacgacgctccgctacttcagggaagaatacatagagcacataaacggccgctgtccggcgaaggtctgcaagccgctcataaggtacgtcataataacggataagtgtacgggctgcaccgcctgcgccatcttctgcccggccaatgccatcagcggcgagaggctcaagccccacttcattgaccaagaggcgtgcatcaagtgcggtacctgctacgaagtgtgccgcttcaacgccattgaaatcctcaccgggagggaggagtga

SEQ ID NO: 39273 - protein, 600 aa, Thermococcus kodakarensis KOD1
MSEIKAIAVGMNSCGIAAGARETYEAIKAELEKRNLNIKLKIVGCVGMCYREPLVDIITEDEIITYGHVDPKKVPRIIEEHVINGRPIKEWIVKRDWWENGERKTWDVDGYFAKQKKIVLENSGYIDPENIDEYIQAGGYEALKKALKMDPEEIIEIITKSGLRGRGGAGFPTGLKWKFTRQAPGDEKYVICNADEGDPGAFMDRNVLEGDPHRVIEGMIIGAYAIGATKGFIYVRAEYPLAIRRLKIALKQARERGFLGENILGSGFSFDIVIKEGAGAFVCGEETALIASIEGKRGMPRPRPPYPAQKGLWGKPTNINNVETWANVPWIIRHGWEAYASLGTEKSKGTKVFALSGKIKHGGNVEVPMGITLREILYEIGGGTKTGKRIKAVQLGGPSGGCIPEELFDTPVDYESVNATGAIMGSGGMVVMDEDTCMVDVAKFFLDFTVKESCGKCTFCRIGTKRMWEILDRFTRGEATEEDLEKLERLAYQVKAGSLCGLGQTAPNPVLTTLRYFREEYIEHINGRCPAKVCKPLIRYVIITDKCTGCTACAIFCPANAISGERLKPHFIDQEACIKCGTCYEVCRFNAIEILTGREE

SEQ ID NO: 39274 - DNA, 1278 bp, Ehrlichia ruminantium str. Gardel
  CDS (1)..(1278): transl_table=11
atgttagaagataaagacaaagtttttactaaccttagtggccaaggttctccatttttaaaagctgcaaaaagtagaggtatctggagtaatatcttagatatattaaatttaggctcagaacacattattcaagaagtaaaaaaatctggattacgtggtaggggtggtgcaggtttttctacaggacttaagtggagttttatgccaaaaaccagaaaggaaggacagccagcgtatttggttgttaatgcggatgagtcggaacctggtacatgtaaagatcgtgatatattaaggtatgaaccacataggcttattgaaggaatattaatagctgggtttgctatgagggtgactacagcttatatttatattcgtggtgaattttataatgagtatttaatattatctgaggcacttaaagaggcatataaagcaaaattaattggtaaaaatgcatgtaagtctggttatgacatagatatatttattcatagaggtgctggtgcatatatttgtggggaggaaactgctcagcttgaatctttggaaggtagaaaagggatgccaaggttaaaaccaccatttcctgctgcaataggattatatggatgtcctactacgattaataatgttgaaactattgcaaccattggtgaaattttaagaagaggtagtaattggtttgcatctcttggaaaggagaataatactggtactaaaatcttctgcatatcaggacatgttaataatccgtgtaatgtagaagaggaattaggtattcctatgagagagttaatagagaaatatgcaggaggtgttcgtggtggatgggataatttattagcagtaataccagggggttcttcagttcctgtgcttccaaaatctatttgtgatactattactatggatttcgattctttaagggctgtacaatctggtttgggtactgcaggtttgatagtgatggataaatcaacagatataattgcagctatagaaaggttatcacatttttacatgcatgaatcttgtgggcagtgtacaccatgccgtgagggtactggttggatgtggaaaatcatgaggaagctagtaaaaggaactgctacatatgatgatattgatttattattaagtattagttatcagatagaaggacatacaatttgtgctcttggtgatgctgcagcttggccagtacaaggtttaattagacattttagaggtgttattgaagagagaatagataattgtattagaaaatcatag

SEQ ID NO: 39275 - protein, 425 aa, Ehrlichia ruminantium str. Gardel
MLEDKDKVFTNLSGQGSPFLKAAKSRGIWSNILDILNLGSEHIIQEVKKSGLRGRGGAGFSTGLKWSFMPKTRKEGQPAYLVVNADESEPGTCKDRDILRYEPHRLIEGILIAGFAMRVTTAYIYIRGEFYNEYLILSEALKEAYKAKLIGKNACKSGYDIDIFIHRGAGAYICGEETAQLESLEGRKGMPRLKPPFPAAIGLYGCPTTINNVETIATIGEILRRGSNWFASLGKENNTGTKIFCISGHVNNPCNVEEELGIPMRELIEKYAGGVRGGWDNLLAVIPGGSSVPVLPKSICDTITMDFDSLRAVQSGLGTAGLIVMDKSTDIIAAIERLSHFYMHESCGQCTPCREGTGWMWKIMRKLVKGTATYDDIDLLLSISYQIEGHTICALGDAAAWPVQGLIRHFRGVIEERIDNCIRKS

SEQ ID NO: 39276 - DNA, 1278 bp, Ehrlichia ruminantium str. Welgevonden
  CDS (1)..(1278): transl_table=11
atgttagaagataaagacaaagtttttactaatcttagtggtcaaggttctccatttttaaaatctgcaaaaagtagaggtatttggagtaatatcttagatatattaaatttaggctcagaacacattattcaagaagtaaaaaaatctggattacgtggtaggggtggtgcaggtttttctacaggacttaagtggagttttatgccaaaaaccagaaaagaaggacagccagcgtatttagttgttaatgctgatgagtcggaacctggtacatgtaaagatcgtgatatattaaggtatgaaccacataggcttattgaaggaatattaatagctgggtttgctatgagagtgactacagcttatatttatattcgtggtgaattttataatgaatatttaatattatctgaggcacttaaggaggcatataaagcaaaattaattggtaaaaatgcatgtaagtctggttatgacatagatatatttattcatagaggtgctggtgcatatatttgtggggaggaaactgctcagcttgaatctttggaaggtagaaaggggaatccaaggttaaaaccaccatttcctgctgcaataggattatatggatgtcctactacgattaataatgttgaaactattgcaacaattggtgaaattttaagaagaggtagtaattggtttgcatctcttggaaaggagaataatactggtactaaaatcttctgcatatcaggacatgttaataatccgtgtaatgtagaagaggaattaggtattcctatgagagagttaatagagaaatatgcaggaggtgttcgtggtggatgggataatttattagcagtaataccaggtggttcttcagttcctgtgcttccaaaatctatttgtgatactattactatggattttgattctttaagggctgtgcaatctggtttgggtactgcaggtttgatagtgatggataaatcaacagatataattgcagctatagaaaggttatcacatttttacatgcatgaatcttgtgggcagtgtacaccatgccgtgagggtactggttggatgtggaaaatcatgaggaagctagtaaaaggaactgctacatatgatgatattgatttattattaagtattagttatcagatagaaggacatacaatttgtgctcttggtgatgctgcagcttggccagtacaaggtttaattagacattttagaggtgttattgaagagagaatagataattgtattagaaaatcatag

SEQ ID NO: 39277 - protein, 425 aa, Ehrlichia ruminantium str. Welgevonden
MLEDKDKVFTNLSGQGSPFLKSAKSRGIWSNILDILNLGSEHIIQEVKKSGLRGRGGAGFSTGLKWSFMPKTRKEGQPAYLVVNADESEPGTCKDRDILRYEPHRLIEGILIAGFAMRVTTAYIYIRGEFYNEYLILSEALKEAYKAKLIGKNACKSGYDIDIFIHRGAGAYICGEETAQLESLEGRKGNPRLKPPFPAAIGLYGCPTTINNVETIATIGEILRRGSNWFASLGKENNTGTKIFCISGHVNNPCNVEEELGIPMRELIEKYAGGVRGGWDNLLAVIPGGSSVPVLPKSICDTITMDFDSLRAVQSGLGTAGLIVMDKSTDIIAAIERLSHFYMHESCGQCTPCREGTGWMWKIMRKLVKGTATYDDIDLLLSISYQIEGHTICALGDAAAWPVQGLIRHFRGVIEERIDNCIRKS

SEQ ID NO: 39278 - DNA, 1275 bp, Wolbachia endosymbiont strain TRS of Brugia malayi
  CDS (1)..(1275): transl_table=11
gtgaaagaacaggacaaaatattcactaatttgagtggtaaagaaactccactactcaagggtgcaaaaaaacgtggtagttggcaaaaaacaaaagaattattggatttagggtcagaaaaaattattgatgaagtaagaaaatctggcttaagaggtcgagggggtgcaggattttctactggtcttaaatggagctttatgcccaagaatccttcaaaagagcagccaacatacttagtagtcaatgcggatgaatcagaacctggtacatgtaaagatagagatatattgcggtatgagccacacaagttacttgagggagttctcttggctagcagagcaattagtgcatctgttgcatatatttacattaggggtgaattttataatgaatatttagttttaaaacaagcacttgaagaagcgtataaagaaggcctaataggaaaaaatgcatgcaaatcaagttatgatcttaacgtgtttatccatagaggtgcaggggcttacatatgtggagaagaaacagctcagcttgaatcgatcgaaggaaaaaagggctttccccgtatgaagcctccatttcctgctggtgttggactttttggctgcccaaccacgataaacaacgttgagactatagctatggttccagacattctgtatcgtggaggggagtggtttgcatctcttggcaaaccaaataatactggtactaagatcttttgtgtttcagggcatgtaaataacccgtgtaatgttgaagaggaacttggaattccgctacgtgagttgattgaagaatatgcgggtggagtacgaggaggttgggataacttacttgctgtaatacctggtgggtcttcagtatcattaattccaaagtctatatgtgatattattaaaatggattttgattcattaagagcagcacagtcagggcttggtactgctgctgtaatagtgatggataaatcgactgatataatagctgcaatagagaggttatcgcacttctatatgcatgaatcatgtggacagtgcacaccatgtcgcgagggtactggatggatgtggagaattatgaaaagaatggtaacaggaaatattaagcatggtgaaatagataaattacttgaccttacaactcaaatagaaggcaatacaatttgcgcacttggtgatgctgcagcttggccaattcaaggattaatcagacattttcgccacgttatcgaagagagagcaattactaaactctctgtttattaa

SEQ ID NO: 39279 - protein, 424 aa, Wolbachia endosymbiont strain TRS of Brugia malayi
MKEQDKIFTNLSGKETPLLKGAKKRGSWQKTKELLDLGSEKIIDEVRKSGLRGRGGAGFSTGLKWSFMPKNPSKEQPTYLVVNADESEPGTCKDRDILRYEPHKLLEGVLLASRAISASVAYIYIRGEFYNEYLVLKQALEEAYKEGLIGKNACKSSYDLNVFIHRGAGAYICGEETAQLESIEGKKGFPRMKPPFPAGVGLFGCPTTINNVETIAMVPDILYRGGEWFASLGKPNNTGTKIFCVSGHVNNPCNVEEELGIPLRELIEEYAGGVRGGWDNLLAVIPGGSSVSLIPKSICDIIKMDFDSLRAAQSGLGTAAVIVMDKSTDIIAAIERLSHFYMHESCGQCTPCREGTGWMWRIMKRMVTGNIKHGEIDKLLDLTTQIEGNTICALGDAAAWPIQGLIRHFRHVIEERAITKLSVY

SEQ ID NO: 39280 - DNA, 1335 bp, Xanthomonas oryzae pv. oryzae KACC10331
  CDS (1)..(1335): transl_table=11
atggcacatcatcacgcaccctcaggcccggtcggtccggcgccgctgccgcatcaggtggtgtatacgacgctgcattacgacaccccgtggtcgtacgagagctatctgaaaacaggtggctacgccgcgctgcgcaagatcctcgaagagaagatcgcgccggccgatgtcatcgaaatggtcaaggcgtcgaatctgcgcggccgtggcggcgcgggcttcccgaccggtttgaagtggtcgttcatgcccaagggcacgatgcagaagtacatcctgtgcaactctgacgaatccgagccgggtacctgcaaggaccgcgacatcctgcgttacaacccgcattcggtggtggagggcatggcgatcgcctgctacgccaccggctcgacggtggggtacaactatctgcgtggcgagttccaccacgagccgttcgaaaatttcgagctggcgctggccgacgcgtacgccaacggttggttgggcaagaacatcctcggcagcggcgtggatatcgatatctacggcgcgctgggtgccggtgcctacatctgcggcgaagaaaccgcattgatggaatctctggaaggcaagaaaggccagccgcgctacaagccgccgttcccggccaacttcggcctgtacggcaagccgaccaccatcaacaacaccgagacctatgcgtcggtgccggcgatcattcgcaacggcccggagtggttccttgggttgagcaagaccaaaaacggcggcccgaagattttctcggtgtccggttgcgtgcagaagggcggcaatttcgaagtgccgctcggcaccaccttcgacgaattgctggaaatggccggcggtctgcgcccgggtcgcaagctcaagggcgtggtgcccggtggcgtgtcgatgccggtgctgaaagccgaccaggtcgctggcctgcagatggattacgacaccttgcgcgcactgggcaccggcttgggttcgggcgccatcgtggtgctggacgacagcgtctgctgcgtgcgtttcgcttgccgcatctcgcagttcttccacaaggaatcctgcggccagtgcaccccgtgccgcgagggcaccggctggatgcaccgcgtgctggagcgcattgtcgccggcaaggccacgatggaagacctgcatcagctgcgtaccgtggccggccagatcgaaggccacaccatctgcgcgttcggtgaagcggcggcatggccgattcagggcttcctgcgtcagttctgggacgagttcgagtactacatcgtcaacggtcgttcgatcgtcgatacgcaagtcggagtggctgcatga

SEQ ID NO: 39281 - protein, 444 aa, Xanthomonas oryzae pv. oryzae KACC10331
MAHHHAPSGPVGPAPLPHQVVYTTLHYDTPWSYESYLKTGGYAALRKILEEKIAPADVIEMVKASNLRGRGGAGFPTGLKWSFMPKGTMQKYILCNSDESEPGTCKDRDILRYNPHSVVEGMAIACYATGSTVGYNYLRGEFHHEPFENFELALADAYANGWLGKNILGSGVDIDIYGALGAGAYICGEETALMESLEGKKGQPRYKPPFPANFGLYGKPTTINNTETYASVPAIIRNGPEWFLGLSKTKNGGPKIFSVSGCVQKGGNFEVPLGTTFDELLEMAGGLRPGRKLKGVVPGGVSMPVLKADQVAGLQMDYDTLRALGTGLGSGAIVVLDDSVCCVRFACRISQFFHKESCGQCTPCREGTGWMHRVLERIVAGKATMEDLHQLRTVAGQIEGHTICAFGEAAAWPIQGFLRQFWDEFEYYIVNGRSIVDTQVGVAA

SEQ ID NO: 39282 - DNA, 1302 bp, Neisseria gonorrhoeae FA 1090
  CDS (1)..(1302): transl_table=11
atggctatttaccaatcaggcgtgatttttgaccaagtggataccgccaatcccgattgctggacattggacgaatacgtcaaacgcggcggctataccgccctgcgtaaaatcctgtccgaaaacatctcgcaaaccgatgtgattgacgaagtcaaaacctccggcttgcgcgggcgcggcggtgcgggcttcccgaccggtttgaaatggagctttatgccccgttctttcccgggcgaaaaatatgtggtttgcaacaccgacgaaggcgagccgggtacatttaaagaccgcgacatcatcatgttcaatcctcatgccctgattgaaggcatgatcattgccggttacgcgatgggcgcgaaagccggctacaactatatccacggcgaaattttcgaaggttatcaacgctttgaagccgctttggagcaggcgcgtgccgcaggctttttgggtaaaaatattttgggttcggattttgaattcgaactcttcgcccaccacggctacggcgcatatatttgcggcgaagaaaccgcattgcttgaatcgttggaaggcaaaaaaggccagccgcgcttcaaaccgccgttccccgcctcgttcggcctgtacggcaaaccgaccaccatcaacaataccgaaacgttctcctccgtcccgtttattatccgtgacggcggacaggcgtttgccgataaaggtattccgaatgcaggcggtaccaaattattttgtatttccggccatgtcgagcgtccgggcaactatgaagtgccgttgggcacgccgtttgccgaagtcttgaaaatggcgggcggtatgcgcggcggtaaaaaactcaaagccgttattcccggcggttcgtccgcccccgtattgcctgccgacattatgatgcagaccaatatggactatgactcgatttccaaagccggctcgatgctcggttccggcgcgattatcgtgatggacgaagacgtgtgcatggtcaaagccctcgaacgcttaagctatttctactacgacgaatcctgcggccaatgcaccccctgccgcgaaggtaccggctggctttaccgcatcgtccgccgcatcgtagaaggcaaaggccgcatggaagacttggatttgctggattctgtcggcaaccaaatggcaggccgcaccatctgcgcccttgccgatgccgccgtcttccctgtccgcagctttaccaagcatttccgtgatgagtttgcgcattacatcgaacacggcgggccgatgaaagagcataagtggggagggtggtaa

SEQ ID NO: 39283 - protein, 433 aa, Neisseria gonorrhoeae FA 1090
MAIYQSGVIFDQVDTANPDCWTLDEYVKRGGYTALRKILSENISQTDVIDEVKTSGLRGRGGAGFPTGLKWSFMPRSFPGEKYVVCNTDEGEPGTFKDRDIIMFNPHALIEGMIIAGYAMGAKAGYNYIHGEIFEGYQRFEAALEQARAAGFLGKNILGSDFEFELFAHHGYGAYICGEETALLESLEGKKGQPRFKPPFPASFGLYGKPTTINNTETFSSVPFIIRDGGQAFADKGIPNAGGTKLFCISGHVERPGNYEVPLGTPFAEVLKMAGGMRGGKKLKAVIPGGSSAPVLPADIMMQTNMDYDSISKAGSMLGSGAIIVMDEDVCMVKALERLSYFYYDESCGQCTPCREGTGWLYRIVRRIVEGKGRMEDLDLLDSVGNQMAGRTICALADAAVFPVRSFTKHFRDEFAHYIEHGGPMKEHKWGGW

SEQ ID NO: 39284 - DNA, 1308 bp, Brucella abortus biovar 1 str. 9-941
  CDS (1)..(1308): transl_table=11
atgctggctgacaaagatcgcatcttcaccaatatttacggcttcaaggatcagtccctgaagggtgccatggctcgtggccattgggacaataccaagggcctgatcgagaagggccgcgactggatcatcgaggagatgaaggcgtcgggcctgcgtggccgtggcggcgctggcttcccgacgggtctcaaatggtcgttcatgcccaagcagagcgatggtcgcccgcattacctcgtcgtcaatgccgacgaatcggagccgggcacctgcaaggaccgcgaaatcctgcgccacgatccgcatacgctgatcgaaggctgcgtgattgccggttgcgcgatgggcgtacacaccgcttatatttatattcgcggcgagttcatgcgtgagcgtgaggcgcttcaggctgcaatcgacgagtgctacgaagccggccttctcggcaagaacaacaagtgcggctgggatatggacatttatgtcacccacggcgctggcgcttatatctgcggtgaagaaacggctctgctcgaaagcctcgaaggcaagaagggtcagccgcgcctcaagcctccattcccggccaatatgggcctctacggttgcccgacgacggtcaacaacgtggaatcgattgccgttgcgccgacgatcctgcgtcgtggcgcggcatggttctcgtccatcggacgtccgaacaatgtcggcaccaagctgttccagatgtccggccatgtgaacacgccgtgcgtcgtggaagaggggctcggcattccgttccgcgagctgatcgaaaagcatggcggcggtatccgtggcggctgggacaatctgctggcggtcattcccggcggcgcgtcgtgcccggtcatcaaggccgaggacatgatggacgccgtcatggattttgatggcatgcgtgagaagaagtcgtccttcggcaccggcggcttgatcgtcatggacaagtccaccgacatcatcaaggcgattgcgcgcctgtctgccttcttcaagcatgagagctgcggccagtgcacgccgtgccgcgaaggcactggctggatgtggcgcgtgatggagcgcatggtcaagggtaacgcgcagaagcgtgaaatcgacatgctgttcgacgtcaccaagcagatcgaaggtcacacgatctgcgcgctcggtgatgcggccgcatggccgatccaggggctgattcgcaatttccgtccggaaattgaaaagcgcattgatgaatatactcgcaacgccgttcagagccgtaatatccgtctggaagcggctgaataa

SEQ ID NO: 39285 - protein, 435 aa, Brucella abortus biovar 1 str. 9-941
MLADKDRIFTNIYGFKDQSLKGAMARGHWDNTKGLIEKGRDWIIEEMKASGLRGRGGAGFPTGLKWSFMPKQSDGRPHYLVVNADESEPGTCKDREILRHDPHTLIEGCVIAGCAMGVHTAYIYIRGEFMREREALQAAIDECYEAGLLGKNNKCGWDMDIYVTHGAGAYICGEETALLESLEGKKGQPRLKPPFPANMGLYGCPTTVNNVESIAVAPTILRRGAAWFSSIGRPNNVGTKLFQMSGHVNTPCVVEEGLGIPFRELIEKHGGGIRGGWDNLLAVIPGGASCPVIKAEDMMDAVMDFDGMREKKSSFGTGGLIVMDKSTDIIKAIARLSAFFKHESCGQCTPCREGTGWMWRVMERMVKGNAQKREIDMLFDVTKQIEGHTICALGDAAAWPIQGLIRNFRPEIEKRIDEYTRNAVQSRNIRLEAAE

SEQ ID NO: 39286 - DNA, 1359 bp, Pseudomonas syringae pv. syringae B728a
  CDS (1)..(1359): transl_table=11
atgaccatcacttccttcggccctgccaaccgcattgcgcgcacggcagaaacccatccgctgacctggcgtctgcgcgacgacggcgaaccggtctggctcgacgagtaccagaccaaggacggctacgctgcagcgcgcaaggcgctgacgcagcaggcgcctgacgatatcgtccagtcggtcaaggattccggcctcaagggccgcggtggcgcaggcttccccacgggggtgaagtggggcctgatgcccaaagacgagtccatgaacatccgctacctgctgtgcaacgcggacgagatggaacccaacacgtggaaagaccgcatgctgatggagcaactgccccatctgctggtcgagggcatgctgatcagtgcccgcgcgctgaaagcctatcgcggctatatcttcctgcgcggcgaatacgtcaccgcagccaagcacctcaatcgcgcagtggctgaagccaaggccgcgggtttgctgggcaagaacattctcggcaccggtttcgacttcgaactgttcgtgcacacgggtgccggtcgctacatctgcggtgaagaaaccgcactgatcaactcgctggaaggccgccgcgccaacccgcgctccaagccgcccttccctgctgcggtgggcgtgtggggcaagccgacttgtgtgaacaacgtcgagactttgtgcaacgtgcctgccatcgtcaacaacggcaacgactggtacaagtcgctggctcgcgaaggcagtgaagaccacggcaccaagctgatgggtttctccggcaaggtcaaaaaccccggtttgtgggaactgcccttcggcgtacaggctcgcgaactgttcgaggactacgccggcggcatgcgcgatggtttcaagctcaagtgctggcaacccggaggcgccggtacgggtttcctgctgccggagcatctggacgcgcagatgtacgcaggcggtatcgccaaggtcggcacccggatgggtacggggctggcgatggcggtcgacgattcggtcaacatggtctcgctgctgcgcaacatggaagagtttttcgctcaggagtcctgtggcttctgcacgccatgccgcgacggcttgccatggagcgtgaagatgcttcgcgccatcgagaacggtcagggtcagccgggggatatcgaaaccctgctgggtctggtcaatttcctcggccctggcaaaaccttctgtgcccatgcaccgggcgccgttgaacccttgggcagtgcgatcaagtatttccgttccgagttcgaagccggtatcgcgccagccagcgcagccacgctcgttccgggcaaaagtccgacagtggtcggcgcataa

SEQ ID NO: 39287 - protein, 452 aa, Pseudomonas syringae pv. syringae B728a
MTITSFGPANRIARTAETHPLTWRLRDDGEPVWLDEYQTKDGYAAARKALTQQAPDDIVQSVKDSGLKGRGGAGFPTGVKWGLMPKDESMNIRYLLCNADEMEPNTWKDRMLMEQLPHLLVEGMLISARALKAYRGYIFLRGEYVTAAKHLNRAVAEAKAAGLLGKNILGTGFDFELFVHTGAGRYICGEETALINSLEGRRANPRSKPPFPAAVGVWGKPTCVNNVETLCNVPAIVNNGNDWYKSLAREGSEDHGTKLMGFSGKVKNPGLWELPFGVQARELFEDYAGGMRDGFKLKCWQPGGAGTGFLLPEHLDAQMYAGGIAKVGTRMGTGLAMAVDDSVNMVSLLRNMEEFFAQESCGFCTPCRDGLPWSVKMLRAIENGQGQPGDIETLLGLVNFLGPGKTFCAHAPGAVEPLGSAIKYFRSEFEAGIAPASAATLVPGKSPTVVGA

SEQ ID NO: 39288 - DNA, 1335 bp, Xanthomonas campestris pv. campestris str. 8004
  CDS (1)..(1335): transl_table=11
atggcacatcatcacgcaccctcaggcccggtcggtccggcgccgctgccgcatcaggtcgtctacacgaccctgcactacgacaccccgtggtcgtacgaaagctatctgaagaccggtggctacgccgcgctgcgcaagatcctcgaagagaagatcccgccgggcgacgtcatcgaaatggtgaaggcttccaacctgcgcggccgcggtggcgcgggcttcccgactggtctgaagtggtccttcatgcccaagggcaccatgcagaagtacatcctgtgcaattcggacgaatccgagccggggacctgcaaggaccgcgacatcctgcgttacaacccgcactcggtggtggagggcatggcaatcgcctgctacgccactggctcgaccgtgggctacaactatctgcgtggtgagttccatcacgagccgttcgaaaatttcgagctggcactggccgatgcctatgccaacggctggctgggcaagaacattctcggcagcggcgtggatatcgatatctatggtgcgctgggcgctggcgcttacatctgcggcgaagaaaccgcgctgatggaatcgctggaaggcaagaagggccagccgcgctacaagccgccgttcccggcgaacttcggcctgtacggcaagcccaccaccatcaacaacaccgagacctacgcgtcggtgccagcgatcattcgcaatggcccggagtggttcctggggttgagcaagaccaagaacggcggcccgaagatcttctcggtgtccggctgcgtgcagaagggcggcaatttcgaagtgccgctcggcaccaccttcgacgaactgctggaaatggccggtggcctgcgtccgggccgcaagctcaagggcgtggtgcccggcggcgtgtcgatgccggtgctgaaggccgaccaggtcgctggcctgcagatggattacgacaccctgcgcgcgcttggcaccggtctgggttccggcgccatcgtggtgctggatgacagcgtgtgctgcgtgcggtttgcctgccgcatctcgcagttcttccacaaggaatcctgcggccagtgcaccccgtgccgcgaaggcaccggctggatgcatcgcgtgctggagcgcatcgtcgccggcaaggccacgatggaagacctccaccagctgcgcaccgtggccggccagatcgaaggtcacaccatctgcgcgttcggcgaagcggcggcatggccgatccagggcttcctgcgccagttctgggacgaattcgagtactacatcgtcaacggtcgttcgatcgtcgacacgcatgtcggagtggccgcatga

SEQ ID NO: 39289 - protein, 444 aa, Xanthomonas campestris pv. campestris str. 8004
MAHHHAPSGPVGPAPLPHQVVYTTLHYDTPWSYESYLKTGGYAALRKILEEKIPPGDVIEMVKASNLRGRGGAGFPTGLKWSFMPKGTMQKYILCNSDESEPGTCKDRDILRYNPHSVVEGMAIACYATGSTVGYNYLRGEFHHEPFENFELALADAYANGWLGKNILGSGVDIDIYGALGAGAYICGEETALMESLEGKKGQPRYKPPFPANFGLYGKPTTINNTETYASVPAIIRNGPEWFLGLSKTKNGGPKIFSVSGCVQKGGNFEVPLGTTFDELLEMAGGLRPGRKLKGVVPGGVSMPVLKADQVAGLQMDYDTLRALGTGLGSGAIVVLDDSVCCVRFACRISQFFHKESCGQCTPCREGTGWMHRVLERIVAGKATMEDLHQLRTVAGQIEGHTICAFGEAAAWPIQGFLRQFWDEFEYYIVNGRSIVDTHVGVAA

SEQ ID NO: 39290 - DNA, 1269 bp, Rickettsia felis URRWXCal2
  CDS (1)..(1269): transl_table=11
atgctaaaagaagaagacaaaatttttactaacctacatggtcagcaaagccatgatttgaaatcaagcaagaagcgaggcgattgggataatactaaagctttgcttgataaaggtagagagtttattattgaagaggtcaagaaatcagggcttagagggcgaggcggtgccgggttttctacaggcatgaaatggtcgtttatgcccaaaaattcagcgaagccttgctatttagtagtaaatgccgacgagtctgagcctggtacttgtaaggatcgtgatatattaaggtttgagccgcacaaattaatagaaggttgcttgcttgcaagctttgcgataggagcaaatgattgctacatctatattagaggtgagttttataatgaagcttctaatattcagcgtgcattagacgaagcttataaagacgggttaataggaaagaatgcttgtggctcaggtttcgattgtaatatttatttacatcgtggggcgggggcttatatttgcggtgaggaaactgcattacttgaaagtttagagggtaaaaaaggcatgcctcgtttaaagccgccttttcctgccggatttgggctatatggctgcccgactactataaataatgttgagtctattgcagtagtgccgaccattttaagacgaggagctagttggtttgcttctatcggtaagcctaacaataccggtactaagattttctgcatatcggggcatgttaataagccttgcaatgttgaagaggcaatgggaatttcgttaaaagaattgattgagaaatatgccggcggtgttcgaggtggttgggataatcttaaagccataattccgggcggttcttccgtgcctttacttcctaagtcattatgtgaagtggatatggattttgatagtttaagaaccgcaggttccggacttggtacaggtggtattatagttatggataaatctaccgatattatttatgcaatagcacgcttaagtaaattttatatgcatgaatcatgcgggcaatgtactccctgccgtgaaggtacgggctggatgtggcgagttatgatgcggctagttaaaggtaatgcccaaaaatccgagatagacgaactccttaacgttacaaaagaaatagaggggcatactatttgtgccttaggtgatgcggcagcttggccaatccaagggctgatacgccattttagaagcgagattgaggagaggataaaggggtggtccagtgctatatga

SEQ ID NO: 39291 - protein, 422 aa, Rickettsia felis URRWXCal2
MLKEEDKIFTNLHGQQSHDLKSSKKRGDWDNTKALLDKGREFIIEEVKKSGLRGRGGAGFSTGMKWSFMPKNSAKPCYLVVNADESEPGTCKDRDILRFEPHKLIEGCLLASFAIGANDCYIYIRGEFYNEASNIQRALDEAYKDGLIGKNACGSGFDCNIYLHRGAGAYICGEETALLESLEGKKGMPRLKPPFPAGFGLYGCPTTINNVESIAVVPTILRRGASWFASIGKPNNTGTKIFCISGHVNKPCNVEEAMGISLKELIEKYAGGVRGGWDNLKAIIPGGSSVPLLPKSLCEVDMDFDSLRTAGSGLGTGGIIVMDKSTDIIYAIARLSKFYMHESCGQCTPCREGTGWMWRVMMRLVKGNAQKSEIDELLNVTKEIEGHTICALGDAAAWPIQGLIRHFRSEIEERIKGWSSAI

SEQ ID NO: 39292 - DNA, 1560 bp, Pseudomonas fluorescens Pf-5
  CDS (1)..(1560): transl_table=11
atgcccagcctctacctgccctgtgattccctggcccgcgccgtgggcgccgatgaagtggccaaggccatcgccacccaggccgaacagcgccagctgccgctgcaactgcaacgcaccagctcccgtggcctgtactggctggagccgctgctggaagtcgacaccccggacgggcgcctgggcttcggcccggtgggcgccgccgacgtaccggcgctgctggacgccctgcaaggcgatgccgccagccatcccctggccctgggccgggtcgaagacctgccctacctgaagaaccagcaacgcctgctgttcgcccgcgccggcattacccggccgctgtccctggccgattaccgggcccacggcggcttcgagggcctgacccgctccatcgccctgggcggcgagcagaccgtggccgcggtgctcgactccggcctgcgtggccgcggcggcgcggccttccccgccgggatcaaatggcgcaccgtgcgcgacacgccgccgcagcagaagtacgtggtgtgcaacgccgacgaaggcgactccggcaccttcgccgaccgcatgctgatggagggcgacccgttcctgctgatcgaaggcatggccattgccggcctcgcggtcggcgccagctacggctacatctacgtacgctcggaatacccccaggccgtggcgaccctgcgcgaggccctggacatcgcccgggatgccggttacctcggggccaacgccggcggtagcggccaggccttcgacatggaagtacgggtcggtgccggggcctatatctgcggcgaggaaaccgccctgctggactccctggaaggcaagcgcggcatcgttcgcgccaagccgccgatcccggcgctgcaaggcctgttcggccagccgaccctggtgcacaacgtgctgaccctggcctcggtaccgctgatcctggccaagggcgcgccgttctatcgcgactacggcatgggccggtccctgggcaccatgcccttccaactggcgggcaacgtgcgccatggcggcctggtggagcgggccttcggcctgaccctgcgcgagctggtggaaggctatggcggcggcaccgccagcggccggccactgaaggcggcgcaagtcggtggccccctgggcgcctgggtaccgccttcgcagttcgatacgccgctggattacgaagccttcgccgccatgggcgcgatgctcggccacgggggcgtagtggtggccgacgacagcctggacctggcccgcatggcgcgcttcgccctgcagttctgcgccgaggaatcctgcggcaaatgcaccccgtgccgcatcggctcgacccgcggcgtggaggtcatcgaccgcctgctggccgctcccgatcaaggccgccgcgatgagcaggcgctgatcctcaaggacctgtgcgacaccctgcaatacggctcgctgtgcgccctgggcgggatgacctcctacccggtggccagcgccctgaagcacttccccgccgacttcggtctggcgccctcggaggccgagcaatga

SEQ ID NO: 39293 - protein, 519 aa, Pseudomonas fluorescens Pf-5
MPSLYLPCDSLARAVGADEVAKAIATQAEQRQLPLQLQRTSSRGLYWLEPLLEVDTPDGRLGFGPVGAADVPALLDALQGDAASHPLALGRVEDLPYLKNQQRLLFARAGITRPLSLADYRAHGGFEGLTRSIALGGEQTVAAVLDSGLRGRGGAAFPAGIKWRTVRDTPPQQKYVVCNADEGDSGTFADRMLMEGDPFLLIEGMAIAGLAVGASYGYIYVRSEYPQAVATLREALDIARDAGYLGANAGGSGQAFDMEVRVGAGAYICGEETALLDSLEGKRGIVRAKPPIPALQGLFGQPTLVHNVLTLASVPLILAKGAPFYRDYGMGRSLGTMPFQLAGNVRHGGLVERAFGLTLRELVEGYGGGTASGRPLKAAQVGGPLGAWVPPSQFDTPLDYEAFAAMGAMLGHGGVVVADDSLDLARMARFALQFCAEESCGKCTPCRIGSTRGVEVIDRLLAAPDQGRRDEQALILKDLCDTLQYGSLCALGGMTSYPVASALKHFPADFGLAPSEAEQ

SEQ ID NO: 39294 - DNA, 1356 bp, Pseudomonas fluorescens Pf-5
  CDS (1)..(1356): transl_table=11
atgaccctgacctctttcggtcctgcgaaccgcattgcgcgcaccgcagaaacccatcccctgacctggcgcctgcgcgacgacggcgagccggtctggttcgacgagtaccaggccaagaacggttacgcggcggctcgcaaggccttcgccgacctgtcccaggacgacatcgtgcagaccgtcaaggatgccggcctcaagggtcgcggcggtgcgggcttccccaccggtgtgaagtggggcctgatgcccaaagacgaatccatgaacatccgctacctgctgtgcaacgcggacgaaatggagcccaacacctggaaagaccgcatgctgatggagcaactgccccatctgctgatcgaaggcatgctgatcagtgcccgcgcactgaaaacctaccgcggctacatcttcctgcgcggcgagtacaccaccgccgccaagcacctgcgacgtgccgtggaagaagccaaggccgcaggccttctgggcaagaacatcctgggcagcggcttcgatttcgagctgttcgtccacaccggcgccgggcgttacatctgcggtgaagaaaccgcactgatcaactccctggaaggccgtcgcgccaacccgcgctccaagccgcccttccctgccgccgtgggcgtgtggggcaagccgacctgcgtgaacaacgtcgagaccctgtgcaacgtgccggcgatcatcggcgacggcgtggaatggtacaaatccctggcccgcgaaggcagcgaagaccacggcaccaagctgatgggcttctccggcaaagtgaagaaccccggcctgtgggagctgcccttcggcgtgaccgcccgcgagctgttcgaagactacgccggcggcatgcgcgacggcttcaagctcaaatgctggcagccaggcggcgccggtaccggcttcctgttgcccgagcacctggacgcccagatgtatgccggcggcatcgccaaagtgggcacccgtatgggtaccggcctggccatggcggtggacgacagcatcaacatggtgtccctgctgcgcaacatggagcagttcttcgcccgcgagtcctgcggcttctgcacaccgtgccgcgacggcctgccctggagcgtcaagctgctgatggccctggaaaaaggccagggccagcaaggggacatcgagaccctgctgggcctggtgggtttcctcggcccaggcaagaccttctgtgctcacgcaccgggtgccgtggagcctttgggcagcgccatcaagtatttccgtccagagttcgaagccggcatcgcgcccaccagcgccgccgtcccgcctctggcccgaccgatcgtagtcggcgcgtaa

SEQ ID NO: 39295 - protein, 451 aa, Pseudomonas fluorescens Pf-5
MTLTSFGPANRIARTAETHPLTWRLRDDGEPVWFDEYQAKNGYAAARKAFADLSQDDIVQTVKDAGLKGRGGAGFPTGVKWGLMPKDESMNIRYLLCNADEMEPNTWKDRMLMEQLPHLLIEGMLISARALKTYRGYIFLRGEYTTAAKHLRRAVEEAKAAGLLGKNILGSGFDFELFVHTGAGRYICGEETALINSLEGRRANPRSKPPFPAAVGVWGKPTCVNNVETLCNVPAIIGDGVEWYKSLAREGSEDHGTKLMGFSGKVKNPGLWELPFGVTARELFEDYAGGMRDGFKLKCWQPGGAGTGFLLPEHLDAQMYAGGIAKVGTRMGTGLAMAVDDSINMVSLLRNMEQFFARESCGFCTPCRDGLPWSVKLLMALEKGQGQQGDIETLLGLVGFLGPGKTFCAHAPGAVEPLGSAIKYFRPEFEAGIAPTSAAVPPLARPIVVGA

SEQ ID NO: 39296 - DNA, 1425 bp, Psychrobacter arcticum 273-4
  CDS (1)..(1425): transl_table=11
atgagattaacggtttcagagcagattgcccttcgcaaccaaggcaaagcaccaagccaacttaatgagcagtgcattcctatctatggtgacagagcgaccgctaccagtgaaactaaaccactgacatggcgtctagcacatcacgatgcggtattagatttggcaacttatgaatcgctacgtggttttgaagcactaaaaatagcgttaaaccaatcaccagatgatacgttaaaaactatcaaagaagcggtagttaaaggacgtggcggtgcaggtttcccagcgggtattaagtggtcgctgatggcaccaccagatggtggtccacgctacctagtttgtaatgctgatgagatggagccgggtacgtttaaagaccgtttgctgatggagcgtctgccactacagcttatagaaggtatgctgatttctgcctacgcgattggtgcaactgctggttatatctttattcgcggtgaatatatcttagcagcggagcgcttaaccgcagcaattgaagagttacgtgccaataacttgattggcgataatattttaggctcagattttagttttgatttacatgtgcatacgggtgctggtcgttatatttgtggtgaagaaacggcattgattaacagcttagaaggtcgtcgtgccaatccgcgtaccaaaccgccatttccacaagtggcaggtgcatggggacgtccaaccgtcgttaataacgttgaaactttgcataacgtctcagcaattatcctgcatggtagcaagtggtatcaagacttgccaaaagccaaaggtgtggtcgaaacacctggtactaaactgtttggttgctcaggcttggttaacgatcccggtctttgggaattaccttttggttatacggcacgtgagatcattgaagattttgcgggtggtatgcaggaaggtcgcacgcttaaggcttggttaccgggcggcgcatcaacggattttttaaccgctgaacatttagatactgttgttgattttgataccattcaaaaagccggtagtcgtatgggtacaggcctgctgatggtcgtcgacgaagagcaagatatggtgccattggtacgtaaccttgagattttctttcagcgtgaatcgtgtggttggtgtacgccatgccgtgatggtctaccgtggggcgttaaaatcctcaccgctatcaatgatggcgaagggcagatgggcgatgttgaaaagttagaagggttaacccgtgacttatggatcggtaaaaccttctgtgcccatgcgccgggtgcgatggaaccactcatgagtgcaattaaatatttccgtcctgagtttgatcaaaaaattacgcaggcggttggtgaagatgtcattgaggctgcagccagtcaacagctagatgtgaaataa

SEQ ID NO: 39297 - protein, 474 aa, Psychrobacter arcticum 273-4
MRLTVSEQIALRNQGKAPSQLNEQCIPIYGDRATATSETKPLTWRLAHHDAVLDLATYESLRGFEALKIALNQSPDDTLKTIKEAVVKGRGGAGFPAGIKWSLMAPPDGGPRYLVCNADEMEPGTFKDRLLMERLPLQLIEGMLISAYAIGATAGYIFIRGEYILAAERLTAAIEELRANNLIGDNILGSDFSFDLHVHTGAGRYICGEETALINSLEGRRANPRTKPPFPQVAGAWGRPTVVNNVETLHNVSAIILHGSKWYQDLPKAKGVVETPGTKLFGCSGLVNDPGLWELPFGYTAREIIEDFAGGMQEGRTLKAWLPGGASTDFLTAEHLDTVVDFDTIQKAGSRMGTGLLMVVDEEQDMVPLVRNLEIFFQRESCGWCTPCRDGLPWGVKILTAINDGEGQMGDVEKLEGLTRDLWIGKTFCAHAPGAMEPLMSAIKYFRPEFDQKITQAVGEDVIEAAASQQLDVK

SEQ ID NO: 39298 - DNA, 1530 bp, Candidatus Pelagibacter ubique HTCC1062
  CDS (1)..(1530): transl_table=11
atgggtgtctcaactattcatggtgcagaaagtttttatgaatttttaagaccctctcatagagaaaaaaaagcttttgtttgcaatggaagtgcttgcatgtgtgctggtactcaagagccgcttaaaaaaaaattacaagaaaaattaggtgacgataaagttggtgaaatgttttgccttggtcactgctatgaaaataatgcttttcattatgatggtgagaattatgccggaaacgatattaataagattgatcaaataattaaaggtgaagacatagttcaagaaaaattcttttctaaaagttatgcctcaactagttttttaatggatgacaaactttctaatttagatcaatttaatgaacaattaaaaaaatttattgctactgacaaacaagaaataactaaatcccttctagactctaatttaactggcagaggtggtgctggttttcctactggtatgaaatgggatttttgtagaaaagctccttctgaaaaaaaatatgttatatgtaatgccgatgaaggtgactcaggtgctttctctgatagatatttattagaagatcaaccattaaaagttttatttggaatggttatttgtggttatgttattggtagtgatgaaggtgttttatatataagaggagagtacccaaaatctatagaagcaataaatggagcaattaattctttaaaaaaagcaggcttgcttggagaaaatattttaggaactaaattttcttttgatttaaatatttgtattggtcaaggtgcttatatttgtggagaagaaacagcattgattgcatcaattgaaggaagaagagctgaagtagatgtaagacctcccttccctgtcactgaaggtctttacaagaaaccaacagttgtaaataatgttgaaacattagctgcagctacgggtatacttattaatggagctgataagttttctgcaattggaaataaaaaatctgctggaaccaaattagtttgctttgatagttttttcaataatccaggtgtttatgaagttgaaatgggaacaccaatgaaaaaagttttaaatgatattggtggtggttttaaagaacccattaaagcattacaaattggaggtccattaggaggtgtaattcctattaccgagattgaaaaattaaatttagattttcaagaatttactgctgcaggttttatgttaggacacgcgagcatagtaagtattccaaaagactttcctatggttgaatatattcatcatttatttgagttttctgccgaagagtcatgtggaaaatgctttcctggtagacttggttcttacaggggtaaagaaatgtttgatcaagcaaagaataaaactgctaaaattccattaaaattactaaatgagctgcttgtaactatgcaaaaaggctgtttatgcgctttgtgtggagcaattcctactcccatcatgaatatattaaaatattttggtgatgaaatgaaggatgatatggtgaaagataattaa

SEQ ID NO: 39299 - protein, 509 aa, Candidatus Pelagibacter ubique HTCC1062
MGVSTIHGAESFYEFLRPSHREKKAFVCNGSACMCAGTQEPLKKKLQEKLGDDKVGEMFCLGHCYENNAFHYDGENYAGNDINKIDQIIKGEDIVQEKFFSKSYASTSFLMDDKLSNLDQFNEQLKKFIATDKQEITKSLLDSNLTGRGGAGFPTGMKWDFCRKAPSEKKYVICNADEGDSGAFSDRYLLEDQPLKVLFGMVICGYVIGSDEGVLYIRGEYPKSIEAINGAINSLKKAGLLGENILGTKFSFDLNICIGQGAYICGEETALIASIEGRRAEVDVRPPFPVTEGLYKKPTVVNNVETLAAATGILINGADKFSAIGNKKSAGTKLVCFDSFFNNPGVYEVEMGTPMKKVLNDIGGGFKEPIKALQIGGPLGGVIPITEIEKLNLDFQEFTAAGFMLGHASIVSIPKDFPMVEYIHHLFEFSAEESCGKCFPGRLGSYRGKEMFDQAKNKTAKIPLKLLNELLVTMQKGCLCALCGAIPTPIMNILKYFGDEMKDDMVKDN

SEQ ID NO: 39300 - DNA, 1332 bp, Candidatus Pelagibacter ubique HTCC1062
  CDS (1)..(1332): transl_table=11
atgcttaacgataaagatagaatatttcaaaacctatataatgataaaggttcagatgttgagtcttcaaaaaatagaggtgactgggtagatactgctgaaataataaaaaaaggtagagaatggattatagaagaagttaaatcatcggaattaagaggaagaggtggtgctggatttcctacgggtcttaaatggtcttttgccccaaaagaacttggttctagacctcactatctagttataaatggtgatgaatctgaacctggcacatgtaaggatcgtgatattttaaggtttgaacctcacaaattaatagaaggatgtttgattgcttcttacgcagttcaggcccatgtttgctatatttatatacgcggcgaatattttattgatggacaaaaacttcaaaaagcaatcgatgaagcttatgaaaaaaaacttataggaaaaaatgcctctggtactggctgggacttagatatttatattcattatggagcaggcgcttatatatgtggtgaagaaacagcacttctagaaagcatcgaaggtaaaaaaggtcagccaagattaaaacctccttttccagctttaataggattatacggatgtccaacaataattaataacgtggaaactatagctgttgttccgacgattttgagaaaaggtggtaaatggtttgcgtcattaggaaaagcgaaaaatacaggaactaaaatattttgtatatctggaaatgttaataaaccatgtaacgttgaagaggaaatgagtatatctcttaaagagttaatagaagtacatgctggcggagtaattggtggatgggataatctacaagcagtaataccaggtggatcttctatgcctattataccaaaaaaaacatgtgaaactttaacaatggattttgattcacttgttgctgagaaaagtggtttaggaaccgcaggtattgtcgttataaataatgatcaggatattattaaatgtatggcaagaattgctagattttataaacatgaaagttgtggacagtgcacaccatgtagagaaggttctggatggatgtggagaatgttagaaagaatggctaagggagaagcgtcaaaagatgaagtagaaatgcttggtgatgttacaaatcaaattgctggtcatactatttgtgcttttggtgaaggatcttcatggcctgtccagggtttgttaagacattttagaaaagaaattgaggaacgaaacaattttgaaccaacaataaaaaaaaataatgaagttccttatttagtcgatcaacatttattggataaaaaaaatgcctaa

SEQ ID NO: 39301 - protein, 443 aa, Candidatus Pelagibacter ubique HTCC1062
MLNDKDRIFQNLYNDKGSDVESSKNRGDWVDTAEIIKKGREWIIEEVKSSELRGRGGAGFPTGLKWSFAPKELGSRPHYLVINGDESEPGTCKDRDILRFEPHKLIEGCLIASYAVQAHVCYIYIRGEYFIDGQKLQKAIDEAYEKKLIGKNASGTGWDLDIYIHYGAGAYICGEETALLESIEGKKGQPRLKPPFPALIGLYGCPTIINNVETIAVVPTILRKGGKWFASLGKAKNTGTKIFCISGNVNKPCNVEEEMSISLKELIEVHAGGVIGGWDNLQAVIPGGSSMPIIPKKTCETLTMDFDSLVAEKSGLGTAGIVVINNDQDIIKCMARIARFYKHESCGQCTPCREGSGWMWRMLERMAKGEASKDEVEMLGDVTNQIAGHTICAFGEGSSWPVQGLLRHFRKEIEERNNFEPTIKKNNEVPYLVDQHLLDKKNA

SEQ ID NO: 39302 - DNA, 1605 bp, Colwellia psychrerythraea 34H
  CDS (1)..(1605): transl_table=11
atgaccactaccctatatttacctatggatacgaccgcactatctatgggagccgacgatgtagccaaggcgcttgaatttcaaacttcagtaaatgagcaaactataaaccttattcgtaatggctctcgtggcatgttttatttggaacccttgctagaagtagaaacagagcaagggcgtgttgcttatggacccgtatcaatagacgatattgaatcattacttgctcaaggtatgctaaatggtgagtcaacacatccactttatttaggcttcacagagaatattccctatttagctaaacaacaacggttaacctttcaacgtgcgggtattattgacccgcttagcatagaagattatatcaaacatcaaggatttattggcttatctaacgctcttaaacttagtgctcagggtattgtcgatgaaatgaagatatctggattacgtggtcgaggcggagccgcatttccaacaggcataaaatggcaaacagtacttgatgctaaagtaacttcttcagaccaaaaaaagtacatcgtttgtaatgccgatgaaggtgattcaggaacttattctgaccgcctaataatggaagccgatccttttagtttaatcgaaggcatgatcattgccggaatagcagtaggtgcaacgcaaggatatatatatcttcgttcagaatacccgcaagcacagaaaatacttgaacaagccatcgctaatgcttatcaagataattacttaggtgacgctattcaaggtactcaacatcaatttgacttagaagttagaataggagcaggtgcttatatttgtggtgaagaaacctctttactggaaagccttgaaggaaaacgtggtttagtaagagcaaaacctcctttgcctgctattacaggtttatttggtcaaccaactactgtgaataatgttatcagtttagctacagtaccaacgattctagccaaaggagcgcaatactatcaggattatggtgttggcagatcgcgcggaaccctaccttttcagttagcgggtaatatcaaacaaggcggcttagtcgaacttgcctttggtaccaccttggccgatcttgttaatgattttggtgctggaacctatactggtgaaacaatgaaagccattcaagttggtggtcccttaggtgcttacttgcccaaatatcaatggcagactcctctcgattatgaagccttttcatcaattggtgctgtattaggccatggcggtatcgttgtctttgatgacagtgtcagtatgactgaacaagcacgttttgctatggaattttgtggtgtggaatcttgcggaaagtgtactccgtgccgtatagggtcaacaagaggcgttgaagttattgataaaatgataacagctcatgaacacgatgaaccaatcgaagcactcaacgaattattagtagatttatgcgataccatggttgatggctccctatgtgctatgggaggcatgacacccattcctgttcgtagcgttatgcagcattttagcgatgacttcatcactgacgctacagttgcggaagttaacaaaacgatgggtaaggagcaataa

SEQ ID NO: 39303 - protein, 534 aa, Colwellia psychrerythraea 34H
MTTTLYLPMDTTALSMGADDVAKALEFQTSVNEQTINLIRNGSRGMFYLEPLLEVETEQGRVAYGPVSIDDIESLLAQGMLNGESTHPLYLGFTENIPYLAKQQRLTFQRAGIIDPLSIEDYIKHQGFIGLSNALKLSAQGIVDEMKISGLRGRGGAAFPTGIKWQTVLDAKVTSSDQKKYIVCNADEGDSGTYSDRLIMEADPFSLIEGMIIAGIAVGATQGYIYLRSEYPQAQKILEQAIANAYQDNYLGDAIQGTQHQFDLEVRIGAGAYICGEETSLLESLEGKRGLVRAKPPLPAITGLFGQPTTVNNVISLATVPTILAKGAQYYQDYGVGRSRGTLPFQLAGNIKQGGLVELAFGTTLADLVNDFGAGTYTGETMKAIQVGGPLGAYLPKYQWQTPLDYEAFSSIGAVLGHGGIVVFDDSVSMTEQARFAMEFCGVESCGKCTPCRIGSTRGVEVIDKMITAHEHDEPIEALNELLVDLCDTMVDGSLCAMGGMTPIPVRSVMQHFSDDFITDATVAEVNKTMGKEQ

SEQ ID NO: 39304 - DNA, 1614 bp, Colwellia psychrerythraea 34H
  CDS (1)..(1614): transl_table=11
atgaatcactcaccttccgatgacagctcaatgccagtagcgtcacgaaaaattttcgtttctttagatactactgcccgctcccgcggtagtgataaggtagcaacgcaggttgaaagtgtacttaacgcacaaccagaactagcagcaacattagtaagaaatggctctcgcggcatgttttggttagagcctttattagaaattaatacccccaaaggtcgagtcgcttatggtccggtaaaagcggaagatgtaaacgacatcattaacctgcaatgttttgatgatgctactgaacacccattatgccttggtttaaccgaagaattaccctggtttaaatctcaacaacggttaacgtttgcccgagtgggcattatcgatcctatcgatgttgatgattacattagccatggtggatttgtcggtttaactaatgctttcgcaaaaactgcacaacagttagtcgatgaagtaaaagagtctggtctcagaggtcgtggcggtgctgcatttcctacaggtataaagtggcaaaccgttttgaatgaaccagagcagcagaaatatattgtctgtaacgccgatgaaggtgattcaggtacttttgccgatcgtatgttaatggaaggcgatccgttagtactagttgaaggcatgatcatcgcaggccttagcgtaggagctgaccaaggttatatctatttacgcagtgagtatcctcaggcccatgacctattaaataaagccattagcaatgcaaaagcagctggttatctaggtgataatatttgtggcactgagcacaactttcatttagaagtgcgtttaggcgctggtgcttatatttgtggcgaggaaacatccttattagaaagccttgaaggcaaacgtggcttagttcgcgctaaaccaccactacccgctattgaaggtttatttggtcaaccaaccgtggtaaataacgtcatatcactcgcttctgtaccttatattttaagccatggcggtgatagttatcgtgatttcggcatgggccgatctcgtggcaccttacccattcaattagcgggtaacattgctcaaggggggttagttgaattagctttcggtatatcccttaatgaattactacagcaatatggcaatggctgtaaaagcaaacgtgctatgcgcagtgtacaagtaggcggaccgttaggtgcttatttgcccgcagagcaatgggataccgcccttgattatgaagagtttgccagtattggtgccgtattaggccacggtggaattgttgtttttgacgacactgtcgatatggctgcacaggctcgttttgccatggaattttgtgaagtagaatcttgtggtaaatgtaccccatgtcgaattggcgccgtacgtggcgttgaagtcattgataaaattatcgatggcaacaatgacgaacaacaacgacaagacagcgtagacttattacatgacctatgtgacaccatggaattcggttctttatgtgctatgggtggcatgaccccattcccggtgcgcagcgcactaaaatatttccctgatgattttttgccacaaccgtcaacacaaaaggctcaataa

SEQ ID NO: 39305 - protein, 537 aa, Colwellia psychrerythraea 34H
MNHSPSDDSSMPVASRKIFVSLDTTARSRGSDKVATQVESVLNAQPELAATLVRNGSRGMFWLEPLLEINTPKGRVAYGPVKAEDVNDIINLQCFDDATEHPLCLGLTEELPWFKSQQRLTFARVGIIDPIDVDDYISHGGFVGLTNAFAKTAQQLVDEVKESGLRGRGGAAFPTGIKWQTVLNEPEQQKYIVCNADEGDSGTFADRMLMEGDPLVLVEGMIIAGLSVGADQGYIYLRSEYPQAHDLLNKAISNAKAAGYLGDNICGTEHNFHLEVRLGAGAYICGEETSLLESLEGKRGLVRAKPPLPAIEGLFGQPTVVNNVISLASVPYILSHGGDSYRDFGMGRSRGTLPIQLAGNIAQGGLVELAFGISLNELLQQYGNGCKSKRAMRSVQVGGPLGAYLPAEQWDTALDYEEFASIGAVLGHGGIVVFDDTVDMAAQARFAMEFCEVESCGKCTPCRIGAVRGVEVIDKIIDGNNDEQQRQDSVDLLHDLCDTMEFGSLCAMGGMTPFPVRSALKYFPDDFLPQPSTQKAQ

SEQ ID NO: 39306 - DNA, 1359 bp, Pseudomonas syringae pv. phaseolicola 1448A
  CDS (1)..(1359): transl_table=11
atgaccatcacttccttcggccctgccaaccgcattgcgcgcacggcagaaacccacccgctgacctggcgtctgcgtgacgacggcgagccggtctggctcgacgagtatcaggccaaagacggttatgcagcagcgcgcaaggcgctgacgcaacagtcgcctgacgatatcgtccagtcggtcaaggactcgggcctcaagggccgcggcggtgcgggcttccctaccggcgttaaatggggcctgatgcccaaagacgaatccatgaacatccgctatttgctgtgcaatgcggatgagatggaacccaatacctggaaagaccgcatgctgatggagcaactgccccatctgctggtcgagggcatgctgatcagtgcgcgtgcgctgaaagcctatcgtggctatatcttcctgcgtggcgaatacgtaacggccgccaagcacttgaaccgcgccgtggccgaagcgaaggctgccggcctgctgggcaagaacatcctcggcaccggcttcgactttgaactgttcgtacacaccggagccggccgttacatctgcggtgaagaaaccgcgctgatcaactcgctggaaggccgccgcgccaacccgcgctccaagccgcccttccctgctgccgtaggcgtctggggcaagccgacctgtgtaaacaacgtcgaaaccctgtgcaacgtgcccgccatcgtcaacaacggcaacgactggtacaagtcgctggcccgcgaaggcagtgaagaccacggcaccaagctgatgggcttctccggcaaggttaaaaacccgggtttgtgggagctgccatttggcgtacaggctcgcgaactgttcgaagactacgccggtggcatgcgcgatggcttcaagctcaaatgctggcaacccggcggcgccggtacgggtttcctgctgccagagcatctggacgcccagatgtacgcaggcggtattgccaaggtcggtacccggatgggcaccggtctggcgatggccgtcgacgattcggtcaacatggtttcactgctgcgcaacatggaagagttcttcgctcaggagtcctgcggcttctgcaccccatgccgcgacggtttgccatggagcgtaaaaatgcttcgcgccatcgagaagggtcaggggcagccgggggatatcgaaaccctgctgggtctggtcaatttcctcggcccaggcaagaccttctgcgcccatgcaccgggcgctgtggaaccgctgggcagtgcgatcaagtatttccgttcggagttcgaagccggtattgcgccagccagcgcaaccacgctcgttccgggcaacagtccgaccgtggtcggcgcataa

SEQ ID NO: 39307 - protein, 452 aa, Pseudomonas syringae pv. phaseolicola 1448A
MTITSFGPANRIARTAETHPLTWRLRDDGEPVWLDEYQAKDGYAAARKALTQQSPDDIVQSVKDSGLKGRGGAGFPTGVKWGLMPKDESMNIRYLLCNADEMEPNTWKDRMLMEQLPHLLVEGMLISARALKAYRGYIFLRGEYVTAAKHLNRAVAEAKAAGLLGKNILGTGFDFELFVHTGAGRYICGEETALINSLEGRRANPRSKPPFPAAVGVWGKPTCVNNVETLCNVPAIVNNGNDWYKSLAREGSEDHGTKLMGFSGKVKNPGLWELPFGVQARELFEDYAGGMRDGFKLKCWQPGGAGTGFLLPEHLDAQMYAGGIAKVGTRMGTGLAMAVDDSVNMVSLLRNMEEFFAQESCGFCTPCRDGLPWSVKMLRAIEKGQGQPGDIETLLGLVNFLGPGKTFCAHAPGAVEPLGSAIKYFRSEFEAGIAPASATTLVPGNSPTVVGA

SEQ ID NO: 39308 - DNA, 1332 bp, Candidatus Blochmannia pennsylvanicus str. BPEN
  CDS (1)..(1332): transl_table=11
atgagcaatacttatgatgttagtgcagaaaataatccacttacatggagaatgcgtgacgataaacaaccagtatggttgcatgaatataaatctaaaaatgggtatcgagctgcgtataaagcaattactcaaatgtctccagaagagattattgaattagttagaaattcaggtttaagaggtcgtggaggtgggggtttttttactggaataaaatggtctatgatgtctcaaagtaagtcagtctgctctcgttatttagtgtgtaatgcagacgaaatggagccaggaacttataaagatcgatttttaatggaacgattgcctcatttattattagaaggtatattaatttcaagttatgctttaggagcgtcacgagcgtatatttttttgagatatgaatacataatcgttgcgaaatatttaactcgtgctatagccgagattaaatcaattggattgattggtaaaaacatattgaatagtgagtttaattttgagttattcttgcatacaggagctggaagatatatttgtggagaagaaacagcgttgattaacgctttagaagggcgtcgagcagtgccgcgtgctaaaccaccttttccaagtcatgtaggattgtggggaaaacctacatgtgtcaataatgttgagacgttatgcaatattccaggaattattgagcatgggaccacttggtatcggaatatttcttctaaaaaaagtaatgattcaggtacaaaattaatgggattttctggtcgagttaaaaacccaggggtttgggagctaccttttggtacgactgctagagaaattttagaagattattctcgaggcatgtgtcctggttttagtttaaaagcatggcaacctgggggtgtaagtacagattttttaactacagatcatttagatacacctatggattttgataaaattgctatttctggtagtagatttggaactggtatggcaatagcgatagataatactgtaaatatggtgtctttagtgcgtaatttagaagagtttttttcaagagaatcttgtggttggtgtactccttgtagagatgggttaccgtggatagtaaaattgttgatttctttggaaaataaagacggcagacctggagacatagaattattagagaaattgtgttgtgtactcggacctggaaggactttttgcgctcacgccccaggagctatagaacctttgaaaagtgctttaaaatattttaaaaatgaatttgaattgggtattcatgaattttataaacaggaaccgaatcgtattatttgtgtgcaaattaattaa

SEQ ID NO: 39309 - protein, 443 aa, Candidatus Blochmannia pennsylvanicus str. BPEN
MSNTYDVSAENNPLTWRMRDDKQPVWLHEYKSKNGYRAAYKAITQMSPEEIIELVRNSGLRGRGGGGFFTGIKWSMMSQSKSVCSRYLVCNADEMEPGTYKDRFLMERLPHLLLEGILISSYALGASRAYIFLRYEYIIVAKYLTRAIAEIKSIGLIGKNILNSEFNFELFLHTGAGRYICGEETALINALEGRRAVPRAKPPFPSHVGLWGKPTCVNNVETLCNIPGIIEHGTTWYRNISSKKSNDSGTKLMGFSGRVKNPGVWELPFGTTAREILEDYSRGMCPGFSLKAWQPGGVSTDFLTTDHLDTPMDFDKIAISGSRFGTGMAIAIDNTVNMVSLVRNLEEFFSRESCGWCTPCRDGLPWIVKLLISLENKDGRPGDIELLEKLCCVLGPGRTFCAHAPGAIEPLKSALKYFKNEFELGIHEFYKQEPNRIICVQIN

SEQ ID NO: 39310 - DNA, 1329 bp, Dechloromonas aromatica RCB
  CDS (1)..(1329): transl_table=11
atggcgatgcttggttcgatcaacggcgttctgatggaaggtcttgacggcgacaacagttggagcctgaaggattacgtggcccgcggcggttatgcgcagctgaagcgaattctggacagcaagatgacccaggaagatgtcatcagcgaagtcaagaagtcggtgctgcgggggcgtggtggtgcaggttttccgacaggcctgaagtggtctttcatgccgcgctccttcccgggtgacaagtatgtcgtctgtaacaccgacgaaggtgagccgggtaccttcaaggaccgcgatatcatgcgttacaacccgcatgccgtcatcgaaggcatggccatcgccgcctacgcgatgggggccaatcgcggttacaactacgtgcacggagaagtctggctggaatacaagcgtttcgaagaagcgctagatcaggctcgtgctgccggttttatcggtcaaaatattcttggctcgggcttcaatttcgaattgttcgcccaccacggttacggtgcctacatctgtggcgaagaaactgcgctgctcgagtcgatcgaaggcaagaaggggcaaccgcgcttcaagccaccattcccggcctctttcggcctctacggcaagccgacgacaatcaacaataccgaaaccttcgcttccatccccttcattctgaagatgggcggcgaggagtttctcaatctgggcaagccgaacaacggaggcaccaagctgttctcggtatccggccacgtcaatcgcccgggcaactacgaaattccgctcggcacgccgtttgccacattgcttgaaatgtgtggtggtatgcgcggaggccgcaagctgaaggcggtaattcccggagggtcttcggcgccggtgatgcctgccgatgtgatcatggattgcaccatggactacgactcgatcagcaagggcggatcgatgcttggttccggtgcggttatcgtcatggacgagacagtctgcatggtcaaggcattggatcgtctgtccttcttctatcacgaagagtcctgcggccagtgcaccccctgtcgtgaaggtacggcctggatgtacaaggttgtacatcgcatcgaaaatggcctcggcaagcccgaggatctggacctgctgaacagcgtgctcggcaacattgcgggtcgcacgatttgcgccctcggcgatgctgcggcttttccggtacagagttttatcaagcacttcggcaaagaattcgagtatcacattgaacacaagacctgtctggtacccaaggatgtgcaatgggccggcagtggcttccacaagattccggcctga

SEQ ID NO: 39311 - protein, 442 aa, Dechloromonas aromatica RCB
MAMLGSINGVLMEGLDGDNSWSLKDYVARGGYAQLKRILDSKMTQEDVISEVKKSVLRGRGGAGFPTGLKWSFMPRSFPGDKYVVCNTDEGEPGTFKDRDIMRYNPHAVIEGMAIAAYAMGANRGYNYVHGEVWLEYKRFEEALDQARAAGFIGQNILGSGFNFELFAHHGYGAYICGEETALLESIEGKKGQPRFKPPFPASFGLYGKPTTINNTETFASIPFILKMGGEEFLNLGKPNNGGTKLFSVSGHVNRPGNYEIPLGTPFATLLEMCGGMRGGRKLKAVIPGGSSAPVMPADVIMDCTMDYDSISKGGSMLGSGAVIVMDETVCMVKALDRLSFFYHEESCGQCTPCREGTAWMYKVVHRIENGLGKPEDLDLLNSVLGNIAGRTICALGDAAAFPVQSFIKHFGKEFEYHIEHKTCLVPKDVQWAGSGFHKIPA

SEQ ID NO: 39312 - DNA, 1899 bp, Dechloromonas aromatica RCB
  CDS (1)..(1899): transl_table=11
gtggctctgaacgatatgcatgccgaggcggtggctggtgttgtcgaccgcgttgtcgcccgttatcaccgggatcccacttgcatggtgcagatactgcgcgaggttcaggaggtttgtgactggatttcgcccgaagccatcgaccgcatgcaggtcacgctcggcgttccacggaccaagatcgagggcgtcgccggcttttacgcctttttctataccgagccacgcggcaaataccgggtgctgttttcggacaacatcactgaccgcatgctgggcagcaaggcgatgatggatcgcctgtgcaacagcctgtgggtcgagcgtggcaaggtttctgaggatggtctggtcagcgtggcgcagacggcctgtaccggtatgtgcgatcaggggccggcgctgctgatcaataactacgccattgccggattgactgcagagcgtattgacgagattgccgagctgattcgcggcaaggtgccgctggccgagtggccgccggcctatttcaagaccgaagacaatatccgccgggccgatatcctgctcaatgccgatttcaaacccggtgaggcactgctggcagcccgagcgcgggcaccgagcgatggtctcaattcatcgaacatgcgttcctggcgcgaaggcttgcccagcgggattggcgggccgggcgccacgctggacgaaatcaagcgcgccaatctgcgggggcgtggcggtgccggtttcaccaccggcctcaaatgggaggcctgccgcaatgccccgctcaaggctggcgcccagcgcatcgtggtctgcaacgccgatgaaggcgaaccgggtactttcaaggatcgcgttttactgtccaggaacccggacctggttttcgagggcatgacggtggcggcttatgcggtcggcgcgacccgcggttttgtctatctgcgcggcgaataccgttacatgctcgaccacctgaatgccgtgctggcccatcgccggcgcgaaaagctgttgggcaaggacattctcggcctgccgggggcggatttcgatatcgagattcatgtcggggccggcgcctatgtctgcggcgaagagtcggcgctgatcgagtcgctcgaaggcaagcgcggcaccccgcgcaaccggccgcctttcccggtcaccaacggctatctggaccagccgaccatcgtcaataacgttgaaacctttgccgcggcagcgctgatcgcgttgaatggcggtgactggtatgccgccatcggcaccaagcattcggccggcaccaagctgctttcggtctccggcgattgcgagcggccgggcatttacgaatacccgttcggcgtcagtgtccgacaggtgctggaagactgcggcgccagggatacgcaggccgtgcaggtcagcgggccatccggcatctgtattgcagagcaggaattcgaccgtgtcatcggttttgaggatatccccacggccggcgctttcaccgtattcaacaacactcgcgacatgttcgaggtggcgcgcaactacgtgcatttcttccagcacgaaagctgcggtttctgcacgccgtgccgggttggcacgtccctgctcaagaacctgatggacaaactgcacaatggcgtcggttcgccctacgactttgccgaaatcgagaagctcaaccagttgctgcaatcgatgagccattgcggactgggccatacggcctgcaacccggtgctcgacacgatcgaacgcttccgtccggcctacgagcgacgcatggcgcaaaaggatttcacaccggctttcgatctcgaccgcgcgctgtcatcggcccgacagatgaccgggcgcgatgatgccggcgcccatctggcgacagaacatggaggtcaatcatga

SEQ ID NO: 39313 - protein, 632 aa, Dechloromonas aromatica RCB
MALNDMHAEAVAGVVDRVVARYHRDPTCMVQILREVQEVCDWISPEAIDRMQVTLGVPRTKIEGVAGFYAFFYTEPRGKYRVLFSDNITDRMLGSKAMMDRLCNSLWVERGKVSEDGLVSVAQTACTGMCDQGPALLINNYAIAGLTAERIDEIAELIRGKVPLAEWPPAYFKTEDNIRRADILLNADFKPGEALLAARARAPSDGLNSSNMRSWREGLPSGIGGPGATLDEIKRANLRGRGGAGFTTGLKWEACRNAPLKAGAQRIVVCNADEGEPGTFKDRVLLSRNPDLVFEGMTVAAYAVGATRGFVYLRGEYRYMLDHLNAVLAHRRREKLLGKDILGLPGADFDIEIHVGAGAYVCGEESALIESLEGKRGTPRNRPPFPVTNGYLDQPTIVNNVETFAAAALIALNGGDWYAAIGTKHSAGTKLLSVSGDCERPGIYEYPFGVSVRQVLEDCGARDTQAVQVSGPSGICIAEQEFDRVIGFEDIPTAGAFTVFNNTRDMFEVARNYVHFFQHESCGFCTPCRVGTSLLKNLMDKLHNGVGSPYDFAEIEKLNQLLQSMSHCGLGHTACNPVLDTIERFRPAYERRMAQKDFTPAFDLDRALSSARQMTGRDDAGAHLATEHGGQS

SEQ ID NO: 39314 - DNA, 1317 bp, Thermobifida fusca YX
  CDS (1)..(1317): transl_table=11
gtgacgacgctgacccccgtgctgtcccgcaactgggaccgcccggactcctacaccctcgacgcctaccgggagaacggtggctacgaggcgctgcgcaaggccctgaccatggagcccgacgccatcgtcgagatggtcaaggcctccggcctgcgcggccgcggcggtgccggcttccccaccgggatgaagtggggtttcctccccaaggacaaccccaagccgcgctacctcgtcgtcaacgccgacgagtctgagcccggcacctgcaaagacatcccgctgatgatggccaacccgcacgcgctcatcgaaggcgtcatcatctccgcctacgcgatcaacagccaccaggccttcatctacgtccgcggggaggtcctgcacgtcatccggcggctgcggcacgccgtcgccgaagcctacgaggccgggctgctcggtaaggacatcctcggcagcggcttcgacctcgacgtcgtcgtccacgccggggcgggcgcctacatctgcggtgaggagaccgccctgctggactcgctcgagggctaccgcggccagcctcgcctcaagccgccgttccccgccgtcgcaggtctgtacgcctcacccaccgtggtgaacaacgtcgaatccatcgccaccgtgccgagcatcgtcgccaacggcgccgagtggttcaagtccatgggcacggagaagtccgccggcttcggcttcttctccctgtccggccacgtcaagcggcccggccagtacgaggccccgctcggcgtgaccttgcgcgaactgctcgagatggccggcggtatccgcgacgggcaccggctcaagttctggacccccggtggctcctccaccccgatcttcaccgaggagcacatcgacatccccctggacttcgagtcggtcggcggagcgggctccatgctcggcacccgcgcgctgcagatcttcgacgaaaccacctcggtcgtccgggtcgtgcgcggctggatcgagttctacgcgcacgagtcctgcggcaagtgcactccgtgccgcgaaggcaactactggatggtccaagtcctgcgccgtatcgaagcaggcaaggggacccaagaggacatcgacacgctgctcgacatctgcgacaacctgctcgggcgctccttctgcgcgctcggggacggtgcgaccagctcggtgacctcggcgatcaagtacttccgggaggagttcatcgcgggaacccacactcccgcgtgggagctgttcccgtaccagcgcaccactcgctgggcgaatgagtccgtggaagaggacgcctga

SEQ ID NO: 39315 - protein, 438 aa, Thermobifida fusca YX
MTTLTPVLSRNWDRPDSYTLDAYRENGGYEALRKALTMEPDAIVEMVKASGLRGRGGAGFPTGMKWGFLPKDNPKPRYLVVNADESEPGTCKDIPLMMANPHALIEGVIISAYAINSHQAFIYVRGEVLHVIRRLRHAVAEAYEAGLLGKDILGSGFDLDVVVHAGAGAYICGEETALLDSLEGYRGQPRLKPPFPAVAGLYASPTVVNNVESIATVPSIVANGAEWFKSMGTEKSAGFGFFSLSGHVKRPGQYEAPLGVTLRELLEMAGGIRDGHRLKFWTPGGSSTPIFTEEHIDIPLDFESVGGAGSMLGTRALQIFDETTSVVRVVRGWIEFYAHESCGKCTPCREGNYWMVQVLRRIEAGKGTQEDIDTLLDICDNLLGRSFCALGDGATSSVTSAIKYFREEFIAGTHTPAWELFPYQRTTRWANESVEEDA

SEQ ID NO: 39316 - DNA, 1566 bp, Ralstonia eutropha JMP134
  CDS (1)..(1566): transl_table=11
atgagcgccgccgtcaccaccatctttgtcccgcgcgattccaccgcgctggcccttggcgccgacgacgtggcgcgcgcgattgctcgtgaagcggctgcgcgcggcgagtcggtgcacatcgtgcgcaacggctcgcgcggcatgttctggctcgagccgttggttgaagtgcaaaccgaagcgggccgcgcggcctacggtccagtcagcgtggacgatgtgccgggactgctagatgcgggcctgctgcaaggcggcgaacacgtactggctcatggcctcaccgacgagattcctttcctcaagcgccaggaacgcctgacgttcgcgcgtgtcggcatcaccgatccgctgtcgctcgacgactaccgcgcgcatgaaggctatgccggcctcgaacgcgcgctggcgatggagcctgccgcgatcgtgcaggaagtgaccgactccggcctgcgtggccgtggcggcgcggcgtttcccaccggcattaagtggaagaccgtgctcggcgcgaagtccgcggtcaagtacatcgtctgcaatgccgacgaaggcgattcgggcacgttctccgaccgcatggtgatggaagacgacccgttcgtgctgatcgagggcatgaccatcgccggtctcgcggtcggtgcggagtacggctatatctactgccgttccgaatacccgcatgcgattgccgtgctgaatgcagccattgctacggctacggccgccggctggctcggcgacgacatccgcggcagcggcaagcgcttccacctggaagtgcgcaagggcgccggcgcctatgtgtgcggcgaggaaaccgcgctgctcgaaagcctggaaggtaaacgtggcgtggtgcgcgccaagccgccgctcccggcgctggagggcctgtttggcaagcccaccgtcatcaacaacgtgatttcgctcgcgacggtgcccgtcatcctcgcgcgcggcgcgcagcactaccgcgacttcggcatgggtcgttcacgcggcacgctgccgttccagctcgccggcaatatcaagcaaggtggtctggtcgaaaaggcattcggcgtgacgctgcgtgaactgctctacgactacggcggtggcacgcgcagcggccgcgccgtacgcgcggtgcaggtgggcggcccgctcggcgcctatctgcccgaagcgcgcttcgatgtgccgatggactacgaagcctatgcggcattcggtggtgtagtcggccacggcggcattgtggtgttcgacgagaccgtcgacatggccaggcaggcgcgctacgcgatggagttctgcgcgatcgaatcatgtggcaagtgcacgccgtgccggatcggctccacgcgcggcgtggaggtcatggaccggatcatcgccggcaacgagcccgtcaagcatgtgaagctggtgcgcgacctgtgcgacaccatgctcaacggctcgctctgcgccatgggcggtatgacgccgtacccggtgctgtccgcactcaacgaattccccgaggacttcggcctcgcctccaacccagccaaggcggcctga

SEQ ID NO: 39317 - protein, 521 aa, Ralstonia eutropha JMP134
MSAAVTTIFVPRDSTALALGADDVARAIAREAAARGESVHIVRNGSRGMFWLEPLVEVQTEAGRAAYGPVSVDDVPGLLDAGLLQGGEHVLAHGLTDEIPFLKRQERLTFARVGITDPLSLDDYRAHEGYAGLERALAMEPAAIVQEVTDSGLRGRGGAAFPTGIKWKTVLGAKSAVKYIVCNADEGDSGTFSDRMVMEDDPFVLIEGMTIAGLAVGAEYGYIYCRSEYPHAIAVLNAAIATATAAGWLGDDIRGSGKRFHLEVRKGAGAYVCGEETALLESLEGKRGVVRAKPPLPALEGLFGKPTVINNVISLATVPVILARGAQHYRDFGMGRSRGTLPFQLAGNIKQGGLVEKAFGVTLRELLYDYGGGTRSGRAVRAVQVGGPLGAYLPEARFDVPMDYEAYAAFGGVVGHGGIVVFDETVDMARQARYAMEFCAIESCGKCTPCRIGSTRGVEVMDRIIAGNEPVKHVKLVRDLCDTMLNGSLCAMGGMTPYPVLSALNEFPEDFGLASNPAKAA

SEQ ID NO: 39318 - DNA, 1296 bp, Ralstonia eutropha JMP134
  CDS (1)..(1296): transl_table=11
atgacctctctgcacgaccgccacatccagccgctgatcctggccggcctggacggcaagaactggcacctggaagactacgtcaagcgcggcggctaccagcagctcaagcgcatcctgaccgaaaagatcccgcccgagcaggtgatcgcggacgtcaaggcctcgggcctgcgtggccgtgggggcgcgggcttcccgaccggcctgaagtggagcttcatgccgcgtacgtttccgggccagaagtacctcgtctgcaataccgatgagggcgagcccggtacgttcaaggaccgcgacatcatccggttcaatccgcactcgctgatcgagggcatggccatcggcgcttacgcgatgggcatcaccgtgggctacaactatatccacggcgagatctggaacgaatacaagatcttcgaggaagccctcgaagaggcgcgcgccgcgggtttcctcggcgacaacatcctgggctcgggcttcagcttccagctgcacgcccaccatggctatggcgcgtacatctgcggcgaagaaaccgcgctgctcgaatcgctggaaggcaagaagggccagccgcgtttcaagccgcccttcccggcgagcttcggcctgtacggcaagccgaccaccatcaataacaccgagacgtttgccgcggtgccgttcctgctggccatcggcccggagaactacctgaagatgggcaagccgaacaacggcggaaccaagatcttctcgatctccggtgacgtcgagcgtccgggcaactacgagatcccgctgggcacgccgttcgccaagctgctggagctggctggtggcatgcgcggtggcaagcgcatcaaggccgtgattcccggtggttcgtccgcgccggtcgtaccgggcgagatgatgatggcgtccgacatggactacgactcgatcgccaaggccggctcgatgctgggctcgggcgccgtgatcgtgatggacgagacgcgctgcatggtgcgctcgttgctgcgcctgtcgtatttctattttgaagaatcgtgtggccagtgcacgccgtgccgtgaaggcaccggttggctgtaccgcatggtcaatcgcattgaacacggagaggggcgccaggaagacctggacctgctcaacaacgtcgcggaaaacatcatgggccgcaccatctgcgcgctcggcgatgccgcggcgatgccggtccgcggcatgctcaagcactactggaaagagttcgaatatcacgtcgaacacaagcagtgcatggttccggcctacatctaa

SEQ ID NO: 39319 - protein, 431 aa, Ralstonia eutropha JMP134
MTSLHDRHIQPLILAGLDGKNWHLEDYVKRGGYQQLKRILTEKIPPEQVIADVKASGLRGRGGAGFPTGLKWSFMPRTFPGQKYLVCNTDEGEPGTFKDRDIIRFNPHSLIEGMAIGAYAMGITVGYNYIHGEIWNEYKIFEEALEEARAAGFLGDNILGSGFSFQLHAHHGYGAYICGEETALLESLEGKKGQPRFKPPFPASFGLYGKPTTINNTETFAAVPFLLAIGPENYLKMGKPNNGGTKIFSISGDVERPGNYEIPLGTPFAKLLELAGGMRGGKRIKAVIPGGSSAPVVPGEMMMASDMDYDSIAKAGSMLGSGAVIVMDETRCMVRSLLRLSYFYFEESCGQCTPCREGTGWLYRMVNRIEHGEGRQEDLDLLNNVAENIMGRTICALGDAAAMPVRGMLKHYWKEFEYHVEHKQCMVPAYI

SEQ ID NO: 39320 - DNA, 1245 bp, Ralstonia eutropha JMP134
  CDS (1)..(1245): transl_table=11
atggaaaagctgaatcaggtcttgcttaaggaggacatccgggtcggcgcagacctgcaggcctggcttgcgcgtggtggcggagaagggctggccaaggctttgtccaatccggatgcgatccttgcggagatcgaacaggccgatctgcgcggcatgggcggcgcggggttcccgacgcaccgcaagtggaggccagttgctgctgcagccgcggtcgacaagtacatcatctgcaatggcaacgaagacgaacccggcacgttcaaggaccgcttccttctggagcacacgccgcaccaggtcatcgagggcgcgctgatcgcggcggcagccacgcgggccaatcatgtcgtgctctacgtcaatccgcatcagccactgtcgctcgaaatgacgcggcaggcggtgcagcagtggcaaacacatgcgcaactcgccgaactcgagcggctgctcggcgggccgctgacgctgcgggtcgtgccgagttccggcctgtacatcggtggcgaggaaacggccgtgatagccagcgtcgagggtacgttcccatttccgcgacgcaagccgccttatcccgccgacagcggcgtgcacggcgcgccgaccatcgtcaacaacaccgagacgctcgcccacgtgccggggatacttcgccacggcgcgcagtggtatcgcgcgctcggcgtcgctcaggcggcagggaccaagctctattcgctgtcgggcgacgtcctgcgcccggggctgtacgagctgccgatgggcaccagcctggagacactgatcttcgagtttggcggcggcatgctgcagggcaaggaattcaaggctgtcttcacgggcgggccgtccaacacgctgctgaccaagcgcgatctcgacgtagcgctggatttcgactcggtgcgcaagcggcgctcgcgcctggggaccggcgcgatgatcgtcgtatcggagggctccagcatcgtccgcaaggtggccgagtatgtgagcttctttgcgcaaggttcctgcggccagtgcccgccgtgcaaggggggcacattccagctgatgcgattgctcaaccggatcgacacgggccgcggcgtgcgcgccgacctggaggcgctggagaacctgtgccgcatccttcccggcagcggtcgctgcgggctgatcgacggcgctgtcacggtggtagacagttcgcttcaccagttccgcgatgaatatgagtcgcagctgatggcatag

SEQ ID NO: 39321 - protein, 414 aa, Ralstonia eutropha JMP134
MEKLNQVLLKEDIRVGADLQAWLARGGGEGLAKALSNPDAILAEIEQADLRGMGGAGFPTHRKWRPVAAAAAVDKYIICNGNEDEPGTFKDRFLLEHTPHQVIEGALIAAAATRANHVVLYVNPHQPLSLEMTRQAVQQWQTHAQLAELERLLGGPLTLRVVPSSGLYIGGEETAVIASVEGTFPFPRRKPPYPADSGVHGAPTIVNNTETLAHVPGILRHGAQWYRALGVAQAAGTKLYSLSGDVLRPGLYELPMGTSLETLIFEFGGGMLQGKEFKAVFTGGPSNTLLTKRDLDVALDFDSVRKRRSRLGTGAMIVVSEGSSIVRKVAEYVSFFAQGSCGQCPPCKGGTFQLMRLLNRIDTGRGVRADLEALENLCRILPGSGRCGLIDGAVTVVDSSLHQFRDEYESQLMA

SEQ ID NO: 39322 - DNA, 1743 bp, Ralstonia eutropha JMP134
  CDS (1)..(1743): transl_table=11
atgaatcaggttgtcatcccgatcgaggccaccggccttggaaggctgcgcaagcgccgccagcccaaaggcaggcaggtggacgctgccgcgctggcggaagtccgcgcggcgcttggcgacatgccgcgccgccgagacctgttgatcgaacatctccactgcatccaggaccgttacggtcagctggccatgccgcatcttgtcgcgctggcgcaggaacttggtctggcgatgaccgaggtctacgaggttgcgacgttctaccaccacttcgacgtggtgcgcgaagatgcggacggccacatcgcgccgccgccggcactgacggtgcgcgtatgcgagggcattgcctgcgagatggccggggcgcaggtgctgatcgacaagctgcccgccgtgcttggcacggacgtacgtgtggtggccgcgccgtgcatcggccggtgcgagaaagcgccggccgtgctggccggacagaagccggtcgatggcgcgacggtggaggccgtcgcgagttgcgtggcggcgggcaccgttcgcgatgccatcgccgcgcagaacagctatggcgcgtacaaggcaaacggcggctatggcctgctcaaagcgcttgtgcaggaaggctcgctcgatccggcagccgtgatttgcacgatggaagactccggcctgcgcggcctgggcggcgccggtttcccgaccggccgcaaatggcgcatcgtgtccggggagccggcaccacggctcatggccgtgaacatcgacgaaggcgagcccggcaccttcaaggaccgcgtctacctggagcgcgatccgcaccgttttctggagggcatgctgatcgctgccgctgtgacgcaggttgctgcgatctatatctacctgcgcgacgaatacgcgggctgccgcgccatcctgacgcaagcgctgcaggaactgcacgacgacccgccggtaccggacctgccgcgcatagaactgcgccgcggcgcgggcgcctatatttgcggcgaagagtccgccatgatcgaatcgatcgaaggcaagcgcggcatgccgcgcctgcggccgccctatgtggcgcaggtcgggctgttcggcaggccgacgctcgagcacaacttcgaaacgctctactgggtgcgcgacatcctggagaagggggccgagtggtttgcgtcgcagggccggcatggccgcaaggggctgcgctcgttctcggtgtcggggcgcgtgcgccagcccggcgtgcacctggcgccggccggtatcaccgtgcgcgagctgatcgatgaatactgcggcggcatgatcgacggacacacgttctacgcgtacctgcccggcggtgcgtcgggcggcatcctgcctgcgtcgatgggcaatataccgctcgacttcgacacgttgcagccgcacggctgctttatcggctcggcggccatcatcgtgctgtccgaccacgacagcgcggtggccgcggcgcgcaacctgatgcactttttcaaacacgagtcgtgcgggcaatgcacgccatgccgcgtcggcaccgccaaggcgcttgatctgatccgccagccgcaatgggacttgcccgcgctggaagacctgtccgccgtgatgcgcgacgcctcgatctgcgggctcggacaggctgcgccaaatcccgtcgattgtgtgatccgttactttccccatgaactgcaggcggcgccagaccgcccggaggcacaggcatga

SEQ ID NO: 39323 - protein, 580 aa, Ralstonia eutropha JMP134
MNQVVIPIEATGLGRLRKRRQPKGRQVDAAALAEVRAALGDMPRRRDLLIEHLHCIQDRYGQLAMPHLVALAQELGLAMTEVYEVATFYHHFDVVREDADGHIAPPPALTVRVCEGIACEMAGAQVLIDKLPAVLGTDVRVVAAPCIGRCEKAPAVLAGQKPVDGATVEAVASCVAAGTVRDAIAAQNSYGAYKANGGYGLLKALVQEGSLDPAAVICTMEDSGLRGLGGAGFPTGRKWRIVSGEPAPRLMAVNIDEGEPGTFKDRVYLERDPHRFLEGMLIAAAVTQVAAIYIYLRDEYAGCRAILTQALQELHDDPPVPDLPRIELRRGAGAYICGEESAMIESIEGKRGMPRLRPPYVAQVGLFGRPTLEHNFETLYWVRDILEKGAEWFASQGRHGRKGLRSFSVSGRVRQPGVHLAPAGITVRELIDEYCGGMIDGHTFYAYLPGGASGGILPASMGNIPLDFDTLQPHGCFIGSAAIIVLSDHDSAVAAARNLMHFFKHESCGQCTPCRVGTAKALDLIRQPQWDLPALEDLSAVMRDASICGLGQAAPNPVDCVIRYFPHELQAAPDRPEAQA

SEQ ID NO: 39324 - DNA, 1284 bp, Ehrlichia canis str. Jake
  CDS (1)..(1284): transl_table=11
atgttaaaagatagtgatagggtatttactaatctttatggtcaacagtctccgtttttaaaatctgcaaagagtaggggtgtgtggagtaatattttagaaatattaaacttaggtcctgatcatattattcaagaggtaaagaaatctggattgcgtggtagaggtggtgcaggattttctacaggattaaagtggagctttatgccaaagactagaaaggatggacaaccagcgtatttagtagttaatgcagatgaatctgaacctggtacatgtaaagatcgtgatatattaagatatgatcctcataggcttattgaagggatattaatagctggttttgcaatgaatgtaactacagcttatgtttatattcgtggtgaattttataatgaatatttagtattatctaaggctttagacgaagcatataaagctaagttgataggaaaaaatgcttgtggttctgggtatgatttggatatttttattcatagaggtgcgggagcttatatttgtggtgaagagactgctcagcttgaatcattagaaggtagaaaggggatgccaaggttaaaacctccttttccagcagcaataggattgtatggttgccctactactattaataatgttgaaactattgctactgttagtgaaattatgagaagaggcagtgattggtttgcatctcttggaaaggaaaataatactggaactaagattttttgtatatcaggacatgtgaataatccgtgtaacgtggaagaagaattgggcattccaatgaaggaacttatagaaaaatatgctggtggtgttcgtggaggatgggataacttattagcagtgatacctggtggttcatcagtaccaatgcttccaaaatctatttgtgatactgtaactatggattttgactctttaagagctgtacagtcaggattaggtacagctgggttaatagttatggataaatctacagatttgatagcagctatagagaggttatcgcatttttatatgcatgaatcttgtggacagtgtacaccttgtagagaaggtactggttggatgtggagaattatgcaaaagatggtgaagggtgacgctacatctgaaagcattgatttattattgaatattactcatcaagtagaaggacatactatatgtgctcttggtgatgctgcagcatggcctatacaaggcttaattagacattttagagatgtgattgaagatagaataaaaaattataatagtagtagattaacttga

SEQ ID NO: 39325 - protein, 427 aa, Ehrlichia canis str. Jake
MLKDSDRVFTNLYGQQSPFLKSAKSRGVWSNILEILNLGPDHIIQEVKKSGLRGRGGAGFSTGLKWSFMPKTRKDGQPAYLVVNADESEPGTCKDRDILRYDPHRLIEGILIAGFAMNVTTAYVYIRGEFYNEYLVLSKALDEAYKAKLIGKNACGSGYDLDIFIHRGAGAYICGEETAQLESLEGRKGMPRLKPPFPAAIGLYGCPTTINNVETIATVSEIMRRGSDWFASLGKENNTGTKIFCISGHVNNPCNVEEELGIPMKELIEKYAGGVRGGWDNLLAVIPGGSSVPMLPKSICDTVTMDFDSLRAVQSGLGTAGLIVMDKSTDLIAAIERLSHFYMHESCGQCTPCREGTGWMWRIMQKMVKGDATSESIDLLLNITHQVEGHTICALGDAAAWPIQGLIRHFRDVIEDRIKNYNSSRLT

SEQ ID NO: 39326 - DNA, 1254 bp, Dehalococcoides sp. CBDB1
  CDS (1)..(1254): transl_table=11
atgaaagacttgaagattattacccgccatctgaacactgccaattcagcggatattgatgtctatctggctgacggcggctaccaggccctcaagaaagctttgtctatgaccccggaggaagtgattgccgaggtcaaacgctcaaagctggtgggtcggggaggggcggcttttcccaccgggctcaagtgggagcttacccgcaaggaaaaggccaacccgaaatatattgtctgcaatgccagcgagggcgaaccgggcacttttaaagaccggttaatactcaaaaatgacccccatatggtgctggaaggttttattattgccgcttatgcggtaggtacatctcagggctttattcacgcccgcgaggtttatacccaagaaatagagcttttccaaaaggccatagaccaggcaaccgaacgcggttttctgggtcagaatatcatggggagcaatttctcgctggatatccagttttacaaaagcgccggtgcgtacatctgcggtgaggaaaccgccctgtttgagtcccttgaagggcacaggggcattcccgccactcgtccgccttacccggtgcaggtggggcttatggataaacccaccaccgtcaacaatgttgaaacattgtgcaatattcctgccattataaataacggggcagactggtttgcttcaatcggccatccggactatcccggtaccaagctcttctgcctttccggcaacgtgaaaaagccgggtgtttttgaattgccactggggactaaccttaaggacttgcttgaggccggggggggcgtagacggtaagttcaaagcggttttaccgggtggcatatcttccagtctgcttaccgaaacggatatcagtctggatttcaagactctggccaaggccggtactatgctgggttcaggtgcggttattgtgataaactctgataccagcatggtaaatgtagcgtccaatgtcgcccacttctttgatgaagagggttgcggcaagtgttctatttgccgcgaaggtacccgccgggcggctgaaatcctgagccgtttttcccgcgggcagggtaaccgcaacgaactggagtggttactggaactgcatgaggtaatgaaagacaccgcttcctgcggtttgggacaggtagccttgaatgtggctgccagtgccatacgtaacttcaagggtgaattcttggcgcaggtgcgtaaggaggaaggcgtatggttacgctaa

SEQ ID NO: 39327 - protein, 417 aa, Dehalococcoides sp. CBDB1
MKDLKIITRHLNTANSADIDVYLADGGYQALKKALSMTPEEVIAEVKRSKLVGRGGAAFPTGLKWELTRKEKANPKYIVCNASEGEPGTFKDRLILKNDPHMVLEGFIIAAYAVGTSQGFIHAREVYTQEIELFQKAIDQATERGFLGQNIMGSNFSLDIQFYKSAGAYICGEETALFESLEGHRGIPATRPPYPVQVGLMDKPTTVNNVETLCNIPAIINNGADWFASIGHPDYPGTKLFCLSGNVKKPGVFELPLGTNLKDLLEAGGGVDGKFKAVLPGGISSSLLTETDISLDFKTLAKAGTMLGSGAVIVINSDTSMVNVASNVAHFFDEEGCGKCSICREGTRRAAEILSRFSRGQGNRNELEWLLELHEVMKDTASCGLGQVALNVAASAIRNFKGEFLAQVRKEEGVWLR

SEQ ID NO: 39328 - DNA, 1872 bp, Dehalococcoides sp. CBDB1
  CDS (1)..(1872): transl_table=11
atgagtaatatagcgattaaaaagtttagcagtgcaaccgaacttgaagccaaaaggcaggaaattcttaaaagcaggaattcggggcaggcggttattgctatttgttgcggtaccggttgtcaggcttacggggctaaaaaagttgcagatgcctttgaagaagaactggctaaagccggtttgggagataaggttgaggtaaggactcccggttgtcatggtttttgtgaacgcggtccactggtagttatccgcccccagaatattttctaccaacgtctaaaaatttcagatatacctgaaatcattgaaaaaaccataaagaataacgaagtaatagaacgattgttgtatgttgatcccatgaccaaagagaaaaaggtgcatgaacatgatgtgcctttttacaaaaaacagatgcgtctggtttttggcaacaacggcaatatagaccctacctctatagaggactatctagcggtaggcggctataaatctctggccaaggctatatccagcctgaagcctgatgaaattgtggaagaaattattaaatccggtctgcgcggtcggggtggcggcggttttcccaccggctggaaatggaagtcctgcagggaagcccatgacccggtaaagtatgtaatctgtaactgtgacgaaggtgatcccggtgcatttatggatcgttcccttatggagggcaatccccatagtgttatagaaggcatgattatcggtgcttatgctattggctcgcacgaggcgtatatttacattcgtgatgaatatcctatggcggttaagcacgcccttctggccataaaacaggccgaagattatggtttgctgggtgaaaatatactgggcagcgggtttagcctgaaaatccatataaacagaggcggcggagcttttgtttgcggtgaatctaccgcccttatggcctcccttgagggtaaggttggcgaaccccgtgccaagtatgttcatacctctgaaaagggtctatacgacaagcctaccactcttaataacgtagagacttgggcgaatatacccctgattatagaaaaaggggcagactggtttaacaaaataggcactgctggcagtaagggtaccaagatattctcactggtaggcaaggtcaacaacactgggcttattgaagttcccatggggattacccttagggaaattgtgtatgatattggcggtggtatccccaaaggcaagaaattcaaagctattcagactggcggcccttccggcggctgtttgcccgaaagtatgctggatctgccggtggactttgatgagcttaccaaggccggctctatgatgggttcaggtgccatgattgttatggatgaagataactgcatggtggagattgcccgttacttcctgagcttccttgagggtgaatcctgcggcaaatgtgtaccttgccgtgagggtgtcaaacgtatgcgccagattctagaaaagataactaaaggtgagggcgaagagggagacatagagcatctggaacagctttcacaggctatacaagacgcttctttgtgcgctctgggcggcagtgctcccaatccggttatgtccaccataaaatacttccgtgaggagtatgaagcccatatccggcaaaagacctgccccgccaaggaatgcaaggctcttattacctataacattattgatgccaactgtcccggctgcggtttgtgctataaagcctgtgcaacaggggctatcatttcgcagggcaaaaagatgccggtcatacttgaccaaagcaaatgtactaaatgcggtgcgtgttttgacgcttgtaagctacacgccgtagaaatcagataa

SEQ ID NO: 39329 - protein, 623 aa, Dehalococcoides sp. CBDB1
MSNIAIKKFSSATELEAKRQEILKSRNSGQAVIAICCGTGCQAYGAKKVADAFEEELAKAGLGDKVEVRTPGCHGFCERGPLVVIRPQNIFYQRLKISDIPEIIEKTIKNNEVIERLLYVDPMTKEKKVHEHDVPFYKKQMRLVFGNNGNIDPTSIEDYLAVGGYKSLAKAISSLKPDEIVEEIIKSGLRGRGGGGFPTGWKWKSCREAHDPVKYVICNCDEGDPGAFMDRSLMEGNPHSVIEGMIIGAYAIGSHEAYIYIRDEYPMAVKHALLAIKQAEDYGLLGENILGSGFSLKIHINRGGGAFVCGESTALMASLEGKVGEPRAKYVHTSEKGLYDKPTTLNNVETWANIPLIIEKGADWFNKIGTAGSKGTKIFSLVGKVNNTGLIEVPMGITLREIVYDIGGGIPKGKKFKAIQTGGPSGGCLPESMLDLPVDFDELTKAGSMMGSGAMIVMDEDNCMVEIARYFLSFLEGESCGKCVPCREGVKRMRQILEKITKGEGEEGDIEHLEQLSQAIQDASLCALGGSAPNPVMSTIKYFREEYEAHIRQKTCPAKECKALITYNIIDANCPGCGLCYKACATGAIISQGKKMPVILDQSKCTKCGACFDACKLHAVEIR

SEQ ID NO: 39330 - DNA, 1923 bp, Dehalococcoides sp. CBDB1
  CDS (1)..(1923): transl_table=11
atgccaaggctaaatactccggctgagctggaaatactgcgtgaaaaactggcaaagaaacagtctgccagccgtccctgcataacggtatgttgcggtacgggttgccgggctttgggttcagttaaactggtagatgccttccgaagtgaacttgccaaacaagggctggagaatcaggttgatatcaaagaaaccggctgtcacggcttttgcgaaaaaggttcggtagtcgttatatatccccaaaatatctgctatttccatgtcaaatctgaagatgcagctgacgttatcgaaaaaactattaaaaccggtgaattagtggaacgcttactgtatgcagatcctgccaccggagagaaactggtctaccaccatgacatccccttttataaatatcagaagcgtattgtactgggtgataacgaacatataaacccccaaaatatagaggattatatccagcgtggtggttattccgctctggttaaaacccttttccatatgactcctgaatctgtgctggaagaggtagacaaagccaatttgcggggacgcggcggcggaggtttcccggccggtaaaaaatggcgcactacccatgatgccgcagacccggtcaagtatgtactggttaactgtgacgaaggtgatccgggtgctttcatggaccgttccataatggagggcaatcctcattgtgtactggaaggtctggctatcggggcttttgccattggtgctaaagaaggttatatatatgttagggctgaataccctttggcggtagaaaatctgtatgctgctttaaggcaggctgaagaatatggcttgctgggcaaaaatatactcggctcaggttttgattttgtagtcaaagtccatgagggcgccggtgcttttgtatccggtgaatcatccgctttaatgactgctatcgaaggccgggttggtgaacctcgccccaaatatatccgcaccgctatcaaaggcctctgggataaaccttcaaacctgaataacgtggaaacttgggctaacgtaccccacataataaataaaggggcagactggttcaggtctatcggcacagagggcagcaaaggcaccaagatattcgcactggttggcaaggtcaataataccggactggtggaagtgcctatgggcactactcttcgggacattatatttaaaataggcggcggtttgcgtgacggcaaaaaaataaaagctgtccagacaggcgggccttcaggcggatgtataccggaaaatctgctggattcgcctgttgattatgatgcactaagcaagctgggttctatggtaggctcaggcgggctgataataatggacgaagaaacctgcatggtagacatcgcccgttattttataaactttttatcagacgaatcttgcggcaagtgcttaccctgccgtgagggtctgcgccagctggtagatatacttacccgtattaccgaaggcaaaggcactatggttgacatggatacactggaagacctgagcggcgtaatgagtgaagcctgtttgtgtgccctgggacaacaagcccccaaccccttgctcactactcttaaatatttccgccacgaatatattgaccatattaaaaataagcattgcgaagccggtgtttgtaaagccttgcttactttttatattgaccctgacaaatgcaaagcctgtatgatttgtgccagaaactgccccactgacgccatcaagggcggcaaggggcttattcatacgattgagcagggaaaatgcatcaaatgcggtgcttgtgtagatacctgccctgccaaatttgatgccgttattaaaatatccggcaaacctattccaaaaaatgtaccggctgaacctattcctttaaaccggaaggcagaataa

SEQ ID NO: 39331 - protein, 640 aa, Dehalococcoides sp. CBDB1
MPRLNTPAELEILREKLAKKQSASRPCITVCCGTGCRALGSVKLVDAFRSELAKQGLENQVDIKETGCHGFCEKGSVVVIYPQNICYFHVKSEDAADVIEKTIKTGELVERLLYADPATGEKLVYHHDIPFYKYQKRIVLGDNEHINPQNIEDYIQRGGYSALVKTLFHMTPESVLEEVDKANLRGRGGGGFPAGKKWRTTHDAADPVKYVLVNCDEGDPGAFMDRSIMEGNPHCVLEGLAIGAFAIGAKEGYIYVRAEYPLAVENLYAALRQAEEYGLLGKNILGSGFDFVVKVHEGAGAFVSGESSALMTAIEGRVGEPRPKYIRTAIKGLWDKPSNLNNVETWANVPHIINKGADWFRSIGTEGSKGTKIFALVGKVNNTGLVEVPMGTTLRDIIFKIGGGLRDGKKIKAVQTGGPSGGCIPENLLDSPVDYDALSKLGSMVGSGGLIIMDEETCMVDIARYFINFLSDESCGKCLPCREGLRQLVDILTRITEGKGTMVDMDTLEDLSGVMSEACLCALGQQAPNPLLTTLKYFRHEYIDHIKNKHCEAGVCKALLTFYIDPDKCKACMICARNCPTDAIKGGKGLIHTIEQGKCIKCGACVDTCPAKFDAVIKISGKPIPKNVPAEPIPLNRKAE

SEQ ID NO: 39332 - DNA, 1281 bp, Thiobacillus denitrificans ATCC 25259
  CDS (1)..(1281): transl_table=11
atgagtctgctcacgcccacgccgcaggtctgcagctggacgcagacgctcgacgatccggcatcgctcgccacctacgtcgccaacggcgggtaccaggctctgcgccgcgtcgtcaccgaagcggtcccgggtgacgacatcatcgccgagatcaagaccagcgcgttgcgcgggcggggcggggcggggtttccgaccggcctcaagtggagcttcatgccgcgtgcgtttccgggcgacaagtacatcgtctgcaatagcgacgaaggcgagccgggcaccttcaaggaccgcgatatcctgcgctacaacccgcaccagctgatcgaaggcatggcgatcgccgggtacgtgctcggcgcgcgcgtgggttacaactatatccacggagagattttcgaggtctaccagatcttcgaacgcgcgctcgaggaagcacggcaagcgggctacctcggcgccaacctgttcggaaccgatttctgcttcgacctgcacgcccaccacggctacggtgcgtacatctgcggcgaagaaacggccctgctcgagtcgatcgaaggcaagaaggggcagccgcgcttcaagccgccgtttcccgcaagcttcggtctctacggcaagccgaccacgatcaacaataccgaaacgctggcgagcgtcccctggatcgtgcagcacggcggccaggccttcctcgagctcggcaagccgaacaacggcggcgccaagctgttttcggtatccggccatgtcaaccggccgggcaattacgaggtgccgctcggcacgccgttcaccgaattgctggaaatggccggcggcgtgcgcgacggccgcagcctgaaggccgtcatccccggcggatcttcggcgccggtgttgccggggcacatcatgatggagacgacgatggatttcgattccatcgccaaggccggctcgatgctcggctccggggccgtcatcgtgatggacgaaaccgtatgcatggtgcgcgcgctcgagcggctctcgtacttctattacgaggagtcgtgcggccagtgcacgccctgccgcgaggggaccggatggatgtatcgcgtgatccatcgcatcgagaacgggcagggacgccccgaagacatggatctcctcaacagtgtcgcaggccagatcggcggacacacgatctgcgccctcggtgacgcggcggccatgccggtgcaaagcttcctcaaacatttcggccacgagttcgagcatcacatcgaacacaagcgctgcatggtctga

SEQ ID NO: 39333 - protein, 426 aa, Thiobacillus denitrificans ATCC 25259
MSLLTPTPQVCSWTQTLDDPASLATYVANGGYQALRRVVTEAVPGDDIIAEIKTSALRGRGGAGFPTGLKWSFMPRAFPGDKYIVCNSDEGEPGTFKDRDILRYNPHQLIEGMAIAGYVLGARVGYNYIHGEIFEVYQIFERALEEARQAGYLGANLFGTDFCFDLHAHHGYGAYICGEETALLESIEGKKGQPRFKPPFPASFGLYGKPTTINNTETLASVPWIVQHGGQAFLELGKPNNGGAKLFSVSGHVNRPGNYEVPLGTPFTELLEMAGGVRDGRSLKAVIPGGSSAPVLPGHIMMETTMDFDSIAKAGSMLGSGAVIVMDETVCMVRALERLSYFYYEESCGQCTPCREGTGWMYRVIHRIENGQGRPEDMDLLNSVAGQIGGHTICALGDAAAMPVQSFLKHFGHEFEHHIEHKRCMV

SEQ ID NO: 39334 - DNA, 1326 bp, Anaeromyxobacter dehalogenans 2CP-C
  CDS (1)..(1326): transl_table=11
gtgagcgagacgctcatcctctcgaagcgctggggcaagccggactccgcctcgctcgcctcgtaccgggccgacggcggctacggcgcgctcgacaaggccatgggcgccgacccggccgccatcgtggacgaggtgaagaagtcgaacctgcgcggccgcggcggcgcgggcttcgcgaccggcctcaagtggacgttcctgccgaaggacgtccgcccgcgttacctgacggtgaacgcggacgagtccgagccgggcacgttcaaggaccgctacatcatcgagcacgatccgcacatgctgatcgaggggatcgcgctcacctgctacgcgctcgacatccacctcgcctacgtctacatccgcggcgagttcgcgaagcaggcgcgcatcctcgagcaggccatccaggaggcgcgcgacgccggcatcctcggcccgcgcctgctcggcaagaaggacttcccgctcgacatccacgtgcaccgcggcgccggcgcgtacatctgcggcgaggagtccgcgctgctcgagtcgctcgagggcaagaagggctacccgcgcctgaagccgccgttcccggcggtggtgggcctgtggggcaagccgaccatcatcaacaacgtcgagaccatcgcgaacgtcccctggatcgtcgcgaacggcggggcggcgttcgccgcgctcggcgtgggcaagtcgggcggcacgcgcctgttcggcgtctcgggccacgtgaaccggccgggcgtctacgagaagccggtccactacaacctgaagaagctgatcatggaggacgcgggcgggatcgtcggcggccgcaagctgaaggcggtcatccccggcggctcctccgcgccggtgctcgccgcgcacgagatcgacatctcgctcgagttcgacgcggtgaaggcggccgggtcgatgtccggctccggcggcgtgatcgtgttcgacgagtcggtgtgcctggtccgggcgctggcccgcatcgcgaagttctacgccgaggagagctgcggccagtgcaccccctgccgcgagggcacctcgtggatggagggcatcctcgagaagatcgagcacgggcacgcgaccgccgccgacgtggagaagctcgagcaggtggccggcaacatcgccgggaacaccatctgcgcgctgggcgacgcggcggccatgccggtgcagtcgttcctgaagaagttcaagccggagttcctgcggcacgtcgaggcgcaccgctgccccatgggcgagagcggctggggcctcgaccagtcctcgcgtgatgccctcgtcggggcggtgaggtactag

SEQ ID NO: 39335 - protein, 441 aa, Anaeromyxobacter dehalogenans 2CP-C
MSETLILSKRWGKPDSASLASYRADGGYGALDKAMGADPAAIVDEVKKSNLRGRGGAGFATGLKWTFLPKDVRPRYLTVNADESEPGTFKDRYIIEHDPHMLIEGIALTCYALDIHLAYVYIRGEFAKQARILEQAIQEARDAGILGPRLLGKKDFPLDIHVHRGAGAYICGEESALLESLEGKKGYPRLKPPFPAVVGLWGKPTIINNVETIANVPWIVANGGAAFAALGVGKSGGTRLFGVSGHVNRPGVYEKPVHYNLKKLIMEDAGGIVGGRKLKAVIPGGSSAPVLAAHEIDISLEFDAVKAAGSMSGSGGVIVFDESVCLVRALARIAKFYAEESCGQCTPCREGTSWMEGILEKIEHGHATAADVEKLEQVAGNIAGNTICALGDAAAMPVQSFLKKFKPEFLRHVEAHRCPMGESGWGLDQSSRDALVGAVRY

SEQ ID NO: 39336 - DNA, 1719 bp, Syntrophobacter fumaroxidans MPOB
  CDS (1)..(1719): transl_table=11
atgaaatcactggacgaactggcaatcatcaaggaaagcgctcaagaaaccctgcagattcggtacggcaagccgggtgtcctccacaaagcgcatatcatggtgtgtggcggccagggttgcatatcttcaaaatgcgcagaggtggtggacgccatccgggaggcgctcaagaagcacaacttttcggaccatgtgaaagtcgttttgacgggctgcatgggcccctgcgacatgggaccggtggccgtcgtctttccggacgccgtgttctatcgaaggttgaaacccaaggacgccgaggcgatcgtcctcgaacacatcatcggcgggcaaccggtgaccaggctgctttacagggttccgggcgaaaaggacccggttccctcgatgtatgacatcgagctgttcaagaaacaggaaaggattgttcttcggaacacactctacatcgatcccctttccatcgaggaatacatcggacgggacggctacgcggcgctggcgaaagcgctcacccgaatgaggccgggggaggtcgttgaagaaatcaagagatcaggacttcgcgggcgtggaggagccgggttttcgacgggcatgaagtggtctttctcggccgctgccgcggggactcccaagtatgtggtgtgcaacggcgacgagggggacccgggtgcgttcatggacaggtccgtgcttgagggcgatccgcacagcgttatcgaaggcatggccatctgcgggcgcgccatcggcgcggagcaaggctacgtgtatgtgcgcgcggagtaccctcttgcgattgaaaggcttgagcacgccatcaggaaagcccgtgaattcgggctgctggggaaagacatattcgggacgggtttcaatttcgatatcgagatccggatcggtgccggggctttcgtctgtggcgaggaaaccgcccttttggcttccgtcgaaggacgcagaggcgagccgcggccgcggccgccgttcccggcgatcgagggagtgttcggcaaaccgacggtcataaacaatgtcgaaacctgggccaacatccccgcgatcattttcaagggggcggactggttcgcctcaatcggaaccccgaagagcaaggggaccaaggtttttgccctggccggcaaaatcaccaacaccggcatagtggaggtgccgatgggcaccacgctccgggaaatggtcttcgacatcggagggggaataccgaagaagaaggaattcaaagcggttcagacaggggggccttccggcggctgcattcccgcccggcacttggatacccccatcgactacgattcactcggggcgcttggcgccatcatgggctccggcggcatgatcgtcatggaccaggacacctgcatggtggacattgcaaaattcttcctggaattctgcgtggatgagtcctgcgggaagtgttcgccgtgcagaatcgggaccaagaggatgcatgagatcctggagcgcatcagcaccgggcacggcagggagggtgacattgagctgctggtggaactggccaccacgatcaagacgactgccttgtgtggtctcggccagacggcccccaaccctgtgctcagcacgatccgatacttccgggatgagtacgagcaacacatcagggatcacgtatgtgtggccaaggtttgtgacttcgccaacggggatccggacgcttcagaatga

SEQ ID NO: 39337 - protein, 572 aa, Syntrophobacter fumaroxidans MPOB
MKSLDELAIIKESAQETLQIRYGKPGVLHKAHIMVCGGQGCISSKCAEVVDAIREALKKHNFSDHVKVVLTGCMGPCDMGPVAVVFPDAVFYRRLKPKDAEAIVLEHIIGGQPVTRLLYRVPGEKDPVPSMYDIELFKKQERIVLRNTLYIDPLSIEEYIGRDGYAALAKALTRMRPGEVVEEIKRSGLRGRGGAGFSTGMKWSFSAAAAGTPKYVVCNGDEGDPGAFMDRSVLEGDPHSVIEGMAICGRAIGAEQGYVYVRAEYPLAIERLEHAIRKAREFGLLGKDIFGTGFNFDIEIRIGAGAFVCGEETALLASVEGRRGEPRPRPPFPAIEGVFGKPTVINNVETWANIPAIIFKGADWFASIGTPKSKGTKVFALAGKITNTGIVEVPMGTTLREMVFDIGGGIPKKKEFKAVQTGGPSGGCIPARHLDTPIDYDSLGALGAIMGSGGMIVMDQDTCMVDIAKFFLEFCVDESCGKCSPCRIGTKRMHEILERISTGHGREGDIELLVELATTIKTTALCGLGQTAPNPVLSTIRYFRDEYEQHIRDHVCVAKVCDFANGDPDASE

SEQ ID NO: 39338 - DNA, 1563 bp, Alcaligenes eutrophus
  CDS (1)..(1563): transl_table=11
atgatcacgatcaccaccatcttcgtgccgcgcgattccaccgcgctggcactgggcgccgacgacgtcgcccgcgccatcgcgcgtgaagccgcggcgcgcaacgagcacgtgcgcattgtgcgcaatggctcgcgcggcatgttctggctggagccgctggtcgaggtgcagaccggagccggccgcgtggcctatggcccggtcagcgccgcagacgtgccggggctgttcgacgccggcttgctgcaaggcggcgagcacgcgctgtcgcagggcgtcaccgaagagatccccttcctgaagcagcaggagcgcctgaccttcgcccgcgtcggcatcaccgatccgctgtcgctggacgactaccgcgcgcatgagggctttgccggcctggagcgcgcgctggcgatgcagcccgccgagatcgtgcaggaggtcaccgactccggcctgcgcggccgcggcggcgcggcgttcccgaccggcatcaagtggaagaccgtgctgggcgcgcagtccgcggtcaagtacatcgtctgcaatgccgacgagggcgactcgggcacgttctccgatcgcatggtgatggaagacgacccgttcatgctgatcgaaggcatgaccattgccgcgcttgcggtgggtgcggagcagggctacatctactgccgttccgaatacccgcacgcgattgccgtgctggaaagcgcgattggtatcgccaacgccgccggctggctcggcgacgacatccgcggcagcggcaagcgcttccacctcgaagtgcgcaagggcgccggcgcctatgtctgcggcgaggaaaccgcgctgctggaaagcctggaaggacggcgcggcgtggtgcgcgccaagccgccgctgccggcgctgcaggggctgttcggcaagcccacggtgatcaacaacgtgatctcgctggccaccgtggccggtgaatcctggcgcgcggcggagtactaccgcgactacggcatgggccgttcgcgcggcacgttgccgtttcagcttgccggcaacatcaagcagggcggactggtggaaaaggcgttcggcgtgacgctgcgcgagctgctggtcgactacggcggcggcacgcgcagcggccgcgccatccgcgcggtgcaggtgggcgggccgctgggcgcctacctgcccgagtcgcgcttcgacgtgccgctggactatgaagcctatgccgcgttcggcggcgtggtcggccacggcggcatcgtggtgttcgatgaaaccgtcgacatggcaaaagcaggcccctacgcgatggagttctgcgcgatcgaatcgtgcggcaagtgcaccccgtgccggatcggctcgacccgcggcgtcgaagtgatggaccgcatcatcgccggcgagcagccggtcaagcacgtcgccctggtgcgcgacctgtgcgacaccatgctcaacggctcgctgtgcgcgatgggcggcatgaccccgtacccggtgctgtccgcgctgaatgaattccccgaggacttcggcctcgcctccaacccagccaaggccgcctga

SEQ ID NO: 39339 - protein, 520 aa, Alcaligenes eutrophus
MITITTIFVPRDSTALALGADDVARAIAREAAARNEHVRIVRNGSRGMFWLEPLVEVQTGAGRVAYGPVSAADVPGLFDAGLLQGGEHALSQGVTEEIPFLKQQERLTFARVGITDPLSLDDYRAHEGFAGLERALAMQPAEIVQEVTDSGLRGRGGAAFPTGIKWKTVLGAQSAVKYIVCNADEGDSGTFSDRMVMEDDPFMLIEGMTIAALAVGAEQGYIYCRSEYPHAIAVLESAIGIANAAGWLGDDIRGSGKRFHLEVRKGAGAYVCGEETALLESLEGRRGVVRAKPPLPALQGLFGKPTVINNVISLATVAGESWRAAEYYRDYGMGRSRGTLPFQLAGNIKQGGLVEKAFGVTLRELLVDYGGGTRSGRAIRAVQVGGPLGAYLPESRFDVPLDYEAYAAFGGVVGHGGIVVFDETVDMAKAGPYAMEFCAIESCGKCTPCRIGSTRGVEVMDRIIAGEQPVKHVALVRDLCDTMLNGSLCAMGGMTPYPVLSALNEFPEDFGLASNPAKAA

SEQ ID NO: 39340 - DNA, 1815 bp, Rhodococcus opacus
  CDS (1)..(1815): transl_table=11
atgagcggagacatcaaggcaatactcgagcggaacggttctgagagaacgcgcctgatcgacatactttgggatgttcagcatctgtacggtcatattccggacgaagtactgccacaactggcggacgagctgaatctctccccacttgatattttggaaactgcctccttctaccatttctttcatcgcaagccgtcgggaaagtatcggatctacctgagcgatacggtgattgccaagatgaacggctatcaagccgtgcacgattctctcgagcgggagactggggcccgtttcggtggaaccgataagacggggatgtttggcctgttcgaaacgccatgtatcggtctcagtgatcaggaaccggcgatgttgatcgacaacgtggtgttcacccgtctaaggcctggaacgatcgtcgacatcatcacacaattgcggcaggggcgatccccggaagatattgcgaacccggctggactaccaagtgatgatgtcgcctatgtcgatggtgtagtggaatccaatgttcggacgaagggcccggtctttttccgaggtctcacggactacgggcggttgctcgaactctgcctcgcactcagacctgaacagatcatcgatagaatcatcgaatccaagctccgcgggcgcggcggcgccggcttttcaaccggattgaagtggcagctttgccggaccgccgtgagcgacgacaagtatatcatctgtaatgccgatgaaggcgaacccggcaccttcaaggaccgcgtgctgctgacccgctctcccaagaaggtattcatggggatgattattgccgcccgtgccatcggcagcagaaacggaatactttatctgcgttgggaatacatttacctgaaggattatctggaaagacagcttcaggaactcagggatgaagggctgctcggtgcccgtattggtggccagtcgggatttgattttgatatccgtatccagatgggggccggcgcctatatatgcggtgacgaatcggcactcatcgaatcatgcgagggcaaacgaggcacgccgcgtgtgaaaccccccttccctgtgcaagagggatacctgggcaaacccacatgcgtcaacaacgtcgagacctttgccgccgcggcccgcatcatggaggaagggccaaactggttcagggcgctgggaaccccggaatccaccggcactcggctgttgagcgttgctggcgactgtagtaggccgggaatctacgaggtcgaatggggcgtcacactcaacgaggtactgacgacggtcggtgctcgggatgcccgggcggtccagatcagcggcccctcgggtcaatgcgtgtcggtggcggaggacggtgaacgcaggatggcgtacgaagatatttcctgcaatggcgcgttcaccatcttcaacacagaacgcgacctgttggaaatcgtcaaggacttcatgcagttcttcgtggatgagtcgtgcggaatttgcgtgccatgtcgagtgggcaatatcgacctgcacaagaaagtggaactggtgatcgccggtaaagcgtgccagaaggacctcgacgatgttgtcagctggggagcgctggtgaaaaagaccagtcgttgcggtcttggcgccacttcacccaatcccatcctgacgaccctggataagttccccgagatctatacgaaaaggctgcgcaaacagaagaaggaggccttgctgctgtcgttcgatctcgatgctgccttgggcgggtacgagaaggcgctcgagggtctggcgaaggaggagatcaaatga

SEQ ID NO: 39341 - protein, 604 aa, Rhodococcus opacus
MSGDIKAILERNGSERTRLIDILWDVQHLYGHIPDEVLPQLADELNLSPLDILETASFYHFFHRKPSGKYRIYLSDTVIAKMNGYQAVHDSLERETGARFGGTDKTGMFGLFETPCIGLSDQEPAMLIDNVVFTRLRPGTIVDIITQLRQGRSPEDIANPAGLPSDDVAYVDGVVESNVRTKGPVFFRGLTDYGRLLELCLALRPEQIIDRIIESKLRGRGGAGFSTGLKWQLCRTAVSDDKYIICNADEGEPGTFKDRVLLTRSPKKVFMGMIIAARAIGSRNGILYLRWEYIYLKDYLERQLQELRDEGLLGARIGGQSGFDFDIRIQMGAGAYICGDESALIESCEGKRGTPRVKPPFPVQEGYLGKPTCVNNVETFAAAARIMEEGPNWFRALGTPESTGTRLLSVAGDCSRPGIYEVEWGVTLNEVLTTVGARDARAVQISGPSGQCVSVAEDGERRMAYEDISCNGAFTIFNTERDLLEIVKDFMQFFVDESCGICVPCRVGNIDLHKKVELVIAGKACQKDLDDVVSWGALVKKTSRCGLGATSPNPILTTLDKFPEIYTKRLRKQKKEALLLSFDLDAALGGYEKALEGLAKEEIK

SEQ ID NO: 39342 - DNA, 1440 bp, Dictyostelium discoideum
  CDS (1)..(1440)
atgatgaatttaggtaatcgtgttaaatcggttattaaattaacttcaacaacaggtttaacaggcaaaaattttcaagcaaccaaagttgcaacattttcaacagcacaagttcaacaagcacaagaaaatgttagatcatatggtggtttgaaggataaagatcgtattttcacaaatttatatggtgaacatgacgtttatttaaagggtgctattgcacgtggagattggtataaaactaaaaatattattgataaaggtaaagattggatattaaaagaaatgatggcctctggtttaagaggtagaggtggtgctggtttcccatcaggtttgaaatggagtttcatgccagaaacaacttcaaaagatagaccacaataccttgtcatcaatgctgatgagggtgaacctggaacatgcaaagatagagaaattatgagacacgatcctcataaattaattgaaggttgtttacttgctggttttgcaatgagagcatgtgcagcatacatttatattcgtggtgaatttcattatgaagcaaaagtattagaacaagcaatcgatgaagcatataaagcaggtttaattggtgaaaatgcatgcggtacaggctataaatttgatgtatatgttcacagaggtgctggtgcatacatttgtggtgaagagacagctctcattggaagtattgaaggtaaacaaggtaaaccacgtttaaagccacctttcccagctatggctggtctttatggttgtccaacaactgtaacaaatgttgaaacagtagctgttgctccaactattttaagacgtggcggtgcttggtttgcaagttttggtagaccaaagaatgcaggtactaaattattttgtatttccggtcatgtcaataatccatgtactgttgaagaagagatgagtattccattaagagaattaattgataaacattgtggtggtgtcattggaggttgggataacttaaaaggtgttattccaggtggttcatcagtaccagtccttccaaaaaatatttgtgataatgttttaatggatttcgatgatcttagacaacacagatctggtttaggtacagctgcagttatagttatgaacaaagaaactgatatgattgcagcaattgcaagattatctaaattctataaacacgaatcatgtggtcaatgtaccccatgtcgtgaaggtgttggatggctctatgatatcaccgatcgtttagtcactggtaatgccaaacccgatgaaattgattcacttgaagaaattagtagacaaattgaaggtcacaccatttgtgctttaggtgatgctgctgcttggccagtacaaggtttaattagacattttagaccagaaattgaagatagaattaaacaattccaactcaataagaaacaatcaccattttaa

SEQ ID NO: 39343 - protein, 479 aa, Dictyostelium discoideum
MMNLGNRVKSVIKLTSTTGLTGKNFQATKVATFSTAQVQQAQENVRSYGGLKDKDRIFTNLYGEHDVYLKGAIARGDWYKTKNIIDKGKDWILKEMMASGLRGRGGAGFPSGLKWSFMPETTSKDRPQYLVINADEGEPGTCKDREIMRHDPHKLIEGCLLAGFAMRACAAYIYIRGEFHYEAKVLEQAIDEAYKAGLIGENACGTGYKFDVYVHRGAGAYICGEETALIGSIEGKQGKPRLKPPFPAMAGLYGCPTTVTNVETVAVAPTILRRGGAWFASFGRPKNAGTKLFCISGHVNNPCTVEEEMSIPLRELIDKHCGGVIGGWDNLKGVIPGGSSVPVLPKNICDNVLMDFDDLRQHRSGLGTAAVIVMNKETDMIAAIARLSKFYKHESCGQCTPCREGVGWLYDITDRLVTGNAKPDEIDSLEEISRQIEGHTICALGDAAAWPVQGLIRHFRPEIEDRIKQFQLNKKQSPF

SEQ ID NO: 39344 - DNA, 1464 bp, Solanum tuberosum
  CDS (1)..(1464)
atggcacctataaagggccttctttctctgcaacggactgcattagctcaacgttctagtgaaagatggggcctatatggtaggttatttagcactcaggctgcatcaactgctagcactccccaacctacacccccacccccacctcccgagaggactcactttggtggccttaaagatgaggatcgtattttcacaaatctctacggattgcatgacccttacctcaaaggtgccatgaagcgaggagattggtacagaacaaaagatcttgtcatcaagggttctgactggatcgtgaatgaaatgaagaaatctggtcttcgaggacgtggtggtgctggttttccatctggtctcaaatggtccttcatgccaaagacaacagatggccgtccttcatatcttgtcgtcaatgctgatgaaagtgaacctggaacctgtaaagacagggaaatcatgcggcatgacccacacaagttgttggaaggctgtctgattgcaggagtggggatgagggctaaagctgcttatatttatatcaggggagagtatgtgaatgaaaggaagagccttcagaaggctagacaagaagcctatgaagctggattgttggggaaaaatgcttgtggatctggttatgattttgacgtatatattcattttggtgctggtgcctatatttgtggtgaagagacagctcttctggagagccttgagggcaaacaaggcaaaccaagattgaagcctccatttccagctaatgcaggactatatggatgtccaacaactgtcacaaatgttgaaacagtagctgtttcaccaaccatcttaaggcgtgggccggagtggtttgctagttttggccggaagaataatgccgggacaaagctgttttgcatctcaggccatgttaacaagccctgcacagttgaagaggaaatgagtatttcattgaaggagctgatagagaggcactgtggtggtgttcgtggaggatgggacaatttgcttgctgttataccaggaggttcatctgttccattgcttcccaagaacatatgtgaggatgtacttatggattttgatgcactcaaagctgtgcagtcagggttggggactgctgctgtaattgtcatggacaagtcaactgatgttgtagatgcaattgcaaggctctcgtacttctataagcacgagagctgtggtcaatgtacaccatgtagggaaggcacagggtggctttggatgatcatggaaagaatgaaggttggcaatgcaaagttggaagagattgacatgctccaagaggtgacaaaacagattgaagggcataccatttgtgccttgggtgacgctgctgcttggccagtgcagggtcttattaggcactttagaccagagctagaaaggaggatcagggagcacgcagagagagagctacaacaggcggctgctgcttga

SEQ ID NO: 39345 - protein, 487 aa, Solanum tuberosum
MAPIKGLLSLQRTALAQRSSERWGLYGRLFSTQAASTASTPQPTPPPPPPERTHFGGLKDEDRIFTNLYGLHDPYLKGAMKRGDWYRTKDLVIKGSDWIVNEMKKSGLRGRGGAGFPSGLKWSFMPKTTDGRPSYLVVNADESEPGTCKDREIMRHDPHKLLEGCLIAGVGMRAKAAYIYIRGEYVNERKSLQKARQEAYEAGLLGKNACGSGYDFDVYIHFGAGAYICGEETALLESLEGKQGKPRLKPPFPANAGLYGCPTTVTNVETVAVSPTILRRGPEWFASFGRKNNAGTKLFCISGHVNKPCTVEEEMSISLKELIERHCGGVRGGWDNLLAVIPGGSSVPLLPKNICEDVLMDFDALKAVQSGLGTAAVIVMDKSTDVVDAIARLSYFYKHESCGQCTPCREGTGWLWMIMERMKVGNAKLEEIDMLQEVTKQIEGHTICALGDAAAWPVQGLIRHFRPELERRIREHAERELQQAAAA

SEQ ID NO: 39346 - DNA, 1473 bp, Desulfovibrio fructosovorans
  CDS (1)..(1473): transl_table=11
atggcagcgacgaccacggaaaaaaagcagcttcggatcgccacccgcaattgcggcttcatcgatccggaaagtatcgacgattacatcgccctgcggggctatgagggcctggccaaggtcctgaccatgaccccggccgaggtggtggacctggtcaagcgctcgggcctgcgcggccgcggcggcgcgggcttccccaccggcatcaagtggggcatcgcgctcggcaacaaggccgaccagaagtacatggtgtgcaacgccgacgaaggcgacccggagttcatggaccgcgccgtgctcgagggcgacccccactcggtggtggaggccatggccatcggcggctacgccatcggggccacccggggcacggtctacatccgggccgagtatcccctggccatcaagcgcctcaaaaaggccatcgacgacgcccgcgagtacggcctgctcggcgaaaacatcttcggctcgggcttcgatttcgacatcgaactcaagtacggcgccggcgcgttcgtctgcggcgaggaaacggccctgatccgctccatggaaggcaagcgcggcgagcccgtgaccaagccgccgttcccggcccagtccggctattgggaaaagcccaccatcgtcaacaacgtggagaccttcgccaatatccccgccatcatcatcaacggcgcggattggttctccggcatcggcaccgccacctccaagggcaccaaggtgttcgccctggccggcaagatccagaacgtgggcctgatcgaagtccccatgggcatcagcctgcgcgaggtcatcttcgacatcggcggcggctgccccgacggcaaggccttcaaggccgtccagaccggcggcccctccggcggcgcgctggccaacaaggacctcgatgtggccatcgactacgagtccctggccgcctgcaagtccatcatgggttccggcggcatggtcgtcatggacgaggacgactgcatggtctccgtggccaagttcttcctggacttcaccatggacgagacctgcggcaagtgcaccccctgccgcatcggctccaagcgcctctacgagatcctggaccggatcaccaagggcaagggcacccgggccgacctcgatcggctcaagtccctgtccgagatcatcaaggacacggcgctgtgcggcctcgggcagaccatgcccaaccccatcctgtccaccatggataccttcgccaatgaatacgaggcccatgtcgacgacaagaagtgtccggcccacgtctgcacggccctgctgacctacaccatcgatcccgccaagtgcacgggctgcggcctgtgcaccagggtctgcccggtggagtgcatttccggcacgaagaagcagccccacaccatcgataccacacggtgcatcaagtgcggcgcctgctacgacaagtgcaagttcgactccatcatcaagcaataa

SEQ ID NO: 39347 - protein, 490 aa, Desulfovibrio fructosovorans
MAATTTEKKQLRIATRNCGFIDPESIDDYIALRGYEGLAKVLTMTPAEVVDLVKRSGLRGRGGAGFPTGIKWGIALGNKADQKYMVCNADEGDPEFMDRAVLEGDPHSVVEAMAIGGYAIGATRGTVYIRAEYPLAIKRLKKAIDDAREYGLLGENIFGSGFDFDIELKYGAGAFVCGEETALIRSMEGKRGEPVTKPPFPAQSGYWEKPTIVNNVETFANIPAIIINGADWFSGIGTATSKGTKVFALAGKIQNVGLIEVPMGISLREVIFDIGGGCPDGKAFKAVQTGGPSGGALANKDLDVAIDYESLAACKSIMGSGGMVVMDEDDCMVSVAKFFLDFTMDETCGKCTPCRIGSKRLYEILDRITKGKGTRADLDRLKSLSEIIKDTALCGLGQTMPNPILSTMDTFANEYEAHVDDKKCPAHVCTALLTYTIDPAKCTGCGLCTRVCPVECISGTKKQPHTIDTTRCIKCGACYDKCKFDSIIKQ

SEQ ID NO: 39348 - DNA, 1332 bp, Rhodothermus marinus
  CDS (1)..(1332): transl_table=11
atggcgacgaacggagcccagagtaaagccggagactggcggaattacaagcgggtgctgctcccgcccattcgggatctgcaccggctggaagtctacgaagcgcacgggggctaccagaccctgcgcgaagtgctgacctccgaccggtgggatcccaagtcggtcatcgaagaggtcaaaaagagcaagctacgcggacggggcggcgccggctttcctacggggctgaagtggagcttcatgccgccggtggacgatcggccccgcttcctgtgctgcaacggcgacgaaagcgagccgggcacgttcaaggaccgccagctcatggagttcaatccccaccagattttcgaggggattctgatcgcctgctacgccatgtcggtgcgcacgtgctacctgtacgtgcgcggcgaatttgcccggtggatcgagcacatggagcgggagctggaaaagctctacgccaaaggttacgtggggaagaacattatgggcacggacttctcggccgacatcgtgatccacaagggagccggggcctacatctgcggcgaggagtccagcctgatggagtcggtcgagggcaagcgggcctacccgcgcatcaagccgccgtttccggcccagcggggcctctggggctaccccaccacgatcaacaacgtggagacgctggcgaacgtcccgctcattctgcgcaacggcggcgagtggtttgcgtccatcggcgcgcccaaccatcccggtccggtgctctacggtatttcgggccacgtcaaccgccccggcgtctacgaataccccaccggcatgctgatcaccgacctgatctacgaggtggccggtggcatccgcgggggtaaaaagctcaaggccgtcatcccgggcggaagctccacgccgcccctgcgggccgacatgatcgacggcgtgaccatggacgccgagtcgctgcgcgaggccggctcgatgatgggcacggctggcctgctcgtgctcgacgaagacaccgacatggtctcgtggctgcggcgcgtggctcacttttacgcgcacgaaagctgcggccagtgcacgccctgccgcgagggcaccggctggctcgaaaacatcctcacgcgcatcgaagaaggcgaaggccgtctgcgcgacctggacctgctgctggacctgtgcgatcagatggaaggccgcacggtctgcgccctggccgacgctgccgcctggcccgtacgctacaccatccttcgcttccgcgaggagttcgaggccaggtgcaagcccagccttgtcccgacgggcatcgatctgacgccaaccggttga

SEQ ID NO: 39349 - protein, 443 aa, Rhodothermus marinus
MATNGAQSKAGDWRNYKRVLLPPIRDLHRLEVYEAHGGYQTLREVLTSDRWDPKSVIEEVKKSKLRGRGGAGFPTGLKWSFMPPVDDRPRFLCCNGDESEPGTFKDRQLMEFNPHQIFEGILIACYAMSVRTCYLYVRGEFARWIEHMERELEKLYAKGYVGKNIMGTDFSADIVIHKGAGAYICGEESSLMESVEGKRAYPRIKPPFPAQRGLWGYPTTINNVETLANVPLILRNGGEWFASIGAPNHPGPVLYGISGHVNRPGVYEYPTGMLITDLIYEVAGGIRGGKKLKAVIPGGSSTPPLRADMIDGVTMDAESLREAGSMMGTAGLLVLDEDTDMVSWLRRVAHFYAHESCGQCTPCREGTGWLENILTRIEEGEGRLRDLDLLLDLCDQMEGRTVCALADAAAWPVRYTILRFREEFEARCKPSLVPTGIDLTPTG

SEQ ID NO: 39350 - DNA, 1395 bp, Homo sapiens
  CDS (1)..(1395)
atgctggcaacacggcggctgctcggctggtcgcttcccgcgcgggtatctgtgcgtttcagcggcgacacgacagcacccaagaaaacctcatttggctcgctgaaggatgaagaccggattttcaccaacctgtacggccgccatgactggaggctgaaaggttccctgagtcgaggtgactggtacaagacaaaggagatcctgctgaaggggcccgactggatcctgggcgagatcaagacatcgggtttgaggggccgtggaggcgctggcttccccactggcctcaagtggagcttcatgaataagccctcagatggcaggcccaagtatctggtggtgaacgcagacgagggggagccgggcacctgcaaggaccgggagatcttacgccatgatcctcacaagctgctggaaggctgcctggtggggggccgggccatgggcgcccgcgctgcctatatctacatccgaggggaattctacaatgaggcctccaatctgcaggtggccatccgagaggcctatgaggcaggtccgattggcaagaatgcttgtggctctggctatgattttgacgtgtttgtggtgcgcggggctggggcctacatctgtggagaggagacagcgctcatcgagtccattgagggcaagcagggcaagccccgcctgaagccccccttccccgcagacgtgggagtgtttggctgccccacaactgtggccaacgtggagacagtggcagtgtcccccacaatctgccgccgtggaggtacctggtttgctggctttggcagagaacgcaactcaggcaccaaactattcaacatctctggccatgtcaaccacccttgcactgtggaggaggagatgtctgtgcccttgaaagaactgattgagaagcatgctgggggtgtcacgggcggctgggacaacctccttgctgtgatccctggcggctcgtctaccccactgatccccaagtctgtgtgtgagacggtgctgatggacttcgatgcgctggtgcaggcacagacaggcctgggcacagctgcggtgatcgtcatggaccgctcgacggacatcgtgaaagccatcgcccgcctcattgagttctataagcacgagagctgtggccagtgtaccccatgccgtgagggtgtggactggatgaacaaggtgatggcacgtttcgtgaggggggatgcccggccggccgagatcgactccctgtgggagatcagcaagcagatagaaggccatacgatttgtgctctgggtgacggggccgcctggcctgtgcagggtctgatccgccactttcggccggagctcgaggagcggatgcagcggtttgcccagcagcatcaggcccggcaggctgcctcttag

SEQ ID NO: 39351 - protein, 464 aa, Homo sapiens
MLATRRLLGWSLPARVSVRFSGDTTAPKKTSFGSLKDEDRIFTNLYGRHDWRLKGSLSRGDWYKTKEILLKGPDWILGEIKTSGLRGRGGAGFPTGLKWSFMNKPSDGRPKYLVVNADEGEPGTCKDREILRHDPHKLLEGCLVGGRAMGARAAYIYIRGEFYNEASNLQVAIREAYEAGPIGKNACGSGYDFDVFVVRGAGAYICGEETALIESIEGKQGKPRLKPPFPADVGVFGCPTTVANVETVAVSPTICRRGGTWFAGFGRERNSGTKLFNISGHVNHPCTVEEEMSVPLKELIEKHAGGVTGGWDNLLAVIPGGSSTPLIPKSVCETVLMDFDALVQAQTGLGTAAVIVMDRSTDIVKAIARLIEFYKHESCGQCTPCREGVDWMNKVMARFVRGDARPAEIDSLWEISKQIEGHTICALGDGAAWPVQGLIRHFRPELEERMQRFAQQHQARQAAS

SEQ ID NO: 39352 - DNA, 1425 bp, Nyctotherus ovalis
  CDS (1)..(1425): transl_table=10
atgatagtacgcattggtaagagaacaggaaggctagttcgcttatttgcttcagtagatgcaacaaaggctgaggagaagccaaggagttatggcaatatatcagatcaagacaggatcttcagtaatttgtataaagatcaagatccttttattaatggtgccttgaaaagaggagattggtatagaactaaagatatcctttcttgtcctcaggattttgtcatagatgaaataaagaaatctggtcttcgtggacggggaggagcagggtttccatcaggattgaagtattcgtttatgccaaagaagagtgatggacgtccttcttacttagtagtaaatgctgacgaatcagaaccagcaacctgcaaagatagagaaatcatgagacatgatcctcataagttagttgaaggagcacttattgttggttatgcaatgagagctaaagctgcctacgtttatattcgcggtgaattctggcatgaagctcaacaattggaaagagcggtggcggaggcatatgaaaaaggatttatagggaagaatgcttgtggatcaggatatgattttgatatttacgtgcatagaggagcaggagcttatgtttgtggtgaggaaacttcaatgttaagcagtattgaaggagttgtagggaaacctcgaatgaaacctccatatccagctggcacaggactttatggttgtcctacaactgtaactaatgtggaaacagtctctactgttcctaccataatgcgtcgaggtggaagttggttcgcaagctttggaagaaagaacaatcacggaaccaaactttattccctaagtgggcatataaacaatccttgtacagtggaagatgagatgagtatatctgtgcgcgaattaattgaaagacatggaggaggagtaagaggtggatgggataaccttctaggagtaattcctggtggctcatcaactcctataatctctaaagaactatgtgaaactgcactaatggactttgattcgttgattgaagctggttcagcatttgggacagctggagttatagtgttggataaatctacagatgtaattgatgcgatattgagattatcaaagttttatctgcatgagagttgtggccagtgtacaccatgtcgtgaaggaactggatggcttgtcgatatgcttgagcgaatgaagatagggaaggcagattatggagagatagaccaattatacgagcttacaaaacaaatagaaggacacacaatttgtgcgttaggagaagcagcagcatggccagtacaaggacttatcaaacattacagacctgttatggaagatcgtatggacaagtatcatagtcaacatcctgtagtagcagaaggtccattttcatctcatcatcctgttgcaggatctcattaa

SEQ ID NO: 39353 - protein, 474 aa, Nyctotherus ovalis
MIVRIGKRTGRLVRLFASVDATKAEEKPRSYGNISDQDRIFSNLYKDQDPFINGALKRGDWYRTKDILSCPQDFVIDEIKKSGLRGRGGAGFPSGLKYSFMPKKSDGRPSYLVVNADESEPATCKDREIMRHDPHKLVEGALIVGYAMRAKAAYVYIRGEFWHEAQQLERAVAEAYEKGFIGKNACGSGYDFDIYVHRGAGAYVCGEETSMLSSIEGVVGKPRMKPPYPAGTGLYGCPTTVTNVETVSTVPTIMRRGGSWFASFGRKNNHGTKLYSLSGHINNPCTVEDEMSISVRELIERHGGGVRGGWDNLLGVIPGGSSTPIISKELCETALMDFDSLIEAGSAFGTAGVIVLDKSTDVIDAILRLSKFYLHESCGQCTPCREGTGWLVDMLERMKIGKADYGEIDQLYELTKQIEGHTICALGEAAAWPVQGLIKHYRPVMEDRMDKYHSQHPVVAEGPFSSHHPVAGSH

SEQ ID NO: 39354 - DNA, 1875 bp, Clostridium saccharoperbutylacetonicum
  CDS (1)..(1875): transl_table=11
atgcttcttaatagaaatgatttgattaatacaagagaactttataaaaaaagtttaataaaagaaaaaaagaaaattttaatatgtgctggtactggttgtgtagcaggtggatcactagatatttatgaagaatttataaagttaatgaaagaaaaagaaataaattgtgaagtgagccttgagaaagaaccacatgatgaaactgttggaattaaaaaaagtggatgtcatgggttttgtgagatgggacctcttgtaagaattgagccttttggatatttatacataaaggtaaagccagaagattgtgctgaaatccttgaaaaaactataattaatgatgaatgtgtcgaaagacttgcatatactaaaaatggtgagatatataaaaaacaagaagaaataccattttataaaaaacaaactagacttgcacttgagcactgtggacatattgatgcaacttcaattgaagaataccttgctatagatgggtattcagcctttgaaaaggtgctgtttgatatgaaagcagatgaagttattaaggaaatagaagaatcaaatttaagaggtcgtggaggcggtggttttccagcaggtcgtaaatggtctcaagtaagtcgccaaaaagaagaaattagatatattgtttgtaatggtgatgaaggagatccaggtgcatttatggatagaagcataatggaaggagatcctcatagaatgcttgaaggcatgatgattgctggtgtagcttgtggtgcacaaaaaggatatatatatgttcgtgcagagtaccctttagcagtaagcagactttcaaatgcaattgagcaggcaagaaagtatggaatattaggagaaaatattttaggaactggatttagctttgatcttcaaataaatagaggtgccggagcatttgtatgtggtgaaggaagtgcacttactgcttctattgaaggaaaaagaggaatgccaagagtaaaaccaccaagaactgttgaacaaggtctttttggaaagcctacagtacttaataatgttgaaacttttgctaatgtacctatagttattaataaaggtgctgaatggtatagatctattggacctgaaaatagtccgggaacaaaagcttttgccttaacagggaatattgaaaatactggtcttatagaggttccaatgggaacaaccttgagggaagtaatttttgatattggcggtggaataagagatggtaaacggtttaaagccgtgcaaattggtggaccatcaggaggatgtctaacagctgaacaccttgatctaccgttagattttgattctcttaaaaaagcaggtgcaatgataggatctggtggtcttgtagttatggatgaagatacatgtatggttgaagttgcacgtttctttatgaatttcacaaagaatgaatcttgtggaaaatgtgttccttgtcgtgaaggtactaaacgtatgcttgtaatacttgaaggaattgttgctggtaaaggtaaattagaagatatggatatgttacttgaacttgcagacacaatttcagctacagcactttgtggactaggaaaaacagcgccatcacctgttgttagcacaattaagaatttcaaagatgaatatataaaacatattgtcgataaaaaatgtccatcaaagacttgtcaaaagcttaagacaatattaattgacccttctatgtgtaagggatgttcaaaatgttcaaaagtttgtcctgtaggggcaatttcaggaaaaattaaagaaccattcgtaatagatcaaaacaagtgtataaaatgtggagcttgtttggaaacttgcccatttaaagctataaaggaggattaa

SEQ ID NO: 39355 - protein, 624 aa, Clostridium saccharoperbutylacetonicum
MLLNRNDLINTRELYKKSLIKEKKKILICAGTGCVAGGSLDIYEEFIKLMKEKEINCEVSLEKEPHDETVGIKKSGCHGFCEMGPLVRIEPFGYLYIKVKPEDCAEILEKTIINDECVERLAYTKNGEIYKKQEEIPFYKKQTRLALEHCGHIDATSIEEYLAIDGYSAFEKVLFDMKADEVIKEIEESNLRGRGGGGFPAGRKWSQVSRQKEEIRYIVCNGDEGDPGAFMDRSIMEGDPHRMLEGMMIAGVACGAQKGYIYVRAEYPLAVSRLSNAIEQARKYGILGENILGTGFSFDLQINRGAGAFVCGEGSALTASIEGKRGMPRVKPPRTVEQGLFGKPTVLNNVETFANVPIVINKGAEWYRSIGPENSPGTKAFALTGNIENTGLIEVPMGTTLREVIFDIGGGIRDGKRFKAVQIGGPSGGCLTAEHLDLPLDFDSLKKAGAMIGSGGLVVMDEDTCMVEVARFFMNFTKNESCGKCVPCREGTKRMLVILEGIVAGKGKLEDMDMLLELADTISATALCGLGKTAPSPVVSTIKNFKDEYIKHIVDKKCPSKTCQKLKTILIDPSMCKGCSKCSKVCPVGAISGKIKEPFVIDQNKCIKCGACLETCPFKAIKED

SEQ ID NO: 39356 - DNA, 1290 bp, Trichomonas vaginalis
  CDS (1)..(1290)
atgcttgcagcatacggccatcgcttccagacaaaattccttgacccaaaggatcgcattttccccaatctctttggtgacgagggcgctgatttggcttctgcacaaaagcgtggagactggaatcaaacagaagaacttatcaagaagggcaaagagttcattctcaacgaagtcaagaagtccgaaatccgtggacgtggtggtgctggtttctcaacaggccagaaatggagtttcgttccaaagccaagtggcatcccacattatctctgcatcaacgccgatgaaggtgaaccaggcacatgcaaggatcgccagattctcacaaacgagccacacaagctcgtagaaggcgctcttctcgcttcatacacaatccacgctcacacagcctacgtttacgttcgtggtgaattccgccatgaaattgcctgcttacagaaggctattgatgaggcctacgctgctggactcatcggcaagaacaacaaattcggatgggatttcgatatgtacatccactccggtgctggcgcttacgtttgcggtgaagagacagccctcctcaactccattgaaggtaaggcaggccgcccacgctttaaaccaccgtacccagctgcaaagggtcttttccagaagccaaccatcatcaacaacgtcgagaccatctcctccgtcccaacaatctgcaagcgcggtggtgactggttctcatccatcggtatcaagggctcaaagggcacaaagatctacgctatctctggccacgtcaaccacccatgcgttgttgaagaagctatgggtatcccaatcaaggacctcatcaacaagtacgctggtggtgtccgcggcggctgggataacctcctctgcttgatcccaggtggtctctcctgcccaatcctcacaaaggagcagtgcgagacagcagtcatgggttacaacgagctctccgctatgggctctgctctcggcacaggtgctatcatcgttatggataagtctacaaacctttacgaggctttcagacgcgtttctcacttctacatgcatgaatcttgcggtcagtgcggtccatgccgtgaaggaacagctaaactctccgacatcatggacaaattcgctgagggaaaggccacaaagcacgatttacttatgcttaagaaggtcgcttaccagacatctaactgcatctgcgccctcgctggtgcttcttctgacccaatcaagggactcctcaagcagttcagaccagagctcgaaaaggcttgcgtcgctgagtaa

SEQ ID NO: 39357 - protein, 429 aa, Trichomonas vaginalis
MLAAYGHRFQTKFLDPKDRIFPNLFGDEGADLASAQKRGDWNQTEELIKKGKEFILNEVKKSEIRGRGGAGFSTGQKWSFVPKPSGIPHYLCINADEGEPGTCKDRQILTNEPHKLVEGALLASYTIHAHTAYVYVRGEFRHEIACLQKAIDEAYAAGLIGKNNKFGWDFDMYIHSGAGAYVCGEETALLNSIEGKAGRPRFKPPYPAAKGLFQKPTIINNVETISSVPTICKRGGDWFSSIGIKGSKGTKIYAISGHVNHPCVVEEAMGIPIKDLINKYAGGVRGGWDNLLCLIPGGLSCPILTKEQCETAVMGYNELSAMGSALGTGAIIVMDKSTNLYEAFRRVSHFYMHESCGQCGPCREGTAKLSDIMDKFAEGKATKHDLLMLKKVAYQTSNCICALAGASSDPIKGLLKQFRPELEKACVAE

SEQ ID NO: 39358 - DNA, 2109 bp, Drosophila melanogaster
  CDS (1)..(2109)
atgatatcgtttctgttaaaacgccgagcttgtgatgcttacaagatttcattaggactaactcgtgcatatagagccttaacagaagtaaaaagccttcaaaatgccttacgacctggtaataaaactggaaatatcaagctggtaaacatataccgaacttctagcatacaaaatgtgaagaagaaccaactaagtgacgctgaaagcgttattccactcttattgcggccagccaaacctgtgctgattatgagagaaggatctcaaaccgattgtaacgacgatttgctgtcctctgagcaaagagccaaaaaaagggaaagcatacaaaaatccgaagtagattgcccaaaatttccagctgagaaacttccgcccacaacgaaatttcctattaatgaaaatgccaagaaggttttagatccagccgaccaaagagaactcgaggccaatttgttaaaaaggcttaaagatatggctaaaagaaagaaatctcgactagataagaaagttgacgagctgagggataattttataggctggaattatgctgctctacaaggaagaactattgtgactgtagatgccaaggaatcaactccaccgaaaggatctgggccggccaccccggcaggctctcctccacctaaaaatgtttctgcaccgccgacgggcggttctccgcctgccaaaagcggtgctccaccacccccaaaggggccaccgcccggaactccaccaccgcagacgaaaactacttttggaccacttgctgatgctgatcgaatctttaccaatttatacggacggcacgattggcgattgaaggcagcaatgaagcgcggtgactggtacaagacgaaggagatcatagccaagggtgacaagtggatagtcaacgagattaagacatctggactgcgaggacgcggtggcgccggatttcccagtggacttaagtggtcatttatgcataaaccgcctgatggaagaccaaagtttctggtggtcaatgcggatgaaggagagcccggtacgtgcaaggatcgtgagataatgcgtcatgatccacacaaactggtagagggatgtctcattgctggacgggctatgggtgccaacactggttttatttacattcgcggagagttttacaacgaagcttgcaatcttcagtatgccattattgaggcctataaggctggctacctgggaaagaatgcctgcggttctgggttcgatttcgatctttatgtgcaacgtggagcaggagcctatatttgcggtgaggaaacctctctgattgaatccctggagggcaaggcgggtaagccaaggaacaagcctccctttccggctgatatcggcgtctttggctgtccgtctacggtgaccaatgtggaaacggtggccgtgtctcccactatttgccggcgtggtggcaattggtttgccagctttggacgtacccgaaactctggcaccaagctgttcaatatctctggtcatgtttgcaacccttgtaccgtcgaggaggagatgtccatgccaaccagagagcttatcgaacgccatgctggcggagtgatcgggggctgggacaatctactggccatcattccgggtggctcctccactccctgcattaccaaggagcacgcttcgagtgcgattcacgactacgatgggctgatggcagtgcgttcgtccatgggaacgggtgccttaattgttatgaataaggatacggacattatcaaggccattgcccgattatcggctttctataagcacgagagctgcggccagtgcactccttgccgcgagggtctccactgggtgaacatgatcatgcatagatttgtgacaggacaggcgcaaattgcagagatcgatatgctgttcgaactgacgaagcagatcgagggccataccatttgtgccctggccgatggtgctgcttggccgccccaaggactcatccggaacttccgaccggtcatcgaggagaggatcaagaagcgggcggccgaggaccaagctaaagctgaagcactcgaagccgaacgtttcccttgtcaaacggtgactccttgtccagaataa

SEQ ID NO: 39359 - protein, 702 aa, Drosophila melanogaster
MISFLLKRRACDAYKISLGLTRAYRALTEVKSLQNALRPGNKTGNIKLVNIYRTSSIQNVKKNQLSDAESVIPLLLRPAKPVLIMREGSQTDCNDDLLSSEQRAKKRESIQKSEVDCPKFPAEKLPPTTKFPINENAKKVLDPADQRELEANLLKRLKDMAKRKKSRLDKKVDELRDNFIGWNYAALQGRTIVTVDAKESTPPKGSGPATPAGSPPPKNVSAPPTGGSPPAKSGAPPPPKGPPPGTPPPQTKTTFGPLADADRIFTNLYGRHDWRLKAAMKRGDWYKTKEIIAKGDKWIVNEIKTSGLRGRGGAGFPSGLKWSFMHKPPDGRPKFLVVNADEGEPGTCKDREIMRHDPHKLVEGCLIAGRAMGANTGFIYIRGEFYNEACNLQYAIIEAYKAGYLGKNACGSGFDFDLYVQRGAGAYICGEETSLIESLEGKAGKPRNKPPFPADIGVFGCPSTVTNVETVAVSPTICRRGGNWFASFGRTRNSGTKLFNISGHVCNPCTVEEEMSMPTRELIERHAGGVIGGWDNLLAIIPGGSSTPCITKEHASSAIHDYDGLMAVRSSMGTGALIVMNKDTDIIKAIARLSAFYKHESCGQCTPCREGLHWVNMIMHRFVTGQAQIAEIDMLFELTKQIEGHTICALADGAAWPPQGLIRNFRPVIEERIKKRAAEDQAKAEALEAERFPCQTVTPCPE

SEQ ID NO: 39360 - DNA, 1389 bp, Nilaparvata lugens
  CDS (1)..(1389)
atggcgagtgccctttcattgtgtaggattggacatcttcaaaaagttaatttatgtcctgttctaagtaccgttcaagttagaagcaattcagatgctgcaccaactaaaacgaaatacgggccattgaacgatagcgaccgtatcttcacgaacttgtacggtcgccatgactggcggttgaagggagctctcaagcggggagactggtacaagaccaaggaaatcgttcttaagggggccgacttcattatcaatgaagtgaaagcttcaggtctgaggggccgaggaggagctggattcccctccggtctcaaatggagtttcatgaacaaaccatccgatggcaggccgaagtacctgtgcgtgaacgccgacgagggtgagccgggcacatgcaaggaccgggagatcatgcgccatgacccccacaagttggtcgagggctgccttatcgctggtcgagccatgggtgctcaggccgcctacatctacattcgcggcgagttctacaacgaggcgtccaacatgcaggttgccatcagtgaggcgtaccaggcgggactgattggcaagaacgcatgtggcacaggcttcgactttgacgtgtacatgcacaggggcgcaggcgcctacatctgcggcgaggagacggcgctcatcgagtcgatcgagggcaaacagggcaagccccgcctcaagccccccttccccgccgatgtcggtctcttcggctgccccaccactgtcaccaatgtggagacggtcgccgttgcaccgacaatctgtcgtcggggcggcgcgtggttcgcgtcgttcggtcgtccgcgcaacacgggcaccaaactgttcaacatctcgggccatgtgaaccggccgtgcaccgtcgaggaggagatgtcggtgccgctgcgggagctgatcgaacggcatgcgggaggagtgaggggcggatgggataatctgctcgccgtcataccgggcggatcgtcgacaccgcttataccgaaacgtgtgtgcgacgacgtgctgatggactttgacgcgttgatcgcggccgagacgagtttcggcacggcggccgtcatcgttatggacaagagcaccgacatcattaaggcgatcgcacgactgatcgtgttctacaagcacgagtcgtgcggccagtgcacgccgtgtcgcgagggcatcgcctggatgcacaagatgatgcagcgatttgtgaagggtgacgcgaggccggctgaaattgacatgctgtgggagatcagcaagagattgagggacacactatttgcgcgctgggtgacggggctgcggtggccggtacagggcttgattcgtcacttcagaccagaaatcgagaacagaatgaaggcagttttctga

SEQ ID NO: 39361 - protein, 462 aa, Nilaparvata lugens
MASALSLCRIGHLQKVNLCPVLSTVQVRSNSDAAPTKTKYGPLNDSDRIFTNLYGRHDWRLKGALKRGDWYKTKEIVLKGADFIINEVKASGLRGRGGAGFPSGLKWSFMNKPSDGRPKYLCVNADEGEPGTCKDREIMRHDPHKLVEGCLIAGRAMGAQAAYIYIRGEFYNEASNMQVAISEAYQAGLIGKNACGTGFDFDVYMHRGAGAYICGEETALIESIEGKQGKPRLKPPFPADVGLFGCPTTVTNVETVAVAPTICRRGGAWFASFGRPRNTGTKLFNISGHVNRPCTVEEEMSVPLRELIERHAGGVRGGWDNLLAVIPGGSSTPLIPKRVCDDVLMDFDALIAAETSFGTAAVIVMDKSTDIIKAIARLIVFYKHESCGQCTPCREGIAWMHKMMQRFVKGDARPAEIDMLWEISKRLRDTLFARWVTGLRWPVQGLIRHFRPEIENRMKAVF

SEQ ID NO: 39362 - DNA, 1296 bp, uncultured bacterium 463
  CDS (1)..(1296)
atgagcctgactacacctctcacccgcaatgtgcgcgatgaccgccgtcctactgacatggctgcctacgaagccaacggcggctaccagggtctgcgggcggcacttgctcagtcgccagaagattgcctgcaagttcttaaagactctaatctccgtggccgcggtggtgcaggctttccgacgggaatgaagtggagcttcgttcctatgggcgacaagtgcagcccggggcataaatacctgatctgcaacgccgatgaaatggaaccgggcacctttaaagatcgactattattggaatgcgacccccatcagcttatcgaaggcatgatcgtttccgcttatacattgcaggccgatgtcgcctatatttttattcgcgctgagtatcatcaagccacgcgcctgctgcaggaagcaattgccgcctgtcatgagaaaggttatctgggacaagatatcctcgggacgggctatcaacttgagatgcacgtccactcgagcgcagggcgctacatctgcggcgaggaaaccgcattgatcagctcattggaaggtaagcgagccaacccccgagcgaagcctcctttcccccaggtgagcggtctgtgggggcgaccaactatcgtcaacaacgtggaaacattgtgtaacgtccatcacatcattgaacgcggtgccgagtggttcaagtcgctaggactgaccgaagatgccggcaccaaattgtatggcgttagcggccgggtcaagaacccagggtgctgggagctgccaatgggtacaccggtacgccagatcatcgaggagtacgccggcggcatggaagacggctacaacctcaagggttttcttcccggaggtggctctaccgatttcttgactgaggagcatctggacctggcgatggactatgacaccattggcaaggccggttcacgcatgggcactggcaccatgattattctggacgacaaaacctgtccagtcggttttgtcaaaaacctggtggcgttttttgcacgtgagtcctgtggcttctgcaccccctgccgggatggactgccctggtcggcccaggtattagacgatatccagaatggccgcggccaggaagaagacatggacaccctggcgcgtcaggtgaagtttattggcgctatcggcaacacccattgcgcgctcgcgcccggggcgatggaacctctgcaaagcgcaatgaaatactttccggaagcctttgaaaatcacctgagcggcaactgtccccactgtaacgggggaactcactaa

SEQ ID NO: 39363 - protein, 431 aa, uncultured bacterium 463
MSLTTPLTRNVRDDRRPTDMAAYEANGGYQGLRAALAQSPEDCLQVLKDSNLRGRGGAGFPTGMKWSFVPMGDKCSPGHKYLICNADEMEPGTFKDRLLLECDPHQLIEGMIVSAYTLQADVAYIFIRAEYHQATRLLQEAIAACHEKGYLGQDILGTGYQLEMHVHSSAGRYICGEETALISSLEGKRANPRAKPPFPQVSGLWGRPTIVNNVETLCNVHHIIERGAEWFKSLGLTEDAGTKLYGVSGRVKNPGCWELPMGTPVRQIIEEYAGGMEDGYNLKGFLPGGGSTDFLTEEHLDLAMDYDTIGKAGSRMGTGTMIILDDKTCPVGFVKNLVAFFARESCGFCTPCRDGLPWSAQVLDDIQNGRGQEEDMDTLARQVKFIGAIGNTHCALAPGAMEPLQSAMKYFPEAFENHLSGNCPHCNGGTH

SEQ ID NO: 39364 - DNA, 1455 bp, Chlamydomonas reinhardtii
  CDS (1)..(1455)
atgcagcgcaccggtggtctggttagccagcttgcgggagcgcagctgactggcgcgctgcaggagctgaagactggggtgcttcgggccttcagcactgccgctcccgcggctggtgctccccctccgcctcctccgcctcctgctaagaccagctttggtggtctgaaggatgaggaccgcattttccagaacatttacggtcgccatgacctcagcatcaagggcgccatgtcccgtggcgactggtacatgaccaaggagatcatcgggaagggccgggactggatcatcgaccaaatgaagaagtcgggactgcgcggccgcggcggcgccggcttcccctccggcctcaagtggagcttcatgcccaaggcctctgacagccgccccatctacctggtggtgaacggcgacgagtcggagccgggcacgtgcaaagaccgcgagatcatgcgccacgagccgcacaagctggtggagggctgcctcatggcgggagtggccatgggcgcgcgcgcaggctacatctacatccgtggcgagttcgtgcaagagcgccgcgctgtggagcgcgccattagcgaggcgtacgccaagggcttcctgggcaagaacgcgtgcggcagcggtgtggactttgacctgatggtgcactacggcgccggcgcctacatctgcggcgaggagacggcgctgatcgagtcgctggagggcaagcagggcaagccccgcctcaagcccccgttccccgcgggtgtgggcctgtacggctgccccaccaccgtgaccaatgtggagaccgttgcggtgagccccaccattctgcgccgcggccccgagtggttcagctcttttggccgcaagaacaacgccggcaccaagctgttctgcatcagcggccacgtgaaccggccggtgacggtggaggaggagatgtccattccgctcaaggagctcatcgagcgccacgcgggcggtgtgcgcggcggctgggacaacctgctggccatcatccccggaggcagctccgtgccgctgctgcccaagaagatctgcgacggcgtgctgatggacttcgacgcgctcaaggaggcgcagtcgggcctgggcaccgccgccgtcatcgtcatggacaagtccaccgacgtgatcgacgccatcgcgcgcctgtcctacttctacaagcacgagtcgtgcggccagtgcacgccctgccgcgagggcaccggctggctgtacgacatcatgacgcgcatgaagaagggtgacgcccgcctggaggagatcgacatgctgtgggagatcaccaagcagatcgagggacacaccatctgcgcgctgggcgacgccgcggcgtggcccgtgcagggcctgatccgccacttccgtggcgagatggaggagcgcatcaagagcgccggcggcaagaagaagcttgccgcgaccgcgtaa

SEQ ID NO: 39365 - protein, 484 aa, Chlamydomonas reinhardtii
MQRTGGLVSQLAGAQLTGALQELKTGVLRAFSTAAPAAGAPPPPPPPPAKTSFGGLKDEDRIFQNIYGRHDLSIKGAMSRGDWYMTKEIIGKGRDWIIDQMKKSGLRGRGGAGFPSGLKWSFMPKASDSRPIYLVVNGDESEPGTCKDREIMRHEPHKLVEGCLMAGVAMGARAGYIYIRGEFVQERRAVERAISEAYAKGFLGKNACGSGVDFDLMVHYGAGAYICGEETALIESLEGKQGKPRLKPPFPAGVGLYGCPTTVTNVETVAVSPTILRRGPEWFSSFGRKNNAGTKLFCISGHVNRPVTVEEEMSIPLKELIERHAGGVRGGWDNLLAIIPGGSSVPLLPKKICDGVLMDFDALKEAQSGLGTAAVIVMDKSTDVIDAIARLSYFYKHESCGQCTPCREGTGWLYDIMTRMKKGDARLEEIDMLWEITKQIEGHTICALGDAAAWPVQGLIRHFRGEMEERIKSAGGKKKLAATA

SEQ ID NO: 39366 - DNA, 1611 bp, Thiocapsa roseopersicina
  CDS (1)..(1611): transl_table=11
atgaacctcgacgatctgaccgacctggccgagaaataccgggaagccgaagccggcgtggatcgcgaggtgcgtgtctgcctcgcggccagctgtcagtcatccggtgccgtccccgtcttcgatgcactggtcgccgagctcggcgacaccaaaccctcctgcaaggtcaaaggggtcgggtgtatgggcctatgttcggccgggccgctggtcgctgtcgccgatcgcgaggcggacctccaaggctccgtgctctatcgcgacgtgaccgcggacgacgccgaggacatcgtcgccagcatcgatggcccgcctgtggagcgcttacgttgtccgaccaatcagcccttcttcgcgcgtcagcagaagatcgtgctcgaaaatgccggcatcatcgatcccgacagtttcaagggctatgtcgccgtcggcggatactccgcgctgatccgggccttaagcgagatgacccccgccgatgtcttgcgcgaagtgaccgacagcggtctgcgcggacgcggcggcggcggctatccgaccggcttgaaatggtcgaccgtcgcgaagatgccggcgacccagaaatacgtcatctgcaacgcggacgagggcgacccgggcgccttcatggaccgggcgatcctggagtcagacccgcatcgtgtccttgagggcatggcgatcgccgcctacgcgatcggggccaacaaggcctatgtctatgtccgcgccgagtacccgctcgcggtcgagcgacttcagacggccattcgcaaagccaagcgctcggggcttttgggcaacaagatcggcgatacccaattcagcctggaggtagagatccgcctcggcgccggggccttcgtctgcggcgaagaaaccgcactcatggcctccatcgaaggactacgtggacaaccgcgcccgcgtccgccgtaccccgccgaggcgggactctggggctaccccacgctcatcaacaacgtcgagaccttcgccaacatcgccccgatcgtgcgcgaggggggcgattggttcgcctcgatcggcaccgaacgatcgaaagggaccaaggtgtttgcgctggccggaaccatcacgaacaccggcctcatcgaggtcccgatgggcacctctctgcgcgacatcatcgaggtcatcggcgggggcatcccaggcggcaaggctttcaaggccgtgcagaccggcggcccctcgggcggttgtatcccggcgcagcacctcgacatcgccgtggactacgacagcctcaaaacgctcggcaccatgatgggctcaggcggcatgatcgtcatggacgagacctccagcatggtcgacgtcgcacgctatttcatggaattctgcatgaccgaatcgtgcggaaagtgcatcccctgccgcaccgggacgcaacagatgcacagcatcctcgaccggctggccaagtcgcaggccacacgggccgagctcacactgctggaagagctctgcgaagtggtgcaggcaaccagcctctgcggactgggccagacggcgcccaatcccgtgctgagtaccatgcgctatttccgcgacgaatacgaagcgaagctcggcgaggtttag

SEQ ID NO: 39367 - protein, 536 aa, Thiocapsa roseopersicina
MNLDDLTDLAEKYREAEAGVDREVRVCLAASCQSSGAVPVFDALVAELGDTKPSCKVKGVGCMGLCSAGPLVAVADREADLQGSVLYRDVTADDAEDIVASIDGPPVERLRCPTNQPFFARQQKIVLENAGIIDPDSFKGYVAVGGYSALIRALSEMTPADVLREVTDSGLRGRGGGGYPTGLKWSTVAKMPATQKYVICNADEGDPGAFMDRAILESDPHRVLEGMAIAAYAIGANKAYVYVRAEYPLAVERLQTAIRKAKRSGLLGNKIGDTQFSLEVEIRLGAGAFVCGEETALMASIEGLRGQPRPRPPYPAEAGLWGYPTLINNVETFANIAPIVREGGDWFASIGTERSKGTKVFALAGTITNTGLIEVPMGTSLRDIIEVIGGGIPGGKAFKAVQTGGPSGGCIPAQHLDIAVDYDSLKTLGTMMGSGGMIVMDETSSMVDVARYFMEFCMTESCGKCIPCRTGTQQMHSILDRLAKSQATRAELTLLEELCEVVQATSLCGLGQTAPNPVLSTMRYFRDEYEAKLGEV

SEQ ID NO: 39368 - DNA, 1854 bp, Leptospirillum ferrooxidans
  CDS (1)..(1854)
atgttaaccgaggtgcttgaagattcttctttgcagctggaagagcgttcatccctgccggtcattcatatcggaatggctacttgtggtttggcatcaggggcgaaagctttgcacgagttaatcctgaaagaagttgcttccagaaatctggctgttaaggttgttccaaccggttgtatcggaatgtgtcacaacgaacctcttgtagatataaccatgccaggtaaaaacagggtttcttacaggaatgtcaaacccaataccctgacacaaatccttgatgcgcacttcaataaaaatgaatttgcaaaaaaatatgctgtttgccagattcctgttcctggtgcagagccttttgccggactgccattgatgcaggagattccattttttaagggacaggtaaagattgtttccaaaccgttgggaatgatcgacccattgagcattgatgactatattgcaatggacgggtatgcagcattaagaaaagttctttcatcgatgactcccgaacaggttattgatgaggtaacaaaatcagggcttcgcggaagagggggcggtggttttcccactggtgtgaagtggaatttgacgcgtaaggctcccggtcctgaaaaatacgttgtttgtaatgctgatgagggtgatcccggtgcgtttatggacagatccgttctggaaggtgatccccattctgtcatagaagggatgatccttgccgcttttgcagtcgggcatgcccgtaagggatatatctactgccgtgccgagtatcccctggctatcaaacgattacagaaagcgatcaatgatgccagggagagaaattttctgggagacaacattttaggatctgacctgtcttttgacctcgagatcaaggagggagcaggtgcctatgtatgcggtgaggaaacggctcttcttgcctcccttatgggggaacgcggaatgccatggcccaaacccccttttcctgctcaaaaaggagtctggggaaagccgtcagttattaataacgttgaaacactggcaaacatcggccatatcattctgggcggtggtgaatggtatgcatcctatggaagtgaaaaaaccaaagggacaaaaacctttgcgctcacaggctcaattaaaaatactggcctgatcgaggttcccgcaggaacccccttgagagagattgttttttccattggcggcggaatggttgagaagaagataccgttcaaggcagcccagctgggtgggccgtctggaggatgtattcccacaagcggacttgatacacccgttgattttgaaaatgttgtttcggcgggcgcaatcatgggttcgggcggaatcgttgttatggatgaggcagcctgtattgtggacactgccaagttctttctgaagtttacccaggatgagtcttgtggggaatgtactccctgcagggtaggctcaaaaattatgctggatatcctgactcgcattaccgaaggtaaggggcaggaaggggacctcgatgagctggtccgtctttccatgtatatcaagtccaactctctctgcggacttggtggagcagctccaaacccggttctctcaactattcgatatttcagggaagagtacgaggcacatattcgggacaagcgttgtccgggtaccgtatgtaacgatctgatcaagtatgttgtgattgaggaagattgtacgacctgcgggctttgcgagccagtatgtccatccggatcggtgacatgggaaaaaggtgaggttgcgcatatagatctcacgacatgcattcgctgcaaggcttgtgtcgatgcctgcaaattcagggctatcatttag

SEQ ID NO: 39369 - protein, 617 aa, Leptospirillum ferrooxidans
MLTEVLEDSSLQLEERSSLPVIHIGMATCGLASGAKALHELILKEVASRNLAVKVVPTGCIGMCHNEPLVDITMPGKNRVSYRNVKPNTLTQILDAHFNKNEFAKKYAVCQIPVPGAEPFAGLPLMQEIPFFKGQVKIVSKPLGMIDPLSIDDYIAMDGYAALRKVLSSMTPEQVIDEVTKSGLRGRGGGGFPTGVKWNLTRKAPGPEKYVVCNADEGDPGAFMDRSVLEGDPHSVIEGMILAAFAVGHARKGYIYCRAEYPLAIKRLQKAINDARERNFLGDNILGSDLSFDLEIKEGAGAYVCGEETALLASLMGERGMPWPKPPFPAQKGVWGKPSVINNVETLANIGHIILGGGEWYASYGSEKTKGTKTFALTGSIKNTGLIEVPAGTPLREIVFSIGGGMVEKKIPFKAAQLGGPSGGCIPTSGLDTPVDFENVVSAGAIMGSGGIVVMDEAACIVDTAKFFLKFTQDESCGECTPCRVGSKIMLDILTRITEGKGQEGDLDELVRLSMYIKSNSLCGLGGAAPNPVLSTIRYFREEYEAHIRDKRCPGTVCNDLIKYVVIEEDCTTCGLCEPVCPSGSVTWEKGEVAHIDLTTCIRCKACVDACKFRAII

SEQ ID NO: 39370 - DNA, 1560 bp, Methylobacterium extorquens
  CDS (1)..(1560): transl_table=11
gtgagcatcaccgtttacgtcccgcaggacgccgtcgccctcgggctcggtgccaaccgcgtcgcccgggcgatcttcgccggtgccgagcggcgcggtctcgacgtgcgcatcgtccgcaccggcacccgcggcctgctctggctcgagccgatggtcgaggtcgcgacccctgagggccgcatcgcctacggtccggtgaccccggccgatgtcgagggcctgctcgatgccgggctcaccgaggggggcgaacacgcgctccgcctcggcaagccggaagaaattccgttcctggccaagcagcaccggctcactttccaccgctgcggcgtggtcgatccggtctcggtcgaggattaccgggcccatggcggctaccgtggtttggaggccgcgctgaagctcgacgccaagggcatcgtcgcccaggtgcgcgattcgggactgcgcgggcgcggcggtgccggcttcccggccggcatcaagtggaacacggtgatgctggcccagtcggaccagaaatacgtggtctgcaacgccgacgagggcgattccggcaccttcgccgaccggatcatgatggagggtgaccccttcaacctgatcgagggcatgaccatcgccgccgtcgcgaccggcgccactcgcggctacatctactgccgctcggagtacccgcagagcttcaagaccctgcgcgacgccatcgccaacggcgtgcgggccggcgtcctcggcgacaacattctgggctccggcaagagcttccacctggaagtgcggctgggcgccggcgcctatatctgcggcgaggaaacctcgctgctggagagccttgagggcaagcgcggcatcgtccgggccaagccgccgatcccggcgctgaagggctttctcggcaagccgacgctggtcaacaacgtcatgaccttcacggccgtgccgtacatcctggagcacggcgccaagtcttacgccgagtacggcatgggccgctcgctcggcaccctgccgatccaactcgccggcaacatccggcagggcggcctgatcgagtacgccttcggcatcaccatccggcaggtgatcgaggatttcggcggcggcacggcctcggaccggccggtccgcgcggtgcaggtcggcggcccgctcggggcctacttccccgacgacttgctcgacacgccgctggattacgaggcgatggcggccaagaagggcctcgtcggccatggcggcatcgtcgtgttcgacgacaccgtggacatggccaagcaggctcgcttcgccttcgagttctgcgccaccgaatcctgcggcaagtgcaccccctgccgggtcggcgccacccgcggcgtcgagaccatggacaaggtcatctccggcatccgcccggaggccaatctcaagctcgtcgaagatctctgcgagatcatgaccgacggctcgctctgcgccatgggcggcctgacgcccatgcccgtgatgagcgcgatcaccaacttccccgaggattttcggcgcgcgggcgatctgcccgtcgcggccgagtga

SEQ ID NO: 39371 - protein, 519 aa, Methylobacterium extorquens
MSITVYVPQDAVALGLGANRVARAIFAGAERRGLDVRIVRTGTRGLLWLEPMVEVATPEGRIAYGPVTPADVEGLLDAGLTEGGEHALRLGKPEEIPFLAKQHRLTFHRCGVVDPVSVEDYRAHGGYRGLEAALKLDAKGIVAQVRDSGLRGRGGAGFPAGIKWNTVMLAQSDQKYVVCNADEGDSGTFADRIMMEGDPFNLIEGMTIAAVATGATRGYIYCRSEYPQSFKTLRDAIANGVRAGVLGDNILGSGKSFHLEVRLGAGAYICGEETSLLESLEGKRGIVRAKPPIPALKGFLGKPTLVNNVMTFTAVPYILEHGAKSYAEYGMGRSLGTLPIQLAGNIRQGGLIEYAFGITIRQVIEDFGGGTASDRPVRAVQVGGPLGAYFPDDLLDTPLDYEAMAAKKGLVGHGGIVVFDDTVDMAKQARFAFEFCATESCGKCTPCRVGATRGVETMDKVISGIRPEANLKLVEDLCEIMTDGSLCAMGGLTPMPVMSAITNFPEDFRRAGDLPVAAE

SEQ ID NO: 39372 - DNA, 1416 bp, Xenopus laevis
  CDS (1)..(1416)
atgctttccctaagacatatagtgagaattcctcttccctctcctgcttccaccattgttcttgccagattcaactctagtggacctgatcagactccaaaaaagacaaaatttggacctcttagtgacgaagatcgaatatttaccaacttatatggacgtcatgactggggattgaaaggtgctttaagtagaggagactggtacaagaccaaggagattttgttgaagggagtagactggattcagggtgaggttaaaacttctggcctgcgtggcagaggaggagctggcttcccaacaggtcttaaatggagctttatgaataaaccatcagatggaaggcccaaatatcttgtagtcaatgcagatgaaggtgaacctggaacatgtaaggatcgggagatcatgagacacgacccccacaaacttgtggagggttgtctagttgctggacgtagcatgggagctcgtgcagcatacatctacattcgaggagaattctacaatgaagcatccaatctacaggtagctgtgcgggaggcatactctgcggggcttattgggcgtaatgcctgtggctcagggtatgattttgatgtgtttgtggtgagaggcgctggggcatacatctgtggtgaagagactgcattgattgagagcattgaaggaaaacaaggaaaaccccgccttaagcctccctttcctgctgatgttggtgtttttggttgtccaacaacagttgccaatgtggaaactgttgcagttgccccgaccatttgcaggcgtggaggttcctggtttgctagctttggtcgtgaaagaaactctggtaccaaactgttcaacatatcgggacatgtaaacaatccatgtactgtggaggaagaaatgtctataccacttaaagagctcattgaaaggcatgcaggaggagttactggtggctgggataatcttcttgctgtaatccccggaggctcctccacaccacttataccacgatctgtgtgtgaaacagttcttatggattttgatgctctagtccaggctcagactggtcttggtacagcagcgatcattgtcatgaataaatcaactgacattgtccgtgcaattgcacgccttattgaattctacaaacatgagagctgtggtcagtgtactccctgcagggaaggtgttgactggatgaacaaagttatgtggcgtatgtgtcgaggtgatgcccatgtagatgagatcgacatgttgtgggagattagcaagcagattgaaggacacaccatttgtgcattgggagatggggctgcctggcctgtccagggtttgattcgtcatttccgccctgagttggagcagcgcatgaaactttttgacaccgcaaagagacagcaagctagcaaaacattttag

SEQ ID NO: 39373 - protein, 471 aa, Xenopus laevis
MLSLRHIVRIPLPSPASTIVLARFNSSGPDQTPKKTKFGPLSDEDRIFTNLYGRHDWGLKGALSRGDWYKTKEILLKGVDWIQGEVKTSGLRGRGGAGFPTGLKWSFMNKPSDGRPKYLVVNADEGEPGTCKDREIMRHDPHKLVEGCLVAGRSMGARAAYIYIRGEFYNEASNLQVAVREAYSAGLIGRNACGSGYDFDVFVVRGAGAYICGEETALIESIEGKQGKPRLKPPFPADVGVFGCPTTVANVETVAVAPTICRRGGSWFASFGRERNSGTKLFNISGHVNNPCTVEEEMSIPLKELIERHAGGVTGGWDNLLAVIPGGSSTPLIPRSVCETVLMDFDALVQAQTGLGTAAIIVMNKSTDIVRAIARLIEFYKHESCGQCTPCREGVDWMNKVMWRMCRGDAHVDEIDMLWEISKQIEGHTICALGDGAAWPVQGLIRHFRPELEQRMKLFDTAKRQQASKTF

SEQ ID NO: 39374 - DNA, 1719 bp, Methylobacterium extorquens
  CDS (1)..(1719): transl_table=11
atgagtgaggcaagtgggactgtccggagcttcgcgcatccgggccgtggccgtaacgtcgcccgcgccgtgccgaaggggcgtcaggtcgatccccacgccaaggtcgagatcgaggagctgctcggcacccgcccgcgccagcgcgacctgctgatcgagcacctgcacctgatccaagacacctacggccagatcagcgccgatcatctcgcggcgctggccgacgagatgagcctcgccttcgccgaggtgttcgagaccgcgaccttctacgcgcatttcgatgtggtgaaggagggcgaggccgacatcccgcgcctgacgatccgggtttgcgacagcatcacctgcgccatgttcggcgccgacgagctgctggagacgctgcagcgcgagctggcctcggatgcggtccgcgtcgtgcgcgcgccctgtgtcggcctgtgcgaccacgccccggcggtcgaggtcgggcacaacttcctgcaccgggccgacctcgcctccgtgcgcgccgcggtcgaggccgaggacacccacgcccacatccccacttacgtcgattacgacgcctaccgggccggcggcggctacgcgaccctggagcggctgcgcagcggcgaactgccggtcgatgacgtgctgaaggtgctcgacgacggcggcctgcgcggcctcggcggcgccggctttcccaccggccgcaagtggcgctccgtgcgcggcgagcccggaccccggctgatggcggtcaacggcgacgagggcgagcccggcaccttcaaggatcagctctacctcaacaccgatccgcaccgctttctggaaggcatgctgatcggcgcccacgtcgtcgaggccgccgacgtctacatctacctgcgcgacgagtacccgatctcccgcgagatcctggcccgcgagatcgcgaagctccccgagggcggcacccgcatccacctgcgccgtggggccggcgcctatatctgcggcgaggaatcctcgctgatcgagtcgctggagggcaagcgcggcctgccgcggcacaagccgcccttccccttccaggtcggcctgttcaaccggccgacgctgatcaacaacatcgagacgctgttctgggtgcgcgacctgatcgagcgcggcgccgaatggtggaagagccacgggcgcaacggccgcgtcggcctgcgctcgtactcggtttcgggccgggtcaaggagccgggcgtcaagctcgcgcccgccggcctgaccatccaggaactcatcgacgagtattgcggcggcatctctgacggccacagcttcgcggcctacctgccgggcggagcctcgggcggcatcctgccggcctcgatgaacgacatcccgctcgatttcggcacgctggaaaaatacggctgcttcatcggctcggccgcggtcgtgatcctgtccgatcaggacgatgtgcgcggtgccgcgttgaacctgatgaagttcttcgaggacgagtcctgcgggcagtgcacgccctgccgctcgggcacgcagaaggcccgcatgctgatggagaacggcgtgtgggacaccgatctcctcggcgagctggcgcaatgcatgcgcgacgcctcgatctgcggtctcggtcaggcggcctcgaaccccgtcagcaccgtgatcaagtacttccctgatctcttcccggagccgcgggccgtggcggccgagtga

SEQ ID NO: 39375 - protein, 572 aa, Methylobacterium extorquens
MSEASGTVRSFAHPGRGRNVARAVPKGRQVDPHAKVEIEELLGTRPRQRDLLIEHLHLIQDTYGQISADHLAALADEMSLAFAEVFETATFYAHFDVVKEGEADIPRLTIRVCDSITCAMFGADELLETLQRELASDAVRVVRAPCVGLCDHAPAVEVGHNFLHRADLASVRAAVEAEDTHAHIPTYVDYDAYRAGGGYATLERLRSGELPVDDVLKVLDDGGLRGLGGAGFPTGRKWRSVRGEPGPRLMAVNGDEGEPGTFKDQLYLNTDPHRFLEGMLIGAHVVEAADVYIYLRDEYPISREILAREIAKLPEGGTRIHLRRGAGAYICGEESSLIESLEGKRGLPRHKPPFPFQVGLFNRPTLINNIETLFWVRDLIERGAEWWKSHGRNGRVGLRSYSVSGRVKEPGVKLAPAGLTIQELIDEYCGGISDGHSFAAYLPGGASGGILPASMNDIPLDFGTLEKYGCFIGSAAVVILSDQDDVRGAALNLMKFFEDESCGQCTPCRSGTQKARMLMENGVWDTDLLGELAQCMRDASICGLGQAASNPVSTVIKYFPDLFPEPRAVAAE

SEQ ID NO: 39376 - DNA, 1605 bp, Synechococcus sp
  CDS (1)..(1605): transl_table=11
atgacggatttagcggaattgtttgaaattgcggaagcggaacaggacagccacacaaaaattcagattcgctgttgtacggcggcgggttgtatgtcctccggcagtttggcggtgaaggaggaactggaaaaacagattaaggaaaaaaatttgggtgatcgcctggaggtggttcccgtcggttgtatgaaactctgtggctttgcgccgttggtggatgtgagcgatgagacttgtttccagcaggtgatgccagaagttgccccagagatcgtcgatgtagcattgggggaaacgccctcggataagctggaaatttgcgatcgccaagcgccatttttcacgttacaaaaacccgtggtgctggaaaatagcggcaaaattgaccccgaacggattgaagcgtacattgcgcggggcggctatcggtcattgcaccaagtgctcgaagatctgaccccgatggcggtggtggaagaaattacccagagcggcctacgggggcgtggcggcggcggctatcccacgggattgaaatgggcgaccgtcgcgaaaatgccgggggatcaaaaatatgtcgtctgtaacgccgacgaaggggatccgggggcatttatggatcgggcggtgctcgaaagtgacccccaccgggttctcgaagggatggcgatcgccggctatgccgtgggcgcaaaccacggatatatttacattcgggcagaatatcccctcgcgatccaacgcctcgaaaaagcaatcaaacaagccaaaagtaagggtttactcggtagccagatttttaattcccccttcaatttcaccatcgacatccgcattggcgcaggggcattcgtttgtggcgaagaaaccgccctaattgcctccatcgaaggcggacggggaacccccagacccagacccccctaccccgcccagtccggactgtggggacatcccaccctaatcaacaacgttgaaacctacgccaacatcgtcccgatcatccgtgaaggggcagactggtttagcagcatcggcaccgaaaaaagcaaaggcacaaaagtctttgccctcaccggaaaagtgaaaaataatggcttgatcgaagtgccgatgggaacccccgtccggcaaattgtcgagcaaatgggcggtggcatccccgacagtggcacagtcaaatctgtccaaaccggagggccctctggcggttgtattccggcggactaccttgatacgcccatcgaatatgattctttgatcaaactcggcacaatgatgggttccggcggcatgatcgttatggacgaagccactaacatggttgatgtggcgaagttttacatggaattttgccagtgcgaatcctgcggtaaatgtatcccctgccgtgccggaacggtgcagatgtcgggactgttaagcaaaatgctcaagggacaggctgaacccaaggacattgaactgctcgaacaactttgtcacatggtcaaggaagcaagtttatgtgggttaggacagagtgcgcccaatccaattttgagtaccctgcgctatttccgcgcggaatatgatgccctcgtggggagtaacgccgattaa

SEQ ID NO: 39377 - protein, 534 aa, Synechococcus sp
MTDLAELFEIAEAEQDSHTKIQIRCCTAAGCMSSGSLAVKEELEKQIKEKNLGDRLEVVPVGCMKLCGFAPLVDVSDETCFQQVMPEVAPEIVDVALGETPSDKLEICDRQAPFFTLQKPVVLENSGKIDPERIEAYIARGGYRSLHQVLEDLTPMAVVEEITQSGLRGRGGGGYPTGLKWATVAKMPGDQKYVVCNADEGDPGAFMDRAVLESDPHRVLEGMAIAGYAVGANHGYIYIRAEYPLAIQRLEKAIKQAKSKGLLGSQIFNSPFNFTIDIRIGAGAFVCGEETALIASIEGGRGTPRPRPPYPAQSGLWGHPTLINNVETYANIVPIIREGADWFSSIGTEKSKGTKVFALTGKVKNNGLIEVPMGTPVRQIVEQMGGGIPDSGTVKSVQTGGPSGGCIPADYLDTPIEYDSLIKLGTMMGSGGMIVMDEATNMVDVAKFYMEFCQCESCGKCIPCRAGTVQMSGLLSKMLKGQAEPKDIELLEQLCHMVKEASLCGLGQSAPNPILSTLRYFRAEYDALVGSNAD

SEQ ID NO: 39378 - DNA, 1461 bp, Arabidopsis thaliana
  CDS (1)..(1461): Xaa of translated CDS can stand for any naturally occuring amino acid which can be translated from respective CDS-codon
atggcacccgtgagggggattcttggcttgcaaagggcagtgtccatttggaaggaaagtaacagactgactccagctttgagatcattcagcactcaagctgcatccacttccaccactccacagcctcctccacctcctccgcctccggaaaagactcatttcggtggtctcaaggatgaagatcggatttttactaatctctatggtctgcatgacccatttctcaaaggcgcgatgaagagaggtgattggcataggaccaaagatttggtgctcaagggtactgattggattgtcaatgaaatgaagaaatctggacttcgtggacgtggtggtgctggtttcccttctggtcttaagtggtcctttatgcctaaagtttctgatggccgtccctcctatttggttgtcaatgctgatgagagtgagcctggaacttgtaaagatagggagatcatgcgtcatgaccctcacaaattgttggaagggtgtttgattgctggtgttggaatgagagctagtgctgcgtatatttacatcaggggtgaatatgtgaatgagcgtttgaatctagagaaggctagaagagaagcgtatgcagctggtctcttggggaagaatgcatgtggttctggttatgattttgaagtttatatccactttggtgctggtgcgtacatttgtggtgaagagactgcgcttcttgaaagccttgaagggaagcaaggaaaacctaggttgaagcctccgttccctgctaatgctggtttatatggttgtcccacaactgttaccaatgtggaaacagtggctgtttcgcctaccattttaaggcgtggacctgagtggttttctagtttcggtaggaagaataacgctgggacaaagctcttttgtatatcavgccatgtaaacaagccatgcacggtggaagaggagatgagtatacctctcaaggaactgattgagaggcattgtggaggtgttaggggtggatgggacaatctacttgctatcatccctggtggttcatctgttcctctgatccctaagaacatttgcgaggatgtgctgatggatttcgatgcgctcaaggctgtccaatcagggttaggaactgcagcagtcattgtgatggataaatcaaccgatgttgtggatgcaattgcaaggctctcttacttctacaagcatgaaagctgtgggcagtgcactccttgcagagagggaacaggttggctttggatgatcatggagagaatgaaagttggcaatgcaaagctggaagagattgatatgctgcaggaggtaaccaaacagatcgaaggacacacaatctgtgcattgggtgatgcagctgcatggcctgtgcaaggtctgataagacactttaggccagagctcgagagaaggatcagggaacgcgctgaaagggagttgctacaggctgctgcttaa

SEQ ID NO: 39379 - protein, 486 aa, Arabidopsis thaliana
  misc_feature (303)..(303): Xaa can be any naturally occuring amino acid
MAPVRGILGLQRAVSIWKESNRLTPALRSFSTQAASTSTTPQPPPPPPPPEKTHFGGLKDEDRIFTNLYGLHDPFLKGAMKRGDWHRTKDLVLKGTDWIVNEMKKSGLRGRGGAGFPSGLKWSFMPKVSDGRPSYLVVNADESEPGTCKDREIMRHDPHKLLEGCLIAGVGMRASAAYIYIRGEYVNERLNLEKARREAYAAGLLGKNACGSGYDFEVYIHFGAGAYICGEETALLESLEGKQGKPRLKPPFPANAGLYGCPTTVTNVETVAVSPTILRRGPEWFSSFGRKNNAGTKLFCISXHVNKPCTVEEEMSIPLKELIERHCGGVRGGWDNLLAIIPGGSSVPLIPKNICEDVLMDFDALKAVQSGLGTAAVIVMDKSTDVVDAIARLSYFYKHESCGQCTPCREGTGWLWMIMERMKVGNAKLEEIDMLQEVTKQIEGHTICALGDAAAWPVQGLIRHFRPELERRIRERAERELLQAAA

SEQ ID NO: 39380 - DNA, 1389 bp, Drosophila melanogaster
  CDS (1)..(1389)
atgttgcggcagaagcttaaaaactatttaccgtctgtttgggaacagcaactgcgtctcgtccaaactgccaagaaagcgggaggtagcaaaaagctgggtcccgataggcctcccattatcgatccgcccaagggatatgagcccaattgcaagaccaaatttggtccgctggacgattgtgatcgtgtgtttcagaatctctatggacgccacgattggcgcttgcatggagcatgccaacgtggggattggcatcgcaccgctgagttgctggagcagggtcccgaatggatcatgaagcagtgggaatttctacgccagaccaagtccgagaaggtgcccaaaatggtcatcgtgaactgtgcagagggagagcccggaacctgcaaggaccgtgatatcctgcgacatgaaccccacaaactgatagaaggtatccttctggtaggtgtggccatgggatgcggtagagccattgtgtacattcgaaatcgcttctacaacgaggcctgcaacctgcactttgccttggcggaggcctatcatcatggtttgttgggaaacagtgtctgtggcacgggcatcaagttcgatgtgatggtccagcgtggagatcggtacttatgtggcgaggaaaccgccatgatcaactgtttgatgggtaaactgggaagaccacgacgtcgtccgcccttccttacggaaaagggctacttcgagcatcccagtttggtaatcaatgccgagtcgattgcagtagtgcccaccattctgcgaagaggttcacagtggtgggctggattgggtcgcagttacaacacgggaaccaaactttactgtctcagcggtcaggtgaataatccctgcactgtggaggaagaaatgtccatacccctgaaggaccttatagaacgacatgctggtggagtaaaaggtggttgggacaatctcgcagcagtatttccaggtggtttgtccacgccattgttggatccatcaactgccggaaaggttctcatggatttcgatagtttgacggatgcaggcagtggtttcgggtgcggagcggttattgtgatgaccaaggactgtgatcctctggcaataatgttgcgatcaattcagtttttcgaaaagcacacttgcaaacagtgctcctattgtcgcgatggtgccatatggctgccggagatattcgcccgctttgttaagggtcagacacatccccacgagatcgattggacgctggtcattgccgataaaatgaggaatagtaagcccatttgcgcactcgcttatagccaagtcagcgtggccgaaagtttggtgcgaatgtttagccggcagatcgaggaacgccttttaaaatatgccaagggatcttaa

SEQ ID NO: 39381 - protein, 462 aa, Drosophila melanogaster
MLRQKLKNYLPSVWEQQLRLVQTAKKAGGSKKLGPDRPPIIDPPKGYEPNCKTKFGPLDDCDRVFQNLYGRHDWRLHGACQRGDWHRTAELLEQGPEWIMKQWEFLRQTKSEKVPKMVIVNCAEGEPGTCKDRDILRHEPHKLIEGILLVGVAMGCGRAIVYIRNRFYNEACNLHFALAEAYHHGLLGNSVCGTGIKFDVMVQRGDRYLCGEETAMINCLMGKLGRPRRRPPFLTEKGYFEHPSLVINAESIAVVPTILRRGSQWWAGLGRSYNTGTKLYCLSGQVNNPCTVEEEMSIPLKDLIERHAGGVKGGWDNLAAVFPGGLSTPLLDPSTAGKVLMDFDSLTDAGSGFGCGAVIVMTKDCDPLAIMLRSIQFFEKHTCKQCSYCRDGAIWLPEIFARFVKGQTHPHEIDWTLVIADKMRNSKPICALAYSQVSVAESLVRMFSRQIEERLLKYAKGS

SEQ ID NO: 39382 - DNA, 1794 bp, Eubacterium acidaminophilum
  CDS (1)..(1794): transl_table=11
atggattataaaaacactattttggtttgtgcgggaactggatgtatgtcttcttcttcacttaaaatacttaagagactagaggaccttatggctgagaagggtattcttgagcagactaagattgtaaagactggctgctttggactttgctctgtaggaccgatagtaatagtataccctgaaggcgcattctacgctcacgttcaggaagaagatgcagacagaatagttaacgagcacctgataggcggcaaaatagtaaaagaccttctttacaaggaagctttgcttgaaaacggagaaataagaccttttgaggaggttcctttctacaacaagcaggtgaggatagcgcttgagcattgcggacgtatacaggctgaagacataaacgactatattgaaactgcagaaggctacgaggcaatcaaaaaagctataacaaaaatgacaagagaagatgtaatagaggaaatcaaaagatcaggccttagaggaagaggcggcggcggcttccctacaggactcaagtggcagttcgcatacaatgcgccgggagatcaaaaatacgttatatgtaacgctgacgaaggtgacccgggagcattcatggacagatcagtgcttgaaggagaccctcacgctgtaatagaggccatgatgataactggttacgccataggagctaaccacggatatatatatataagagccgagtatcctgttgctataaagagacttgagatagcattggcacaggcaagagagtcaggataccttggcaagaatgtaatgggaacagattttgaatttgacatcgagctgaaactcggagccggagctttcgtatgcggtgaggagactgctcttatcaactctatagaaggaaaacgtggaatggcaaatccaaagccaccgttcccggcaaacgaaggcgtatggaaaaaacctacaataataaacaacgtagagacgcttgcaaacgttccaaagataatacttaaaggagcagactggtttgcttcaataggaactgaaaaatctaagggaactaaggttttcgctcttggcggaaagataaacaacgttggactagttgaggttccaatgggaactacactaagagagataatatatgaagtaggcggaggaattccaaacggcaaggcgttcaaagccgttcaaaccggaggaccatcaggaggatgtataacagctgactatcttgacactcaaatagatttcgactcgcttaccgctctaggttctatgatgggttcaggcggtatgatagttatggacgaagacaactgcatggttgacatagccaaattcttccttgactttacagtggaagagtcatgcggaaaatgtactccttgtagagaaggcacaaagagaatgcttgaaatacttgagagaatatcagagggacatggaactcttgaagaccttgacaagcttgaaagacttgcaaatacaatcaagtcaactgctctttgcggacttggacagacagctccaaacccagtactttcaactcttaaatacttcagagatgagtacgtggctcacgttgttgacaagaagtgcccagcgggggtttgtacagcgcttctagagtacttcataacagacaagtgcataggctgtactaagtgcgctagagtgtgtccggttactgctataagcggcaaggttaaggaaaagcacgtaatagatacagataagtgcataaagtgcggcgcttgtatggatgcttgtcctgtaaacgctataattaagaaataa

SEQ ID NO: 39383 - protein, 597 aa, Eubacterium acidaminophilum
MDYKNTILVCAGTGCMSSSSLKILKRLEDLMAEKGILEQTKIVKTGCFGLCSVGPIVIVYPEGAFYAHVQEEDADRIVNEHLIGGKIVKDLLYKEALLENGEIRPFEEVPFYNKQVRIALEHCGRIQAEDINDYIETAEGYEAIKKAITKMTREDVIEEIKRSGLRGRGGGGFPTGLKWQFAYNAPGDQKYVICNADEGDPGAFMDRSVLEGDPHAVIEAMMITGYAIGANHGYIYIRAEYPVAIKRLEIALAQARESGYLGKNVMGTDFEFDIELKLGAGAFVCGEETALINSIEGKRGMANPKPPFPANEGVWKKPTIINNVETLANVPKIILKGADWFASIGTEKSKGTKVFALGGKINNVGLVEVPMGTTLREIIYEVGGGIPNGKAFKAVQTGGPSGGCITADYLDTQIDFDSLTALGSMMGSGGMIVMDEDNCMVDIAKFFLDFTVEESCGKCTPCREGTKRMLEILERISEGHGTLEDLDKLERLANTIKSTALCGLGQTAPNPVLSTLKYFRDEYVAHVVDKKCPAGVCTALLEYFITDKCIGCTKCARVCPVTAISGKVKEKHVIDTDKCIKCGACMDACPVNAIIKK

SEQ ID NO: 39384 - DNA, 1068 bp, Homo sapiens
  CDS (1)..(1068)
atgaagtatctggtggtgaacgcagacgagggggagccgggcacctgcaaggaccgggagatcttacgccatgatcctcacaagctgctggaaggctgcctggtggggggccgggccatgggcgcccgcgctgcctatatctacatccgaggggaattctacaatgaggcctccaatctgcaggtggccatccgagaggcctatgaggcaggtctgattggcaagaatgcttgtggctctggctatgattttgacgtgtttgtggtgcgcggggctggggcctacatctgtggagaggagacagcgctcatcgagtccattgagggcaagcagggcaagccccgcctgaagccccccttccccgcagacgtgggagtgtttggctgccccacaactgtggccaacgtggagacagtggcagtgtcccccacaatctgccgccgtggaggtacctggtttgctggctttggcagagaacgcaactcaggcaccaaactattcaacatctctggccatgtcaaccacccttgcactgtggaggaggagatgtctgtgcccttgaaagaactgattgagaagcatgctgggggtgtcacgggcggctgggacaacctccttgctgtgatccctggcggctcgtctaccccactgatccccaagtctgtgtgtgagacggtgctgatggacttcgatgcgctggtgcaggcacagacaggcctgggcacagctgcggtgatcgtcatggaccgctcgacggacatcgtgaaagccatcgcccgcctcattgagttctataagcacgagagctgtggccagtgtaccccatgccgtgagggtgtggactggatgaacaaggtgatggcacgtttcgtgaggggggatgcccggccggccgagatcgactccctgtgggagatcagcaagcagatagaaggccatacgatttgtgctctgggtgacggggccgcctggcctgtgcagggtctgatccgccactttcggccggagctcgaggagcggatgcagcggtttgcccagcagcatcaggcccggcaggctgcctcttag

SEQ ID NO: 39385 - protein, 355 aa, Homo sapiens
MKYLVVNADEGEPGTCKDREILRHDPHKLLEGCLVGGRAMGARAAYIYIRGEFYNEASNLQVAIREAYEAGLIGKNACGSGYDFDVFVVRGAGAYICGEETALIESIEGKQGKPRLKPPFPADVGVFGCPTTVANVETVAVSPTICRRGGTWFAGFGRERNSGTKLFNISGHVNHPCTVEEEMSVPLKELIEKHAGGVTGGWDNLLAVIPGGSSTPLIPKSVCETVLMDFDALVQAQTGLGTAAVIVMDRSTDIVKAIARLIEFYKHESCGQCTPCREGVDWMNKVMARFVRGDARPAEIDSLWEISKQIEGHTICALGDGAAWPVQGLIRHFRPELEERMQRFAQQHQARQAAS

SEQ ID NO: 39386 - DNA, 1470 bp, Candida tropicalis
  misc_feature (1398)..(1398): n is a, c, g, or t
  misc_feature (1407)..(1407): n is a, c, g, or t
  CDS (1)..(1470): transl_table=12
atgcttcgcaatttcaaaatacagcctcgtacaatggtacgtggattagccactgcagctgatccagcatctatcccaaatagagtacatggaggattaaaagatcaagatcgtatatttcaaaatgtctatggtaactatggccatgacttaaaatcagcacaaaaaatgggtgattggtataaaaccaaagaaatcatattgaaaggtgataaatggattatcgatgaaatgaagaaatctggtttaagaggtagaggtggtgcaggtttcccatctggtttgaaatggtcattcatgaacccacctggttgggaaaagaatgtaggtccaagatatttggttgtcaatgcagatgaaggggaaccaggtacttgtaaagatagagaaattattagaaaagatccacataaattggttgaagggtgtttgttggctggtagagccatgaatgctactgctgcttatatttatattagaggagaattctacaatgaaactgtaattttacaaaatgccattaacgaagcttacaaagccggtttaattggtaagaacgcttgtggatcaggttatgattttgatgtctatattcaccgtggtatgggtgcttatgtctgtggtgaagaaaccgctttgattgaatctatcgaaggtaaagctggtaaaccaagattaaagcctcctttcccagctggtgttggtttatttggtagaccaaccactgttgccaatgttgagagtgtttccgtcgccccaactattttaagaagaggtggtgattggtttgcttcttttggtcgtgaaagaaactctggtactaaattgttctgtatttctggtcacgtcaatgaaccatgtactgttgaagaagaaatgtctattccattaaaagaattgttagaaaagcactgtggtggtatcaaaggtggttgggataacttgttgggtgttattccaggtggttcttctgttccaattatgccaaaagaaacctgtgaccacgttttgatggattacgatgctttaagagatgttggttccggtttaggtaccgcagctgtcattgtcatgaacaaacaaactgatattataagagccattcaaagattctcccatttctataaacatgaatcctgtggtcaatgtactccatgtcgtgaaggtactacttggttgcaaagaatgatggatagattttacaaaggtcaagccactgaaaaagaaattgatatgattttcgaattaaccaaagaaatcgaaggtcacaccatttgtgccttgggtgatgctgctgcttggccagtgcaaggtttgatcaaatcattcagaccagttatggttgacagaattaaacaattccaagaacaacacgccggtgataagattgaatatggnggttgggtngaaggtggtaaagtaaaagacggtgttgttgttgacaacccaatgccatctgctcatcattaa

SEQ ID NO: 39387 - protein, 489 aa, Candida tropicalis
MLRNFKIQPRTMVRGLATAADPASIPNRVHGGLKDQDRIFQNVYGNYGHDLKSAQKMGDWYKTKEIILKGDKWIIDEMKKSGLRGRGGAGFPSGLKWSFMNPPGWEKNVGPRYLVVNADEGEPGTCKDREIIRKDPHKLVEGCLLAGRAMNATAAYIYIRGEFYNETVILQNAINEAYKAGLIGKNACGSGYDFDVYIHRGMGAYVCGEETALIESIEGKAGKPRLKPPFPAGVGLFGRPTTVANVESVSVAPTILRRGGDWFASFGRERNSGTKLFCISGHVNEPCTVEEEMSIPLKELLEKHCGGIKGGWDNLLGVIPGGSSVPIMPKETCDHVLMDYDALRDVGSGLGTAAVIVMNKQTDIIRAIQRFSHFYKHESCGQCTPCREGTTWLQRMMDRFYKGQATEKEIDMIFELTKEIEGHTICALGDAAAWPVQGLIKSFRPVMVDRIKQFQEQHAGDKIEYGGWVEGGKVKDGVVVDNPMPSAHH

SEQ ID NO: 39388 - DNA, 1626 bp, Anabaena variabilis
  CDS (1)..(1626): transl_table=11
atggatctatcagagttaattgaaattgcccaaaaagaacgtgcttctgaaaaacccgtacaaattcgctgttgtgttgctgctggttgtttgtctgcaaattcacaagccgtcaaagaacgtctagaagaaactgtaacggcaaaaaatttaacggcaaaagtggaagttcgcggtgttggctgtatgcgtttgtgttgtcaagggccattagtcgaagtcaggagtcaggaggagtctcagcaatttccacaaaaaaaattgtatgaaaaagtaacgcctgatgatgcaccttcaattgttactgctgtgaatggggaagagacaacagttaaacaaggaaatttaagtcatccattttttacatatcaaatgccgattgttttagaaaacagtggcaaagtcgatccagaacgcattcaatcttacattgccgcccaaggttatcgatcgctttaccatgtcttgcgggagatgacagccaatgaagtggtggataccattacccgcagtggtttacgaggacgtggtggtgctggttatcccacgggtttgaaatgggcaacggtggcgaaagcacaaggagaacgcaaatttgtcatctgtaacgccgatgaaggagatcccggtgcgtttatggatcgcagcgtcctagaaagcgatccccatcgcgttttagaaggaatggcgatcgctgcctatgccgtacgcaaacaaggctacatctacatccgggcagaatatcctgttgccatcaatcgcctgcaaactgcaattcgccaagcccaacgtctggggattttgggtactcaaatttttgattctcgctttgattttaaaattgatattcgtatcggtgctggcgcttatgtttgtggtgaagaaactgctttaatggcttccattgaaggtaaacgcggtacacctcatccccgcccgccttatccggccgagtctggtttatggggttatcctactttaattaataatgtcgaaacctatgccaatgttgcaccaattatccgtaaaggtgctgaatggttcgccagtattggcacagaaaaaagcaaaggtacaaaggtttttgccttggcaggtaaaatccgtaacacgggtttaattgaagtaccaatgggaacttcattgaagcaaattgtagaagcaatgggtggtggcgtgccagataatggtgtagtcaaagccgtgcaaactggtggcccttccggaggatgtattcccgcatcagcttttgagagcatagtggattatgaatcactgactcaactcggctcaatgatgggttccggtggcatgattgtcatggatgaaaccaccaacatggtggatgtcgcccgcttttttatggaattttgcatggatgaatcttgcggtaaatgtattccttgtcgggtaggaacggtgcagttacataaattgttaaccaagattagtcaaggtaaagcatccttagctgacttggaactgttagaagaattatgcgatatggtgaaaaacaccagcttgtgcggtcttggtcaatctgcaccaaatccagtatttagtaccttgcgttattttcgcgatgaatatttggccctatgcgctattcctgacctcaacaaataa

SEQ ID NO: 39389 - protein, 541 aa, Anabaena variabilis
MDLSELIEIAQKERASEKPVQIRCCVAAGCLSANSQAVKERLEETVTAKNLTAKVEVRGVGCMRLCCQGPLVEVRSQEESQQFPQKKLYEKVTPDDAPSIVTAVNGEETTVKQGNLSHPFFTYQMPIVLENSGKVDPERIQSYIAAQGYRSLYHVLREMTANEVVDTITRSGLRGRGGAGYPTGLKWATVAKAQGERKFVICNADEGDPGAFMDRSVLESDPHRVLEGMAIAAYAVRKQGYIYIRAEYPVAINRLQTAIRQAQRLGILGTQIFDSRFDFKIDIRIGAGAYVCGEETALMASIEGKRGTPHPRPPYPAESGLWGYPTLINNVETYANVAPIIRKGAEWFASIGTEKSKGTKVFALAGKIRNTGLIEVPMGTSLKQIVEAMGGGVPDNGVVKAVQTGGPSGGCIPASAFESIVDYESLTQLGSMMGSGGMIVMDETTNMVDVARFFMEFCMDESCGKCIPCRVGTVQLHKLLTKISQGKASLADLELLEELCDMVKNTSLCGLGQSAPNPVFSTLRYFRDEYLALCAIPDLNK

SEQ ID NO: 39390 - DNA, 1356 bp, Pseudomonas fluorescens
  CDS (1)..(1356): transl_table=11
atgaccctgacttccttcgggcccgccaaccgcatccagcgttcggccgaaacccatcccctgacctggcgcctgcgtgacgacggcgaagcggtatggctggacgagtaccaggccaagaacggctacgccgctgcgcgcaaggcgttcagcgacatggcccaggacgacatcgtccagaccgtgaaagactccggcctcaagggccgtggcggcgcgggcttccccacgggtgtgaagtggggcctgatgcccaaggacgaatccatcaacatccgctacctgctgtgcaacgcggatgaaatggagcccaacacctggaaagaccgcatgctgatggagcaactgccccatctgctgatcgaaggcatgctgatcagcgcccgcgcgctgaaaacctaccgtggctatatcttcctgcgtggcgaatacaccaccgccgccaagcacctgaaccgtgccgtggaagaagccaaggccgccggcctcttgggcaagaacatcctgggctcgggctttgatttcgagctgttcgtccacaccggtgccggacgctacatctgcggtgaagaaaccgcactgatcaactccctggaaggccgtcgcgccaacccacgttccaagccgcccttccctgccgctgtaggcgtgtggggcaagccgacctgcgtgaacaacgtcgagaccctgtgcaacgtgccggcgatcatcgccgacggcgtggactggtacaaatccctggcccgtgacggcagcgaagacatgggcaccaagctcatgggcttctccggcaaggtcaagaaccctggcctgtgggaactgccgttcggcgtcaccggccgcgagctgttcgaagactatgctggcggcatgcgcgacggctacaagctcaagtgctggcagcctggcggcgccggtaccgggttcctgttgccggaacacctggacgcccaaatgtacgccggcggcatcgccaaggtcggcacccgcatgggcaccggcctggccatggcggtggacgacagcgtgaacatggtgtcgctgctgcgcaacatggaagagttcttctcccgtgagtcgtgcggtttctgcaccccttgccgcgatggcctgccatggagcgtcaagctgctgcgggcccttgaaaacggcgaaggccaggccggcgacattgagaccctgctgggtctggtgggtttcctcggcccaggcaagaccttctgtgctcacgcaccgggtgccgtggagccgttgggcagcgcgatcaaatacttccgtccagagttcgaagccggcatcgcgcccaccagcgccgtcgtcccgcctctggcaaagccgatcgtagtcggcgcgtaa

SEQ ID NO: 39391 - protein, 451 aa, Pseudomonas fluorescens
MTLTSFGPANRIQRSAETHPLTWRLRDDGEAVWLDEYQAKNGYAAARKAFSDMAQDDIVQTVKDSGLKGRGGAGFPTGVKWGLMPKDESINIRYLLCNADEMEPNTWKDRMLMEQLPHLLIEGMLISARALKTYRGYIFLRGEYTTAAKHLNRAVEEAKAAGLLGKNILGSGFDFELFVHTGAGRYICGEETALINSLEGRRANPRSKPPFPAAVGVWGKPTCVNNVETLCNVPAIIADGVDWYKSLARDGSEDMGTKLMGFSGKVKNPGLWELPFGVTGRELFEDYAGGMRDGYKLKCWQPGGAGTGFLLPEHLDAQMYAGGIAKVGTRMGTGLAMAVDDSVNMVSLLRNMEEFFSRESCGFCTPCRDGLPWSVKLLRALENGEGQAGDIETLLGLVGFLGPGKTFCAHAPGAVEPLGSAIKYFRPEFEAGIAPTSAVVPPLAKPIVVGA

SEQ ID NO: 39392 - DNA, 1143 bp, Yarrowia lipolytica
  CDS (1)..(1143)
atggagggtccccgatatctggttgtcaacgccgatgagggagagcccggaacctgcaaggaccgagaaattatgcgaaaggatccccacaagctcgtcgagggctgtctgctggccggccgagccatgaacgccaccgcagcctacatctacattcgaggcgagttctacaacgaggccgccgtgctgcagaccgccatcaacgaggcttacgccgccggtctcatcggtaaggacgcctgtggctccggctacgattttgacgtgtacatccaccgtggaatgggtgcctacgtctgcggagaggagacctctctgatcgagtctctggagggcaaggctggtaagccccgtctcaagcccccgttccctgccggtgtcggtctgttcggccgaccctccaccgtcactaacgtcgagaccgtggccgtggctcctaccattctgcgacgaggaggagactggtttgcctcctttggccgagagcgaaactccggaaccaagcttttctgtatctccggaaacgtcaacgaaccctgcacagtcgaggaggagatgtccatccctctgcgagagcttctggagaagcactgcggcggaatcaagggtggctgggacaacttactgggtgtgattcccggtggatgctccgtccccattctccccaagaacatttgtgaggacgttctgatggactttgacgccctcaaggacgtgcagtccggtctgggaaccgctgctgtcattgtcatcaacaagcagcaggatgtcattcgagccatccagcgtttcgcagccttctacaagcacgagtcgtgtggtcagtgcaccccctgccgagagggaactacctggctgctcaaggccatggaccgattccgaaccggccaggccaaggagcgggagattgacatgctgtacgagctgactaaggacattgagggccacaccatttgcgctctcggtgatgccgccgcatggcctatccagggtctcattcgaaacttccgaccggaaatggagactcgaatgaagaagttccacgacgaggttggtgctgtttctgtcggtggctggatgaaggacgcacgagtggagaagggtaaggttgttggagcccctcttcccggcgttcatcattag

SEQ ID NO: 39393 - protein, 380 aa, Yarrowia lipolytica
MEGPRYLVVNADEGEPGTCKDREIMRKDPHKLVEGCLLAGRAMNATAAYIYIRGEFYNEAAVLQTAINEAYAAGLIGKDACGSGYDFDVYIHRGMGAYVCGEETSLIESLEGKAGKPRLKPPFPAGVGLFGRPSTVTNVETVAVAPTILRRGGDWFASFGRERNSGTKLFCISGNVNEPCTVEEEMSIPLRELLEKHCGGIKGGWDNLLGVIPGGCSVPILPKNICEDVLMDFDALKDVQSGLGTAAVIVINKQQDVIRAIQRFAAFYKHESCGQCTPCREGTTWLLKAMDRFRTGQAKEREIDMLYELTKDIEGHTICALGDAAAWPIQGLIRNFRPEMETRMKKFHDEVGAVSVGGWMKDARVEKGKVVGAPLPGVHH

SEQ ID NO: 39394 - DNA, 1296 bp, Paracoccus denitrificans
  CDS (1)..(1296): transl_table=11
atgctgaacgatcaggaccggatctttacgaacctttacggcatgggcgaccgcagcctggccggcgcgaaaaagcgcggccattgggacggcaccgccgcgatcatccagcgcgggcgcgacaagatcatcgacgagatgaaggcctcgggcctgcgcggccgtggcggcgccggcttcccgaccggcatgaaatggtccttcatgcccaaggaatcggacggccgcccctcttacctggtcatcaatgccgacgaatccgagcccgcgacctgcaaggaccgcgagatcatgcgccacgatccgcacacgctgatcgagggcgcgctgattgccagcttcgccatgggcgcccatgccgcctatatctatatccgcggcgagttcatccgcgagcgcgaggcgctgcaggccgccatcgacgaatgctacgacgcgggccttctgggccgcaatgccgccggttcgggctgggatttcgacctatacctgcatcacggcgccggcgcctatatctgcggcgaggaaaccgcgctgctggaatcgctggaaggcaagaagggcatgccgcgcatgaagccgcccttcccggcgggcgcgggcctttacggctgcccgaccacggtgaacaacgtcgaatcgatcgccgtggtgccgaccatcctgcgccgcggcgccgagtggttcgccagcttcggccggccgaacaatgcgggcgtgaagctgttcggcctgaccggccatgtcaacactccttgcgtggtcgaagaggccatgtcgattcccatgcgcgagctgatcgaaaagcatggcggtggcatccgcggcggctggaagaacctcaaggcggtgatccccggcggcgcttcctgcccggtgctgaccgccgagcaatgcgaaaacgccatcatggactatgacggcatgcgcgacgtgcgctcgtccttcggcaccgcctgcatgatcgtcatggaccagtcgaccgacgtggtgaaggcgatctggcggctgtccaagttcttcaagcacgaaagctgcggccagtgcaccccctgccgcgaaggcaccggctggatgatgcgggtgatggagcgcttggtgcgcggcgatgccgaggtcgaggaaatcgacatgctcttcgacgtgaccaagcaggtcgaaggccataccatctgcgccttgggcgatgcggcggcctggccgatccagggcctgatccgcaatttccgcgaagagatcgaggaccgcatcaaggccaagcgcaccggccgcatgggcgcgatggcggcggagtaa

SEQ ID NO: 39395 - protein, 431 aa, Paracoccus denitrificans
MLNDQDRIFTNLYGMGDRSLAGAKKRGHWDGTAAIIQRGRDKIIDEMKASGLRGRGGAGFPTGMKWSFMPKESDGRPSYLVINADESEPATCKDREIMRHDPHTLIEGALIASFAMGAHAAYIYIRGEFIREREALQAAIDECYDAGLLGRNAAGSGWDFDLYLHHGAGAYICGEETALLESLEGKKGMPRMKPPFPAGAGLYGCPTTVNNVESIAVVPTILRRGAEWFASFGRPNNAGVKLFGLTGHVNTPCVVEEAMSIPMRELIEKHGGGIRGGWKNLKAVIPGGASCPVLTAEQCENAIMDYDGMRDVRSSFGTACMIVMDQSTDVVKAIWRLSKFFKHESCGQCTPCREGTGWMMRVMERLVRGDAEVEEIDMLFDVTKQVEGHTICALGDAAAWPIQGLIRNFREEIEDRIKAKRTGRMGAMAAE

SEQ ID NO: 39396 - DNA, 1317 bp, Thermus thermophilus
  CDS (1)..(1317): transl_table=11
atgactggccccattctttccggactggacccccggtttgaaaggaccctctacgcccacgtggggaaggaggggtcctggaccctggactactacctccggcacggggggtacgagacggcgaagcgggtgctcaaggagaagaccccggacgaggtcatagaggaggtgaagcgctccgggcttaggggccggggcggggcgggcttccccacggggcttaagtggagcttcatgcccaaggacgacgggaagcagcactacctcatctgcaacgccgacgagtccgagcccgggagcttcaaggaccgctacatcctggaggacgtcccccacctcctcattgaggggatgatcctcgccgggtacgccatccgggccacggtgggctacatctacgtccgcggggagtaccgcagggcggcggaccggctagaacaagccatcaaggaggcccgggcccggggctacctggggaagaacctcttcggcacggacttctcctttgacctccacgtccaccggggggccggggcctacatctgcggcgaggagacggccctcatgaactccctggagggcctaagggcgaacccccgcttgaagccccccttccccgcccagtcgggcctttggggcaagcccaccaccatcaacaacgtggagaccctggcctccgtggtgcccatcatggaacggggcgccgactggttcgcccagatgggcacggagcagtccaaggggatgaagctctaccagatctccgggcccgtgaagcgccccggggtgtacgagctccccatgggcaccacgttccgcgagctcatctacgagtgggcgggtgggcccctggagcccatccaggccatcatccccggggggtcctccaccccgcctctgcccttcaccgaggaggtcctggacacccccatgagctacgagcacctccaggccaagggctccatgctggggacggggggcgtgatcctcatccccgagcgggtgagcatggtggacgccatgtggaacctcacccgcttctacgcccacgagtcctgcggcaagtgcaccccctgccgcgagggcgtggcggggttcatggtgaacctcttcgccaagatcggcaccggccagggggaggagaaggacgtggagaacctggaagccctcctccccctcattgaggggcggagcttctgccccttggcggacgcggcggtgtggccggtgaagggctcgctaaggcacttcaaggaccagtacctggccctggcgcgggagaagcgccccgtgcccaggccttccctctggaggtga

SEQ ID NO: 39397 - protein, 438 aa, Thermus thermophilus
MTGPILSGLDPRFERTLYAHVGKEGSWTLDYYLRHGGYETAKRVLKEKTPDEVIEEVKRSGLRGRGGAGFPTGLKWSFMPKDDGKQHYLICNADESEPGSFKDRYILEDVPHLLIEGMILAGYAIRATVGYIYVRGEYRRAADRLEQAIKEARARGYLGKNLFGTDFSFDLHVHRGAGAYICGEETALMNSLEGLRANPRLKPPFPAQSGLWGKPTTINNVETLASVVPIMERGADWFAQMGTEQSKGMKLYQISGPVKRPGVYELPMGTTFRELIYEWAGGPLEPIQAIIPGGSSTPPLPFTEEVLDTPMSYEHLQAKGSMLGTGGVILIPERVSMVDAMWNLTRFYAHESCGKCTPCREGVAGFMVNLFAKIGTGQGEEKDVENLEALLPLIEGRSFCPLADAAVWPVKGSLRHFKDQYLALAREKRPVPRPSLWR

SEQ ID NO: 39398 - DNA, 1535 bp, Bos taurus
  CDS (79)..(1473)
aattcgcgtctgagcctcagagctgtgaaggtgacagcgggcggtcactggcttgcctttcctccccccatccccgcgatgctggcggcacggcggctgctcggcgggtcgctccccgcgcgggtgtctgtgcgattcagcggcgacacgacagcgcccaagaaaacctcatttggctcgctgaaggacgaagaccggatcttcaccaacctgtatggccgccatgactggaggcttaaaggtgcccagagtcgaggtgactggtacaagacgaaggagattctgctgaaggggcctgactggatcctgggtgaggtcaagacgtcgggcttgcggggccgtggaggtgctggcttccccactggccttaaatggagcttcatgaataagccctcagatggcaggcccaagtatctggtggtgaacgcggatgagggggagccaggcacgtgcaaggaccgagagatcatccgccacgacccccacaagctggtggaaggctgcctagtagggggccgggccatgggcgctcgtgccgcctacatctacatccgcggggagttctacaacgaggcctccaatctgcaggtagccatccgagaggcctacgaggctggtctgattggcaagaatgcctgcggctccggctacgatttcgacgtgtttgtggtgcgtggggccggggcctacatctgcggggaggagacggcgctcatcgagtccatcgagggcaaacagggcaagccccgcctgaagccgcctttccctgcagacgtgggagtgtttggctgccctacaactgtggccaatgtggagactgtggccgtgtcccctaccatctgccgccgtgggggtgcctggtttgccagcttcggccgagagcgcaactcaggcaccaaactgttcaacatctctggccacgtcaacaacccctgcaccgtggaggaggagatgtctgtgccgctgaaggagctgattgaaaagcacgccgggggtgtcacgggtggctgggacaacctccttgctgtgatccctggcggctcgtccaccccgctgatccccaagtccgtgtgtgagacggtgctgatggacttcgacgcgctgatccaggcgcagacggggctgggcacggctgccgtgatcgtcatggaccgctcgacggacattgtgaaagccatcgcccgcctcatcgagttctacaagcatgagagctgtggccagtgtaccccgtgccgcgagggtgtggactggatgaacaaggtgatggcccgctttgtgaggggagatgcccggccggcagagatcgactctctgtgggagatcagcaagcagatcgagggccacaccatctgcgccctgggcgatggggctgcgtggcccgtgcagggcctgatccgacacttccggccggagctcgaggagcggatgcagcagtttgcccagcagcaccaggccaggcaagcagctttctgagcccacggggctggtgtccgtctgtctggatggctggacaataaagctagcgatacccactc

SEQ ID NO: 39399 - protein, 464 aa, Bos taurus
MLAARRLLGGSLPARVSVRFSGDTTAPKKTSFGSLKDEDRIFTNLYGRHDWRLKGAQSRGDWYKTKEILLKGPDWILGEVKTSGLRGRGGAGFPTGLKWSFMNKPSDGRPKYLVVNADEGEPGTCKDREIIRHDPHKLVEGCLVGGRAMGARAAYIYIRGEFYNEASNLQVAIREAYEAGLIGKNACGSGYDFDVFVVRGAGAYICGEETALIESIEGKQGKPRLKPPFPADVGVFGCPTTVANVETVAVSPTICRRGGAWFASFGRERNSGTKLFNISGHVNNPCTVEEEMSVPLKELIEKHAGGVTGGWDNLLAVIPGGSSTPLIPKSVCETVLMDFDALIQAQTGLGTAAVIVMDRSTDIVKAIARLIEFYKHESCGQCTPCREGVDWMNKVMARFVRGDARPAEIDSLWEISKQIEGHTICALGDGAAWPVQGLIRHFRPELEERMQQFAQQHQARQAAF

SEQ ID NO: 39400 - DNA, 1395 bp, Homo sapiens
  CDS (1)..(1395)
atgctggcaacacggcggctgctcggctggtcgcttcccgcgcgggtatctgtgcgtttcagcggcgacacgacagcacccaagaaaacctcatttggctcgctgaaggatgaagaccggattttcaccaacctgtacggccgccatgactggaggctgaaaggttccctgagtcgaggtgactggtacaagacaaaggagatcctgctgaaggggcccgactggatcctgggcgagatcaagacatcgggtttgaggggccgtggaggcgctggcttccccactggcctcaagtggagcttcatgaataagccctcagatggcaggcccaagtatctggtggtgaacgcagacgagggggagccgggcacctgcaaggaccgggagatcttacgccatgatcctcacaagctgctggaaggctgcctggtggggggccgggccatgggcgcccgcgctgcctatatctacatccgaggggaattctacaatgaggcctccaatctgcaggtggccatccgagaggcctatgaggcaggtctgattggcaagaatgcttgtggctctggctatgattttgacgtgtttgtggtgcgcggggctggggcctacatctgtggagaggagacagcgctcatcgagtccattgagggcaagcagggcaagccccgcctgaagccccccttccccgcagacgtgggagtgtttggctgccccacaactgtggccaacgtggagacagtggcagtgtcccccacaatctgccgccgtggaggtacctggtttgctggctttggcagagaacgcaactcaggcaccaaactattcaacatctctggccatgtcaaccacccttgcactgtggaggaggagatgtctgtgcccttgaaagaactgattgagaagcatgctgggggtgtcacgggcggctgggacaacctccttgctgtgatccctggcggctcgtctaccccactgatccccaagtctgtgtgtgagacggtgctgatggacttcgatgcgctggtgcaggcacagacaggcctgggcacagctgcggtgatcgtcatggaccgctcgacggacatcgtgaaagccatcgcccgcctcattgagttctataagcacgagagctgtggccagtgtaccccatgccgtgagggtgtggactggatgaacaaggtgatggcacgtttcgtgaggggggatgcccggccggccgagatcgactccctgtgggagatcagcaagcagatagaaggccatacgatttgtgctctgggtgacggggccgcctggcctgtgcagggtctgatccgccactttcggccggagctcgaggagcggatgcagcggtttgcccagcagcatcaggcccggcaggctgcctcttag

SEQ ID NO: 39401 - protein, 464 aa, Homo sapiens
MLATRRLLGWSLPARVSVRFSGDTTAPKKTSFGSLKDEDRIFTNLYGRHDWRLKGSLSRGDWYKTKEILLKGPDWILGEIKTSGLRGRGGAGFPTGLKWSFMNKPSDGRPKYLVVNADEGEPGTCKDREILRHDPHKLLEGCLVGGRAMGARAAYIYIRGEFYNEASNLQVAIREAYEAGLIGKNACGSGYDFDVFVVRGAGAYICGEETALIESIEGKQGKPRLKPPFPADVGVFGCPTTVANVETVAVSPTICRRGGTWFAGFGRERNSGTKLFNISGHVNHPCTVEEEMSVPLKELIEKHAGGVTGGWDNLLAVIPGGSSTPLIPKSVCETVLMDFDALVQAQTGLGTAAVIVMDRSTDIVKAIARLIEFYKHESCGQCTPCREGVDWMNKVMARFVRGDARPAEIDSLWEISKQIEGHTICALGDGAAWPVQGLIRHFRPELEERMQRFAQQHQARQAAS

SEQ ID NO: 39402 - DNA, 1395 bp, Macaca fascicularis
  CDS (1)..(1395)
atgctggcagcacggcggctgctcggcgggtcgctcccctctcgggtatctgtgcgtttcagcggcgacacgacagcacccaagaaaacctcatttggctcgctgaaggatgaagaccggatcttcaccaacctgtacggccgccatgactggaggctgaaaggtgccctgagtcgaggtgactggtacaagacaaaagagatcctgctgaaggggcccgattggatcctgggtgagatcaagacatcgggtttgcggggccgtggaggcgctggcttccccactggcctcaagtggagcttcatgaataagccctcagatggcaggcccaagtatctggtggtgaacgcagacgagggggagccaggcacctgcaaggaccgggagatcatacgccatgatcctcacaagctggtggaaggctgcctggttgggggccgggccatgggtgcccgcgccgcctatatctacatccgaggggaattctacaatgaggcctccaatctgcaggtggccatccgagaggcctatgaggcaggtctgattggcaagaatgcctgtggatctggctatgattttgacgtgtttgtggtgcgcggggctggggcctacatctgtggagaggagacagcgctcatcgagtccatcgagggcaagcagggcaagccccgcctgaagccccccttccctgcagacgtgggagtgtttggctgccccacaactgtggccaacgtggagacagtggcagtgtcccccaccatctgccgccgtgggggcacctggtttgctggctttggcagagagcgcaactcaggcaccaaactattcaacatctctggccatgtcaaccacccttgcactgtggaggaggagatgtctgtgcccttgaaagaactgattgagaagcatgctgggggtgtcacgggcggctgggacaacctccttgctgtgattcctggtggctcgtctactccactgatccccaagtctgtgtgtgagacggtgctgatggacttcgacgcgctggtgcaggcacagacaggcttgggcacagctgcggtgatcgtcatggaccgctcgacggacatcgtgaaagccatcgcccgcctcattgagttctataagtacgagagctgtggccagtgcaccccatgccgcgagggtgtggactggatgaacaaggtgatggctcgtttcgtgaggggggacgcccggccggccgagattgactccctgtgggagatcagcaagcagatagaaggccacaccatttgtgctctgggtgacggggctgcctggcctgtgcagggtctgatccgccactttcggccggagcttgaggaacggatgcagcggtttgcccagcagcatcaggcccggcaggctgcctcttag

SEQ ID NO: 39403 - protein, 464 aa, Macaca fascicularis
MLAARRLLGGSLPSRVSVRFSGDTTAPKKTSFGSLKDEDRIFTNLYGRHDWRLKGALSRGDWYKTKEILLKGPDWILGEIKTSGLRGRGGAGFPTGLKWSFMNKPSDGRPKYLVVNADEGEPGTCKDREIIRHDPHKLVEGCLVGGRAMGARAAYIYIRGEFYNEASNLQVAIREAYEAGLIGKNACGSGYDFDVFVVRGAGAYICGEETALIESIEGKQGKPRLKPPFPADVGVFGCPTTVANVETVAVSPTICRRGGTWFAGFGRERNSGTKLFNISGHVNHPCTVEEEMSVPLKELIEKHAGGVTGGWDNLLAVIPGGSSTPLIPKSVCETVLMDFDALVQAQTGLGTAAVIVMDRSTDIVKAIARLIEFYKYESCGQCTPCREGVDWMNKVMARFVRGDARPAEIDSLWEISKQIEGHTICALGDGAAWPVQGLIRHFRPELEERMQRFAQQHQARQAAS

SEQ ID NO: 39404 - DNA, 1395 bp, Mus musculus
  CDS (1)..(1395)
atgctagcggcacggcattttctcggcgggttggttcccgtgcgggtatctgtgcgtttcagcagcggcacgacagcacccaagaaaacctcatttggctcactgaaggatgaagaccggatctttaccaacctgtatgggcgccatgactggaggctgaaaggtgccctgagacggggtgactggtacaagacaaaggagatcctgctgaaggggcctgactggatcttgggtgagatgaagacatcaggtttacggggccgtggtggtgctggcttccccactggcctcaagtggagcttcatgaataagccctcagatggcaggcccaagtatctggtggtgaatgctgacgagggagagccaggcacctgtaaggaccgagagatcatgcgtcatgaccctcacaagctggtggaaggctgccttgtgggaggccgggccatgggagcccgggccgcctatatctacatccgaggggaattctacaacgaggcctccaatttgcaggtagctatccgagaggcctatgaagcaggtctgattggcaagaatgcttgtggctccgactatgattttgatgtgtttgtggtgcgtggggctggggcctacatctgtggagaagagacggcacttattgaatccattgaaggcaagcagggaaagccacgcctgaagccgccctttccagcagatgtgggagtgtttggatgccccacaactgtggccaatgtggagacagtggctgtgtcccccaccatttgccgtcgtgggggcacctggtttgctggctttggccgagaacgcaattcaggtaccaaattgtttaacatctctggccatgtcaaccacccctgcactgtggaggaagagatgtctgtgccactgaaagagctgattgagaaacatgctggtggtgtcacaggtggctgggacaacctccttgctgtgattcctggtggctcatctactccactgattcccaaatctgtgtgtgagaccgtgctaatggacttcgatgcactggtgcaggctcagacaggcctgggcacggctgcagttattgttatggatcgctcgacagacattgtgaaagccatcgctcgtctcattgagttctacaagcatgagagctgtggccagtgtaccccgtgccgtgagggcgttgactggatgaacaaggtgatggcccgatttgtgaagggagatgcccggccagctgagattgactccctgtgggagatcagcaagcagatagaaggccacaccatttgtgctctgggtgatggggctgcctggccagtacagggtctgatccgacatttcaggccagagcttgaggatcggatgcaacggtttgcccagcagcaccgggcctggcaggcagcctcgtga

SEQ ID NO: 39405 - protein, 464 aa, Mus musculus
MLAARHFLGGLVPVRVSVRFSSGTTAPKKTSFGSLKDEDRIFTNLYGRHDWRLKGALRRGDWYKTKEILLKGPDWILGEMKTSGLRGRGGAGFPTGLKWSFMNKPSDGRPKYLVVNADEGEPGTCKDREIMRHDPHKLVEGCLVGGRAMGARAAYIYIRGEFYNEASNLQVAIREAYEAGLIGKNACGSDYDFDVFVVRGAGAYICGEETALIESIEGKQGKPRLKPPFPADVGVFGCPTTVANVETVAVSPTICRRGGTWFAGFGRERNSGTKLFNISGHVNHPCTVEEEMSVPLKELIEKHAGGVTGGWDNLLAVIPGGSSTPLIPKSVCETVLMDFDALVQAQTGLGTAAVIVMDRSTDIVKAIARLIEFYKHESCGQCTPCREGVDWMNKVMARFVKGDARPAEIDSLWEISKQIEGHTICALGDGAAWPVQGLIRHFRPELEDRMQRFAQQHRAWQAAS

SEQ ID NO: 39406 - DNA, 1482 bp, Neurospora crassa
  CDS (1)..(1482)
atgctttcacgtaccgcggcgcccaccaaggcgtcggccaggaccctctcgcgcgccgccgccgagcaatgccgcacctttgcgaccgtccaagatggctctgccaatcccgtacgccactacggcggtctcaaggaccaggatcgcatcttccagaacctctacggccgttacccgcccgacctgaagcatgcgaaaaagatgggcgactggcacaagaccaaggagattctcctcaagggtcacgactggatcattggcgaggtcaaggcctctggtcttagaggccgtggtggagctggtttcccctcgggactcaaatggtcgttcatgaacttcaaggattgggacaaggacgacaagccccgttatctggtcgtcaatgccgatgagggtgagccgggtacctgcaaggaccgcgagatcatgcgcaaggatccccacaaacttgtcgaaggctgcttggtcgccggccgtgccatgaacgccaccgctgcctacatctacatccgcggcgagttcatccaggaggctgccatcttacagaacgccatcaacgaggcttatgctgatgggcttatcggaaagaacgcctgcggctcaggctacgatttcgatgtctacctccaccgcggtgccggtgcctatgtgtgcggcgaggagaccagcttgatcgagtctcttgagggcaagcccggaaaaccccgtctgaagcctcctttccctgccgccgtcggtctgttcggttgcccttcgactgttgccaacgtcgagactgtcgctgtcgctcccaccatctgccgccgcggtggcaactggtttgccggcttcggccgtgagcgcaaccagggtaccaagcttttctgcatcagcggccacgtcaacaacccctgcactgtcgaggaggagatgagcatcccgatgcgtgagcttattgataagcactgcggcggtgtccgcggtggctgggacaaccttttggccgtcattcccggtggatcctcaacacctatcctgcccaagcacatctgcgatacccagttgatggacttcgatgcgctcaaggacagccagtccggtctgggtaccgccgcccttatcgtcatggacaagagcactgatgtcgtccgcgccatttcccgactaagccacttctaccgccatgaatcctgcggccagtgcacaccttgccgtgaaggcagcaagtggactgagcagattatgaagcgtttcgagaagggtcagggccgcgagagggagattgatatgctccaggagttgactaagcaggttgaaggtcacactatttgcgctctcggcgaagcttttgcctggcctattcaaggcctcatccgccacttccggcccgagctggaggcccgtatacggaagtttgcccaggagaacggtggtgaggctcttgccggtggctggcaacgcaatgccagacaacagggcaagctcgtctcgcctggcatgtaa

SEQ ID NO: 39407 - protein, 493 aa, Neurospora crassa
MLSRTAAPTKASARTLSRAAAEQCRTFATVQDGSANPVRHYGGLKDQDRIFQNLYGRYPPDLKHAKKMGDWHKTKEILLKGHDWIIGEVKASGLRGRGGAGFPSGLKWSFMNFKDWDKDDKPRYLVVNADEGEPGTCKDREIMRKDPHKLVEGCLVAGRAMNATAAYIYIRGEFIQEAAILQNAINEAYADGLIGKNACGSGYDFDVYLHRGAGAYVCGEETSLIESLEGKPGKPRLKPPFPAAVGLFGCPSTVANVETVAVAPTICRRGGNWFAGFGRERNQGTKLFCISGHVNNPCTVEEEMSIPMRELIDKHCGGVRGGWDNLLAVIPGGSSTPILPKHICDTQLMDFDALKDSQSGLGTAALIVMDKSTDVVRAISRLSHFYRHESCGQCTPCREGSKWTEQIMKRFEKGQGREREIDMLQELTKQVEGHTICALGEAFAWPIQGLIRHFRPELEARIRKFAQENGGEALAGGWQRNARQQGKLVSPGM

SEQ ID NO: 39408 - DNA, 1305 bp, Rhizobium meliloti
  CDS (1)..(1305): transl_table=11
atgcttagagatgaagatcgcatctttaccaacatctacggcctcaaggacaagtcgctgaggggcgcgatggcgcgcggccattgggacggcacgaagcagttcctcgaaaagggccgcgactggatcatcaacgaggtgaaggcctccggccttcgcggccgcggcggcgccggcttcccgaccggtctcaaatggtccttcatgccgaaggaaagcgacgggcgcccccattatctcgtcgtcaatgccgacgagtccgaacccggtacctgcaaggaccgcgacatcatgcgccacgatccgcacacgctgatcgaaggctgcgtgattgcgagcttcgccatgggtgcgcatgccgcctatatctacgtccgcggcgagttcatccgcgagcgtgaagcgctgcaggcggcgatcgacgaatgctatgaatacggcctgctcggcaagaacaacaagctcggctacgacatcgacatttacgtgcatcacggtgccggcgcctatatctgcggcgaggagacggcgctgctcgaaagcctcgaaggcaagaaaggccagccgcgcctgaagccgcctttcccggcgaatatgggcctttatggctgcccgacgacggtcaacaatgtcgagtcgattgcggtgacgccgaccatcctgcgccgcggcgccggctggtacacgagcttcggccgccccaacaaccacggcaccaagctctattcggtttccggccacgtcaatcgcccttgcacggtcgaggacgcgatgtcgatcccgttccatgagctgatcgagaagcactgcggcggcattcgcggcggctgggacaatctgctggcggtcatccccggcggctcttcggtcccctgcgtgcccggcgcgcagatgaaggacgcgatcatggactatgacggcctgcgcgagctcggctcgggcctcggcacggctgccgtcatcgtcatggacaagtcgaccgacatcatcaaggcgatctggcggctgtcggccttctacaagcacgagagctgcggccagtgcacgccctgccgcgaaggcaccggttggatgatgcgcgtcatggagcgcatggtgcagggccgcgcccagaagcgcgagatcgacatgctcttcgacgtgacgaagcaggtcgagggccacacgatctgcgcgctcggcgatgcggcggcatggccgatccagggccttatcaagcatttccgtccggaaatggagaagcggatcgacgaatacacgcgcaatgcgacctcgcatggcgccgtgctggaggcggcggagtaa

SEQ ID NO: 39409 - protein, 434 aa, Rhizobium meliloti
MLRDEDRIFTNIYGLKDKSLRGAMARGHWDGTKQFLEKGRDWIINEVKASGLRGRGGAGFPTGLKWSFMPKESDGRPHYLVVNADESEPGTCKDRDIMRHDPHTLIEGCVIASFAMGAHAAYIYVRGEFIREREALQAAIDECYEYGLLGKNNKLGYDIDIYVHHGAGAYICGEETALLESLEGKKGQPRLKPPFPANMGLYGCPTTVNNVESIAVTPTILRRGAGWYTSFGRPNNHGTKLYSVSGHVNRPCTVEDAMSIPFHELIEKHCGGIRGGWDNLLAVIPGGSSVPCVPGAQMKDAIMDYDGLRELGSGLGTAAVIVMDKSTDIIKAIWRLSAFYKHESCGQCTPCREGTGWMMRVMERMVQGRAQKREIDMLFDVTKQVEGHTICALGDAAAWPIQGLIKHFRPEMEKRIDEYTRNATSHGAVLEAAE

SEQ ID NO: 39410 - DNA, 1266 bp, Rhizobium meliloti
  CDS (1)..(1266): transl_table=11
atgttcgagcctgtcctgctcaggaatgtcgatgtgccggacggtcatctgctgtcgacgtacgaggccggcggcggctaccgggcgctcaggaaggcgctcggcgaatatacgcccgacgagatcgtcgagctcgtcaaggagtccaacctgcgcggccgcgggggtgccgggttcccgacgggcatgaagtggagcttcgtgccgaaagcggccggcaagccgaaatacctctgctgcaatgccgatgaaggggaacccggcaccttcaaggaccgcatcatcatggagcgtgacccgcatcagctcatcgaggggctggcggtcagcgcctatgcaatcggagccgagacggcttacgtctacattcgcggagaatatgtgacggctatacgccgcatggaacaggcgatcgccgaggcacatgaaaacggctatctgggcatcggcattcttggctcgggcttcaatttcatggtccacatccatcgcggtgccggcgcctatatctgcggcgaggagaccgcaatgctcgagtcactcgagggcaagcgagcgcagccgcgactgaagccgccgtttccggccgtggccgggctctatgccagccccactgtcatcaacaatgtcgagacgcttgcctgcgtgccgcatatcgtgatgcgcggatcggcatggttccgcggcatagggccggacaggagccccggcccgaaactctactgcctcagcggtcaggttcgcaaacccggcctctatgagctgccgatgggcatatcgctgcgggagctcgtcgaggagcacgccggcggacccctgccggggcgaaaggtcaaggcggtgattcccggtggggtatcggcgccggttatcccggagggcgagctcgaggtgggcatggatttcgactcgctcactgccgccggttcgatgctcggctcggcaggcgtggtcgtgatcgacgactcgacctgcatggtcaagctcgccacgcggatcatcgagttcttccaccatgagtcctgcggcaagtgcacgccatgccgggaaggattggactggactgtgaaagtcctgcggcgcatcgaggcaggcgagggtgaaaccggcgacctggagcagttggagatgctctgcaagggcattttcggcaacacgttttgtgccctgggcgacggcgcggccatgggattgcgggccgcgctcaagcatttccgcgcggagttcgtcgcccacatcgaagagcggaggtgccctttccactga

SEQ ID NO: 39411 - protein, 421 aa, Rhizobium meliloti
MFEPVLLRNVDVPDGHLLSTYEAGGGYRALRKALGEYTPDEIVELVKESNLRGRGGAGFPTGMKWSFVPKAAGKPKYLCCNADEGEPGTFKDRIIMERDPHQLIEGLAVSAYAIGAETAYVYIRGEYVTAIRRMEQAIAEAHENGYLGIGILGSGFNFMVHIHRGAGAYICGEETAMLESLEGKRAQPRLKPPFPAVAGLYASPTVINNVETLACVPHIVMRGSAWFRGIGPDRSPGPKLYCLSGQVRKPGLYELPMGISLRELVEEHAGGPLPGRKVKAVIPGGVSAPVIPEGELEVGMDFDSLTAAGSMLGSAGVVVIDDSTCMVKLATRIIEFFHHESCGKCTPCREGLDWTVKVLRRIEAGEGETGDLEQLEMLCKGIFGNTFCALGDGAAMGLRAALKHFRAEFVAHIEERRCPFH

SEQ ID NO: 39412 - DNA, 1281 bp, Aquifex aeolicus
  CDS (1)..(1281): transl_table=11
atgagatcctatcccgctatacctaggatttacgctgaaactacccttaatatgctcctcaagagggctaaaaagcccagagttcattccatagatgagtacttaaaagatgggggataccaggctttagaaaaagccctgaacatgtcccccgaggaaatcatagactgggttgacaaaagtacgctgcggggtagaggaggagcaggattcccaaccgggaagaagtggaaattcgcggttcagaaccccggacccaggtactttatatgcaacgcggacgagtcagaaccgggaacctttaaggacaggataataatagagagggatccccacctcctgatagagggaataatcatatcctcctatgcgattggggcaaacgaagcatacatatacataaggggagagtaccccgcgggctattacatactgagggatgcaatagaggaggcgaaaaagaagggatttttaggaaagaacatcttgggttcgggatttgaccttgagatatacgtggcaaggggtgcgggtgcctacatatgcggtgaggaaaccgctctgatagaaagccttgagggtaaaaggggacacccgaggttaaaacccccataccccgtccagaagggactctggggaaaaccgacggtagtgaacaacgtagaaaccatagctaacgttccctttataatttccatgggctgggaggagtacaggtacataggcccgagtgactacgctggaccaaaactctttcccgtaagcggtaaggtgaaaaaacccggggtttacgagcttcccatgaacacaacactcagggaagtcatattcaagtatgcgggcggaaccctcggaaacaaaaaggtgaaggctgtattttccggggctcttgactgcttttcctcggaagaactcgacattcccatggactactctcctctcgggtttggcggaacgggaacggttatagtgctcacggaagaggacgacatagtggaagcagctctaaaaattgcagagttctacgaacacgaaacctgcggacagtgcaccccttgcagggtagggtgctacgaacaggcaaacctccttgagaaaatatacaagggtgaagctacagagcaggactgggaaggttttgactttgtaaacaggaacattcaacccacttctatatgcggtctcggggctgttgcgggaaggcttatcagacaaacacttgagaaattcccggaggagtgggaaaagtacagaaagaaatctgcttcccttcccctttaa

SEQ ID NO: 39413 - protein, 426 aa, Aquifex aeolicus
MRSYPAIPRIYAETTLNMLLKRAKKPRVHSIDEYLKDGGYQALEKALNMSPEEIIDWVDKSTLRGRGGAGFPTGKKWKFAVQNPGPRYFICNADESEPGTFKDRIIIERDPHLLIEGIIISSYAIGANEAYIYIRGEYPAGYYILRDAIEEAKKKGFLGKNILGSGFDLEIYVARGAGAYICGEETALIESLEGKRGHPRLKPPYPVQKGLWGKPTVVNNVETIANVPFIISMGWEEYRYIGPSDYAGPKLFPVSGKVKKPGVYELPMNTTLREVIFKYAGGTLGNKKVKAVFSGALDCFSSEELDIPMDYSPLGFGGTGTVIVLTEEDDIVEAALKIAEFYEHETCGQCTPCRVGCYEQANLLEKIYKGEATEQDWEGFDFVNRNIQPTSICGLGAVAGRLIRQTLEKFPEEWEKYRKKSASLPL

SEQ ID NO: 39414 - DNA, 1335 bp, Buchnera aphidicola subsp
  CDS (1)..(1335): transl_table=11
atgaatagaattttacgaatttcagaaacgcaccctttaacttggcggttaagagatgatcaaaaaactgtttggattaaagaatattgtgataaaaatggttatttatctttaaagaaagcattaaaagaaatgcttccagaagatgttattaatatagtaaaagaatctggtttaaaaggaagaggaggtgcaggattttctactggattaaaatggagtctaatgtctcaaaaccattcttatacaagagaacgtggttacttaatatgtaatgctgatgaaatggaacctggtacgtataaagatagattattaattgaaaagattcctcatcaattaattgaaggaataatattgtccgcatacgcattaaacgtttctcgtgcttatatttttttaagaggagaatatgttcaagctgagcatattttaaaacaatctatacaggaagcaattaattttggttttattggattaaatatcttaggaagcaattttaatatcgagttagttttacatactggggctggacgatatatttgtggagaagaaactgctttaattaattctttagaaggtcgtagagctaatcctagatcgaagccgccatttccagcagtatttggtttgtggggaaaacctacttgtgtgaataatgttgaaacactgtctaatgttccatgtattatattgaacggtgtaagttggtataaaaatttatctaaaagttctgatacaggtactaaattaatggggttctcaggaaatgtaagaaatcccggtgtttgggaattaccttttggcaccactgctcgtgaaattttagaagattatgctcatggaatgaagtccggtttttctttaaaagcttggcagccaggtggcgcgggaacagatttcttgcttgaagaacatttagacttgccaatggattttaaaaatatcagtcaggctggaagtcgtttaggaactgctctttctatggctgttgataataaaactagcatggtttctcttgtatataatatagaaaaatttttttcacgagaatcatgtggtttgtgtacaccatgtcgagatgggttgccttggattgtaaaaatattaaaaagtttagaacaaaataaaggtcataaaaatgatgtgaaaaacttagaaaaactatgctctcatttaagtccaggaaaaacattttgtgctcatgcgcccggggcaatagaaccattgcaaagtgctattaaatattttcgatctgaatttgaatctggaatcaatataagaaaaagagatttaaataaaaaaattattgggattcaatctaattgtatttaa

SEQ ID NO: 39415 - protein, 444 aa, Buchnera aphidicola subsp
MNRILRISETHPLTWRLRDDQKTVWIKEYCDKNGYLSLKKALKEMLPEDVINIVKESGLKGRGGAGFSTGLKWSLMSQNHSYTRERGYLICNADEMEPGTYKDRLLIEKIPHQLIEGIILSAYALNVSRAYIFLRGEYVQAEHILKQSIQEAINFGFIGLNILGSNFNIELVLHTGAGRYICGEETALINSLEGRRANPRSKPPFPAVFGLWGKPTCVNNVETLSNVPCIILNGVSWYKNLSKSSDTGTKLMGFSGNVRNPGVWELPFGTTAREILEDYAHGMKSGFSLKAWQPGGAGTDFLLEEHLDLPMDFKNISQAGSRLGTALSMAVDNKTSMVSLVYNIEKFFSRESCGLCTPCRDGLPWIVKILKSLEQNKGHKNDVKNLEKLCSHLSPGKTFCAHAPGAIEPLQSAIKYFRSEFESGINIRKRDLNKKIIGIQSNCI

SEQ ID NO: 39416 - DNA, 1344 bp, Buchnera aphidicola subsp
  CDS (1)..(1344): transl_table=11
atgaataatattatccccactgaggagacacatccgttaacatggagattaagaaatgatcgagaaacagtttggattgaagaatattgtaaaaaaaatggttattttagtttaaaaaaagcattaaaaactatgtgtccagaagatgttgtacatttgataaaagaatcaggtttaaaaggaagaggaggagctggtttttctacaggtttaaaatggagtttaatgtctaaagacaatagctctaaaattcgttatttattatgcaacgctgatgaaatggaacctggaacttataaagatagatttttaatggaaaatatacctcatcaattaattgaaggaatgttattatcagcgtttgccttaaatgtttctcgtggttatatttttttacggggtgaatatattaaagctgaatatattttaaaaaaatctatacaagaagcaattaattttggttttattggttctaatattttaaatagtggttttaattttgaactttttttacatactggagctggtcgttatatttgtggcgaagaaactgctttaattaattcgctagagggacgtagagctaatccaagagctaagccaccttttcctgcagtatttgggctatggggaaaacctacttgtgttaacaatgttgaaacattatctaatgttccttctattgtattacatggtgttaattggtataaaaaactatctaaaagtactgatactactggtactaagttaatgggattttcaggaaaagtaaataatcctggtgtttgggaattaccttttggaactactgcacgtgaaattttagaagattatgcacgtggaatgaaatcaggtttatttttaaaatcttggcaacctggtggagcaggaacagattttctcattgaaaaacatttagatttaccgatggattttacaagtattgcaaaagccggaagtcgtttaggaacagctattgctatggctgtagataataaaactaatatgatttctttagtttgcaatatagaaaagtttttttctcgtgaatcatgtggtttatgtacaccatgcagagaaggattaccctggattgtaaagatattagaaagtttagagaaaaaagaaggtcataaaaatgatgtcaaaaatttagagaggttatgtttagatttaagtccaggaaaaacattttgtgctcatgcacctggtgcagtagaacctttacaaagtgctataaaatattttcgtttagagtttgaagctggtattagcataaaaaaattaaaaaaatgttcaaatattcttggaattcaatcaaatgaatttacttcaaaagtttaa

SEQ ID NO: 39417 - protein, 447 aa, Buchnera aphidicola subsp
MNNIIPTEETHPLTWRLRNDRETVWIEEYCKKNGYFSLKKALKTMCPEDVVHLIKESGLKGRGGAGFSTGLKWSLMSKDNSSKIRYLLCNADEMEPGTYKDRFLMENIPHQLIEGMLLSAFALNVSRGYIFLRGEYIKAEYILKKSIQEAINFGFIGSNILNSGFNFELFLHTGAGRYICGEETALINSLEGRRANPRAKPPFPAVFGLWGKPTCVNNVETLSNVPSIVLHGVNWYKKLSKSTDTTGTKLMGFSGKVNNPGVWELPFGTTAREILEDYARGMKSGLFLKSWQPGGAGTDFLIEKHLDLPMDFTSIAKAGSRLGTAIAMAVDNKTNMISLVCNIEKFFSRESCGLCTPCREGLPWIVKILESLEKKEGHKNDVKNLERLCLDLSPGKTFCAHAPGAVEPLQSAIKYFRLEFEAGISIKKLKKCSNILGIQSNEFTSKV

SEQ ID NO: 39418 - DNA, 1335 bp, Buchnera aphidicola subsp
  CDS (1)..(1335): transl_table=11
atgaaaaaactattatcgcgaacttcagaaacacatccattaacgtggcgtttaaatgcacaacaagatacggtttggattaaagaatataaacgtaaaaatggatatcgtgcttttgaaaaagtagttaatcatatgacctctgaggatgtgattgatttaataaaacaatcaggacttaagggacgtggaggtgcagggtttttaacaggtttaaagtggagtttaatgccacctttaaatgatgaatatggttatactagatatttgttatgtaatgcggatgaaatggaaccgggtacgtataaggatagatttttaatggaaaaggttcctcatcaattgttagaaggaatattaataagtgcatttgctttgagtgttactaaaagttatatctttttaagaggggaatatgttaatactgagcgtattctaaaacaatcaattattgaagctactaattatggttatttaggtaaaaatgtttgtggatctaatctaacctttgaaatttttatacatactggagcaggtcgttatatttgcggtgaagaaactgctttaattaattctttagaaggtcgtagagctaatcctagatttaaacctccatttcctgcttatgttggtctttggggaaagcctacatgtgttaataatgttgaaactttgtctaatgttccagcaatttttctaaatggtgttaagtggtataaaggtttgtctaaaagtcttgatactggtacaaagatgatgggtttttcaggatcagtaaaatttcctggaatttgggaattaccttttggaataacagcgcgcgaaatatttgaaaggtatgctggaggtatgaaaaataataaaaagctaaaagtgtggcaacctggaggtgcaagtacaagttttttgattgataaacatttagatgtacctatggattttgttaatattaaaaaagttggtagcagattgggaactgcattagctatggctgtagatgattctgtaagtatagtatctttagtacgaaacatagaagaatttttttctagagaatcatgtggattttgcacgccatgtagggatggtttaccatggattgttaaaattttaaaagttttagaacaaaaaataggagttcctgaagatattgaaatattagaacaattgtgtgagcaattaggtcctggacgtactttttgcgcacacgctccgggagcaatagagcccttaaagagtgctttaaaatattttagattagaattcgaattgtgtgtcaattccaattctacaataaaatgtaaatatattcatagttctatatcagaatattag

SEQ ID NO: 39419 - protein, 444 aa, Buchnera aphidicola subsp
MKKLLSRTSETHPLTWRLNAQQDTVWIKEYKRKNGYRAFEKVVNHMTSEDVIDLIKQSGLKGRGGAGFLTGLKWSLMPPLNDEYGYTRYLLCNADEMEPGTYKDRFLMEKVPHQLLEGILISAFALSVTKSYIFLRGEYVNTERILKQSIIEATNYGYLGKNVCGSNLTFEIFIHTGAGRYICGEETALINSLEGRRANPRFKPPFPAYVGLWGKPTCVNNVETLSNVPAIFLNGVKWYKGLSKSLDTGTKMMGFSGSVKFPGIWELPFGITAREIFERYAGGMKNNKKLKVWQPGGASTSFLIDKHLDVPMDFVNIKKVGSRLGTALAMAVDDSVSIVSLVRNIEEFFSRESCGFCTPCRDGLPWIVKILKVLEQKIGVPEDIEILEQLCEQLGPGRTFCAHAPGAIEPLKSALKYFRLEFELCVNSNSTIKCKYIHSSISEY

SEQ ID NO: 39420 - DNA, 1338 bp, Mycobacterium bovis
  CDS (1)..(1338): transl_table=11
atgaccacgcaggccaccccgttgaccccggtgatcagccgccactgggacgacccggagtcgtggaccctggccacttatcaacgccacgatcgctatcggggctatcaggcgttgcagaaagccctgacgatgccgcccgacgacgtgatcagcatcgtcaaggattccgggttacgcggacgcggcggcgcgggctttgccaccgggaccaagtggtcgttcatcccgcagggcgacaccggcgccgcggccaagccgcactacctggtggtcaacgccgacgagtccgaacccggtacgtgcaaagacattccgttgatgctggcgacgccacatgtgctcatcgaaggcgtcatcatcgccgcctacgcgatccgcgcccatcacgcgttcgtctacgtacgcggtgaggtggtgccggtattgcgccggctgcacaacgcggtggccgaggcctatgccgccggcttcctaggccgcaacatcggaggttccggattcgatctggagctggtggtacacgccggcgcgggcgcctacatctgcggcgaggagaccgccctgctcgactcgctggaaggccggcgcggccagccgcggctgcggccccccttccccgcggtggccggtctgtatggctgcccgaccgtgatcaacaacgtcgaaacgatcgccagtgtcccatcgatcatcctgggcggcatcgactggttccggtcgatgggcagcgagaaatcgcctggcttcaccctgtattcgctgtccggccacgtcacccgccccggccagtacgaggcgccgctgggcattacgctgcgcgagttgctcgactacgcaggcggggtgcgcgccgggcaccggctgaagttctggacaccgggcggctcgtcgaccccgctgctcaccgacgagcatctggatgtgccgctggactacgagggtgtgggtgcggccggctcgatgctggggaccaaggcgctggagatcttcgacgagaccacctgcgtggtgcgcgcggtgcgccgctggaccgagttctacaagcacgaatcgtgtgggaaatgcacgccgtgccgggagggcaccttctggctggataagatctacgagcggctggaaaccggccggggtagccatgaagacattgacaaactgttggacatttccgattccatcttgggaaagtcgttctgcgcgttgggcgacggtgccgcgagtccggtgatgtcgtcgatcaagcacttccgcgacgagtacctggcccacgtcgaaggaggcggttgcccattcgacccccgagactccatgctcgtcgcgaacggagtggacgcgtga

SEQ ID NO: 39421 - protein, 445 aa, Mycobacterium bovis
MTTQATPLTPVISRHWDDPESWTLATYQRHDRYRGYQALQKALTMPPDDVISIVKDSGLRGRGGAGFATGTKWSFIPQGDTGAAAKPHYLVVNADESEPGTCKDIPLMLATPHVLIEGVIIAAYAIRAHHAFVYVRGEVVPVLRRLHNAVAEAYAAGFLGRNIGGSGFDLELVVHAGAGAYICGEETALLDSLEGRRGQPRLRPPFPAVAGLYGCPTVINNVETIASVPSIILGGIDWFRSMGSEKSPGFTLYSLSGHVTRPGQYEAPLGITLRELLDYAGGVRAGHRLKFWTPGGSSTPLLTDEHLDVPLDYEGVGAAGSMLGTKALEIFDETTCVVRAVRRWTEFYKHESCGKCTPCREGTFWLDKIYERLETGRGSHEDIDKLLDISDSILGKSFCALGDGAASPVMSSIKHFRDEYLAHVEGGGCPFDPRDSMLVANGVDA

SEQ ID NO: 39422 - DNA, 1296 bp, Rhodobacter capsulatus
  CDS (1)..(1296): transl_table=11
atgctcaacgatcacgatcgcatcttcaccaacatctacgggatgcacgaccgctcgctgaagggcgcgatggcgcgtggtcactgggatggcacggcggcgatccttggcaatggccgcgactggatcatcgagcaggtcaaggcctcggggctgcgcggccgcggcggtgcgggctttccgaccgggctcaagtggtccttcatgccgaagcaatccgacgggcgcccctcgtttctggtgatcaacgccgatgaatccgagccgggcacctgcaaggaccgcgaaatcatgcgccacgatccgcatacgctgatcgaaggcgcgctgatcgccggtttcgccatgggcgcgcgggcggcctatatctatattcgcggcgaatatgtccgcgaaaaggaggccctgcaggccgccatcgacgaatgctacgaggccgggctgatcggcaagaacgcctgccgctcggactatgatttcgacgtctatctgcaccacggtgcgggcgcctatatctgcggcgaggaaaccgcgcttctggaaagccttgagggcaagaaggggatgccgcggatgaaaccgccgttcccggcgggctcggggctttatggctgcccgacgacggtgaacaacgtcgaatccatcgccgtcgtgccgacgatcctgcgccgtggtggtgcctggttcgcgggcatcgggcggccgaacaacaccggcgtcaagctgttcgcgatgtcggggcacgtcaacaccccctgcgtcgtcgaagaagccatgtcgatcagcatgaaggagctgatcgaaaagcacggcggcggcgtccgcggcggctggaagaacctgaaagcggtgatccccggcggcgcctcctgcccggtcattccggcgcatctgtgcgaagacgcgatcatggattacgacggcatgcgcgaaaagcagtcgtccttcggcaccgcctgtctgatcgtgatggatcagcagaccgacatcatcaaggcgatcgcgcggctgtcgaaattcttcaagcacgagagctgcggccagtgcacgccctgccgcgaggggacctcgtggatgtggcgggtgatggagcgactggtcaccggcgaggccgaggtcgaggagatcgacatgctgttttcggtgacgaaacaggtcgagggccacacgatctgcgccctgggcgatgccgccgcctggccgatccaggggctgatccggcattaccgcgaggagatcgaggaccggatcaaggcgcgcaagaccggccgcatgggcgcgatggcggcggagtga

SEQ ID NO: 39423 - protein, 431 aa, Rhodobacter capsulatus
MLNDHDRIFTNIYGMHDRSLKGAMARGHWDGTAAILGNGRDWIIEQVKASGLRGRGGAGFPTGLKWSFMPKQSDGRPSFLVINADESEPGTCKDREIMRHDPHTLIEGALIAGFAMGARAAYIYIRGEYVREKEALQAAIDECYEAGLIGKNACRSDYDFDVYLHHGAGAYICGEETALLESLEGKKGMPRMKPPFPAGSGLYGCPTTVNNVESIAVVPTILRRGGAWFAGIGRPNNTGVKLFAMSGHVNTPCVVEEAMSISMKELIEKHGGGVRGGWKNLKAVIPGGASCPVIPAHLCEDAIMDYDGMREKQSSFGTACLIVMDQQTDIIKAIARLSKFFKHESCGQCTPCREGTSWMWRVMERLVTGEAEVEEIDMLFSVTKQVEGHTICALGDAAAWPIQGLIRHYREEIEDRIKARKTGRMGAMAAE

SEQ ID NO: 39424 - DNA, 1266 bp, Rickettsia conorii
  CDS (1)..(1266): transl_table=11
atgctaaaagaagaagacaaaatttttactaacctgcatgggcagcaaagccatgatttgaaatctagcaagaagcgaggcgattgggagaatactaaagctttgcttgataaaggtagagatttcatcgttgaagaggttaagaaatcagggcttagagggcgaggaggtgccggattttctaccggtatgaaatggtcatttatgcctaaaaatttagagaagtcttgctatttagtagtaaatgccgacgagtctgagcctggcacttgtaaggatcgtgatatattaaggtttgagccgcacaaattaatagaaggttgcttgcttgcaagctttgctataggagcgaataattgttatatctatattagaggtgagttttataatgaagcctctaatattcagcgtgccttagatgaagcctataaagaagggttaataggaaagaattcttgcggttcgggctttgattgtaatatttatttacatcgtggggcgggtgcttatatttgtggcgaagaaacggcattgcttgaaagcttagagggcaaaaaaggtatgcctcgtttaaagccgccttttcctgccggctttgggttatatggctgtccgactactataaataatgttgagtctatcgcagtagtgccaaccattttaagacgaggagctagttggtttgctggtataggtaaacctaacaatacgggcactaagattttctgcatatcagggcatgttaacaagccttgtaatgttgaggaagcaatgggcatttcgttaaaagaattgattgagaaatatgcgggtggtgttcgtggtggatgggataatcttaaagccataatcccgggcggttcttccgtgcctttacttcctaagtcattatgtgaagtggatatggattttgatagtttaagaacagcaggttctggacttggtacaggcggtattatagttatggatcaatctaccgatattatttatgcaatagcaaggcttagtaaattttacatgcatgaatcttgcgggcaatgtactccttgccgtgagggtacgggctggatgtggcgagttatgatgcgactagttaaaggtaatgtcaaaaaatctgagatagacgaactccttaacgttacgaaagaaatagaggggcatactatctgtgctttaggtgatgcggcagcttggccgattcaagggctgatacgccattttagaagcgagattgaggcaaggataaagagtgatagtgtggtttga

SEQ ID NO: 39425 - protein, 421 aa, Rickettsia conorii
MLKEEDKIFTNLHGQQSHDLKSSKKRGDWENTKALLDKGRDFIVEEVKKSGLRGRGGAGFSTGMKWSFMPKNLEKSCYLVVNADESEPGTCKDRDILRFEPHKLIEGCLLASFAIGANNCYIYIRGEFYNEASNIQRALDEAYKEGLIGKNSCGSGFDCNIYLHRGAGAYICGEETALLESLEGKKGMPRLKPPFPAGFGLYGCPTTINNVESIAVVPTILRRGASWFAGIGKPNNTGTKIFCISGHVNKPCNVEEAMGISLKELIEKYAGGVRGGWDNLKAIIPGGSSVPLLPKSLCEVDMDFDSLRTAGSGLGTGGIIVMDQSTDIIYAIARLSKFYMHESCGQCTPCREGTGWMWRVMMRLVKGNVKKSEIDELLNVTKEIEGHTICALGDAAAWPIQGLIRHFRSEIEARIKSDSVV

SEQ ID NO: 39426 - DNA, 1266 bp, Rickettsia prowazekii
  CDS (1)..(1266): transl_table=11
atgctaaaagaagaagacaaaatttttactaacttgtatgggcagcaaagctatgatttgaaatctagtcaaaagcgaggggattggtataatactaaggcattgattgataaaggtagagacttcattattgatgaggttaagaaatcagggcttagagggcgcggtggtgctgggttttctactggtatgaaatggtcatttatgcctaaaaattcagagaagccttgttatttagtagtaaatgcggatgaatctgagcctggtacttgtaaagatcgtgatatattaaggtttgaaccgcacaaattaatagaaggttgtttgattgcaagctttgctataggagcgaatacttgttatatttatattagaggtgaattttataatgaagcttctaatatgcagcgtgccttagatgaagcttataaagaagggttaataggcaagaatgcttgtggttcgggtttcgattgtaatatttatttacatcgtggtgcaggtgcttatatttgcggtgaagaaactgcgttacttgagagcttagaaggtaaaaaaggtatgccacgacttaagccaccttttcctgctgggtttggtttatatggttgtccaactactataaataatgttgagtctattgcagtagtgccaacaattttaagacgaggagcaagttggtttgctgcaatcggtaaacctaacaatactggcactaaggttttttgcatatctggtcatgttaataagccttgcaatattgaagaagtaatgggggttccattaaaagaattgattgagaaatatgctggcggtgtgcgtggtggatggaataatcttaaagcaataatcccaggtggtgcttctgtacctttactccctaaatcattatgtgaagtagagatggattttgatagtttaagaacagtagggtctggacttggtacaggtggtattattgttatggataaatctactgacattatttatgcaatagcacgtctaagtaaattttatatgcatgaatcatgtgggcaatgtaccccttgtcgagagggtactggttggatgtggcgagttatgatgcgcctagttaatggtaatgcaaaaaaaaatgaaatagatactctgttgaatgttacgaaagaaatagagggacatactatttgtgctttgggggatgctgcagcttggccaatccaagggttgatacggcattttagagatgaaattgagcagaggataaagagttttggtatcgcttaa

SEQ ID NO: 39427 - protein, 421 aa, Rickettsia prowazekii
MLKEEDKIFTNLYGQQSYDLKSSQKRGDWYNTKALIDKGRDFIIDEVKKSGLRGRGGAGFSTGMKWSFMPKNSEKPCYLVVNADESEPGTCKDRDILRFEPHKLIEGCLIASFAIGANTCYIYIRGEFYNEASNMQRALDEAYKEGLIGKNACGSGFDCNIYLHRGAGAYICGEETALLESLEGKKGMPRLKPPFPAGFGLYGCPTTINNVESIAVVPTILRRGASWFAAIGKPNNTGTKVFCISGHVNKPCNIEEVMGVPLKELIEKYAGGVRGGWNNLKAIIPGGASVPLLPKSLCEVEMDFDSLRTVGSGLGTGGIIVMDKSTDIIYAIARLSKFYMHESCGQCTPCREGTGWMWRVMMRLVNGNAKKNEIDTLLNVTKEIEGHTICALGDAAAWPIQGLIRHFRDEIEQRIKSFGIA

SEQ ID NO: 39428 - DNA, 1350 bp, Streptomyces coelicolor
  CDS (1)..(1350): transl_table=11
gtgatgaccgtggcagccgagatcaggggcagcaacccggagaagctgctcgcacccgtgctgtcggccttctgggacgaggacgagtcgtggactctcgacgtctaccggaggcacgaagggtacgaggggctccgcaaggcgctggcgatggcgccggacgacctgatcgcgtacgtcaaggagtccggtctgcgtggacgcggcggtgccgggttcccgacggggatgaagtggcagttcattcctcagggggacggcaagcctcactatctagttgtcaacgccgacgaatcggagcccgggacctgcaaggacatcccgctcctcttcgcgaacccgcacagcctcatcgagggcatcgtcatcgcgtgttacgccatcaggtcttcgcatgccttcatctatctgcgtggtgaagtcgtcccagtgctgcggcggttgcacgaggccgtgcgcgaggcctacgcggccggcttcctcggcgagaacatcctgggcagcggactcgatctcaccctcaccgtgcacgcgggcgcgggcgcgtacatctgcggtgaggagaccgcactgctcgactcgctcgaaggccgccggggtcaaccgcggctccgtcccccctttcctgccgtcgcgggcctctatgcgtgcccgactgtggtgaataacgtcgaatcgatcgcttcagttcccgcgatcctgaacaagggcaaggactggttcaggtcgatgggcagcgagaagtccccgggcttcacgctctactcgctcagcggccacgtcgcgggccccggccagtacgaggccccgctcggcatcacgctgcgccagctcctcgacatgagcggcggcatgcgccccggccaccggctcaagttctggacgcccggcgggtcctcgacgccgatgttcaccgacgagcacctcgacgtccccctcgactacgaaggagtgggcgccgccggttccatgctcggcaccaaggcgctccagtgcttcgacgagacgacctgcgtcgtgcgggccgtcacccgctggaccgagttctacgcccacgagtcctgcggcaagtgcacaccgtgccgcgaaggcacgtactggctcgtccagttgctgcgcgacatcgaggccggcaagggacagatgtccgacctcgacaagctgaacgacatcgccgacaacatcaacggcaagtccttctgcgccctcggcgacggtgccgcctcgccgatcttctcctcgctcaagtacttccgcgaggagtacgaggagcacatcacgggccgcggctgccccttcgacccggccaagtcgacggcctgggccgaccgcacggaggtgaaggcatga

SEQ ID NO: 39429 - protein, 449 aa, Streptomyces coelicolor
MMTVAAEIRGSNPEKLLAPVLSAFWDEDESWTLDVYRRHEGYEGLRKALAMAPDDLIAYVKESGLRGRGGAGFPTGMKWQFIPQGDGKPHYLVVNADESEPGTCKDIPLLFANPHSLIEGIVIACYAIRSSHAFIYLRGEVVPVLRRLHEAVREAYAAGFLGENILGSGLDLTLTVHAGAGAYICGEETALLDSLEGRRGQPRLRPPFPAVAGLYACPTVVNNVESIASVPAILNKGKDWFRSMGSEKSPGFTLYSLSGHVAGPGQYEAPLGITLRQLLDMSGGMRPGHRLKFWTPGGSSTPMFTDEHLDVPLDYEGVGAAGSMLGTKALQCFDETTCVVRAVTRWTEFYAHESCGKCTPCREGTYWLVQLLRDIEAGKGQMSDLDKLNDIADNINGKSFCALGDGAASPIFSSLKYFREEYEEHITGRGCPFDPAKSTAWADRTEVKA

SEQ ID NO: 39430 - DNA, 25 bp, Artificial sequence
  Primer sequence
atgaaaaacattatccgtactcccg

SEQ ID NO: 39431 - DNA, 21 bp, Artificial sequence
  Primer sequence
ttaccagcgctctttcagcag

SEQ ID NO: 39432 - protein, 478 aa, Artificial sequence
  Consensus
  Variant (2)..(9): Xaa in position 2 to 9 is any amino acid
  Variant (10)..(62): Xaa in position 10 to 62 is any or no amino acid
  Variant (64)..(69): Xaa in position 64 to 69 is any amino acid
  Variant (71)..(72): Xaa in position 71 to 72 is any amino acid
  Variant (73)..(80): Xaa in position 73 to 80 is any or no amino acid
  Variant (83)..(84): Xaa in position 83 to 84 is any or no amino acid
  Variant (86)..(87): Xaa in position 86 to 87 is any or no amino acid
  Variant (89)..(89): Xaa in position 89 is any or no amino acid
  Variant (105)..(106): Xaa in position 105 to 106 is any amino acid
  Variant (108)..(114): Xaa in position 108 to 114 is any amino acid
  Variant (115)..(128): Xaa in position 115 to 128 is any or no amino acid
  Variant (132)..(132): Xaa in position 132 is any amino acid
  Variant (137)..(137): Xaa in position 137 is any amino acid
  Variant (142)..(143): Xaa in position 142 to 143 is any amino acid
  Variant (146)..(146): Xaa in position 146 is any amino acid
  Variant (149)..(151): Xaa in position 149 to 151 is any amino acid
  Variant (154)..(154): Xaa in position 154 is any amino acid
  Variant (159)..(160): Xaa in position 159 to 160 is any amino acid
  Variant (164)..(164): Xaa in position 164 is any amino acid
  Variant (167)..(168): Xaa in position 167 to 168 is any or no amino acid
  Variant (170)..(171): Xaa in position 170 to 171 is any amino acid
  Variant (181)..(183): Xaa in position 181 to 183 is any amino acid
  Variant (184)..(187): Xaa in position 184 to 187 is any or no amino acid
  Variant (189)..(190): Xaa in position 189 to 190 is any or no amino acid
  Variant (193)..(194): Xaa in position 193 to 194 is any or no amino acid
  Variant (196)..(196): Xaa in position 196 is any amino acid
  Variant (197)..(198): Xaa in position 197 to 198 is any or no amino acid
  Variant (200)..(200): Xaa in position 200 is any amino acid
  Variant (203)..(206): Xaa in position 203 to 206 is any amino acid
  Variant (207)..(207): Xaa in position 207 is any or no amino acid
  Variant (209)..(214): Xaa in position 209 to 214 is any or no amino acid
  Variant (216)..(216): Xaa in position 216 is any or no amino acid
  Variant (218)..(219): Xaa in position 218 to 219 is any amino acid
  Variant (234)..(234): Xaa in position 234 is any amino acid
  Variant (240)..(240): Xaa in position 240 is any amino acid
  Variant (242)..(242): Xaa in position 242 is any amino acid
  Variant (245)..(245): Xaa in position 245 is any amino acid
  Variant (248)..(248): Xaa in position 248 is any or no amino acid
  Variant (253)..(254): Xaa in position 253 to 254 is any amino acid
  Variant (259)..(259): Xaa in position 259 is any amino acid
  Variant (262)..(262): Xaa in position 262 is any amino acid
  Variant (264)..(264): Xaa in position 264 is any amino acid
  Variant (269)..(269): Xaa in position 269 is any amino acid
  Variant (271)..(274): Xaa in position 271 to 274 is any amino acid
  Variant (277)..(278): Xaa in position 277 to 278 is any amino acid
  Variant (280)..(281): Xaa in position 280 to 281 is any amino acid
  Variant (284)..(286): Xaa in position 284 to 286 is any amino acid
  Variant (288)..(292): Xaa in position 288 to 292 is any amino acid
  Variant (293)..(296): Xaa in position 293 to 296 is any or no amino acid
  Variant (302)..(302): Xaa in position 302 is any amino acid
  Variant (306)..(306): Xaa in position 306 is any amino acid
  Variant (308)..(313): Xaa in position 308 to 313 is any amino acid
  Variant (315)..(322): Xaa in position 315 to 322 is any amino acid
  Variant (326)..(327): Xaa in position 326 to 327 is any amino acid
  Variant (328)..(329): Xaa in position 328 to 329 is any or no amino acid
  Variant (333)..(335): Xaa in position 333 to 335 is any amino acid
  Variant (336)..(340): Xaa in position 336 to 340 is any or no amino acid
  Variant (342)..(344): Xaa in position 342 to 344 is any amino acid
  Variant (347)..(347): Xaa in position 347 is any amino acid
  Variant (349)..(351): Xaa in position 349 to 351 is any amino acid
  Variant (353)..(360): Xaa in position 353 to 360 is any amino acid
  Variant (361)..(362): Xaa in position 361 to 362 is any or no amino acid
  Variant (367)..(367): Xaa in position 367 is any amino acid
  Variant (369)..(371): Xaa in position 369 to 371 is any amino acid
  Variant (372)..(374): Xaa in position 372 to 374 is any or no amino acid
  Variant (384)..(388): Xaa in position 384 to 388 is any amino acid
  Variant (391)..(398): Xaa in position 391 to 398 is any amino acid
  Variant (400)..(402): Xaa in position 400 to 402 is any amino acid
  Variant (407)..(407): Xaa in position 407 is any amino acid
  Variant (413)..(413): Xaa in position 413 is any amino acid
  Variant (415)..(418): Xaa in position 415 to 418 is any amino acid
  Variant (419)..(423): Xaa in position 419 to 423 is any or no amino acid
  Variant (426)..(426): Xaa in position 426 is any amino acid
  Variant (427)..(430): Xaa in position 427 to 430 is any or no amino acid
  Variant (432)..(432): Xaa in position 432 is any or no amino acid
  Variant (434)..(436): Xaa in position 434 to 436 is any or no amino acid
  Variant (439)..(440): Xaa in position 439 to 440 is any amino acid
  Variant (442)..(443): Xaa in position 442 to 443 is any amino acid
  Variant (445)..(447): Xaa in position 445 to 447 is any amino acid
  Variant (449)..(450): Xaa in position 449 to 450 is any amino acid
  Variant (451)..(455): Xaa in position 451 to 455 is any or no amino acid
  Variant (457)..(457): Xaa in position 457 is any amino acid
  Variant (462)..(463): Xaa in position 462 to 463 is any amino acid
  Variant (465)..(466): Xaa in position 465 to 466 is any amino acid
  Variant (469)..(471): Xaa in position 469 to 471 is any amino acid
  Variant (474)..(474): Xaa in position 474 is any amino acid
  Variant (476)..(477): Xaa in position 476 to 477 is any amino acid
LXXXXXXXXXXXXXXXXXXXXXXXXXXXXXXXXXXXXXXXXXXXXXXXXXXXXXXXXXXXXXYXXXXXXLXXXXXXXXXXIIXXVXXSXLRGRGGAGFPTGLKWXXMXXXXXXXXXXXXXXXXXXXXXYLVXNADEXEPGTXXDRXIMXXXPHXLIEGXXIAGXAMXXAXXGYIYIRGEYXXXXXXXLXXAIXXAXXXGXLGXXXXXSXXXXXXLXVXXGAGAYICGEETALLXSLEGKXGXPRXKPXPFPAXXGLYGXPTXVXNVETXAXXXXILXXGXXWFXXXGXXXXXXXXXGTKLFXISGXVXXXXXXEXXXXXXXXELIXXXXGGVXXXXXXXXAXXXGGXSXXXLXXXXXXXXXXMDFDXLXXXXXXLGTGAVIVMXXXXXMVXXXXXXXXFXXXESCGXCTPCRXGXXXXXXXXXILXXXXXGXGXXXDIXXLXXLXXXIXXXXXXXTXCALGXXAXXPVXXXIRXFXXE

SEQ ID NO: 39433 - protein, 12 aa, Artificial sequence
  Consensus
  Variant (4)..(5): Xaa in position 4 to 5 is Ala or Gly
  Variant (7)..(7): Xaa in position 7 is Pro or Ser
  Variant (8)..(8): Xaa in position 8 is Ala, Ser or Thr
  Variant (10)..(10): Xaa in position 10 is any amino acid
RGGXXFXXGXKW

SEQ ID NO: 39434 - protein, 50 aa, Artificial sequence
  Consensus
  Variant (2)..(4): Xaa in position 2 to 4 is any amino acid
  Variant (6)..(6): Xaa in position 6 is Ala, Cys, Gly, Ser or Thr
  Variant (9)..(9): Xaa in position 9 is any amino acid
  Variant (10)..(10): Xaa in position 10 is Asp or Glu
  Variant (11)..(11): Xaa in position 11 is Pro or Ser
  Variant (12)..(12): Xaa in position 12 is Ala, Gly or Asn
  Variant (13)..(13): Xaa in position 13 is Ala, Ser or Thr
  Variant (14)..(15): Xaa in position 14 to 15 is any amino acid
  Variant (18)..(19): Xaa in position 18 to 19 is any amino acid
  Variant (20)..(20): Xaa in position 20 is Ile, Leu or Met
  Variant (21)..(23): Xaa in position 21 to 23 is any amino acid
  Variant (25)..(26): Xaa in position 25 to 26 is any amino acid
  Variant (27)..(27): Xaa in position 27 is Phe, Ile, Leu, Met or Val
  Variant (28)..(28): Xaa in position 28 is Phe, Ile, Leu or Val
  Variant (29)..(29): Xaa in position 29 is any amino acid
  Variant (30)..(30): Xaa in position 30 is Ala or Gly
  Variant (31)..(32): Xaa in position 31 to 32 is any amino acid
  Variant (33)..(33): Xaa in position 33 is Ile, Leu, Met or Val
  Variant (34)..(34): Xaa in position 34 is Ala, Cys, Gly, Ser, Thr or Val
  Variant (35)..(35): Xaa in position 35 is Ala, Cys, Gly, Ser or Thr
  Variant (36)..(36): Xaa in position 36 is any amino acid
  Variant (37)..(37): Xaa in position 37 is Ala, Gly, Ser, Thr or Val
  Variant (38)..(49): Xaa in position 38 to 49 is any amino acid
  Variant (50)..(50): Xaa in position 50 is Ala, Glu or Gly
YXXXNXDEXXXXXXXDRXXXXXXPXXXXXXXXXXXXXXXXXXXXXXXXXX

SEQ ID NO: 39435 - protein, 45 aa, Artificial sequence
  Consensus
  Variant (3)..(4): Xaa in position 3 to 4 is any or no amino acid
  Variant (6)..(6): Xaa in position 6 is Ile or Val
  Variant (7)..(7): Xaa in position 7 is Ala or Cys
  Variant (11)..(11): Xaa in position 11 is Ser or Thr
  Variant (12)..(12): Xaa in position 12 is Ala or Ser
  Variant (13)..(13): Xaa in position 13 is any amino acid
  Variant (14)..(14): Xaa in position 14 is Phe, Ile, Leu or Met
  Variant (15)..(15): Xaa in position 15 is Ala, Asp, Glu, Gly, Asn or Ser
  Variant (17)..(17): Xaa in position 17 is Ile, Leu or Val
  Variant (20)..(21): Xaa in position 20 to 21 is any amino acid
  Variant (22)..(22): Xaa in position 22 is Ala or Gly
  Variant (23)..(23): Xaa in position 23 is any amino acid
  Variant (24)..(24): Xaa in position 24 is Pro or Val
  Variant (25)..(26): Xaa in position 25 to 26 is any amino acid
  Variant (27)..(27): Xaa in position 27 is Lys or Arg
  Variant (30)..(30): Xaa in position 30 is any amino acid
  Variant (31)..(31): Xaa in position 31 is Pro or Val
  Variant (32)..(34): Xaa in position 32 to 34 is any amino acid
  Variant (36)..(39): Xaa in position 36 to 39 is any amino acid
  Variant (41)..(41): Xaa in position 41 is Ser or Thr
  Variant (42)..(44): Xaa in position 42 to 44 is any amino acid
GAXXYXXGEEXXXXXSXEGXXXXXXXXPPXXXXXGXXXXPXXXXN

SEQ ID NO: 39436 - protein, 16 aa, Artificial sequence
  Consensus
  Variant (2)..(4): Xaa in position 2 to 4 is any amino acid
  Variant (9)..(9): Xaa in position 9 is any amino acid
  Variant (15)..(15): Xaa in position 15 is any amino acid
FXXXESCGXCTPCRXG

SEQ ID NO: 39437 - DNA, 1152 bp, Escherichia coli
  CDS (1)..(1152)
atgatggctaacagaatgattctgaacgaaacggcatggtttggtcggggtgctgttggggctttaaccgatgaggtgaaacgccgtggttatcagaaggcgctgatcgtcaccgataaaacgctggtgcaatgcggcgtggtggcgaaagtgaccgataagatggatgctgcagggctggcatgggcgatttacgacggcgtagtgcccaacccaacaattactgtcgtcaaagaagggctcggtgtattccagaatagcggcgcggattacctgatcgctattggtggtggttctccacaggatacttgtaaagcgattggcattatcagcaacaacccggagtttgccgatgtgcgtagcctggaaggactttccccgaccaataaacccagtgtaccgattctggcaatccccaccacagcaggcactgcggcagaagtgaccattaactacgtgatcactgacgaagaaaaacggcgcaagtttgtttgcgttgatccgcatgatatcccgcaggtggcgtttattgacgctgacatgatggatggtatgcctccagcgctgaaagctgcgacgggtgtcgatgcgctcactcatgctattgaggggtatattacccgtggcgcgtgggcgctaaccgatgcactgcacattaaagcgattgaaatcattgctggggcgctgcgaggatcggttgctggtgataaggatgccggagaagaaatggcgctcgggcagtatgttgcgggtatgggcttctcgaatgtggggttagggttggtgcatggtatggcgcatccactgggcgcgttttataacactccacacggtgttgcaaacgccatcctgttaccgcatgtcatgcgttataacgctgactttaccggtgagaagtaccgcgatatcgcgcgcgttatgggcgtgaaagtggaaggtatgagcctggaagaggcgcgtaatgccgctgttgaagcggtgtttgctctcaaccgtgatgtcggtattccgccacatttgcgtgatgttggtgtacgcaaggaagacattccggcactggcgcaggcggcactggatgatgtttgtaccggtggcaacccgcgtgaagcaacgcttgaggatattgtagarctttaccataccgcctggtaa

SEQ ID NO: 39438 - protein, 383 aa, Escherichia coli
MMANRMILNETAWFGRGAVGALTDEVKRRGYQKALIVTDKTLVQCGVVAKVTDKMDAAGLAWAIYDGVVPNPTITVVKEGLGVFQNSGADYLIAIGGGSPQDTCKAIGIISNNPEFADVRSLEGLSPTNKPSVPILAIPTTAGTAAEVTINYVITDEEKRRKFVCVDPHDIPQVAFIDADMMDGMPPALKAATGVDALTHAIEGYITRGAWALTDALHIKAIEIIAGALRGSVAGDKDAGEEMALGQYVAGMGFSNVGLGLVHGMAHPLGAFYNTPHGVANAILLPHVMRYNADFTGEKYRDIARVMGVKVEGMSLEEARNAAVEAVFALNRDVGIPPHLRDVGVRKEDIPALAQAALDDVCTGGNPREATLEDIVELYHTAW

SEQ ID NO: 39439 - DNA, 1251 bp, Archaeoglobus fulgidus DSM 4304
  CDS (1)..(1251): transl_table=11
gtgttgtgtatggctgaatggccgatggacagacctgagttgagaaccatcataacgacctacagcgttccagagtcgaagcttctgctgaactcattcatcatgccgaagaccttctacgggttggccggtttgcagatgtttgctggagccatggtgcagttcggaagaaggagggctttcatagtcaccgataagggagtgagagcccttgctctgacagtgcaaaaaatgcttaagggtgtcggcattgaagtcgagattttcgacgaagcgaagcctgaggtgccgttgagctcgataaagcccgctgcagaaaaaatggaagccctccagcccgacttgattgtggcagttggtggtggaagcgttatggacatggcgaaggcctcgtggattctctacgaggctccgcagacagacctgacaaacgtcgatgcgatgcagccgatcgggctgaggagaaaggcgtttctggcgtgcatcccaacaactgccggaacgggaagcgaggcaacaaacgttgcggtcattacagatgacactgtggagccgcacaggaaagagggtgttgtgcatcctgagctttatcctgacttcgccgtcctcgacccgcgatttgttttgaaaatgcctccgaatctcacacttgggacggggctggatgccctgtcgcatgcagttgactgctacctctgcaggtcgagcaacgaaatttccgacgctctggcggtgagagcgacaaagctcgttttcaagtacctcccgttagccctgaagtaccccgacaacccgcagatcaggctcaaaactcagattgccgccatgattgcaggttcagccttttcgaacggcggaataggaacgacccacgcagttgcgcacaacataggcgcgctcttcgaggttcaccacggtatggcgtgtggggttacaataccctacgtcatcaagttctacgcggaggtggatgataagtacctcagctttgccgaggagcttggcgtgagaggaggcagcaacgaagaaacgctgaaaaagctcatagacattttcatggacttctacaggaaaataggggcaccaacgactatgagagaccttggcataaaagaggatgacttcaaggagaagctcgacaccttcgcacagtacgttgttaaagacccaacagggcccttcgctccgaggcagcttactgttgaggaggcgaaggagttgttgatggatatgtattatgggaggttgtga

SEQ ID NO: 39440 - protein, 416 aa, Archaeoglobus fulgidus DSM 4304
MLCMAEWPMDRPELRTIITTYSVPESKLLLNSFIMPKTFYGLAGLQMFAGAMVQFGRRRAFIVTDKGVRALALTVQKMLKGVGIEVEIFDEAKPEVPLSSIKPAAEKMEALQPDLIVAVGGGSVMDMAKASWILYEAPQTDLTNVDAMQPIGLRRKAFLACIPTTAGTGSEATNVAVITDDTVEPHRKEGVVHPELYPDFAVLDPRFVLKMPPNLTLGTGLDALSHAVDCYLCRSSNEISDALAVRATKLVFKYLPLALKYPDNPQIRLKTQIAAMIAGSAFSNGGIGTTHAVAHNIGALFEVHHGMACGVTIPYVIKFYAEVDDKYLSFAEELGVRGGSNEETLKKLIDIFMDFYRKIGAPTTMRDLGIKEDDFKEKLDTFAQYVVKDPTGPFAPRQLTVEEAKELLMDMYYGRL

SEQ ID NO: 39441 - DNA, 1188 bp, Archaeoglobus fulgidus DSM 4304
  CDS (1)..(1188): transl_table=11
atgaacattgaaaaacattttatattgttcaatcatcctctcatcatgtggtggtttgttgtaccaaagacagttttcggtgacgatgccattgagcacctgcagagcgagagagcagagagggtgctgattgtaactgacaaggttctgagcgagatgagctaccttgaggaggtaaagaaaaatctcaaggcggagagaatagaggttttcgacgaggtagagccggagccgagcatagaaactgccctaaaatgctcaaaagtggcgagagagcttgatgcgcagctcataatcgctctcggtggtggcagcgttatggacgttgcgaagatggcgaggatactgatggagcttgacgtcgatccagagttcatcacgccctttacagatctctatgagctcggttttcaaaagaaagcaaagctcatcgccattccgacaaccagcggcacgggagcggatgcaacatgggcaatggtgcttaccgacaccaaggaaaagagaaaagttcttcctgcgaacagagaagcgataccggatttaacaatactcgactacaggtttgttgaaaaccttccgcccaagctcgtagccggcacgggaatggatgcgctaacccatgcaatcgagggtgctctggctccgtggagaaacgacttcagcgatgcaatgtgcgagaaggcaattgaattaatcttcgacaaccttgagaagtcttacaacggggacaaggaggcgagggctaagatgcaccacgccgcaacgatggccggaatgggattcggaaactctcaggtggggccggtgcactccttgggccatgctttcggagcctacttcaaggtgcaccacggcatttgcgttgcggtgttcctcccctacgttttgcagttctaccttaacgatgaaggctcgagggcaatgatggattatctggctggtagggttggattggagagcggagagtctatggtggagaaagtaatggacctcatgaagaagatagaggctccgacaaaggtttcagacattgttggtgagaaggagtactttggggcaattgaggatatatggagccatgctatcaacgatgcgtgcatgattacctctccgagatgtccagacaccgagcaaacgaggaagctgcttgagtacgcattctacggaaagagggttgacttctga

SEQ ID NO: 39442 - protein, 395 aa, Archaeoglobus fulgidus DSM 4304
MNIEKHFILFNHPLIMWWFVVPKTVFGDDAIEHLQSERAERVLIVTDKVLSEMSYLEEVKKNLKAERIEVFDEVEPEPSIETALKCSKVARELDAQLIIALGGGSVMDVAKMARILMELDVDPEFITPFTDLYELGFQKKAKLIAIPTTSGTGADATWAMVLTDTKEKRKVLPANREAIPDLTILDYRFVENLPPKLVAGTGMDALTHAIEGALAPWRNDFSDAMCEKAIELIFDNLEKSYNGDKEARAKMHHAATMAGMGFGNSQVGPVHSLGHAFGAYFKVHHGICVAVFLPYVLQFYLNDEGSRAMMDYLAGRVGLESGESMVEKVMDLMKKIEAPTKVSDIVGEKEYFGAIEDIWSHAINDACMITSPRCPDTEQTRKLLEYAFYGKRVDF

SEQ ID NO: 39443 - DNA, 1173 bp, Mesorhizobium loti MAFF303099
  CDS (1)..(1173): transl_table=11
atgtccaaactcatctccaaatggaactaccccaccaccgtccgcttcggcgccgggcgtatcaaggaattgcctgaggtgctcgaggccaccggtatcaagcggccgctcttcgtcaccgatccgggcctggcgaaactgccggtcgtcgcttcgacgctgaagatcctcgacgatgccaaggtgccttacggtgtgttttccgaggtgaagccgaatccggtcgattccaacctcaccgccggcatcgccgtgttcaagaagggcaagcatgacggcgtcatcgccttcggcggcggctcggcgctcgatctcggcaagctgatcgccttccaggccggccagacgcggccggtgtgggatttcgaggatgtcggcgactggtggacgcgcgccaattcggatgcgatcgcgccgatcatcgccgtgccgacgacggccggcaccggctcggaagtcggccgcgccggcgtcatcaccaatgaggagacgcacaccaagaaggtcatcttccatccgaagctcttgccggcgatcgtcattgccgatccggaactgtcggtcggcatgcccgccttcatcaccgccggcaccggcatggatgcgcttgcccactgcctcgaggcctattgcgcgccgggttaccatccgatggctgacggcatcgcggtggaaggcatccggctggtgtttgaaaacctgccgaaggcctatgccaacggcaaggacctggtcgcgcgtgcccatatgatgagcgcggccgccatgggcgccgccgccttccagaaggggctgggcgccatccactcgctgtcgcacccgatcggcgcgctctacgacacccatcacggcatgaccaatgcggtgttcatgccttatgtgctcgccttcaatcgtgactccatcgaggagcgtatcgcccggctcgccgcctattgcggcatcaagggcggcttcgacggcttcgccaaggcgatcatcaagctgcgcaaggagttgaaggtgccgcacgcgctgccgggcctgatcaaggggctcgacatggacaagaagcgcaaggcgctgatcgccgacatggcggtggtcgatccgaccgccggcggcaacccggtcaagctgaccaagaaggcggcgctgacgctgctggaaaacgctatcgccggcacgatctga

SEQ ID NO: 39444 - protein, 390 aa, Mesorhizobium loti MAFF303099
MSKLISKWNYPTTVRFGAGRIKELPEVLEATGIKRPLFVTDPGLAKLPVVASTLKILDDAKVPYGVFSEVKPNPVDSNLTAGIAVFKKGKHDGVIAFGGGSALDLGKLIAFQAGQTRPVWDFEDVGDWWTRANSDAIAPIIAVPTTAGTGSEVGRAGVITNEETHTKKVIFHPKLLPAIVIADPELSVGMPAFITAGTGMDALAHCLEAYCAPGYHPMADGIAVEGIRLVFENLPKAYANGKDLVARAHMMSAAAMGAAAFQKGLGAIHSLSHPIGALYDTHHGMTNAVFMPYVLAFNRDSIEERIARLAAYCGIKGGFDGFAKAIIKLRKELKVPHALPGLIKGLDMDKKRKALIADMAVVDPTAGGNPVKLTKKAALTLLENAIAGTI

SEQ ID NO: 39445 - DNA, 1227 bp, Mesorhizobium loti MAFF303099
  CDS (1)..(1227): transl_table=11
atgagcctcttcgccgccctccggcttccgcgtgaaatccttttcgggaaaggccagcgccacgcactgtcgacagtcgccggcaggttcggccggcacgccctggtctgtaccgacgagcgtttcgccggcacggcggtgttcgcggaaattgtccaatcgctccaggccgcctcgatcgaggtgctggtgcatgaccgcgtgcttcccgacgtgccacgtgacagcgtcggcatttgcgtcgacgaggccgagaaattccagcccgagatggtgatcggcatcggcggcggcagctgcctcgatttcgccaaatgcgccgacttgctgctcagccatggcggcaagcttcaggactactatggggagttcaaggtgcccggcccgacgctgccgctgatcgccgtgcccacgacagcgggcaccggctccgaagtgacgcccgtcgcggtgatctccgatccggatcggacgctcaaggtcggcatatcgagcccctatctaatcgcggcagttgccttgtgcgaccccgaactgacgatgacctgcccccctgccctgactgcgatagccggcgccgacgccctgacccatgcgatcgaggccttcaccgcgaagcagcgcggcgaggaccccagcctggcgcaacagcatgtcttcatcggcaagaccgcgctgaccgaccatttcgccctcctggccataaagctgctgggccgcagcctggagaaagcctgcaccgacggcacggatgccgatgcgcgcgccgatgtgatgatgggcgcactggcggcgggctgcgcattcggcaccgccggcactgcggcggcgcatgccgtgcaatatcccgcgggcgccctcacccacaccgcgcacggattgggcgtggcgacgatgatgccttacgtcatgacctacaacagccgcgtggtcgccgccgaaatggccgagatcggcgacgcgcttggccttgaggccaaggggcggagcgccgaggagatggcggacgccaccatcaaggaaatccggcggctattcacggcgatcggcatcacgccgacgctggccgatctcggccttcccgccgacaagctcgactggaccgccgatcaggcgctcggcatcgaccgcctgatcaagaacaacccgcgccccttcgatctcaccgccatgcgacgcctggtccaggccgcccatgacggcgacctcgcagcctgcgccatgtaa

SEQ ID NO: 39446 - protein, 408 aa, Mesorhizobium loti MAFF303099
MSLFAALRLPREILFGKGQRHALSTVAGRFGRHALVCTDERFAGTAVFAEIVQSLQAASIEVLVHDRVLPDVPRDSVGICVDEAEKFQPEMVIGIGGGSCLDFAKCADLLLSHGGKLQDYYGEFKVPGPTLPLIAVPTTAGTGSEVTPVAVISDPDRTLKVGISSPYLIAAVALCDPELTMTCPPALTAIAGADALTHAIEAFTAKQRGEDPSLAQQHVFIGKTALTDHFALLAIKLLGRSLEKACTDGTDADARADVMMGALAAGCAFGTAGTAAAHAVQYPAGALTHTAHGLGVATMMPYVMTYNSRVVAAEMAEIGDALGLEAKGRSAEEMADATIKEIRRLFTAIGITPTLADLGLPADKLDWTADQALGIDRLIKNNPRPFDLTAMRRLVQAAHDGDLAACAM

SEQ ID NO: 39447 - DNA, 1128 bp, Pyrococcus abyssi GE5
  CDS (1)..(1128): transl_table=11
atgaggttctttttaaagacgacaattctcatgggtaggggatcccttgagaacgtgaagaggataatctcggagggggagagggttctaatattctcttcaagatcaatggatagacttggcttcttaagcgaagtcgccgattacgtggaggaagccggaggagtttacgaaacgattatcggtttaccacctgaacctagcgttgagaacgttgaggaggttcttcccaaggttgaggaattttcaccagaaactttcatagcactaggcggtggaagtgtaatagacgttgcaaaggccgttaaagttttttacgatgctcctgggcttgattttgacagtgtggcaatatttagcaggttcaagaaggctcaacccctgccaaagcttaagactaggctaatagctatcccctcaacgagcggtgctggaagcgaagtttcggctgctagtgtcataaagaagggggataccaagtacacgatagttagcccagagttatgtccagattatgctatcttagaccctagactacctgagaaaatgcccagggaagttgccaggaattccggactagacgttctcgtccatgctattgaagcttacgtctcaaaggcctcaacgcccttcagcgatgccctcgcggttaaagctgctagaataatattcgagaggcttgaagatagcgtcaacggcgatgcaaaggccagagaggaagtacactatgccgcaaccatggctggaatagcattcttaaacggtagattaggcctagtccatgcgatgagtcacaaatctgcttggattggccctcatgggttggttaacgcaatattcctaccctacgttatggagtttaacatggagagggccagggaaaagtacgatgcgatggcaagagagctagggctttccagtgcggatgaactactagagaaggttaaggaacttaatgaaaagcttggagttccgaagctttcggagatagtgaaggaggaggaattcctgggcaaggtagaggatatgagcaggaaaacctacgaagatccactcgttagctttaacccagttgagccgagcgttgaagatataaagaatctctacctgagggccctccatgactga

SEQ ID NO: 39448 - protein, 375 aa, Pyrococcus abyssi GE5
MRFFLKTTILMGRGSLENVKRIISEGERVLIFSSRSMDRLGFLSEVADYVEEAGGVYETIIGLPPEPSVENVEEVLPKVEEFSPETFIALGGGSVIDVAKAVKVFYDAPGLDFDSVAIFSRFKKAQPLPKLKTRLIAIPSTSGAGSEVSAASVIKKGDTKYTIVSPELCPDYAILDPRLPEKMPREVARNSGLDVLVHAIEAYVSKASTPFSDALAVKAARIIFERLEDSVNGDAKAREEVHYAATMAGIAFLNGRLGLVHAMSHKSAWIGPHGLVNAIFLPYVMEFNMERAREKYDAMARELGLSSADELLEKVKELNEKLGVPKLSEIVKEEEFLGKVEDMSRKTYEDPLVSFNPVEPSVEDIKNLYLRALHD

SEQ ID NO: 39449 - DNA, 1128 bp, Pyrococcus horikoshii OT3
  CDS (1)..(1128): transl_table=11
atgacattcttcctaaagactaccatattaatgggtaggggatcccttgaaaatataaaaaagcttgtatctgaaggtgagagggtactcgtcttttcttcaaagtctatggataggcttggctttttaaaagaggtaattgactatttagacgaagcaggtgcaacctatgaaagtattacgggattaccttccgagccaagcattgaaaacgttgaggaattgctcccaaaggtcaaggatttctctccggaaaccttcatagcactcggtggagggagcgtgatagatatctcaaaagccctgaaagttttctatgatgctcctgaacttgattttgacagtgttgcaatatttagcagatttaaaaaagctcaacctcttccaaagcttaaaacaaagcttatagccgttccttctacgagtggtgcagggagtgaagtatccgctgcgaccgtgataaagaagggggatatcaagtacacgatagtgagtccagagctttgtccaaattatgcaatcttggatccgagactccccgagaacatgcccagggaagtagctaggaactctggattagatgtattagttcatgccatagaagcttacgtttcaaaggcatcaacaccttttagtgatgctatggccgtaaaagcagcaaggacaattcttgaaaagcttgaagatagcgttaatggcgatcctaccgctagagaagaagttcattatgccgccactatggccggaatagccttcctaaatggtagacttggactcgtccatgcaatgagtcataaagcagcgtggattggccctcatggattgattaatgcgatactactcccatatgtaatggagttcaatatggaaaaagctagagaaaagtacgatgcaatggccaaggaacttgggctttccaatgctgaagaacttcttcagaaggttaaagagctcaatgaaagattaaacgttccaaagttatcggaaatagttagcgaggaagatttcacttcaaggcttgatgagatgagcagaaaggcttacgaagatcccctggttaacttcaatccagtggaaccaagcgttgatgatataaagaacatctatctgagggccttccatgattga

SEQ ID NO: 39450 - protein, 375 aa, Pyrococcus horikoshii OT3
MTFFLKTTILMGRGSLENIKKLVSEGERVLVFSSKSMDRLGFLKEVIDYLDEAGATYESITGLPSEPSIENVEELLPKVKDFSPETFIALGGGSVIDISKALKVFYDAPELDFDSVAIFSRFKKAQPLPKLKTKLIAVPSTSGAGSEVSAATVIKKGDIKYTIVSPELCPNYAILDPRLPENMPREVARNSGLDVLVHAIEAYVSKASTPFSDAMAVKAARTILEKLEDSVNGDPTAREEVHYAATMAGIAFLNGRLGLVHAMSHKAAWIGPHGLINAILLPYVMEFNMEKAREKYDAMAKELGLSNAEELLQKVKELNERLNVPKLSEIVSEEDFTSRLDEMSRKAYEDPLVNFNPVEPSVDDIKNIYLRAFHD

SEQ ID NO: 39451 - DNA, 1200 bp, Aeropyrum pernix K1
  CDS (1)..(1200): transl_table=11
gtgatgttttctttaggtggaccccgtttggttgactttgttttcccccgtaggatagtgtataatgagagcctccctagggctcttgagacgcttctaggggataagggtgttaaacatgtcctagtggttactgacggtaaagtcgcagctatgagctggtttaaagaagcggttgagcatgtagccagtctcggtgtagaagtgtgtatctttgacggtgttacccctgagccggagtttgatgtgggagacgctatagcatcggaggctaggaggtgccgggctgaggctatagtggctgtgggtggaggcagtgtaatagacgcggctaaggctgggtttgtgaagtttgtcaggcctgatgccgacctggagggcctagcgcccttcaactacctaggccttgaagactctggcatagtactggtagctgttcccacgacgagcggtactggcagcgacgccagctatggtatagtcctcacaaagcgggttaacggtggtagagagaagattgctgtgggcagctacgaggtagtaccctacgcctcaatactcgacccctcaataacacttggcatgccggaaagattgaccgtaggtacggctgttgacgcgctggctcacagtgtggaggctatagcctccacaaacgccaacccgctctccgacgctttagcggctaaggcggctgagatagtcttcaggaggctgccagaggttgtgaatgacccaggcaactatgatgctagggctgagatgcatatcgcagccacaatggctggtatggcgttcacaaactccggcctcggcctagcccacgcgatagcacaccccctcggcgcgaggcttggaacgcaccatggagccacagtgggtatggttctcccccatgtggtcaggttcaacgagtcaaggagtgactatgcgaggaggaagtattgggagctaaagctactgctcgagtccctacttggccttgaagaaagggggagcctagccgaccatatagaagaattatatgccagggtggggcagcccacgagggttagagagcttgcgggtattgagagggaaagatatcttaccttggccgacgaggttgcagaagccgccttcagagacccggaactggccttcaaccctgttatgccaactatggaagatgtaaaaacgctactgtacaatatgtattaa

SEQ ID NO: 39452 - protein, 399 aa, Aeropyrum pernix K1
MMFSLGGPRLVDFVFPRRIVYNESLPRALETLLGDKGVKHVLVVTDGKVAAMSWFKEAVEHVASLGVEVCIFDGVTPEPEFDVGDAIASEARRCRAEAIVAVGGGSVIDAAKAGFVKFVRPDADLEGLAPFNYLGLEDSGIVLVAVPTTSGTGSDASYGIVLTKRVNGGREKIAVGSYEVVPYASILDPSITLGMPERLTVGTAVDALAHSVEAIASTNANPLSDALAAKAAEIVFRRLPEVVNDPGNYDARAEMHIAATMAGMAFTNSGLGLAHAIAHPLGARLGTHHGATVGMVLPHVVRFNESRSDYARRKYWELKLLLESLLGLEERGSLADHIEELYARVGQPTRVRELAGIERERYLTLADEVAEAAFRDPELAFNPVMPTMEDVKTLLYNMY

SEQ ID NO: 39453 - DNA, 2577 bp, Clostridium acetobutylicum ATCC 824
  CDS (1)..(2577): transl_table=11
atgaaagttacaaatcaaaaagaactaaaacaaaagctaaatgaattgagagaagcgcaaaagaagtttgcaacctatactcaagagcaagttgataaaatttttaaacaatgtgccatagccgcagctaaagaaagaataaacttagctaaattagcagtagaagaaacaggaataggtcttgtagaagataaaattataaaaaatcattttgcagcagaatatatatacaataaatataaaaatgaaaaaacttgtggcataatagaccatgacgattctttaggcataacaaaggttgctgaaccaattggaattgttgcagccatagttcctactactaatccaacttccacagcaattttcaaatcattaatttctttaaaaacaagaaacgcaatattcttttcaccacatccacgtgcaaaaaaatctacaattgctgcagcaaaattaattttagatgcagctgttaaagcaggagcacctaaaaatataataggctggatagatgagccatcaatagaactttctcaagatttgatgagtgaagctgatataatattagcaacaggaggtccttcaatggttaaagcggcctattcatctggaaaacctgcaattggtgttggagcaggaaatacaccagcaataatagatgagagtgcagatatagatatggcagtaagctccataattttatcaaagacttatgacaatggagtaatatgcgcttctgaacaatcaatattagttatgaattcaatatacgaaaaagttaaagaggaatttgtaaaacgaggatcatatatactcaatcaaaatgaaatagctaaaataaaagaaactatgtttaaaaatggagctattaatgctgacatagttggaaaatctgcttatataattgctaaaatggcaggaattgaagttcctcaaactacaaagatacttataggcgaagtacaatctgttgaaaaaagcgagctgttctcacatgaaaaactatcaccagtacttgcaatgtataaagttaaggattttgatgaagctctaaaaaaggcacaaaggctaatagaattaggtggaagtggacacacgtcatctttatatatagattcacaaaacaataaggataaagttaaagaatttggattagcaatgaaaacttcaaggacatttattaacatgccttcttcacagggagcaagcggagatttatacaattttgcgatagcaccatcatttactcttggatgcggcacttggggaggaaactctgtatcgcaaaatgtagagcctaaacatttattaaatattaaaagtgttgctgaaagaagggaaaatatgctttggtttaaagtgccacaaaaaatatattttaaatatggatgtcttagatttgcattaaaagaattaaaagatatgaataagaaaagagcctttatagtaacagataaagatctttttaaacttggatatgttaataaaataacaaaggtactagatgagatagatattaaatacagtatatttacagatattaaatctgatccaactattgattcagtaaaaaaaggtgctaaagaaatgcttaactttgaacctgatactataatctctattggtggtggatcgccaatggatgcagcaaaggttatgcacttgttatatgaatatccagaagcagaaattgaaaatctagctataaactttatggatataagaaagagaatatgcaatttccctaaattaggtacaaaggcgatttcagtagctattcctacaactgctggtaccggttcagaggcaacaccttttgcagttataactaatgatgaaacaggaatgaaataccctttaacttcttatgaattgaccccaaacatggcaataatagatactgaattaatgttaaatatgcctagaaaattaacagcagcaactggaatagatgcattagttcatgctatagaagcatatgtttcggttatggctacggattatactgatgaattagccttaagagcaataaaaatgatatttaaatatttgcctagagcctataaaaatgggactaacgacattgaagcaagagaaaaaatggcacatgcctctaatattgcggggatggcatttgcaaatgctttcttaggtgtatgccattcaatggctcataaacttggggcaatgcatcacgttccacatggaattgcttgtgctgtattaatagaagaagttattaaatataacgctacagactgtccaacaaagcaaacagcattccctcaatataaatctcctaatgctaagagaaaatatgctgaaattgcagagtatttgaatttaaagggtactagcgataccgaaaaggtaacagccttaatagaagctatttcaaagttaaagatagatttgagtattccacaaaatataagtgccgctggaataaataaaaaagatttttataatacgctagataaaatgtcagagcttgcttttgatgaccaatgtacaacagctaatcctaggtatccacttataagtgaacttaaggatatctatataaaatcattttaa

SEQ ID NO: 39454 - protein, 858 aa, Clostridium acetobutylicum ATCC 824
MKVTNQKELKQKLNELREAQKKFATYTQEQVDKIFKQCAIAAAKERINLAKLAVEETGIGLVEDKIIKNHFAAEYIYNKYKNEKTCGIIDHDDSLGITKVAEPIGIVAAIVPTTNPTSTAIFKSLISLKTRNAIFFSPHPRAKKSTIAAAKLILDAAVKAGAPKNIIGWIDEPSIELSQDLMSEADIILATGGPSMVKAAYSSGKPAIGVGAGNTPAIIDESADIDMAVSSIILSKTYDNGVICASEQSILVMNSIYEKVKEEFVKRGSYILNQNEIAKIKETMFKNGAINADIVGKSAYIIAKMAGIEVPQTTKILIGEVQSVEKSELFSHEKLSPVLAMYKVKDFDEALKKAQRLIELGGSGHTSSLYIDSQNNKDKVKEFGLAMKTSRTFINMPSSQGASGDLYNFAIAPSFTLGCGTWGGNSVSQNVEPKHLLNIKSVAERRENMLWFKVPQKIYFKYGCLRFALKELKDMNKKRAFIVTDKDLFKLGYVNKITKVLDEIDIKYSIFTDIKSDPTIDSVKKGAKEMLNFEPDTIISIGGGSPMDAAKVMHLLYEYPEAEIENLAINFMDIRKRICNFPKLGTKAISVAIPTTAGTGSEATPFAVITNDETGMKYPLTSYELTPNMAIIDTELMLNMPRKLTAATGIDALVHAIEAYVSVMATDYTDELALRAIKMIFKYLPRAYKNGTNDIEAREKMAHASNIAGMAFANAFLGVCHSMAHKLGAMHHVPHGIACAVLIEEVIKYNATDCPTKQTAFPQYKSPNAKRKYAEIAEYLNLKGTSDTEKVTALIEAISKLKIDLSIPQNISAAGINKKDFYNTLDKMSELAFDDQCTTANPRYPLISELKDIYIKSF

SEQ ID NO: 39455 - DNA, 1191 bp, Clostridium acetobutylicum ATCC 824
  CDS (1)..(1191): transl_table=11
ttgaaaaatacatattatcgtcttcagcaatatatgtttagtaaggctcaaagacttcttccttggcgtatgccgaacatcatatctggaagcaaaagtatctgtaaactgccttataaggtaaaaaatgacggtgtaaaaaaggtcttagttattacaactgctggatcaataaagcgcggcagtttaaatgaaatgtttgatgagttaaaaaaagaaaatatatcttatgtaatatatgatgatgtacaacctgatccaaccattgaatgtatcgaggctgttgtaaagttctataaaaaagaagcttgcgaaggaatcatagcagtaggtggtggttctgtaatggactgcgctaaggttactggtgctagaattgtaaaaccgaaaaaaagtgtaagtcaaatggcaggtcttatgaaaatcagaaaagagcttcctccactatacactgttcctacaactgccggtaccggatcagaaacaacagtagctgcagttgtaacagacagttcaactcacctaaaatatgcggtaagcgatttatgtctaattccaaaatacgcagtactagatcctgaattaacctgtggacttcccaaaaatctcacagcaatcacaggaatggatgctcttacacatgcagttgaagcatataccaataaatatagttctaaagaatcaagaaaatatgctttagatgctgtcaaactaatatttgaaaatcttaaaaaagcctatgataatggaaaacacatagaagtgcgtgaaaatatgttaaaagcttcctactatgctggtgttgcttttactagatcctacgtaggatatgttcatgcaattgcacatgcagtaggcggtttgtatggagttcctcatggtatggcaaatgcagttatattacccgtagtgctagaagcttacggtgaggctatttacaaaaatcttgctgaattagctgatgctactagtgttcctggaaaaactcagatggaaaaagctaaaaattttatcttgtcaattaggaaaatgaatcaatctatggagattcctgataaattagattctataaaaaaagaagatattcctgaaatcattaatagagctatgaaggaagctaatcctagctatcctgtgccagtaatctgggacaaaatacaatttgaaaaagttgttgaatcattgaaataa

SEQ ID NO: 39456 - protein, 396 aa, Clostridium acetobutylicum ATCC 824
MKNTYYRLQQYMFSKAQRLLPWRMPNIISGSKSICKLPYKVKNDGVKKVLVITTAGSIKRGSLNEMFDELKKENISYVIYDDVQPDPTIECIEAVVKFYKKEACEGIIAVGGGSVMDCAKVTGARIVKPKKSVSQMAGLMKIRKELPPLYTVPTTAGTGSETTVAAVVTDSSTHLKYAVSDLCLIPKYAVLDPELTCGLPKNLTAITGMDALTHAVEAYTNKYSSKESRKYALDAVKLIFENLKKAYDNGKHIEVRENMLKASYYAGVAFTRSYVGYVHAIAHAVGGLYGVPHGMANAVILPVVLEAYGEAIYKNLAELADATSVPGKTQMEKAKNFILSIRKMNQSMEIPDKLDSIKKEDIPEIINRAMKEANPSYPVPVIWDKIQFEKVVESLK

SEQ ID NO: 39457 - DNA, 1164 bp, Aquifex aeolicus VF5
  CDS (1)..(1164): transl_table=11
atgactgttgtaaatgagtacagacccgttgaagttttcttcggcgaaggagcggtaaaaaaagcgggagaagtagggagacgctttggcttcaaagccctgatagttactggaagaaaaagcacaaaggaaagcggtgcactggataaattgataaactccttaaaacaaaatcaaatagagtacgtggtatttgacgagataactcccaacccgacggacaaacaggtaaacaaaggtgcagagatagccgtaaacgaaaaagtggactttatcgtaggtatcggaggaggaagtgtcttggacgccgcgaaagcaatttccatagtatcttccaacgaaggttacgcctgggattacgtaaggtatccggaagggagcaggctgattccctttctgaacagacccgtgataacgataccgacaacggcgggaacgggaagcgaggtaaacaggtattccgtactcacaaacccgatgacaaaagaaaaaatggtaatttcccacagcctgaactacccgaaggttgcactcgtggacccggagctaacttatagtatgcctcctagactcaccgccctcacaggctttgatgccctgatgcacgcccttgagagtttgacgaataaaagagaaaacttcatagctgaagagtactcggtaaaggcgatagagcttataaggaagtggcttcccgtagcctttgaagagccagaaaataaagaagcaaggcggtacatgagttacgcagctatgcttgcggggatagctatagaccacctcggagttgccctcatacacgcaatggaacaccccgtttcgggacactaccccgaggtggcacatgcggaaggactttcggcgctcgctccttacataaccgcctttaattacagaggaaaccctgagaagtacgccctctttgcaagactgatgggagaagaagaaaaacctcacaaagcggtggacgctctcgttaagttcatagaaaggttttctctcccaaaaaccctgaaggagcttggagtagaaaaggaaaaactcccgagacttgccgaagacgtttacatgtgcgcaaggcactcctttgccgttaaccctgtagaagtaggtatggaagaagtagaggaactctacgaaagggcttacgaaggaagattatga

SEQ ID NO: 39458 - protein, 387 aa, Aquifex aeolicus VF5
MTVVNEYRPVEVFFGEGAVKKAGEVGRRFGFKALIVTGRKSTKESGALDKLINSLKQNQIEYVVFDEITPNPTDKQVNKGAEIAVNEKVDFIVGIGGGSVLDAAKAISIVSSNEGYAWDYVRYPEGSRLIPFLNRPVITIPTTAGTGSEVNRYSVLTNPMTKEKMVISHSLNYPKVALVDPELTYSMPPRLTALTGFDALMHALESLTNKRENFIAEEYSVKAIELIRKWLPVAFEEPENKEARRYMSYAAMLAGIAIDHLGVALIHAMEHPVSGHYPEVAHAEGLSALAPYITAFNYRGNPEKYALFARLMGEEEKPHKAVDALVKFIERFSLPKTLKELGVEKEKLPRLAEDVYMCARHSFAVNPVEVGMEEVEELYERAYEGRL

SEQ ID NO: 39459 - DNA, 2685 bp, Vibrio cholerae O1 biovar eltor str. N16961
  CDS (1)..(2685): transl_table=11
atgcctgttactaatctggctgaacttgatgctctggttgctcgcgttaaagcagctcaagctgaatttgctactttctctcaagaacaagtagacaaaatcttccgcgcagcctctctagcagcaaaccaagcacgtatcccgttagcacaaatggcggtagaagaatcaggtatgggtattgttgaagataaagtaatcaaaaaccactttgcttctgagtttatctacaacaagtacaaggacgaaaaaacctgtggcatcctcgaagaagatgacaacctaggtactatgactatcgctgagcctgttggcatcatctgtggtatcgtcccaacgactaacccaacctcaaccgcgatcttcaaatcactgatttctctgaagactcgtaacggtatcatcttctctccacacccacgtgcgaaaaactcaaccaacgcagcagcgaaactggttctggatgccgcaatcgcagcgggtgcaccaaaagacatcatcggttggattgaccaaccttcagttgagctgtcaaatgctctgatgaaacacgatggtatcgcactgatccttgcgacgggtggtcctgggatggtgaaagcggcttactcttctggtaaaccagccatcggtgtaggtgcaggtaacgttccagttgttatcgatgaaactgcagatatcaaacgtgcggttgcttctatcctgatgtctaaaacgttcgacaacggtgtagtgtgtgcttctgagcaagcggctatcgtagtgagcgaagtttacgacgaagtgaaagagcgtttcgcaacgcacaaagcgcacgtcctgagcaaagcggatgcagacaaagtgcgtaaagtgctgctgattgatggcgctctgaacgcgaagatcgtaggtcaacctgctgctgctatcgctgaaatggcaggcgtaaaagtacctgcagatactaaagtgctggtgggtgaaggtctgggcaaagtctcttatgacgatgaattcgctcacgagaaactgtctccaacacttggcctgttccgtgctgacaacttcgaagacgcggttgctcaagcggtgactatggttgagatcggcggtatcggtcacacctcaggtctgtacaccaaccaagacgttaacgcagaccgtatccgttactttggtgataaactgaaaactgcccgtattcttgtcaacatcccgaccactcacggtggtatcggtgatctgtacaacttcaacgttgcaccgtctctgactctgggttgtggttcttggggtggtaactcaatctctgagaacgtaggtcctaagcacctaatcaacaagaaaactgttgcgaagcgagctgaaaacatgttgtggcacaaactacctaagtctatctacttccgccgtggtagccttccaatcgccctgagcgacctagaaggtaaaaaacgcgcattcctagttactgaccgtttcctattcaacaacggttatgcagacgatgtggttgccctgctgaaagcacaaggcatggaagttcagacattcttcgaagtagaagcggatccaacactgtctgtcgtagaaaaaggcgctgcagcaatgcaaagcttccaaccagatgtgattcttgcgctaggtggtggttcaccaatggatgcggcgaagatcatgtgggtaatgtacgagcacccagatactcactttgaagaactggctatgcgctttatggacatccgtaagcgtatctacaagttccctaaaatgggtaaaaaagcagagcttgtttgtatcactaccacttcaggtacggggtcagaagttacaccattcgcggttgtgactgacgacaagactggcgctaagtacccactggcagactacgaactgacaccacaaatggcgatcgtagatgcgaaccttgtgatgaacatgcctaagtctctgaccgctttcggtggttacgatgcggtaactcacgcactcgaagcttatgtatccgttcttgcgaacgaatactcagacggtcaagcactacaagcgctgaagatgctgaaagagtacctaccttctagctacgcgaatggtgcgaaagatccaatcgctcgtgagaaagtacacaacgcagccactatcgctggtatcgcattcgcgaacgcgttcttgggtgtatgtcactcaatggcgcacaaaatcggtgctgagttccacctaccacacggtttggcgaacgctctgctgattgctaacgtagtacgttacaacgcgaacgacaacccaaccaaacaaacggcattctctcaatacgaccgtccacaagcacgtcgtcgttacgcagaagtggcggaccacttaggtctgagccaaccgggtgaccgtactgcacagaagattgagcgtctgctgacttggttggatgaactgaaagttaacctagacattccaaaatcaatccaagctgcaggtgtagcagaagcagacttccttgcaaaagtggatgagctagcggttgaagcgtttgatgaccaatgtactggtgcaaacccacgctacccactgatcgctgagctgaaagaagttctgctggcttcttactacggtaagccattcgttgaaggtcaaactttcgaaggcaccactgttatcgtaaagaaagcagatcaagaagcggcgaaagcgccaaaagcgaaaaagtaa

SEQ ID NO: 39460 - protein, 894 aa, Vibrio cholerae O1 biovar eltor str. N16961
MPVTNLAELDALVARVKAAQAEFATFSQEQVDKIFRAASLAANQARIPLAQMAVEESGMGIVEDKVIKNHFASEFIYNKYKDEKTCGILEEDDNLGTMTIAEPVGIICGIVPTTNPTSTAIFKSLISLKTRNGIIFSPHPRAKNSTNAAAKLVLDAAIAAGAPKDIIGWIDQPSVELSNALMKHDGIALILATGGPGMVKAAYSSGKPAIGVGAGNVPVVIDETADIKRAVASILMSKTFDNGVVCASEQAAIVVSEVYDEVKERFATHKAHVLSKADADKVRKVLLIDGALNAKIVGQPAAAIAEMAGVKVPADTKVLVGEGLGKVSYDDEFAHEKLSPTLGLFRADNFEDAVAQAVTMVEIGGIGHTSGLYTNQDVNADRIRYFGDKLKTARILVNIPTTHGGIGDLYNFNVAPSLTLGCGSWGGNSISENVGPKHLINKKTVAKRAENMLWHKLPKSIYFRRGSLPIALSDLEGKKRAFLVTDRFLFNNGYADDVVALLKAQGMEVQTFFEVEADPTLSVVEKGAAAMQSFQPDVILALGGGSPMDAAKIMWVMYEHPDTHFEELAMRFMDIRKRIYKFPKMGKKAELVCITTTSGTGSEVTPFAVVTDDKTGAKYPLADYELTPQMAIVDANLVMNMPKSLTAFGGYDAVTHALEAYVSVLANEYSDGQALQALKMLKEYLPSSYANGAKDPIAREKVHNAATIAGIAFANAFLGVCHSMAHKIGAEFHLPHGLANALLIANVVRYNANDNPTKQTAFSQYDRPQARRRYAEVADHLGLSQPGDRTAQKIERLLTWLDELKVNLDIPKSIQAAGVAEADFLAKVDELAVEAFDDQCTGANPRYPLIAELKEVLLASYYGKPFVEGQTFEGTTVIVKKADQEAAKAPKAKK

SEQ ID NO: 39461 - DNA, 1149 bp, Bacillus halodurans C-125
  CDS (1)..(1149): transl_table=11
atgaatatcaataaatttgtaacaccagagattattttcgggggtcatgcaataaggcaagcaggggatgcttgtgttcggcttggtgcgaaaaaagtgttgattgttagtgataggggcgtcgcaaatgccggatggttagaaaaagtaatggaactttgtaaagagtcacatctaccatttgccacgtttgtcggtgtgacgacagacccgaaagatcgcgaggttgaacaagggtgtcaagtgtttgtgcaacatgaatgtgatgccattattggggttggaggaggaagtgtgttagatgtagcgaaagcgatcgccatccttgcaacgaacggtggagctattagtgattatgaaggaatcgataaaataaaaaaaccccttcctccaatgattatgattatgacaactgcaggatccggttctgaagtatcgcaattttcaatcatagttgattctaatcgaaaaaagaaaatgaccattgtatcaaaaacattggttcccgatattgccattattgatccttacacactcgtgacgaaggacagtagcctaaccgctacaacggggatggatgtgctgacacatgccatcgaagcgtatgtcagtattgcggccaccccgcttacagatgtccaggccaaaaatgccctcatcttgtgtgctcaatacttgcgaccctctgttgcttccaaaacgaatacagaggcgaaggaagcgatggcaatggctagcttacaagcaggacttgctttctcaaatgccattttaggggcagcgcatgcaatatcccatgcgattggagggaagtttcccttaccgcatggagaaataaacgctattcttctcccatatgtgatggattttaattttatcgcaacacctaagcgatttttagacatagcgacatgtttaggtattgatacaaggggattgacggaacgggaagcaggaaatgctgcaatccattttgtcaaagagctgtcctttgacatcggtattcccacaagatttagagaggtagggataacacaagaaatgattcatcacattagcgaagtagcgttagaagatgcctgtatgattacgaatcctcgtgacatgaatgttgagcaagtaaagcaagtattaaaaaatgttttatag

SEQ ID NO: 39462 - protein, 382 aa, Bacillus halodurans C-125
MNINKFVTPEIIFGGHAIRQAGDACVRLGAKKVLIVSDRGVANAGWLEKVMELCKESHLPFATFVGVTTDPKDREVEQGCQVFVQHECDAIIGVGGGSVLDVAKAIAILATNGGAISDYEGIDKIKKPLPPMIMIMTTAGSGSEVSQFSIIVDSNRKKKMTIVSKTLVPDIAIIDPYTLVTKDSSLTATTGMDVLTHAIEAYVSIAATPLTDVQAKNALILCAQYLRPSVASKTNTEAKEAMAMASLQAGLAFSNAILGAAHAISHAIGGKFPLPHGEINAILLPYVMDFNFIATPKRFLDIATCLGIDTRGLTEREAGNAAIHFVKELSFDIGIPTRFREVGITQEMIHHISEVALEDACMITNPRDMNVEQVKQVLKNVL

SEQ ID NO: 39463 - DNA, 2628 bp, Pasteurella multocida subsp. multocida str. Pm70
  CDS (1)..(2628): transl_table=11
atgatgagtcatactgctgaaattgaaatcagcccagcacaagcagaagtgaatgtactggttgaaaaaggattgctggcattagaagcattccgtcagcttaatcaacagcaagtggattacattgtggcaaaagcctcagtagctgctttagatcaacatggggtgcttgctatgcatgcttatgaagaaacagggcgcggggtatttgaagataaagccaccaaaaatctgtttgcctgtgaatatgtagtcaacaatatgcggaatttgaaaaccgtgggggtgatcagtgaggatgatgtcacagggatcaccgaaattgcagaccctgttggcgtggtttgcggaattaccccaacgaccaacccgacgtccaccaccattttcaaagcccttatctcgctaaaaacccgtaaccccatcgtctttgcattccatccttccgcacaacaatgttctgctcatgcggcacgcgtagtctatgaggcagccgttgcagcgggggcgccagaacattgtattcaatggattgaaaccccgtcgatggaaggcaccgcagcgctgatgaaacacccaggcattgctaccattcttgctacgggcggcaatgcgatggttgaggcggcgtattcttgtggtaaaccagctcttggcgtaggagcgggtaacgtacctgcttatgtggaaaaaagcgcaaatatcaaacaagctacacatgatattgtgatgtcaaaagcctttgataacggcatgatttgtgcctctgaacaagccgccattgtcgatcaagaggtgtacgatgaatttgtggcagaaatgcagtcttatggtgcttactttgtaaataaaaaagaaaaagccttgttagaaacatttcttttcggcgtcaaagccaacagtacaaattgtgctaacgcaaaattaaatgccgcggttgtgggaaaacctgccacatggatcgccgaacaagcgggcttcaaagtgccagaaaaaaccaatattttggtggcagcctgtcaagaagtgggcgaaaacgaaccccttacccgtgaaaaactttccccagtcctcgcgatattaaaatccacgtcaacagaacatggctttgcgttatctgaagccatggtgaatttccatggtttaggacattccgccgccattcatactaaagaggcaagcattgccaaagcctttggcgaacgcgtgaaagccattcgtgtgatctggaactcgcctgcgacctttgggggcattggcgatgtgtataatgccttcctcccgtcactcacactcggttgtggttcctacgggaaaaactccgtcggtaacaatgtcagtgcagccaatttattaaatattaaacgtgtgggaagacggagaaataacatgcaatggttcaaagtgccttcaaaaatctattttgaacgcgattcaattcaatatttacaatcaatgaaaggcatggaacgcgtggtgattgtcactgacagaaccatggtggatctaggctttgtggaaaaaattgctaaacaaattaccgcgcgtggtaaccatgtgacctaccaattgtttgctgatgtagaaccggatccatctatcgaaacggtacgccgtggcgcagcattaattcgcaactaccaacccgatacgattattgcgttaggtggtggatcggcaatggatgcagcaaaagtcatgtggttgttctatgaacaacctgaagtggatttccgtgatttagtccaaaaattcatggatattcgcaaacgggcgttcaaattcccacaattagggcgcaaagcgcgctttatcggcattccaacgacttcaggcacaggttcagaagtcacgccatttgcggtcatcaccgaaggcgataaaaaatacccgatcgctgactactcgctcaccccaacagtcgccattgtggatccggcttttgtgatgagtgtgccggcacatgttgctgcggataccggactagacgtgttaacccatgccacggaagcttatgtgtcagtgctcgccaacgactttaccgacggtttagccctacaagcgatcaagctcgtgtttgaacatttagaacgctccgtgaaagacaaagatcccgaagcgcgtgaaaaaatgcacaatgcgtccaccatggcagggatggcatttgctaacgccttcttgggcatgaaccattcccttgcacacaaaattggcgggcgtttccacactccacatggtcgtaccaatgcggtcttaatgccacatgtgattcgttataacggcacacgtccacaaaaaacggcaacgtggccaaaatacaattactacaaagcggatgtgaaataccaagatatcgcgcgtatgctcggtttaccttgtgccacaccagaagaaggggtgaaatcctttgcacaagcgtgctatgacttagccattcgcgtgggtatcaagatgtccttcaaagagcaaggtattgatgaaaaagaatggatggacgctcgtcgccaagtcgcgttactcgcctttgaagaccaatgttcgccagccaacccacgtttacctgtggtaagcgatatggaggtgatcttaaccaatgcctactatggttatgatgccaatcaatactga

SEQ ID NO: 39464 - protein, 875 aa, Pasteurella multocida subsp. multocida str. Pm70
MMSHTAEIEISPAQAEVNVLVEKGLLALEAFRQLNQQQVDYIVAKASVAALDQHGVLAMHAYEETGRGVFEDKATKNLFACEYVVNNMRNLKTVGVISEDDVTGITEIADPVGVVCGITPTTNPTSTTIFKALISLKTRNPIVFAFHPSAQQCSAHAARVVYEAAVAAGAPEHCIQWIETPSMEGTAALMKHPGIATILATGGNAMVEAAYSCGKPALGVGAGNVPAYVEKSANIKQATHDIVMSKAFDNGMICASEQAAIVDQEVYDEFVAEMQSYGAYFVNKKEKALLETFLFGVKANSTNCANAKLNAAVVGKPATWIAEQAGFKVPEKTNILVAACQEVGENEPLTREKLSPVLAILKSTSTEHGFALSEAMVNFHGLGHSAAIHTKEASIAKAFGERVKAIRVIWNSPATFGGIGDVYNAFLPSLTLGCGSYGKNSVGNNVSAANLLNIKRVGRRRNNMQWFKVPSKIYFERDSIQYLQSMKGMERVVIVTDRTMVDLGFVEKIAKQITARGNHVTYQLFADVEPDPSIETVRRGAALIRNYQPDTIIALGGGSAMDAAKVMWLFYEQPEVDFRDLVQKFMDIRKRAFKFPQLGRKARFIGIPTTSGTGSEVTPFAVITEGDKKYPIADYSLTPTVAIVDPAFVMSVPAHVAADTGLDVLTHATEAYVSVLANDFTDGLALQAIKLVFEHLERSVKDKDPEAREKMHNASTMAGMAFANAFLGMNHSLAHKIGGRFHTPHGRTNAVLMPHVIRYNGTRPQKTATWPKYNYYKADVKYQDIARMLGLPCATPEEGVKSFAQACYDLAIRVGIKMSFKEQGIDEKEWMDARRQVALLAFEDQCSPANPRLPVVSDMEVILTNAYYGYDANQY

SEQ ID NO: 39465 - DNA, 1164 bp, Pseudomonas aeruginosa PAO1
  CDS (1)..(1164): transl_table=11
atgagccacgacctcagccaactgcgtaaattcgtctcgcccgagatcatcttcggcgccggctgccggcacagcgtcgccaactacgtgaagaccttcggtgcgcgcaaggtcctgctggtctccgaccccggcgtgctcgccgccggctgggtcgccgacatccaggcaagcctggaggggcagggcatcgactactgcctgtataccgacgtttcgcccaacccccgggtcgacgaggtgatgctcggcgccgagttctatcgcagcgagggctgcaatgtgatcgtcgcggtgggcggcggcagcccgatggattgcgccaagggcatcggcatcgtcgccgcccatggccgcagcatcctcgagttcgaaggcgtcgaccggctgcgggtgccgagtccgccgctgatcctgatcccgaccaccgccgggacttcggcggacgtctcgcagttcgtgatcatttccaaccaggacgagcgcatgaagttctccgtggtgagcaaggcggttgtgcctgacgtctcgctgatcgacccggaaaccacgttgaccatggatcccttcctttcggcctgtaccggcatcgatgcactggtacacgccatcgaggcgttcgtctccaccggccacgggccgctgaccgatccccacgcgctggaagcgatgcgcctgatcgatggcaatctggtacagatgatcgccaatcccggcgacatcgccctgcgcgagaagatcatgctcgggagcatgcaggccgggctggccttctccaacgccatcctcggcgcggtgcatgccatgtcgcacagcctcggcggctatctcgacctgccccacggcctgtgcaacgcggcgctggtcgaacacgtggtggcgttcaactacagcgccgcgccggaacgcttcaaggtgatcgccgagaccttcggcatcgattgccgcggtctgacccaggggcaggtccgccagcgcctggtggaccacctgatcgccttcaagcacgccgtgggtttccacgagagcctcgccctgcacggggtcggcagctccgacattcctttcctctcgcgccacgcgatgcaggacccgtgcatccttaccaacccgcgcgagtcgagccagcgcgatgtcgaggtggtctatggcgaggccctctga

SEQ ID NO: 39466 - protein, 387 aa, Pseudomonas aeruginosa PAO1
MSHDLSQLRKFVSPEIIFGAGCRHSVANYVKTFGARKVLLVSDPGVLAAGWVADIQASLEGQGIDYCLYTDVSPNPRVDEVMLGAEFYRSEGCNVIVAVGGGSPMDCAKGIGIVAAHGRSILEFEGVDRLRVPSPPLILIPTTAGTSADVSQFVIISNQDERMKFSVVSKAVVPDVSLIDPETTLTMDPFLSACTGIDALVHAIEAFVSTGHGPLTDPHALEAMRLIDGNLVQMIANPGDIALREKIMLGSMQAGLAFSNAILGAVHAMSHSLGGYLDLPHGLCNAALVEHVVAFNYSAAPERFKVIAETFGIDCRGLTQGQVRQRLVDHLIAFKHAVGFHESLALHGVGSSDIPFLSRHAMQDPCILTNPRESSQRDVEVVYGEAL

SEQ ID NO: 39467 - DNA, 1164 bp, Pseudomonas aeruginosa PAO1
  CDS (1)..(1164): transl_table=11
atgcaagctttcagtttcgccactaccgcgcagatcctctgcgaggccggctccgccatccgcctggcggaactctgccgcgagcgaagggcgcgccgcgtgttgatcgtgaccgacccggggatcacccggctcggcttgctggatgcgatcctgcccggcttcccgcgcctgggcctggccgtcgaggtgtacgaccaggtgctcgccgatccgcccgagtcggtggtcgaggccgcgctcgggcgggcgcggggcatggctgccgagctggtggtcggtttcggcggcggcagctccatggacgtagccaagctggtcgcgctgctcgcccacccagaagcagggcaggggctcggcgaggtcttcggggtcggcaacgcacgcgggccgcgcctgccgctgatccaggtgccgaccaccgccgggaccggctccgaggtgacgccgatcgccatcgtcaccaccggcgagaccaccaagatgggcgtggtctcgccccacttgctgcccgacctggcgctgctcgacgccgacctgaccctcggcttgccgccggcggtcaccgcggcgaccggtatcgacgcgatggtgcatgcgatcgagagctataccagcaaactgaagaagaacccgctgtccgacctgctggcgcgggaggcgttgcgcctgctggcggccaacctggaacgcgcggtaggcgacggcggcgaccgcgaggcgcgccaggccatgctgctgggcgcctgcttggccgggcaggccttcgccaatgcgccggtggcggcggtgcatgccctggcctatccgctgggagggcatttccacattccccacggcctgagcaatgcgctggtgctaccggaggtgatccgtttcaacgctcccgctgccgctggactctatgccgagctggcgccgctgctgctgggcgaccgcttgcgtccgggcgatcgcgacgcgcttaccgtgcagctgatcgacgaactggcccagctcagtccgcgcaacggcctgccgagccgcttgcgcgacgccggggtggacgaggcgatgctgccgcgcctggccgccgacgcgatgctccagcagcgtctgctggtcaacaacccgcgcgaggtcggcgaggcggatgccctggcgatctatcgcgcggcatactga

SEQ ID NO: 39468 - protein, 387 aa, Pseudomonas aeruginosa PAO1
MQAFSFATTAQILCEAGSAIRLAELCRERRARRVLIVTDPGITRLGLLDAILPGFPRLGLAVEVYDQVLADPPESVVEAALGRARGMAAELVVGFGGGSSMDVAKLVALLAHPEAGQGLGEVFGVGNARGPRLPLIQVPTTAGTGSEVTPIAIVTTGETTKMGVVSPHLLPDLALLDADLTLGLPPAVTAATGIDAMVHAIESYTSKLKKNPLSDLLAREALRLLAANLERAVGDGGDREARQAMLLGACLAGQAFANAPVAAVHALAYPLGGHFHIPHGLSNALVLPEVIRFNAPAAAGLYAELAPLLLGDRLRPGDRDALTVQLIDELAQLSPRNGLPSRLRDAGVDEAMLPRLAADAMLQQRLLVNNPREVGEADALAIYRAAY

SEQ ID NO: 39469 - DNA, 1026 bp, Methanothermobacter thermautotrophicus str. Delta H
  CDS (1)..(1026): transl_table=11
gtgaccgacagggggttaatgaagactggattcgttgaggatgtcagctcctcccttgaggaggagggcctcgaatatgtcatctttgatgatgtgacgcccaacccccgtgaccatgaggtcatggagggtgctgaggtcttcgatgccgaggaatgcaacatgatagttgccctgggtggtggaagccccattgactgtgcaaaggccatgggtgctgttgtatccaacaggatgcacgtacttgactttgagggtgttgatatgatcccgaccccctcggttcccataatatgcatccccacaactgcagggacaggagcggacgtctcccagtttgcaatcatcctcgacacccggaggatggtgaagatagccatcataagcaaggccatgatacccgacgcatcactcatagaccctgagaccaccgtcaccatggaccgggaactgacagcttcaacaggtatggatgcccttgcccattccatcgaagcctatgtatccaatgcaagcttccatctgactgacctcaacgccctggacgccatcagaatcataagcaggtgcctcccatctgccgttgatgaacccgagaacatggagtaccgtgagggtatgatgcttgcaagcctcgaggctggccttgcattctcaaatgccagtctgggacttgtccatgcaatggcccacagccttggaggcaaacttgacatggcccacggtgaggccaatgcactgctacttgaacacgtgatagaattcaactaccctggagccactgaacggtaccatgaaatcgcacgggcaatgggcctcaggggctcggggcccgccgagctcattgattacatccgggaattcaggtccagcatagggatcgacatgaccctggaggatctcggcgtcggggaggacgacatacctgaacttgcagaggcctcaatgaaggacccctgcattgtaacaaaccctgtacggccctcaattgaagatgttgaggccatattcaggagggccctctga

SEQ ID NO: 39470 - protein, 341 aa, Methanothermobacter thermautotrophicus str. Delta H
MTDRGLMKTGFVEDVSSSLEEEGLEYVIFDDVTPNPRDHEVMEGAEVFDAEECNMIVALGGGSPIDCAKAMGAVVSNRMHVLDFEGVDMIPTPSVPIICIPTTAGTGADVSQFAIILDTRRMVKIAIISKAMIPDASLIDPETTVTMDRELTASTGMDALAHSIEAYVSNASFHLTDLNALDAIRIISRCLPSAVDEPENMEYREGMMLASLEAGLAFSNASLGLVHAMAHSLGGKLDMAHGEANALLLEHVIEFNYPGATERYHEIARAMGLRGSGPAELIDYIREFRSSIGIDMTLEDLGVGEDDIPELAEASMKDPCIVTNPVRPSIEDVEAIFRRAL

SEQ ID NO: 39471 - DNA, 2676 bp, Escherichia coli O157:H7 EDL933
  CDS (1)..(2676): transl_table=11
atggctgttactaatgtcgctgaacttaacgcactcgtagagcgtgtaaaaaaagcccagcgtgaatatgccagtttcactcaagagcaagtagacaaaatcttccgcgccgccgctctggctgctgcagatgctcgaatcccactcgcgaaaatggccgttgccgaatccggcatgggtatcgtcgaagataaagtgatcaaaaaccactttgcttctgaatatatctacaacgcctataaagatgaaaaaacctgtggtgttctgtctgaagacgacacttttggtaccatcactatcgctgaaccaatcggtattatttgcggtatcgttccgaccactaacccgacttcaacagctatcttcaaatcgctgatcagtctgaagacccgtaacgccattatcttctccccgcacccgcgtgcaaaagatgcgaccaacaaagcggctgatatcgttctgcaggctgctatcgctgccggtgctccgaaagatctgatcggstggatcgatcaaccttctgttgaactgtctaacgcactgatgcaccacccagacatcaacctgatcctcgcgactggtggtccgggcatggttaaagccgcatacagctccggtaaaccagctatcggcgtaggcgcgggcaacactccggttgttatcgatgaaactgctgatatcaaacgtgcagttgcatctgtactgatgtccaaaaccttcgacaacggcgtaatctgtgcttctgaacagtctgttgttgtcgttgactctgtttatgacgcagtacgtgaacgtttcgcaacccacggcggctatctgttgcagggtaaagagctgaaagctgttcaggacgttatcctgaaaaacggtgcgctgaacgcggctatcgttggtcagccagcctataaaattgctgaactggcaggcttctctgtaccagaaaacaccaagattctgatcggtgaagtgaccgttgttgatgaaagcgaaccgttcgcacatgaaaaactgtccccgactctggcaatgtaccgcgctaaagatttcgaagacgcggtagaaaaagcagagaaactggttgctatgggtggtatcggtcatacctcttgcctgtacactgaccaggataaccaaccggctcgcgtttcttacttcggtcagaaaatgaaaacggctcgtatcctgattaacaccccggcttctcagggtggtatcggtgacctgtataacttcaaactcgcaccttccctgactctgggttgtggttcctggggtggtaactccatctctgaaaacgttggtccgaaacacctgatcaacaagaaaaccgttgctaagcgagctgaaaacatgttgtggcacaaacttccgaaatctatctacttccgccgtggctccctgccaatcgcgctggatgaagtgattactgatggccacaaacgtgcgctcatcgtgactgaccgcttcctgttcaacaatggttatgctgatcagatcacttccgtactgaaagcagcaggcgttgaaactgaagtcttcttcgaagtagaagcggacccgaccctgagcatcgttcgtaaaggtgcagaactggcaaactccttcaaaccagacgtgattatcgcgctgggtggtggttccccgatggacgccgcgaagatcatgtgggttatgtacgaacatccggaaactcacttcgaagagctggcgctgcgctttatggatatccgtaaacgtatctacaagttcccgaaaatgggcgtgaaagcgaaaatgattgctgtcaccaccacttctggtacaggttctgaagtcactccgtttgcggttgtaactgacgacgctactggtcagaaatacccgctggcggactatgcgctgaccccggatatggcgattgtcgacgccaacctggttatggacatgccgaagtccctgtgtgctttcggtggtctggacgcagtaactcacgccatggaagcttatgtttctgtactggcatctgagttctctgatggtcaggctctgcaggcactgaaactgctgaaagaatatctgccagcgtcctaccacgaagggtctaaaaatccggtagcgcgtgaacgtgttcacagtgcarcgactatcgcgggtatcgcgtttgcgaacgccttcctgggtgtatgtcactcaatggcgcacaaactgggttcccagttccatattccgcacggtctggcaaacgccctgctgatttgtaacgttattcgctacaatgcgaacgacaacccgaccaagcagactgcattcagccagtatgaccgtccgcaggctcgccgtcgttatgctgaaattgccgaccacctgggtctgagcgcaccgggcgaccgtactgctgctaagatcgagaaactgctggcatggctggaaacgctgaaggctgaactgggtattccgaaatctatccgtgaagctggcgttcaggaagcagacttcctggcgaacgtggataaactgtctgaagatgcattcgatgaccagtgcactggcgctaacccgcgttacccgctgatctccgagctgaaacagattctgctggatacctactacggtcgtgattatgtagaaggtgaaactgcagcgaaaaaagaagccgctccggctaaagctgagaaaaaagcgaaaaaatccgcttaa

SEQ ID NO: 39472 - protein, 891 aa, Escherichia coli O157:H7 EDL933
  misc_feature (707)..(707): Xaa can be any naturally occuring amino acid
MAVTNVAELNALVERVKKAQREYASFTQEQVDKIFRAAALAAADARIPLAKMAVAESGMGIVEDKVIKNHFASEYIYNAYKDEKTCGVLSEDDTFGTITIAEPIGIICGIVPTTNPTSTAIFKSLISLKTRNAIIFSPHPRAKDATNKAADIVLQAAIAAGAPKDLIGWIDQPSVELSNALMHHPDINLILATGGPGMVKAAYSSGKPAIGVGAGNTPVVIDETADIKRAVASVLMSKTFDNGVICASEQSVVVVDSVYDAVRERFATHGGYLLQGKELKAVQDVILKNGALNAAIVGQPAYKIAELAGFSVPENTKILIGEVTVVDESEPFAHEKLSPTLAMYRAKDFEDAVEKAEKLVAMGGIGHTSCLYTDQDNQPARVSYFGQKMKTARILINTPASQGGIGDLYNFKLAPSLTLGCGSWGGNSISENVGPKHLINKKTVAKRAENMLWHKLPKSIYFRRGSLPIALDEVITDGHKRALIVTDRFLFNNGYADQITSVLKAAGVETEVFFEVEADPTLSIVRKGAELANSFKPDVIIALGGGSPMDAAKIMWVMYEHPETHFEELALRFMDIRKRIYKFPKMGVKAKMIAVTTTSGTGSEVTPFAVVTDDATGQKYPLADYALTPDMAIVDANLVMDMPKSLCAFGGLDAVTHAMEAYVSVLASEFSDGQALQALKLLKEYLPASYHEGSKNPVARERVHSAXTIAGIAFANAFLGVCHSMAHKLGSQFHIPHGLANALLICNVIRYNANDNPTKQTAFSQYDRPQARRRYAEIADHLGLSAPGDRTAAKIEKLLAWLETLKAELGIPKSIREAGVQEADFLANVDKLSEDAFDDQCTGANPRYPLISELKQILLDTYYGRDYVEGETAAKKEAAPAKAEKKAKKSA

SEQ ID NO: 39473 - DNA, 1215 bp, Escherichia coli O157:H7 EDL933
  CDS (1)..(1215): transl_table=11
gtgggcgagagaaagcggaggggctatatgcaaaatgaattgcagaccgcgctctttcaggcgttcgataccctgaatctgcaacgggtaaaaacatttagcgttccaccggtgacgctttgcggtccgggctcggtgagcagttgcggacagcaagcgcaaacgcgtgggctgaaacatctgttcgtgatggcagacagctttttgcatcaggcagggatgaccgccgggctgacgcgtagcctggccgttaaaggtatcgccatgacgctctggccatgtccggtgggcgaaccgtgcattaccgacgtgtgtgcagccgtggcgcagttgcgtgagtcaggttgtgacggggtgatcgcatttggcggcggctcggtgctggatgcggcgaaagccgtggcgttgctggtgacgaacccggatagcacgctggcagagatgtcagaaaccagcgttctgcaaccgcgcttgccgctgattgccattccaactaccgccggaaccggctctgaaaccaccaatgtaacggtgattatcgacgcggtgagcgggcgcaagcaggtgttagcccatgcctcgctgatgccggatgtggcgatcctcgacgccgcattgaccgaaggtgtgccgtcgcatgtcacggcgatgaccggcattgatgcgttaacccatgccattgaagcatacagcgccctgaacgctacaccgtttaccgacagtctggcgattggtgccattgcgatgattggcaaatcgctgccgaaagcggtgggctacggtcacgaccttgccgcgcgcgagagcatgttgctggcttcatgtatggcgggaatggcgttttccagtgcgggtcttgggttgtgccacgcgatggcgcatcagccgggcgcggcgctgcatattccgcacggtctcgcgaacgctatgttgctgccaacggtgatggagtttaaccggatggtttgtcgcgaacgctttagtcagattggtcgggcactgcgaactaaaaaatccgacgatcgtgacgctattaacgcggtaagtgagctgattgcggaagttgggattggtaaacgactgggcgatgttggcgcgacatctgcgcattacggtgcatgggcgcaggccgcgctggaagatatttgtctgcgcagcaacccgcgtaccgccagcctggaacagcttgtcggcctgtacgcagcggcgcaataa

SEQ ID NO: 39474 - protein, 404 aa, Escherichia coli O157:H7 EDL933
MGERKRRGYMQNELQTALFQAFDTLNLQRVKTFSVPPVTLCGPGSVSSCGQQAQTRGLKHLFVMADSFLHQAGMTAGLTRSLAVKGIAMTLWPCPVGEPCITDVCAAVAQLRESGCDGVIAFGGGSVLDAAKAVALLVTNPDSTLAEMSETSVLQPRLPLIAIPTTAGTGSETTNVTVIIDAVSGRKQVLAHASLMPDVAILDAALTEGVPSHVTAMTGIDALTHAIEAYSALNATPFTDSLAIGAIAMIGKSLPKAVGYGHDLAARESMLLASCMAGMAFSSAGLGLCHAMAHQPGAALHIPHGLANAMLLPTVMEFNRMVCRERFSQIGRALRTKKSDDRDAINAVSELIAEVGIGKRLGDVGATSAHYGAWAQAALEDICLRSNPRTASLEQLVGLYAAAQ

SEQ ID NO: 39475 - DNA, 1188 bp, Escherichia coli O157:H7
  CDS (1)..(1188): transl_table=11
atgcaaaatgaattgcagaccgcgctctttcaggcgttcgataccctgaatctgcaacgggtaaaaacatttagcgttccaccggtgacgctttgcggtccgggctcggtgagcagttgcggacagcaagcgcaaacgcgtgggctgaaacatctgttcgtgatggcagacagctttttgcatcaggcagggatgaccgccgggctgacgcgtagcctggccgttaaaggtatcgccatgacgctctggccatgtccggtgggcgaaccgtgcattaccgacgtgtgtgcagccgtggcgcagttgcgtgagtcaggttgtgacggggtgatcgcatttggcggcggctcggtgctggatgcggcgaaagccgtggcgttgctggtgacgaacccggatagcacgctggcagagatgtcagaaaccagcgttctgcaaccgcgcttgccgctgattgccattccaactaccgccggaaccggctctgaaaccaccaatgtaacggtgattatcgacgcggtgagcgggcgcaagcaggtgttagcccatgcctcgctgatgccggatgtggcgatcctcgacgccgcattgaccgaaggtgtgccgtcgcatgtcacggcgatgaccggcattgatgcgttaacccatgccattgaagcatacagcgccctgaacgctacaccgtttaccgacagtctggcgattggtgccattgcgatgattggcaaatcgctgccgaaagcggtgggctacggtcacgaccttgccgcgcgcgagagcatgttgctggcttcatgtatggcgggaatggcgttttccagtgcgggtcttgggttgtgccacgcgatggcgcatcagccgggcgcggcgctgcatattccgcacggtctcgcgaacgctatgttgctgccaacggtgatggagtttaaccggatggtttgtcgcgaacgctttagtcagattggtcgggcactgcgaactaaaaaatccgacgatcgtgacgctattaacgcggtaagtgagctgattgcggaagttgggattggtaaacgactgggcgatgttggcgcgacatctgcgcattacggtgcatgggcgcaggccgcgctggaagatatttgtctgcgcagcaacccgcgtaccgccagcctggaacagcttgtcggcctgtacgcagcggcgcaataa

SEQ ID NO: 39476 - protein, 395 aa, Escherichia coli O157:H7
MQNELQTALFQAFDTLNLQRVKTFSVPPVTLCGPGSVSSCGQQAQTRGLKHLFVMADSFLHQAGMTAGLTRSLAVKGIAMTLWPCPVGEPCITDVCAAVAQLRESGCDGVIAFGGGSVLDAAKAVALLVTNPDSTLAEMSETSVLQPRLPLIAIPTTAGTGSETTNVTVIIDAVSGRKQVLAHASLMPDVAILDAALTEGVPSHVTAMTGIDALTHAIEAYSALNATPFTDSLAIGAIAMIGKSLPKAVGYGHDLAARESMLLASCMAGMAFSSAGLGLCHAMAHQPGAALHIPHGLANAMLLPTVMEFNRMVCRERFSQIGRALRTKKSDDRDAINAVSELIAEVGIGKRLGDVGATSAHYGAWAQAALEDICLRSNPRTASLEQLVGLYAAAQ

SEQ ID NO: 39477 - DNA, 1152 bp, Escherichia coli O157:H7
  CDS (1)..(1152): transl_table=11
atggcatcttcaactttctttattccttctgtgaatgtcatcggcgctgattcattgactgatgcaatgaatatgatggcagattatggatttacccgtaccttaattgtcactgacagtatgttaacgaaattaggtatggcgggcgatgtgcaaaaagcactggaagaacgcaatatttttagcgttatttatgatggcacccaacctaaccccaccacggaaaacgtcgccgcaggtttgaaattacttaaagagaataattgcgatagcgtgatctccttaggcggtggttctccacacgactgcgcaaaaggtattgcgctggtggcagccaatggcggcgatattcgcgattacgaaggcgttgaccgctctgcaaaaccgcagctgccgatgatcgccatcaataccacggcgggtacggcctctgaaatgacccgtttctgcatcatcactgacgaagcgcgtcatatcaaaatggcgattgttgataaacatgtcactccgctgctttctgtcaatgactcctctctgatgattggtatgccgaagtcactgaccgccgcaacgggtatggatgccttaacgcacgctatcgaagcgtatgtttctattgccgccacgccgatcactgacgcttgtgcactgaaagccgtgaccatgattgccgaaaacctgccgttagccgttgaagatggcagtaatgcgaaagcgcgtgaagcaatggcttatgcccagttcctcgccggtatggcgttcaataatgcttctctgggttatgttcatgcgatggcgcaccagctgggcggtttctacaacctgccacacggtgtatgtaacgccgttctgctgccgcatgttcaggtattcaacagcaaagtcgccgctgcacgtctgcgtgactgtgccgctgcaatgggcgtgaacgtgacaggtaaaaacgacgcggaaggtgctgaagcctgcattaacgccatccgtgaactggcgaagaaagtggatatcccggcaggcctacgcgacctgaacgtgaaagaagaagatttcgcggttctggcggctaatgccctgaaagatgcctgtggctttactaacccgatccaggcaactcacgaagaaattgtggcgatttatcgcgcagcgatgtaa

SEQ ID NO: 39478 - protein, 383 aa, Escherichia coli O157:H7
MASSTFFIPSVNVIGADSLTDAMNMMADYGFTRTLIVTDSMLTKLGMAGDVQKALEERNIFSVIYDGTQPNPTTENVAAGLKLLKENNCDSVISLGGGSPHDCAKGIALVAANGGDIRDYEGVDRSAKPQLPMIAINTTAGTASEMTRFCIITDEARHIKMAIVDKHVTPLLSVNDSSLMIGMPKSLTAATGMDALTHAIEAYVSIAATPITDACALKAVTMIAENLPLAVEDGSNAKAREAMAYAQFLAGMAFNNASLGYVHAMAHQLGGFYNLPHGVCNAVLLPHVQVFNSKVAAARLRDCAAAMGVNVTGKNDAEGAEACINAIRELAKKVDIPAGLRDLNVKEEDFAVLAANALKDACGFTNPIQATHEEIVAIYRAAM

SEQ ID NO: 39479 - DNA, 2652 bp, Streptococcus pneumoniae TIGR4
  CDS (1)..(2652): transl_table=11
atggctgataaaaaaactgtgacaccagaggaaaagaaactcgttgctgaaaaacacgtagatgagttggttcaaaaagctctagttgcccttgaagaaatgcgtaaattggatcaagaacaagttgactacatcgttgccaaagcatcagtagcagctttggatgcccacggagaattggctttacatgcctttgaagaaacaggacgtggtgtatttgaagacaaagcaactaagaacttgtttgcctgtgaacacgtagtaaacaacatgcgccacactaagacagttggcgttatcgaagaagacgatgtaacaggattgactcttattgctgaaccagttggtgttgtttgtggtattactccaacaacaaacccaacatcaacagcaatcttcaaatcattgatttcattgaagacacgtaacccaatcgtctttgccttccatccatcagcacaagaatcatctgctcatgcagctcgtatcgtccgcgatgcagctatcgcagctggtgctcctgaaaactgtgtgcaatggattactcaaccatctatggaagcaacaagtgcccttatgaaccacgaaggtgttgcgacaatccttgcaacaggtggtaatgccatggttaaggcggcttattcatgtggtaaaccagctcttggggtaggtgccggaaacgttccagcttatgttgaaaaatcagcaaacattcgtcaagcagcacacgatatcgtcatgtctaaatcatttgataacggtatggtctgtgcatctgaacaagcagttatcattgataaagaaatttacgatgaatttgtagcagagttcaaatcttaccacacttactttgtaaacaaaaaagaaaaagctcttcttgaagagttctgcttcggcgtcaaagcaaacagcaaaaactgtgctggtgcaaaattgaacgctgacatcgttggtaaaccagcaacttggattgcagaacaagcaggatttacagttccagaaggaacaaacattcttgctgcagaatgtaaagaagttggcgaaaatgagccattgactcgtgaaaaattgtcaccagttattgcagttttgaaatctgaaagccgtgaagatggtattactaaggctcgtcaaatggttgaatttaacggtcttggacactcagcagctatccacacagctgacgaagaattgactaaagaatttggtaaagctgttaaagctattcgtgttatctgtaactcaccttctacttttggtggtatcggggacgtttacaatgccttcttgccatcattgacacttggatgtggttcttacggacgcaactcagttggggataacgttagtgccattaacctcttgaatatcaaaaaagtcggaagacggagaaataacatgcaatggatgaaacttccttcaaaaacatactttgaacgtgattcaattcaataccttcaaaaatgtcgtgacgttgaacgtgtcatgatcgttactgaccatgccatggtagagcttggtttccttgatcgtatcatcgaacaactggaccttcgtcgcaataaggttgtttaccaaatctttgcggatgtagaaccggatccagatatcacaactgtaaaccgtggtactgagattatgcgtgccttcaaaccagataccatcatcgcactcggtggtgggtctccaatggatgctgccaaagtaatgtggctcttctacgagcaaccagaagtggacttccgtgaccttgtccaaaaattcatggatatccgtaaacgtgccttcaagttcccattgcttggtaagaagactaaattcatcgcgattccaactacatctggtacaggatctgaagtaacaccatttgccgttatctctgataaagcaaacaaccgtaaatacccaatcgctgactactcattgacaccaactgtggcaatcgtagatcctgctttggtattgacagttccaggatttgttgctgctgatactggtatggacgtattgactcacgcgacagaagcatacgtatcacaaatggctagtgactacactgatggtttagcacttcaagccattaaattggtctttgaaaatctcgaaagctcagttaagaatgcagacttccactcacgtgagaaaatgcataacgcttcaacaatcgctggtatggcctttgccaatgccttcctaggtatttctcactcaatggcccataagattggtgcgcaattccacacaatccacggtcgtacaaatgctatcttgcttccatacgttatccgttacaacggtacacgtccagctaagacagcaacatggcctaagtacaactactaccgtgcagatgaaaaataccaagatatcgcacgcatgcttggacttccagcttctactccagaagaaggggttgaatcttacgcaaaagctgtctacgaactcggtgaacgtattgggatccaaatgaattttagagaccaaggaattgacgaaaaagaatggaaagaacattctcgtaaattagccttcctggcttatgaagaccaatgttcaccagctaacccacgtcttccaatggtagaccatatgcaagaaatcatcgaagatgcatactatggctacaaagaaagaccaggacgccgtaaataa

SEQ ID NO: 39480 - protein, 883 aa, Streptococcus pneumoniae TIGR4
MADKKTVTPEEKKLVAEKHVDELVQKALVALEEMRKLDQEQVDYIVAKASVAALDAHGELALHAFEETGRGVFEDKATKNLFACEHVVNNMRHTKTVGVIEEDDVTGLTLIAEPVGVVCGITPTTNPTSTAIFKSLISLKTRNPIVFAFHPSAQESSAHAARIVRDAAIAAGAPENCVQWITQPSMEATSALMNHEGVATILATGGNAMVKAAYSCGKPALGVGAGNVPAYVEKSANIRQAAHDIVMSKSFDNGMVCASEQAVIIDKEIYDEFVAEFKSYHTYFVNKKEKALLEEFCFGVKANSKNCAGAKLNADIVGKPATWIAEQAGFTVPEGTNILAAECKEVGENEPLTREKLSPVIAVLKSESREDGITKARQMVEFNGLGHSAAIHTADEELTKEFGKAVKAIRVICNSPSTFGGIGDVYNAFLPSLTLGCGSYGRNSVGDNVSAINLLNIKKVGRRRNNMQWMKLPSKTYFERDSIQYLQKCRDVERVMIVTDHAMVELGFLDRIIEQLDLRRNKVVYQIFADVEPDPDITTVNRGTEIMRAFKPDTIIALGGGSPMDAAKVMWLFYEQPEVDFRDLVQKFMDIRKRAFKFPLLGKKTKFIAIPTTSGTGSEVTPFAVISDKANNRKYPIADYSLTPTVAIVDPALVLTVPGFVAADTGMDVLTHATEAYVSQMASDYTDGLALQAIKLVFENLESSVKNADFHSREKMHNASTIAGMAFANAFLGISHSMAHKIGAQFHTIHGRTNAILLPYVIRYNGTRPAKTATWPKYNYYRADEKYQDIARMLGLPASTPEEGVESYAKAVYELGERIGIQMNFRDQGIDEKEWKEHSRKLAFLAYEDQCSPANPRLPMVDHMQEIIEDAYYGYKERPGRRK

SEQ ID NO: 39481 - DNA, 1152 bp, Streptococcus pneumoniae TIGR4
  CDS (1)..(1152): transl_table=11
atggctatattttatgttccggcagtcaaccttattggaaaaggtgttgtaaatgaagtgggtccttatatcaaggaacttggctataaaaaggcacttttggtgacagataagtacatcgaaggcagtgatattttacctaagactttaaaaccactggatacagaaggaatcgaatatgtcatctttagcgatgtagagccaaaccctacttgtaaaaatgtcacagatggggtagctgctttgcaagaacatggctgtgactttatcatcagtcttggcgggggttctccacaggatgcagctagttgtatttctatcatggctacaaatggtggaaaaccacaggattatgaagggcttcataagtctgctaaaaaaggcttgccagttgtggctatcaatacaacggcaggtacatcagcagaaattaccattaactatgtgattactgatgaagaacgcaaggttaagatggtaatggttgacaagaatagccttgctcttatctctgttaatgaccctgaactcatgctttccaaacctaaaggcctgactgctgctactggtatggatgctctgactcatgctgttgaagctttggtaacacctggtgcttatgatgtaaccaagaaactgtctattggtgctattgagcttatcaaggaatatcttcctcgtgctgtagaaaatggacatgatattgaagcgcgtgaaggtatggtcaatgccatcttccttggtggtatgagctttaataatgctggtcttggctatgttcactcaatggctcaccaactcggtgcagtatataatttgccacatggcgtgtgctgtgccatgttgctaccagttatagaacgtgaaaatgctaaacgtgtaccagaagctttccgcaatgttgccaaagccttgggacttcatgtagaaggtaaatcagatcaagaatgtgccgattatgcgattgctgagattgagaagctttctgagacagtaggtattcctaagaaactgactgaacttggtattgaagaaaaagatttcgactttgaatacctttctaagaatgccttgattgatgcctgcgcaccaggaaatccatttatgccaaccttagaagaaacgattgccttttataaagagttattttag

SEQ ID NO: 39482 - protein, 383 aa, Streptococcus pneumoniae TIGR4
MAIFYVPAVNLIGKGVVNEVGPYIKELGYKKALLVTDKYIEGSDILPKTLKPLDTEGIEYVIFSDVEPNPTCKNVTDGVAALQEHGCDFIISLGGGSPQDAASCISIMATNGGKPQDYEGLHKSAKKGLPVVAINTTAGTSAEITINYVITDEERKVKMVMVDKNSLALISVNDPELMLSKPKGLTAATGMDALTHAVEALVTPGAYDVTKKLSIGAIELIKEYLPRAVENGHDIEAREGMVNAIFLGGMSFNNAGLGYVHSMAHQLGAVYNLPHGVCCAMLLPVIERENAKRVPEAFRNVAKALGLHVEGKSDQECADYAIAEIEKLSETVGIPKKLTELGIEEKDFDFEYLSKNALIDACAPGNPFMPTLEETIAFYKELF

SEQ ID NO: 39483 - DNA, 1251 bp, Agrobacterium tumefaciens str. C58
  CDS (1)..(1251): transl_table=11
ttgctggaccggcgtcaaggaaaccggccgtggcggttcgctctccgtcctcggtttccagaatctgacccgcccgaaatcctaccatctgaagaaagtcacgaaatgaatatcgtcgccaactggagttatcccaccgccgtcaagcttggccgtggccggatcaaggaactggcggaagcctgcaaaacgctcggcatcaggaagccgctgctcgtcacggatcgtggccttgccaatatggcgatcaccgcgcatgcgctggatgtgctggaagaggcgggtcttggccgggcgatctttgccgatgtcgatccgaaccccaacgaaatcaacatggaagccggcgtcaaggcttaccgcgatggcggtcatgacggcgtcgtcgcctttggcggcggctcgggcctcgatctcggcaagatgatcgccttcatggccgggcagacacgtccggtctgggatttcgaggatatcggtgattggtggacacgcgctgatgcgtcgaagatcgcgcccatcgtcgcagtcccgacgacggctggcaccggttcggaagtcggccgcgccagcgtcatcaccaattcgcagacgcatgtgaagaagatcatcttccatcccaagctgcttcccggtgtcgtcatctgcgatccggaactgacggtcggcatgccgaaggtcatcacggccggcaccggcatggatgccttcgcccattgcctcgaagcgtattcgtcaccgttcttccacccgatgagtgctggtgtcgcgcttgagggcctgcgtctcgtcaaggaattcctgccgcgcgcctataaggatggcacggatatcgaagcccgcaccaatatgatggcggcggcggcgatgggggcggttgccttccagaagggtctcggggccattcattcgctctcgcatccgatcggggcggtctacaacacccatcacggcatgaccaatgccgtcgtcatgccggcggtgctgcgtttcaaccgtcctgccatcgaagacaagatcgcgcgtgctgccgcctatctcggcatttccggcggttttgacggtttttatgactacgtgctggatcttcgcagggaactcggcgtgccggaaaacctgaccgccatgggcatcaagcctgatcgtatcgacgagctggcggcagaagcgatcaaggatccgagctgcggtggtaatccggtgccgatgacgcttgagaataccaaggcgctttttgaggcttgcttttaa

SEQ ID NO: 39484 - protein, 416 aa, Agrobacterium tumefaciens str. C58
MLDRRQGNRPWRFALRPRFPESDPPEILPSEESHEMNIVANWSYPTAVKLGRGRIKELAEACKTLGIRKPLLVTDRGLANMAITAHALDVLEEAGLGRAIFADVDPNPNEINMEAGVKAYRDGGHDGVVAFGGGSGLDLGKMIAFMAGQTRPVWDFEDIGDWWTRADASKIAPIVAVPTTAGTGSEVGRASVITNSQTHVKKIIFHPKLLPGVVICDPELTVGMPKVITAGTGMDAFAHCLEAYSSPFFHPMSAGVALEGLRLVKEFLPRAYKDGTDIEARTNMMAAAAMGAVAFQKGLGAIHSLSHPIGAVYNTHHGMTNAVVMPAVLRFNRPAIEDKIARAAAYLGISGGFDGFYDYVLDLRRELGVPENLTAMGIKPDRIDELAAEAIKDPSCGGNPVPMTLENTKALFEACF

SEQ ID NO: 39485 - DNA, 2673 bp, Streptococcus pneumoniae R6
  CDS (1)..(2673): transl_table=11
ttgaaagctatggaggaaaatatggctgataaaaaaactgtgacaccagaggaaaagaaactcgttgctgaaaagcacgtagatgagttggttcaaaaagctctagttgcccttgaagaaatgcgtaaattgaatcaagagcaagttgactacatcgttgccaaagcatcagtagcagctttggatgcccatggagaattggctttacatgcctttgaagaaacaggacgtggtgtatttgaagataaagcaactaagaacttgtttgcttgtgaacacgtagtaaacaacatgcgccacactaagacagttggtgttatcgaagaagacgatgtaacaggattgactcttattgctgaaccagttggtgttgtttgtggtattactccaacaacaaacccaacatcaacagcaatcttcaaatcattgatttcattgaagacacgtaacccaatcgtctttgccttccatccatcagcacaagaatcatctgctcatgcagctcgtatcgtccgcgatgcagctatcgcagctggtgctcctgaaaactgtgtgcaatggattactcaaccatctatggaagcaacaagtgcccttatgaaccacgaaggtgttgcgacaatccttgcaacaggtggtaatgccatggttaaagccgcatactcatgtggtaaaccagctcttggggtaggtgccggaaacgttccagcttatgttgaaaaatcagcaaacattcgtcaagcagcacacgatatcgtcatgtctaaatcatttgataacggtatggtctgtgcatctgaacaagcagttatcattgataaagaaatttacgatgaatttgtagcagagttcaaatcttaccacacttactttgtaaacaaaaaagaaaaagctcttcttgaagagttctgcttcggcgtcaaagcaaacagcaaaaactgtgctggtgcaaaattgaacgctgacatcgttggtaaaccagcaacttggattgcagaacaagcaggatttacagttccagaaggaacaaacattcttgctgcagaatgtaaagaagttggcgaaaatgagccattgactcgtgaaaaattgtcaccagttattgcagttttgaaatctgaaagccgtgaagatggtattactaaggctcgtcaaatggttgaatttaacggtcttggacactcagcagctatccacacagctgacgaagaattgactaaagaatttggtaaagctgttaaagctattcgtgttatctgtaactcaccttctacttttggtggtatcggggacgtttacaatgccttcttgccatcattgacacttggatgtggttcttacggacgcaactcagttggggataacgttagtgccattaacctcttgaatatcaaaaaagtcggaagacggagaaataacatgcaatggatgaaacttccttcaaaaacatactttgaacgtgattcaattcaataccttcaaaaatgtcgtgacgttgaacgtgtcatgatcgttactgaccatgccatggtagagcttggtttccttgatcgtatcatcgaacaactggaccttcgtcgcaataaggttgtttaccaaatctttgcggatgtagaaccggatccagatatcacaactgtaaaccgtggtactgagattatgcgtgccttcaaaccagataccatcatcgcactcggtggtgggtctccaatggatgctgccaaagtaatgtggctcttctacgagcaaccagaagtggacttccgtgaccttgtccaaaaattcatggatatccgtaaacgtgccttcaagttcccattgcttggtaagaagactaaattcatcgcgattccaactacatctggtacaggatctgaagtaacaccatttgccgttatctctgataaagcaaacaaccgtaaatacccaatcgctgactactcattgacaccaactgtggcaatcgtagatcctgctttggtattgacagttccaggatttgttgctgctgatactggtatggacgtattgactcacgcgacagaagcatacgtatcacaaatggctagtgactacactgatggtttagcacttcaagccattaaattggtctttgaaaatctcgaaagctcagttaagaatgcagacttccactcacgtgagaaaatgcataacgcttcaacaatcgctggtatggcctttgccaatgccttcctaggtatttctcactcaatggcccataagattggtgcgcaattccacacaatccacggtcgtacaaatgctatcttgcttccatacgttatccgttacaacggtacacgtccagctaagacagcaacatggcctaagtacaactactaccgtgcagatgaaaaataccaagatatcgcacgcatgcttggacttccagcttctactccagaagaaggggttgaatcttacgcaaaagctgtctacgaactcggtgaacgtattgggatccaaatgaattttagagaccaaggaattgacgaaaaagaatggaaagaacattctcgtgaattagccttcctggcttatgaagaccaatgttcaccagctaacccacgtcttccaatggtagaccatatgcaagaaatcatcgaagatgcatactatggctacaaagaaagaccaggacgccgtaaataa

SEQ ID NO: 39486 - protein, 890 aa, Streptococcus pneumoniae R6
MKAMEENMADKKTVTPEEKKLVAEKHVDELVQKALVALEEMRKLNQEQVDYIVAKASVAALDAHGELALHAFEETGRGVFEDKATKNLFACEHVVNNMRHTKTVGVIEEDDVTGLTLIAEPVGVVCGITPTTNPTSTAIFKSLISLKTRNPIVFAFHPSAQESSAHAARIVRDAAIAAGAPENCVQWITQPSMEATSALMNHEGVATILATGGNAMVKAAYSCGKPALGVGAGNVPAYVEKSANIRQAAHDIVMSKSFDNGMVCASEQAVIIDKEIYDEFVAEFKSYHTYFVNKKEKALLEEFCFGVKANSKNCAGAKLNADIVGKPATWIAEQAGFTVPEGTNILAAECKEVGENEPLTREKLSPVIAVLKSESREDGITKARQMVEFNGLGHSAAIHTADEELTKEFGKAVKAIRVICNSPSTFGGIGDVYNAFLPSLTLGCGSYGRNSVGDNVSAINLLNIKKVGRRRNNMQWMKLPSKTYFERDSIQYLQKCRDVERVMIVTDHAMVELGFLDRIIEQLDLRRNKVVYQIFADVEPDPDITTVNRGTEIMRAFKPDTIIALGGGSPMDAAKVMWLFYEQPEVDFRDLVQKFMDIRKRAFKFPLLGKKTKFIAIPTTSGTGSEVTPFAVISDKANNRKYPIADYSLTPTVAIVDPALVLTVPGFVAADTGMDVLTHATEAYVSQMASDYTDGLALQAIKLVFENLESSVKNADFHSREKMHNASTIAGMAFANAFLGISHSMAHKIGAQFHTIHGRTNAILLPYVIRYNGTRPAKTATWPKYNYYRADEKYQDIARMLGLPASTPEEGVESYAKAVYELGERIGIQMNFRDQGIDEKEWKEHSRELAFLAYEDQCSPANPRLPMVDHMQEIIEDAYYGYKERPGRRK

SEQ ID NO: 39487 - DNA, 1152 bp, Streptococcus pneumoniae R6
  CDS (1)..(1152): transl_table=11
atggctacattttatgttccggcagtcaaccttattggaaaaggtgttgtaaatgaagtgggtccttatatcaaggaacttggctataaaaaggcacttttggtgacagataagtacatcgaaggcagtgatattttacctaagactttaaaaccactggatacagaaggaatcgaatatgtcatctttagcgatgtagagccaaaccctacttgtaagaatgtcacagatggggtagctgctttgcaagaacatggatgtgattttatcatcagtcttggcgggggttctccacaggatgcagctagttgtatttctatcatggctacaaatggtggaaaaccacaggattatgaagggcttcataagtctgctaaaaaaggcttgccagttgtggctatcaatacaacggcaggaacttctgcagaaatcactattaactatgtgattactgatgaagaacgcaaggttaagatggtaatggttgacaagaatagccttgccttgatttctgttaatgacccggaactcatgctttccaaacctaaaggcctgactgctgctactggtatggatgctctgactcacgctgttgaagctttggtaacacctggtgcttatgatgtaaccaagaaactgtctattggtgctattgagcttatcaaggaatatcttcctcgtgctgtagcaaacggacatgatattgaagcgcgtgaaggtatggtcaatgccatcttccttggtggtatgagctttaataatgctggtcttggttatgttcactcaatggctcaccaactcggtgcagtatataatttgccacatggtgtttgctgtgccatgttgctaccagttatagaacgtgaaaatgctaaacgtgtaccagaagctttccgcaatgttgccaaagccttgggacttcatgtagaaggtaaatcagatcaagagtgtgccgattatgcgattgctgagattgagaagctttctgagacagtaggtattcctaagaaattgactgaacttggtattgaagaaaaagatttcgactttgaatacctttctaagaatgccttgattgatgcctgcgcaccaggaaatccatttatgccaaccttagaagaaacgattgccttttataaagagttattttag

SEQ ID NO: 39488 - protein, 383 aa, Streptococcus pneumoniae R6
MATFYVPAVNLIGKGVVNEVGPYIKELGYKKALLVTDKYIEGSDILPKTLKPLDTEGIEYVIFSDVEPNPTCKNVTDGVAALQEHGCDFIISLGGGSPQDAASCISIMATNGGKPQDYEGLHKSAKKGLPVVAINTTAGTSAEITINYVITDEERKVKMVMVDKNSLALISVNDPELMLSKPKGLTAATGMDALTHAVEALVTPGAYDVTKKLSIGAIELIKEYLPRAVANGHDIEAREGMVNAIFLGGMSFNNAGLGYVHSMAHQLGAVYNLPHGVCCAMLLPVIERENAKRVPEAFRNVAKALGLHVEGKSDQECADYAIAEIEKLSETVGIPKKLTELGIEEKDFDFEYLSKNALIDACAPGNPFMPTLEETIAFYKELF

SEQ ID NO: 39489 - DNA, 1146 bp, Sinorhizobium meliloti 1021
  CDS (1)..(1146): transl_table=11
atgaccatcaccgccaactggagctatccgaccgccgtcaaattcggcgccggccggatcaaggagcttgccgaccactgcaaggcgctcggcatcaagaagccgctgctcgtaacggatcgcggacttgccccgatggcgatcacgcagcaggcgctcgatattctggaagcgggtggcctcggacgggcgatcttcgcggacgtcgatccgaaccccaacgacaggaacctcgaagccggcgtgaaagcgttccgtgacggcggccatgacggcgtcgtcgccttcggcggcggctcgggcctcgacctcggcaagtgcgtcgccttcatggccggccagacgcggccggtctgggatttcgaggatatcggcgactggtggacccgcgcgagcgtcgaaggtatcgcgccgatcgtcgccgttccgacgaccgccggtaccgggtccgaagtggggcgcgccagcgtcatcaccaattcggcaagtcacgtgaaaaaggtgatcttccatccgaagtttttgcctggcgtcacgatctgcgatccggaactcacggtcggcatgcccaaggtgatcaccgccggcacgggcatggatgcctttgcccattgcctcgaagcctattcgtcccccttctatcacccgatgtcggccgggatcgcgctcgagggcatgcggctcgtcaaggaatacctgccgcgcgcctataaggacggagcggacctcgaagcccgtgccaatatgatgagcgcggcggcgatgggggcggtcgcgttccagaagggcctcggcgcgatccactcgctgtcgcatcccgtcggcgcgatctacaacacccatcacggcatgaccaacgccgtggtgatgcccccggtcctgcggttcaaccgctccgcgatcgaggaaaagatcggtcgcgccgccgcctatctcggcattgcgggcggcttcgacggtttctacgactatgtgctgcggctccgggaggaactcggcgtaccggacaaactttccgcactcggggtcggcacggaccgtatcgacgagatggccgagatggcgatcgtcgatccgacggccggcggcaatcccgtcgaactgacgctcgatgccgcggaaaagctcttcgcagaatgcatttga

SEQ ID NO: 39490 - protein, 381 aa, Sinorhizobium meliloti 1021
MTITANWSYPTAVKFGAGRIKELADHCKALGIKKPLLVTDRGLAPMAITQQALDILEAGGLGRAIFADVDPNPNDRNLEAGVKAFRDGGHDGVVAFGGGSGLDLGKCVAFMAGQTRPVWDFEDIGDWWTRASVEGIAPIVAVPTTAGTGSEVGRASVITNSASHVKKVIFHPKFLPGVTICDPELTVGMPKVITAGTGMDAFAHCLEAYSSPFYHPMSAGIALEGMRLVKEYLPRAYKDGADLEARANMMSAAAMGAVAFQKGLGAIHSLSHPVGAIYNTHHGMTNAVVMPPVLRFNRSAIEEKIGRAAAYLGIAGGFDGFYDYVLRLREELGVPDKLSALGVGTDRIDEMAEMAIVDPTAGGNPVELTLDAAEKLFAECI

SEQ ID NO: 39491 - DNA, 1212 bp, Bacillus subtilis subsp. subtilis str. 168
  CDS (1)..(1212): transl_table=11
atgatgacattaaatatgaaggtagaaagcatgcagaaattccacacatttgaaattccgactgtgattaagcatggaatcggagccatcaagcatacgggtgaggaagtagctgcactgggcgtttcaaaagcgctccttgtcacagaccctgggatttataaagccggtgttgctgatcccgtaatcgaatcacttaaagaagcaggcattgaagtggtactctttaataaagttgagccaaacccgcctgtccgtctggtgaatgaaggatctgagctttacaaaaaagagaactgtaatggtttggtggcagtcggaggcggaagctccatggatacagcaaaagcaatcggagtagaagcgactcacgaaggaagcgtgcttgattatgaagcggcagatgggaaaaaaccgctggaaaaccgcattcctccgctgacgacaattcccactacagctggaaccggatcagaagtaacccaatgggcggttatcacagatgaagaaagagaattcaaattcaacacgggcggtccgctgattgcagcgcacttgacaatcattgatcctgagcttcatgtttcaatgcctccgcatgtaacagctatgacgggaattgatgcgctcgcccatgccattgagtgctatacaatgaaatttgcacagccaatcacggatgcggttgccttaatggcgattgagtatgccgctcattacatcaagagggcatttgctgatggagaggatctggaagcaaggtacggaatggcgcaggctgcgatgcttgccggtctttcttacggaagtgaatcagcgggcgctgctcatgcgatgagccaaacgcttggcggtattatcccagtcgctcacggccaatgtgtagcggcgatgatgggccctgtcatggaatacaactggaagggctatcctgagaagtttgcgcgtattgcgaaagcgttcggtattgatacaagcaagatgacaacagaagaagctgcgaaagcatctgtcaattggatgtatgatctggtcgaagatttagaagtgccgactttagaagagcagggagtatcacctgatatgatcgaacgcttgtctaaagaagcaatgaaagatccgcaaaccttcggaaaccctagagatttaaatgaaaaagcatacaactggatctacaaacgctgctttaaccttacgcctaaaacggtataa

SEQ ID NO: 39492 - protein, 403 aa, Bacillus subtilis subsp. subtilis str. 168
MMTLNMKVESMQKFHTFEIPTVIKHGIGAIKHTGEEVAALGVSKALLVTDPGIYKAGVADPVIESLKEAGIEVVLFNKVEPNPPVRLVNEGSELYKKENCNGLVAVGGGSSMDTAKAIGVEATHEGSVLDYEAADGKKPLENRIPPLTTIPTTAGTGSEVTQWAVITDEEREFKFNTGGPLIAAHLTIIDPELHVSMPPHVTAMTGIDALAHAIECYTMKFAQPITDAVALMAIEYAAHYIKRAFADGEDLEARYGMAQAAMLAGLSYGSESAGAAHAMSQTLGGIIPVAHGQCVAAMMGPVMEYNWKGYPEKFARIAKAFGIDTSKMTTEEAAKASVNWMYDLVEDLEVPTLEEQGVSPDMIERLSKEAMKDPQTFGNPRDLNEKAYNWIYKRCFNLTPKTV

SEQ ID NO: 39493 - DNA, 1200 bp, Agrobacterium tumefaciens str. C58
  CDS (1)..(1200): transl_table=11
gtgctcggccatcggctgagatcacgctgggaggatcagatgaccatcaaccctttcgaattccgcaccgttccctccatgcaggttgcctggggtggcgcccatcgcctcggagagattctttccggcaggtttcaggcgcgcaaggcgctgctgattaccgatgcaggtctcatcaaggccggcctcatcaagccgattgctgacgcccttgcggccagcggctttaacgtcacgatcttcgacaaggtcgttgctgatccgccagagcacatcgttgccgactgcgtcgagtccgcaaggcagatcggcgtcgatatcgttattggtcttggcgggggctcatcgctcgacatcgccaagctcgtggctgtccttctggtttccgaccagacgcttgccgacatgtacgggatcggaaacgttaagggatcacgcctgccgctcgtgctggtgccgaccacggccggtaccggttcggaagtcacaaacatctccatcatcaccacgggagaaaccaccaagatgggggtcgtttctccgcagctttacgctgatttcgttcttctggatgctgaactgacggtgggactgccgcaggtccatacggctgccaccggtatcgatgccatggtgcatgccatcgaggcttacaccagcaaacacaagaagaacccgctatcagatgctctggcgcgcgaggcactgcggctgctcggtgcaaacctgatcgccgcctgcaggaacggggccgaccggaaagcccgtgaaggcatgcttttgggtgcgacattggcaggtcaggctttcgccaactcaccggtggccgccgtccacgcgctcgcttatccgctgggcggccattatcacgtgccacacgggctttccaatgccctgatgctggggccggttttacgctttaacgcgaaggctgcagcgtcgctttatgcggagcttgccgacgtgctgggtgttccgggtgaaggggatgcggcaacccgttcggatgcgttcgttcagcatatggaaacgctgatggacgaaagcggcgcgccgcggcgtctgcgcgatgtcggcgtgacggacaacacgctcgccatgcttgcgtccgacgcaatgaaacagagccgtctgttggtcaataatccggtcgaagtccgcgaagaggatgcgcttgcgctctaccgcgaggcgttctga

SEQ ID NO: 39494 - protein, 399 aa, Agrobacterium tumefaciens str. C58
MLGHRLRSRWEDQMTINPFEFRTVPSMQVAWGGAHRLGEILSGRFQARKALLITDAGLIKAGLIKPIADALAASGFNVTIFDKVVADPPEHIVADCVESARQIGVDIVIGLGGGSSLDIAKLVAVLLVSDQTLADMYGIGNVKGSRLPLVLVPTTAGTGSEVTNISIITTGETTKMGVVSPQLYADFVLLDAELTVGLPQVHTAATGIDAMVHAIEAYTSKHKKNPLSDALAREALRLLGANLIAACRNGADRKAREGMLLGATLAGQAFANSPVAAVHALAYPLGGHYHVPHGLSNALMLGPVLRFNAKAAASLYAELADVLGVPGEGDAATRSDAFVQHMETLMDESGAPRRLRDVGVTDNTLAMLASDAMKQSRLLVNNPVEVREEDALALYREAF

SEQ ID NO: 39495 - DNA, 1215 bp, Escherichia coli K12
  CDS (1)..(1215): transl_table=11
gtgggcgagagaaagcggaggggctatatgcaaaatgaattgcagaccgcgctctttcaggcgttcgataccctgaatctgcaacgggtaaaaacatttagcgttccaccggtgacgctttgcggtccgggctcggtgagcagttgcggacagcaagcgcaaacgcgtgggctgaaacatctgttcgtgatggcagacagctttttgcatcaggcagggatgaccgccgggctgacgcgtagcctgaccgttaaaggtatcgccatgacgctctggccatgtccggtgggcgaaccgtgcattaccgacgtgtgtgcagccgtggcgcagttgcgtgagtcaggctgtgatggggtgatcgcgtttggcggcggctcggtgctggatgcggcgaaagccgtgacgttgctggtgacgaacccggatagcacgctggcagagatgtcagaaaccagcgttctgcaaccgcgcttgccgctgattgccattccaactaccgccggaaccggctctgaaaccaccaatgtaacggtgattatcgacgcggtgagcgggcgcaagcaggtgttagcccatgcctcgctgatgccggatgtggcgatcctcgacgccgcattgaccgaaggtgtgccgtcgcatgtcacggcgatgaccggcattgatgcgttaacccatgccattgaagcatacagcgccctgaacgctacaccgtttaccgacagtctggcgattggtgccattgcgatgattggcaaatcgctgccgaaagcggtgggctacggtcacgaccttgccgcgcgcgagagcatgttgctggcttcatgtatggcgggaatggcgttttccagtgcgggtcttgggttgtgccacgcgatggcgcatcagccgggcgcggcgctgcatattccgcacggtctcgcgaacgccatgttgctgccaacggtgatggaatttaaccggatggtttgtcgtgaacgctttagtcagattggtcgggcactgcgaactaaaaaatccgacgatcgtgacgctattaacgcggtaagtgagctgattgcggaagttgggattggtaaacgactgggcgatgttggtgcgacatctgcgcattacggcgcatgggcgcaggccgcgctggaagatatttgtctgcgcagtaacccgcgtaccgccagcctggagcagattgtcggcctgtacgcagcggcgcaataa

SEQ ID NO: 39496 - protein, 404 aa, Escherichia coli K12
MGERKRRGYMQNELQTALFQAFDTLNLQRVKTFSVPPVTLCGPGSVSSCGQQAQTRGLKHLFVMADSFLHQAGMTAGLTRSLTVKGIAMTLWPCPVGEPCITDVCAAVAQLRESGCDGVIAFGGGSVLDAAKAVTLLVTNPDSTLAEMSETSVLQPRLPLIAIPTTAGTGSETTNVTVIIDAVSGRKQVLAHASLMPDVAILDAALTEGVPSHVTAMTGIDALTHAIEAYSALNATPFTDSLAIGAIAMIGKSLPKAVGYGHDLAARESMLLASCMAGMAFSSAGLGLCHAMAHQPGAALHIPHGLANAMLLPTVMEFNRMVCRERFSQIGRALRTKKSDDRDAINAVSELIAEVGIGKRLGDVGATSAHYGAWAQAALEDICLRSNPRTASLEQIVGLYAAAQ

SEQ ID NO: 39497 - DNA, 1149 bp, Salmonella typhimurium LT2
  CDS (1)..(1149): transl_table=11
atggcgaacagaatgattctgaatgaaacggcatggtttggccggggagcggtggacgcattaaccgatgaggtgacgcgccgcggttatcataaagcgctgattgttaccgataaaacgctggtgcaatgcggtgtggtcgataaagtgacaagcagaatggatgccgcagggctggcgtgggagatctatgcgggcgtgatccctaatcctacgatttccgttgtccaggaagggcttaaggtctttacccaaagcggcgcggactatctcatcgccattggcggcggttctccgcaggatacctgcaaagcgatcggtattatcagtaacaatccggaatttgccgatgtgcgcagtctggaagggctatcgccgacccgtaaacccagcgtgccgattatggcgatcccgacaacggcgggaaccgcggcggaagtcactatcaattatgtgattaccgatgaagagaaacggcgcaaattcgtttgtgtcgatccgcatgatattccgcaggcggcatttatcgatgccgatatgatggacggtatgccgcccgcgctgaaagcggcaacgggcgtggatgcgctaacccatgctattgaaggctatattacccgggccgcatgggcgctgacggatgcattacatatcaaagccattgagattattgctggcgcgctgcgcggcgccgtagccggagaaaaagaggccggtgaggcgatggcgctggggcaatacgttgccgggatggggttttccaatgtggggctggggctggtgcatgggatggcgcatccgttgggcgcgttttacaacacgccacacggcgtcgcgaatgctattttgcttccgcatgtgatgcgtttcaatgccgggtctaccaacgagaaattccgtgatatcgcccgggcgatgggggtgaaggtagaaggattgagccttgaagaggcgcgtaatgccgcagtggaagccgtatttacgctaaatcgcgatgtgggaattccgctgcatttgcgtgatgtcggcgttcgaaaagaggatatcccggcgctggcgcaggcggcgttcgatgatgtctgtacgggcggcaatccgcgtgaagcgagtctggcggacattgtcgaactgtatcataccgcctggtaa

SEQ ID NO: 39498 - protein, 382 aa, Salmonella typhimurium LT2
MANRMILNETAWFGRGAVDALTDEVTRRGYHKALIVTDKTLVQCGVVDKVTSRMDAAGLAWEIYAGVIPNPTISVVQEGLKVFTQSGADYLIAIGGGSPQDTCKAIGIISNNPEFADVRSLEGLSPTRKPSVPIMAIPTTAGTAAEVTINYVITDEEKRRKFVCVDPHDIPQAAFIDADMMDGMPPALKAATGVDALTHAIEGYITRAAWALTDALHIKAIEIIAGALRGAVAGEKEAGEAMALGQYVAGMGFSNVGLGLVHGMAHPLGAFYNTPHGVANAILLPHVMRFNAGSTNEKFRDIARAMGVKVEGLSLEEARNAAVEAVFTLNRDVGIPLHLRDVGVRKEDIPALAQAAFDDVCTGGNPREASLADIVELYHTAW

SEQ ID NO: 39499 - DNA, 1119 bp, Listeria monocytogenes EGD-e
  CDS (1)..(1119): transl_table=11
atgaatagctttcaaattaaaacaaaagtagcttttggtacgaatagtttacaagttttaaaagaaattaaaaataaaaatgtctggattatttgcgaccgttttttggctgatggagaggggcttcaaggattaatcggacaattagatgcatccaataatgtgcatattttcaccgatgtagtgcctgatccgcctatttccaaagtagctggaggggttagtgaggcaggcaaaatccaaccgcaagtcatgattgcttttggtggtggttcagcgattgatacggctaaaggaatctactatttcgccaaacgtttggaaaaaatcaatatcagtacttttattgcaattccaaccactagcggtacaggctcggaagtaacagccgcaaccgttattacagatccaacaacgaaaattaaatatccgcttttcttagatgaactaattccggatatggctattttggatgcgcagctagttgttacggtacctccagccattacggcgaacactgggatggatgtcctaacacacgctatcgaagcttatgtctctaaagatgcgagcgattataccgatgctcttggtgaaaaaagtgtgcaattaacgttacgtttcttaacgagttgttatgatgatggtcgtaatttagcggatcgggaaaaaatgcataatgcgtctactatggctggaatggcatttaactgcgccaatttaggtttgaatcacagtattgcgcatcaacttggtgcacagttccacgtaccccacgggctagccaatgcgattctactggatgcagtgattcgttttaacgcctttaaaaatcgcgaaacggaacaaaaatatgcggagatggcgcgcatttgcggcattgcttccagatctgactcgaacgaaacggcagtccgcttacttcgcgaaagaatcgtagcgatgatggaacatatgcaaatgccacggactttaacagatgctggagtagcaaaagaaaaagtctatgcaaaaatggacgaaattgcaacgaatgcactgaaagacgcttgcttaccgactagtccaacgacaccgacacatcaagagctaaaagaaattttagaacaaattatttag

SEQ ID NO: 39500 - protein, 372 aa, Listeria monocytogenes EGD-e
MNSFQIKTKVAFGTNSLQVLKEIKNKNVWIICDRFLADGEGLQGLIGQLDASNNVHIFTDVVPDPPISKVAGGVSEAGKIQPQVMIAFGGGSAIDTAKGIYYFAKRLEKINISTFIAIPTTSGTGSEVTAATVITDPTTKIKYPLFLDELIPDMAILDAQLVVTVPPAITANTGMDVLTHAIEAYVSKDASDYTDALGEKSVQLTLRFLTSCYDDGRNLADREKMHNASTMAGMAFNCANLGLNHSIAHQLGAQFHVPHGLANAILLDAVIRFNAFKNRETEQKYAEMARICGIASRSDSNETAVRLLRERIVAMMEHMQMPRTLTDAGVAKEKVYAKMDEIATNALKDACLPTSPTTPTHQELKEILEQII

SEQ ID NO: 39501 - DNA, 1140 bp, Listeria monocytogenes EGD-e
  CDS (1)..(1140): transl_table=11
atgcaaaaagttagttttaaaacagatctttacattggccaaggagcaacagatcgtttacttgattttaaagacaaacaaatctttatcgtaacggatccatttatggttagttccggaatgattaacgcgattacagacaaaattgatcaatcgaatacatatacgatttttagcgaaattattccagacccaccgattgaaaacgtggtagcaggaatcgaagttctaaatgaatgtgatgcaaacttgatgattgcaattggtggtggctcagcgattgatgcagcgaaagcgatgaaattcttcggtcaaaaacttggtacggtgcgcgcaatgcctttcatcgttatcccgacaactagtggaactggttcagaagtaactagtttttctgttattacaaacaaagaaaaagcaatcaaatacccactaattacagatgctattttaccagatgaagcaattttagacgctgacttagtaaaatctgttccaccagcaatcacagcagatacaggtatggatgtattaacgcatgcgcttgaagcctatgtatctacaaaagcaaatgattactcggatgcaatggcagaaaaagttatccaattagttttcacatacttagaacgtgcttacaaagatggcaatgatttagaagctcgcgaaaaaatgcataatgcgtcttgtcttgcaggaatggcttttaacattacttcgcttggcttaaatcacggtattgcgcatacagctggtgcgaaatttaaaatcccgcatggccgtatgaacacattacttttaccacacgtaattagttataacgctggaattacaagtgattttggtaacaatccagataaccgagcagcagaacgttatacagcaatcgctaaattactgaaaatgccagcatcgaatacacgtcttggcgttcgcagcttaattaatgccattaaacaacttcaaaagaaactcaatatgccaactacattaacagaatgtggtattagccgcactgatttaaatgaaaatattgctcaaatcgctgaaggtgcgctaaatgacggatgcactgcaacaaatccaagaacaccgactgaaacagatgttagcgcgattcttgagaagatgttggcataa

SEQ ID NO: 39502 - protein, 379 aa, Listeria monocytogenes EGD-e
MQKVSFKTDLYIGQGATDRLLDFKDKQIFIVTDPFMVSSGMINAITDKIDQSNTYTIFSEIIPDPPIENVVAGIEVLNECDANLMIAIGGGSAIDAAKAMKFFGQKLGTVRAMPFIVIPTTSGTGSEVTSFSVITNKEKAIKYPLITDAILPDEAILDADLVKSVPPAITADTGMDVLTHALEAYVSTKANDYSDAMAEKVIQLVFTYLERAYKDGNDLEAREKMHNASCLAGMAFNITSLGLNHGIAHTAGAKFKIPHGRMNTLLLPHVISYNAGITSDFGNNPDNRAAERYTAIAKLLKMPASNTRLGVRSLINAIKQLQKKLNMPTTLTECGISRTDLNENIAQIAEGALNDGCTATNPRTPTETDVSAILEKMLA

SEQ ID NO: 39503 - DNA, 2601 bp, Listeria monocytogenes EGD-e
  CDS (1)..(2601): transl_table=11
atggcaattaaagaaaatgcggcccaagaagtattagaagttcaaaaagtgattgacagattagcagacaatggacaaaaagcattgaaagcatttgaaagttacaaccaagaacaagtagacaatatcgttcacgcaatggcacttgccggacttgaccaacatatgccccttgcaaaattagcagtagaagaaactggacgtggattatacgaagataaatgtattaaaaacatcttcgcgacagaatatatttggaacaacattaaaaacaataaaacagtcggagttattaacgaagacttacaaactggtgtgattgaaattgctgaaccagttggcgttgttgccggcgttacacctgtaactaacccaacatctactactcttttcaaagcaattatcgcgattaaaacgcgtaacccaatcatctttgctttccatccaagtgcacaacgttgttcatcagcagcagcgaaagttgtatatgatgcagcaattgcagctggagctccagaacattgtattcaatgggtagaaaaaccttccctagaagcaacaaaacaattaatgaaccatgataaagttgcacttgtacttgcaactggtggtgctggaatggttaaatcagcatactctactggtaaacctgcactaggtgttggaccaggtaacgtaccagcttacattgacaaaacagctaaaatcaaacgttctgttaatgacatcattctttctaaatcttttgaccaaggtatgatttgtgcttctgaacaagcagtaatcgtagacaaagaagtggctaaagaagtaaaagcagaaatggaagcaaacaactgctacttcgttaaaggcgctgaattcaaaaaattagaaagctatgttatcaaccctgaaaaaggaacacttaacccagatgtagttggtaaatcccctgcatggattgcaaaccaagctggcttcaaagttccagaagatacaaaaattcttgtagctgaaattaaaggtgttggcgacaaatacccactatctcacgaaaaattaagcccagttcttgcatttatcgaagctgctaaccaagcagaagcattcgatcgttgtgaagaaatgttagtatatggaggacttggacactccgcagttattcactctactgataaagaagttcaaaaagcatttggtatccgtatgaaagcttgccgtatcattgtaaacgcaccaagcgcacaaggcggtatcggtgacatttataacggcttcatcccttccctaacacttggttgtggatcttatggtaaaaactctgtatcacaaaatgtaagtgcgactaacttgctgaacgttaaacgtatcgcggatcggagaaataatatgcaatggttcaaacttccaccaaaaattttctttgaaaaatattccactcaataccttcaaaaaatggaaggcgttgaacgcgtatttatcgtaactgacccaggaatggttcaattcaaatatgttgatgttgtaatcgaacacttgaaaaaacgtggcaatgacgtatcttaccaagtatttgctgacgttgaaccagatccatctgacgtaacagtttataaaggtgcagaactaatgaaagacttcaaaccggacacaattatcgctcttggtggtggttccgcaatggatgctgccaaaggtatgtggttattctatgaacacccagaagcttcattcttcggcttgaaacaaaaattcttagatattcgtaaacgtactttcaaatatcctaaacttggtggaaaagcaaaattcgtcgcaattccaacaacaagtggtacaggttctgaagtaacaccttttgcggttattacagacaaagaaaataacattaaataccctcttgctgactacgaattaactccagacgttgcgattgtcgatgcacaatatgtaactactgttccagcacacattactgctgatactggtatggacgttttaactcacgcaattgaatcttatgtatccgtaatggcaagcgattatactcgtggattatctatccgcgcaatcgaacttgtttttgaaaacttacgtgaatctgttcttactggtgatccagatgcgcgcgaaaaaatgcataatgcttctgccctagctggtatggcgtttgcaaatgcgttcctaggaatcaaccacagcttggcacacaaaattggacctgaattccacattcctcacggtcgtgccaatgcaatccttatgccacatgttattcgttataacgcacttaaacctaaaaaacatgcgttattcccaagatatgaaagtttccgtgctgatgaagattatgctcgtatctctcgtattatcggcttccctgctgcaactacagaagaaggcgttaaatcacttgtagatgaaatcatcaaacttggtaaagatgttggtatcgacatgagtcttaaaggacaaaatgttgctaaaaaagatttggatgctgttgtagatactcttgcagatcgcgcattcatggaccaatgtactacagccaaccctaaacaacctcttgtaagtgaactaaaagaaatctaccttgaagcttacaaaggtgtttga

SEQ ID NO: 39504 - protein, 866 aa, Listeria monocytogenes EGD-e
MAIKENAAQEVLEVQKVIDRLADNGQKALKAFESYNQEQVDNIVHAMALAGLDQHMPLAKLAVEETGRGLYEDKCIKNIFATEYIWNNIKNNKTVGVINEDLQTGVIEIAEPVGVVAGVTPVTNPTSTTLFKAIIAIKTRNPIIFAFHPSAQRCSSAAAKVVYDAAIAAGAPEHCIQWVEKPSLEATKQLMNHDKVALVLATGGAGMVKSAYSTGKPALGVGPGNVPAYIDKTAKIKRSVNDIILSKSFDQGMICASEQAVIVDKEVAKEVKAEMEANNCYFVKGAEFKKLESYVINPEKGTLNPDVVGKSPAWIANQAGFKVPEDTKILVAEIKGVGDKYPLSHEKLSPVLAFIEAANQAEAFDRCEEMLVYGGLGHSAVIHSTDKEVQKAFGIRMKACRIIVNAPSAQGGIGDIYNGFIPSLTLGCGSYGKNSVSQNVSATNLLNVKRIADRRNNMQWFKLPPKIFFEKYSTQYLQKMEGVERVFIVTDPGMVQFKYVDVVIEHLKKRGNDVSYQVFADVEPDPSDVTVYKGAELMKDFKPDTIIALGGGSAMDAAKGMWLFYEHPEASFFGLKQKFLDIRKRTFKYPKLGGKAKFVAIPTTSGTGSEVTPFAVITDKENNIKYPLADYELTPDVAIVDAQYVTTVPAHITADTGMDVLTHAIESYVSVMASDYTRGLSIRAIELVFENLRESVLTGDPDAREKMHNASALAGMAFANAFLGINHSLAHKIGPEFHIPHGRANAILMPHVIRYNALKPKKHALFPRYESFRADEDYARISRIIGFPAATTEEGVKSLVDEIIKLGKDVGIDMSLKGQNVAKKDLDAVVDTLADRAFMDQCTTANPKQPLVSELKEIYLEAYKGV

SEQ ID NO: 39505 - DNA, 1119 bp, Listeria innocua Clip11262
  CDS (1)..(1119): transl_table=11
atgaatagctttcaaatcaagacaaaagtagcttttggtacgaatagtttacaagttttaaaagaaattaaaaataaaaatgtttggattatttgtgatcgttttttggcggatggagagggacttcaaggtttagttgggcagttagatgcatctaataatgtgcatattttcaccgatgtagttccagatccacccatttcaaaagtagctagtggtgttagtgaagcaggaaaaattcagcctcaagtcatgatcgcttttggcggtggctcagcaattgatacggcaaaaggaatttactacttcgcaaaacgcttagaaaaaattaatattagtacttttatagcgattccaactacaagtggcactggatctgaagtgacagctgctaccgttattactgatccaacgacaaaaattaagtatccacttttcttagatgaacttattccggatatggctattcttgacgcgcaactcgttgtcacagtgccgccagcgattacagcgaatactggaatggatgtattaacacacgcgattgaagcttatgtttctaaagctgcgagtgattatacggacgcattaggtgaaaaaagtgtgcaattaacgctacgctttttaacgagctgttatgacgatggtcgtaatttagctaaccgtgaaaaaatgcataatgcgtcgaccatggcaggtatggcttttaactgtgccaaccttggtttaaatcatagtattgcgcatcaactaggtgcacagttccacgtgccgcacggtctagctaatgcgatattacttgatgcggtcattcgttttaacgccttcaaaaatcgtgatactgaacaaaaatatgctgaactggcgcggatttgcggaatggcttctagatctgattccaatgaaaccgctgtccgtctgcttcgtgaaagaattgtccaaatgatggaacacatgcaaatgccacgaacattgacagatgctggcgtagcaaaagaaaaagtctatgcaaaaatggacgaaattgcaacaaatgcactgaaagacgcttgcttgccaacaagtccgacgacaccgacacatcaagaactaaaagaaattttagaacaaattatttag

SEQ ID NO: 39506 - protein, 372 aa, Listeria innocua Clip11262
MNSFQIKTKVAFGTNSLQVLKEIKNKNVWIICDRFLADGEGLQGLVGQLDASNNVHIFTDVVPDPPISKVASGVSEAGKIQPQVMIAFGGGSAIDTAKGIYYFAKRLEKINISTFIAIPTTSGTGSEVTAATVITDPTTKIKYPLFLDELIPDMAILDAQLVVTVPPAITANTGMDVLTHAIEAYVSKAASDYTDALGEKSVQLTLRFLTSCYDDGRNLANREKMHNASTMAGMAFNCANLGLNHSIAHQLGAQFHVPHGLANAILLDAVIRFNAFKNRDTEQKYAELARICGMASRSDSNETAVRLLRERIVQMMEHMQMPRTLTDAGVAKEKVYAKMDEIATNALKDACLPTSPTTPTHQELKEILEQII

SEQ ID NO: 39507 - DNA, 1140 bp, Listeria innocua Clip11262
  CDS (1)..(1140): transl_table=11
atgcaaaaagttagttttaaaacagatctttacattggccaaggagcaacagatcgtttactggattttaaagacaaacaaattttcatcgtaacagatccatttatggtgagctcaggaatgattaatgctattacggaaaaaattgataagtcgaatacatatactatttttagcgatattattcctgacccgccaattgaaaacgttgtagctggaattgaagttttaaacgaatgtgatgccaacttgatgatcgctatcggtggtggttccgcgattgatgcggcgaaagcgatgaaattctttggtcaaaaacttggtacggtgcgcgcaatgccattcatcgtaatcccaactacaagtggaactggttctgaagttactagtttttctgtcattacgaataaagaaaaagcaattaaatatccacttattactgatgctattttgccggatgaagcgattttagatgcggatttagtgaaatctgtcccacctgcaatcacagcagacactggtatggatgtactcacacatgcgctagaagcatacgtttccacaaaagcaaatgattattcggacgcaatggctgaaaaagtaatccaattagtattcacatacttggagcgcgcttataaagacggaaatgatttagaagcacgcgaaaaaatgcataatgcttcttgtttagcaggtatggcatttaatattacctcacttggtttaaaccatggtatcgctcacacagccggtgctaagtttaaaattccacatggtcgtatgaatactttacttttgccacatgttattagttataatgctggattaacaagtgattttggtaacaatccagataaccgtgctgcagaacgttatacagcaattgccaaattactaaaaatgccagcttccaatacaagacttggcgttcgtagcttaattaacgcaattaaacaacttcaaaagaaactcaatatgccaacaacattatctgaatgtggcgttagtcgtaccgatttaaacgagcatattgcgcaaatcgcggaaggtgcgctgaatgatggttgtactgcaactaatccaagaacaccgacagaaacagatgttagtgcgattctcgaaaaaatgttggcttaa

SEQ ID NO: 39508 - protein, 379 aa, Listeria innocua Clip11262
MQKVSFKTDLYIGQGATDRLLDFKDKQIFIVTDPFMVSSGMINAITEKIDKSNTYTIFSDIIPDPPIENVVAGIEVLNECDANLMIAIGGGSAIDAAKAMKFFGQKLGTVRAMPFIVIPTTSGTGSEVTSFSVITNKEKAIKYPLITDAILPDEAILDADLVKSVPPAITADTGMDVLTHALEAYVSTKANDYSDAMAEKVIQLVFTYLERAYKDGNDLEAREKMHNASCLAGMAFNITSLGLNHGIAHTAGAKFKIPHGRMNTLLLPHVISYNAGLTSDFGNNPDNRAAERYTAIAKLLKMPASNTRLGVRSLINAIKQLQKKLNMPTTLSECGVSRTDLNEHIAQIAEGALNDGCTATNPRTPTETDVSAILEKMLA

SEQ ID NO: 39509 - DNA, 2601 bp, Listeria innocua Clip11262
  CDS (1)..(2601): transl_table=11
atggcaattaaagaaaatgcggcccaagaagtattagaagttcaaaaagtgattgacagattagcagacaatggacaaaaagcattgaaagcatttgaaagttacaaccaagaacaagtagataatatcgtacacgcaatggcgcttgccggacttgaccaacatatgccccttgcaaaattagcagtagaagaaacaggacgtggattatacgaagataaatgtattaaaaacatcttcgcaacagaatatatttggaacaacattaaaaacaacaaaacagtcggagttattaacgaagatactcaaactggtgttatcgaaattgctgaaccagtcggagtagttgccggggttacaccagtaactaacccaacttcaacaacacttttcaaagcaattatcgcgattaaaacgcgtaacccaatcatcttcgctttccatccaagtgcgcaacgttgttcatctgaagcagcaaaagttgtttatgatgcagcagttgcagctggagcaccagaacattgtattcaatgggtagaaaaaccttccctagaagcaacaaaacaattaatgaaccacgataaagtagcacttgtacttgcaactggtggtgctggaatggttaaatcagcatactctactggtaaacctgcactaggtgttggaccaggtaacgtaccagcttacattgacaaaacagctaaaatcaaacgttctgttaatgacatcattctttctaaatcttttgaccaaggtatgatttgtgcttctgaacaagcagttatcgtggacaaagaagttgctaaagaagtaaaagcagaaatggaagcaaacaaatgctacttcgttaaaggtgctgaattcaaaaaactagaaagctatgtaatcaaccctgaaaaaggaacacttaacccagatgtagttggtaaatcccctgcatggattgcaaaccaagctggtttcaaagttccagaagatacaaaaattcttgtagctgaaattaaaggtgttggcgacaaatacccactatctcacgaaaaattaagcccagttcttgcatttatcgaagctgctaaccaagcagaagcattcgatcgttgtgaagaaatgttagtatacggcggacttggacactcagcagttattcactctactgataaagaagttcaaaaagcatttggtatccgtatgaaagcttgccgtatcatcgtaaatgcaccaagcgctcaaggcggtatcggtgacatttataacggcttcatcccttccctaactcttggttgtggatcttatggtaaaaactctgtatcacaaaatgtaagtgcgactaacttgctgaacgttaaacgtatcgcggatcggagaaataatatgcaatggttcaaacttccaccaaaaattttctttgaaaaatattctactcaataccttcaaaaaatggaaggcgttgaacgcgtatttatcgtaactgacccaggtatggttcaattcaaatacgttgatgtagtaatcgaacacctgaaaaaacgtggtaacgacgtagcttatcaagtattcgctgatgttgaaccagatccatctgatgtaacagtttacaaaggtgcagaactaatgaaagacttcaaaccagatacaattatcgctcttggtggtggttccgcaatggatgctgccaaaggtatgtggttattctatgaacacccagaagcttcattcttcggcttgaaacaaaaattcttagatatccgtaaacgtactttcaaatatcctaaacttggtggaaaagcgaaattcgttgcgattccaacaacaagtggtacaggttctgaagtaactccatttgcggttattacagacaaagaaaacaacattaaataccctcttgctgactatgaactaactccagacgttgcgattgtcgatgcacaatatgtaacaactgttccagcacacattactgctgatactggtatggacgttctaactcacgcaattgaatcttatgtatccgtaatggcaagcgattatacacgtggattgtctatccgtgcaatcgaacttgtttttgaaaacttacgtgaatctgttcttactggtgatcctgatgcgcgtgaaaaaatgcataatgcttctgccctagctggtatggcatttgcgaatgcgttcctaggaattaaccacagcttggcacacaaaattggacctgaattccacattcctcacggtcgtgcgaatgcaatccttatgccacacgttatccgttataacgcacttaaacctaaaaaacatgcgttattcccaagatatgaaagcttccgtgctgatgaagattatgctcgtatctctcgtattatcggcttccctgctgcaactacagaagaaggcgttaaatcacttgtagatgaaatcatcaaacttggtaaagatgttggtatcgacatgagtcttaaaggacaaaatgttgctaaaaaagacttggatgcagttgtagatacacttgcagatcgcgcattcatggaccaatgtactactgccaaccctaaacaaccacttgtaagcgaactaaaagaaatttaccttgaagcttacaaaggtgtttaa

SEQ ID NO: 39510 - protein, 866 aa, Listeria innocua Clip11262
MAIKENAAQEVLEVQKVIDRLADNGQKALKAFESYNQEQVDNIVHAMALAGLDQHMPLAKLAVEETGRGLYEDKCIKNIFATEYIWNNIKNNKTVGVINEDTQTGVIEIAEPVGVVAGVTPVTNPTSTTLFKAIIAIKTRNPIIFAFHPSAQRCSSEAAKVVYDAAVAAGAPEHCIQWVEKPSLEATKQLMNHDKVALVLATGGAGMVKSAYSTGKPALGVGPGNVPAYIDKTAKIKRSVNDIILSKSFDQGMICASEQAVIVDKEVAKEVKAEMEANKCYFVKGAEFKKLESYVINPEKGTLNPDVVGKSPAWIANQAGFKVPEDTKILVAEIKGVGDKYPLSHEKLSPVLAFIEAANQAEAFDRCEEMLVYGGLGHSAVIHSTDKEVQKAFGIRMKACRIIVNAPSAQGGIGDIYNGFIPSLTLGCGSYGKNSVSQNVSATNLLNVKRIADRRNNMQWFKLPPKIFFEKYSTQYLQKMEGVERVFIVTDPGMVQFKYVDVVIEHLKKRGNDVAYQVFADVEPDPSDVTVYKGAELMKDFKPDTIIALGGGSAMDAAKGMWLFYEHPEASFFGLKQKFLDIRKRTFKYPKLGGKAKFVAIPTTSGTGSEVTPFAVITDKENNIKYPLADYELTPDVAIVDAQYVTTVPAHITADTGMDVLTHAIESYVSVMASDYTRGLSIRAIELVFENLRESVLTGDPDAREKMHNASALAGMAFANAFLGINHSLAHKIGPEFHIPHGRANAILMPHVIRYNALKPKKHALFPRYESFRADEDYARISRIIGFPAATTEEGVKSLVDEIIKLGKDVGIDMSLKGQNVAKKDLDAVVDTLADRAFMDQCTTANPKQPLVSELKEIYLEAYKGV

SEQ ID NO: 39511 - DNA, 1149 bp, Ralstonia solanacearum GMI1000
  CDS (1)..(1149): transl_table=11
atggccctcatcttctacctcacccacgtccacctcggcttcggcacgctcggcgagctcggcagcgaatgcgcgcgagtcggcatccgccggccgctggtcgtcaccgaccgcggcgtggcggccgccggcctggcccagcgcgccatcgacgccaccggcggcctgcccgtcaccgtgttcgacgagacgccgtccaaccccaccgaggcgatggtcaggaaggccacggcgcaataccgggacgccggctgcgacgggctgatcgccatcggcggcggctcgtcgatcgacctggccaaggggatcgccatcgcagcgacgcaccccgggccgctcaccgcctacgccaccatcgaaggcggcagcggcaagatcaccgatgcggccgcgccgctgatcgccatccccaccacggccggcaccggcagcgaagtggcgcggggcgcgatcctgatcctggaggacggccgcaagctgggcttccactcctggcatctgctgccgaaatcggccctctgcgaccccgcgcttacgctcggcctgccgcccctgctgacggccgccaccgggatggacgccatcgcgcactgcatcgagaccttcctcgcgccggccttcaacccgcccgccgacggcatcgcgctcgacggtctggagcgcgcctgggcccacatcgagcgcgccacgcgcgacggcgccgaccgcgaggcccggctcaacatgatgagcgcctcgatgcagggggcgatggcgttccagaaggggctgggctgcgtgcattcgctgtcgcacccgctgggcggcgtgaaggtggacggcaagaccgggctgcaccacggcacgctcaacgcggtggtgctgccggcggtgctgcgcttcaatgcgacggcggaatcggtggtgcgcgagcatcgctacgcccgcatgcgccgcgcgatgaacctgccggccgacgccgacctcgcccaggccgtgcacgacatgaccgcgcggctgggcctgcccaccggcctgcgccagatgggcgtgccggacgatgcgctggagcacgtggtgcgtggcgccctgctcgaccactgccacaagaccaatccgcgcgaggccacggcggacgattaccgccggatgctggcggagtcgatgtag

SEQ ID NO: 39512 - protein, 382 aa, Ralstonia solanacearum GMI1000
MALIFYLTHVHLGFGTLGELGSECARVGIRRPLVVTDRGVAAAGLAQRAIDATGGLPVTVFDETPSNPTEAMVRKATAQYRDAGCDGLIAIGGGSSIDLAKGIAIAATHPGPLTAYATIEGGSGKITDAAAPLIAIPTTAGTGSEVARGAILILEDGRKLGFHSWHLLPKSALCDPALTLGLPPLLTAATGMDAIAHCIETFLAPAFNPPADGIALDGLERAWAHIERATRDGADREARLNMMSASMQGAMAFQKGLGCVHSLSHPLGGVKVDGKTGLHHGTLNAVVLPAVLRFNATAESVVREHRYARMRRAMNLPADADLAQAVHDMTARLGLPTGLRQMGVPDDALEHVVRGALLDHCHKTNPREATADDYRRMLAESM

SEQ ID NO: 39513 - DNA, 1146 bp, Agrobacterium tumefaciens str. C58
  CDS (1)..(1146): transl_table=11
atgaatatcgtcgccaactggagttatcccaccgccgtcaagcttggccgtggccggatcaaggaactggcggaagcctgcaaaacgctcggcatcaggaagccgctgctcgtcacggatcgtggccttgccaatatggcgatcaccgcgcatgcgctggatgtgctggaagaggcgggtcttggccgggcgatctttgccgatgtcgatccgaaccccaacgaaatcaacatggaagccggcgtcaaggcttaccgcgatggcggtcatgacggcgtcgtcgcctttggcggcggctcgggcctcgatctcggcaagatgatcgccttcatggccgggcagacacgtccggtctgggatttcgaggatatcggtgattggtggacacgcgctgatgcgtcgaagatcgcgcccatcgtcgcagtcccgacgacggctggcaccggttcggaagtcggccgcgccagcgtcatcaccaattcgcagacgcatgtgaagaagatcatcttccatcccaagctgcttcccggtgtcgtcatctgcgatccggaactgacggtcggcatgccgaaggtcatcacggccggcaccggcatggatgccttcgcccattgcctcgaagcgtattcgtcaccgttcttccacccgatgagtgctggtgtcgcgcttgagggcctgcgtctcgtcaaggaattcctgccgcgcgcctataaggatggcacggatatcgaagcccgcaccaatatgatggcggcggcggcgatgggggcggttgccttccagaagggtctcggggccattcattcgctctcgcatccgatcggggcggtctacaacacccatcacggcatgaccaatgccgtcgtcatgccggcggtgctgcgtttcaaccgtcctgccatcgaagacaagatcgcgcgtgctgccgcctatctcggcatttccggcggttttgacggtttttatgactacgtgctggatcttcgcagggaactcggcgtgccggaaaacctgaccgccatgggcatcaagcctgatcgtatcgacgagctggcggcagaagcgatcaaggatccgagctgcggtggtaatccggtgccgatgacgcttgagaataccaaggcgctttttgaggcttgcttttaa

SEQ ID NO: 39514 - protein, 381 aa, Agrobacterium tumefaciens str. C58
MNIVANWSYPTAVKLGRGRIKELAEACKTLGIRKPLLVTDRGLANMAITAHALDVLEEAGLGRAIFADVDPNPNEINMEAGVKAYRDGGHDGVVAFGGGSGLDLGKMIAFMAGQTRPVWDFEDIGDWWTRADASKIAPIVAVPTTAGTGSEVGRASVITNSQTHVKKIIFHPKLLPGVVICDPELTVGMPKVITAGTGMDAFAHCLEAYSSPFFHPMSAGVALEGLRLVKEFLPRAYKDGTDIEARTNMMAAAAMGAVAFQKGLGAIHSLSHPIGAVYNTHHGMTNAVVMPAVLRFNRPAIEDKIARAAAYLGISGGFDGFYDYVLDLRRELGVPENLTAMGIKPDRIDELAAEAIKDPSCGGNPVPMTLENTKALFEACF

SEQ ID NO: 39515 - DNA, 1179 bp, Agrobacterium tumefaciens str. C58
  CDS (1)..(1179): transl_table=11
atgataaaccgtgtcctgatgccccgcgaaatgcttatcggcggcggcagccgatttcgattacccgccgtggtaaaatcgcttggcgtccatcgccccctgctggtctgcgatcccgtattgcagaagctcggccatgccgatgcgcttttgcaggcgctggccgaggaaggcatcgaggccgccgtgttctcggacgtcgtggaagacccgacggatatatccatcgccaccctggtgaaacgcatttccgatggcggccatgacagtctcgtcgcacttggtggcggcagcgccatggatacggccaaggcgggcgccatcgttgcaacgagcggggaggatttgcgcgccctgaaagtgccgcggatcgtggatttcgccgtcatgccggtgattgccattccgacgacggccggtaccggttcggaagtgacccgcgccgccgtcgtcaccgacacggctgccagcgaaaaaatgctgatcctcggcaccgccgctttgccggtcgcggccatcatcgattatgagctgacgctgacatgtccttaccgtgtcacggtcgataccggcatcgatgcgctgacccatgcgctggaagcgctggtcaaccgcaatggtaacgcccattccgaggcgctggcgctttccgccctgaagctgatcggcgccaatcttgaaaaagtggctgataaccctgatgaccgggatgcgcgtgaagcgatgatgctgggcgcgacccatgccgggcttgccgtctccaatacatcgaccgcactgatccatggcctcagccgtccagtcggcgcgtttttccatgtaccgcatggcatgtcgaatgcgatggtgctgccgctggtcacgcagttttcgctgaattccgctcttccgcattatgctgcggccgcgcgggcgctcggctccgccgccgcgacagatagcgatcaggtctccggtgcgaagctggtggaggctttcctcggcctgaacaggcggttgaaggtgccgaccccacaagagttcggtatcgacaggagccgctatctcgatcttgtgccggaaatggtgcggcagggccttgcttcgggtacgccggcaaataacccccgagtgcccacagttgccgaaatgacgaggctatatgaactcgcctatgacggaagcatcgcggaattttaa

SEQ ID NO: 39516 - protein, 392 aa, Agrobacterium tumefaciens str. C58
MINRVLMPREMLIGGGSRFRLPAVVKSLGVHRPLLVCDPVLQKLGHADALLQALAEEGIEAAVFSDVVEDPTDISIATLVKRISDGGHDSLVALGGGSAMDTAKAGAIVATSGEDLRALKVPRIVDFAVMPVIAIPTTAGTGSEVTRAAVVTDTAASEKMLILGTAALPVAAIIDYELTLTCPYRVTVDTGIDALTHALEALVNRNGNAHSEALALSALKLIGANLEKVADNPDDRDAREAMMLGATHAGLAVSNTSTALIHGLSRPVGAFFHVPHGMSNAMVLPLVTQFSLNSALPHYAAAARALGSAAATDSDQVSGAKLVEAFLGLNRRLKVPTPQEFGIDRSRYLDLVPEMVRQGLASGTPANNPRVPTVAEMTRLYELAYDGSIAEF

SEQ ID NO: 39517 - DNA, 1170 bp, Brucella melitensis 16M
  CDS (1)..(1170): transl_table=11
atgaccacattgaccgcgaaatggaactttccgaccactgtgcttttcgggccggggcacatcaaggagcttccagccgtcctgaaagccgcaggcatcgagcacccgcttttcgtcaccgatccgggcctcgccaaactgcctgtggtcgcctcgacattggccgttctggatgcggcgggcgtgcaatatggcgtgttttccgatgtgaaacccaatccggtcgagagcaatcttcatgccggcgtaaaggttttccgggaaggcaggcatgacggcgtcatcgcctttggcggcggttccgcgctcgatctcggcaagctcatcgcctttcaggccggacagacccggcccgtctgggattttgaagatatcggcgactggtggacccgcgccgacagcaacgccatagctcccgtcattgccgtgccgaccaccgcaggcaccggctcggaagtggggcgcgcgggcgttctcaccaatgaatccacccacacgaagaaggtcatcttccaccccaaaatgctgcccgtaacggtgatcgccgatcccgaactttccactggcatgccgcccttcatcacggcgggtacgggcatggatgcactggcgcactgccttgaagcctattgcgcaccgggcttccatcccatggccgatggcattgccgtggagggcatccgccttgtctttgagaacctgcccaaagcctatgccaatggcggggatatcgaagcgcgtgccaatatgatggcagccgctgccatgggcgccacggccttccagaagggcctcggtgcgatccattcgctctcgcaccccatcggcgcgctctatgacacacatcacggcatgaccaatgccgtcttcatgccctatgtgctgcaccacaaccgggctgccatcgaaaagcgcattgcccggctggccgattatctcggcatcgaaggcgggttcgacggctttgccgatgcgatcatgaagctgcgcgccgaacttggcgtgccgcgcaccctgcccgatctcatcaagaaccttcagatggacaatgcccgcaaggagctgatcgccgaaatggcagtggcagatcccaccgcaggcggaaacccggttgaacttacaaaaaacgacgcgctaaagttgctcaatgcagcattggaaggtagataa

SEQ ID NO: 39518 - protein, 389 aa, Brucella melitensis 16M
MTTLTAKWNFPTTVLFGPGHIKELPAVLKAAGIEHPLFVTDPGLAKLPVVASTLAVLDAAGVQYGVFSDVKPNPVESNLHAGVKVFREGRHDGVIAFGGGSALDLGKLIAFQAGQTRPVWDFEDIGDWWTRADSNAIAPVIAVPTTAGTGSEVGRAGVLTNESTHTKKVIFHPKMLPVTVIADPELSTGMPPFITAGTGMDALAHCLEAYCAPGFHPMADGIAVEGIRLVFENLPKAYANGGDIEARANMMAAAAMGATAFQKGLGAIHSLSHPIGALYDTHHGMTNAVFMPYVLHHNRAAIEKRIARLADYLGIEGGFDGFADAIMKLRAELGVPRTLPDLIKNLQMDNARKELIAEMAVADPTAGGNPVELTKNDALKLLNAALEGR

SEQ ID NO: 39519 - DNA, 1155 bp, Clostridium perfringens str. 13
  CDS (1)..(1155): transl_table=11
atggcgaatcaatttattatgccaaaacgtattatttcaggtgaaaatgctttaaatgaaagtaaagcgtatttaaagagttttggtaagagagttttaatagttactgataaagtaatgactgatctaggtaatgtaaaggttttgacagaggtattagatagtgagaatattgagcacgttttatacaatgaaataaatagtgaacctacagatactatgatagaaaaaggaataaagctttataaagaaaatcaatgtgattttctaattggtttaggtggagggagtccaatagattctactaaagccattggagctatgataacaaacgaaggtaagatatctgattatatgggtagagaaatagaaaaagaacttccaccctttgctgtaataccaactacagctggaacaggttcagaagctactcaatttacaataattacagatacaaaaaatgatgttaagatgcttttaaaaggagctaacttattaccaaacttagcaatagtagatccaagatttacaatgacagcacctgctaagataacagcagctacaggattagatgctttaactcatgctatagaggcttatacatctagaaaggcacagccactttcagatagttttgcagtttcagctgtaaaaagaatatttaagtacttacctatagcttttgatactccaaaggatttaaaagcaagagaagagatgtcaattgcagctttagaagctggaatagcatttaataactcttcagttacaatagttcatggaatgagtagaccaataggagctttattccatgtaccacacggattatcaaatgcaatgcttttagaagcttgtttcacatatgtagtagatggtgcttatgatagatttgctcagctagctaaagaaataaatatagctaatgataatatgagtaatgaagaggccgcaaaagcatttatagatgaagtggttaaattaatggttaaattagaaataccaactttagaagagtttggagtagataaaactaagttctttgataatatagaaaaaatggcagctgacgctatggaaagcggaagcccaagtaatacaagaaagattattgaagttgatgatgtgataaaaatctacaataatctttggaggtaa

SEQ ID NO: 39520 - protein, 384 aa, Clostridium perfringens str. 13
MANQFIMPKRIISGENALNESKAYLKSFGKRVLIVTDKVMTDLGNVKVLTEVLDSENIEHVLYNEINSEPTDTMIEKGIKLYKENQCDFLIGLGGGSPIDSTKAIGAMITNEGKISDYMGREIEKELPPFAVIPTTAGTGSEATQFTIITDTKNDVKMLLKGANLLPNLAIVDPRFTMTAPAKITAATGLDALTHAIEAYTSRKAQPLSDSFAVSAVKRIFKYLPIAFDTPKDLKAREEMSIAALEAGIAFNNSSVTIVHGMSRPIGALFHVPHGLSNAMLLEACFTYVVDGAYDRFAQLAKEINIANDNMSNEEAAKAFIDEVVKLMVKLEIPTLEEFGVDKTKFFDNIEKMAADAMESGSPSNTRKIIEVDDVIKIYNNLWR

SEQ ID NO: 39521 - DNA, 1149 bp, Clostridium perfringens str. 13
  CDS (1)..(1149): transl_table=11
atgagttataaattttttatgccagctataagtttaatgggagcagattgcttaaaagacgctggtgatcaagttggagaattaggatttaaaaaagctttaatagtaacagataaagttttaggacaaataggaatagttaaaaaagtaacagatgttttagataataagaatatagaatatgcaatatatgatgaaactaaaccaaacccaacagttaaaaatgttaatgatggtttagcattattaaaagaaaaagaatgtgattttgttatttcattaggaggaggctcagctcatgactgtgctaaaggaatagctttattagctactaatggtggagaaataaaagactatgagggagtagataaatctaaaaaacctcaattaccaatggtaggtataaatacaactgctggtactggtagtgagatgactttattcgctattataactgatgaagaaagacatataaaaatggctttagtagacaagcatttaacaccaataatagcggttaatgaccctatgttaatgcttgctatgccaaaatcattaacagcggctactggtatggatgccttaacacacgctatagaggcttatgtttcaacttctgccacaccaataacagatgcttgtgcagagaaagctatcgaacttataagcaattatttagtgaatgctgttgaaaatggagaaaatgtggaagctagagatatgatggcttatgctgaatatttagcaggaatggcatttaacaatgctagcttaggatatgttcacgctatggctcaccaattaggtggattctacaacttacctcatggagtatgtaatgcaatattattacctcatgttcaagaatataacaaagatacaagtgcttcaagattagctaaaattgctaaaataatgggtggaaacatagaaggattaactgatgagcaaggagcagatctttgcatagatatgataaaatcattatcacaaactataggaattccagagggacttggagtattaggagtaaaagaaagtgattttgaaactttagctactaatgctttaaatgatgcttgttcattaacaaatccaagaaaaggaaacttagaagaagtaatagctatattcagaaaagcaatgtag

SEQ ID NO: 39522 - protein, 382 aa, Clostridium perfringens str. 13
MSYKFFMPAISLMGADCLKDAGDQVGELGFKKALIVTDKVLGQIGIVKKVTDVLDNKNIEYAIYDETKPNPTVKNVNDGLALLKEKECDFVISLGGGSAHDCAKGIALLATNGGEIKDYEGVDKSKKPQLPMVGINTTAGTGSEMTLFAIITDEERHIKMALVDKHLTPIIAVNDPMLMLAMPKSLTAATGMDALTHAIEAYVSTSATPITDACAEKAIELISNYLVNAVENGENVEARDMMAYAEYLAGMAFNNASLGYVHAMAHQLGGFYNLPHGVCNAILLPHVQEYNKDTSASRLAKIAKIMGGNIEGLTDEQGADLCIDMIKSLSQTIGIPEGLGVLGVKESDFETLATNALNDACSLTNPRKGNLEEVIAIFRKAM

SEQ ID NO: 39523 - DNA, 1131 bp, Clostridium perfringens str. 13
  CDS (1)..(1131): transl_table=11
atgaaaaggtttaagattaagacagaaatactttttggagaaggagccttagattacctaaaggaacttaagaataaaaaagtttttatagtaacagatccttttatggttaagtcagggactatagaaaaattaactaataaccttaaatcatctgaggtttttgtatttagtgaaatagttccagatccacctattgagttagttgtaagtggaatagaaatgcttaaagattttaatcctgatgttgttattgctttagggggagggtctgctatagatgcaactaaggcaataatagatttttctaaaaaattagttaaattaaatgatattaagtttatagctataccaacaacaagtggtacaggctcagaagtaacttcattttccgtaataacagataagcaaaaaggagttaaatatcctttagtatcagatgaattattaccagacatagcaattttagatccagaacttgttaaaacagttccaaattttataactgctgatacaggaatggatgtacttactcatgcattagaagcatatgtttctaaaaatgcaacagacttttcagatgctttagctgaaaaagcagctactttagtttttaaatatttattaaaagcttatgaaaatggaaatgatatagaagctagggaaaaaatgcataatgcttcttgtttagccgggttagcctttaatgaggcttctttaggagtaaaccatggtattgcccatgttttaggaggaaaattccatgttcctcatggaagaactaactcaatattattaccacatgtaatagaatataatgcaaacataacaagctataattctaaggaatttagtgaagctgcagaaaaatatgctaaaatagctaaaatggttggattacaaggatcaaatactagaggattagtaaaaaatcttgtaaatgaaattaaaaagatgcaaaaggcaatgaatatgcctacaactttaagagaatgtaaagttaattgtgatgaactaaagagtttagagaatgaaatagctcaattagcattaaaggatgcatgtacagaaagtaatccaagagtgccagatgaaaatgatataatatctattttaaacaaaattaaatag

SEQ ID NO: 39524 - protein, 376 aa, Clostridium perfringens str. 13
MKRFKIKTEILFGEGALDYLKELKNKKVFIVTDPFMVKSGTIEKLTNNLKSSEVFVFSEIVPDPPIELVVSGIEMLKDFNPDVVIALGGGSAIDATKAIIDFSKKLVKLNDIKFIAIPTTSGTGSEVTSFSVITDKQKGVKYPLVSDELLPDIAILDPELVKTVPNFITADTGMDVLTHALEAYVSKNATDFSDALAEKAATLVFKYLLKAYENGNDIEAREKMHNASCLAGLAFNEASLGVNHGIAHVLGGKFHVPHGRTNSILLPHVIEYNANITSYNSKEFSEAAEKYAKIAKMVGLQGSNTRGLVKNLVNEIKKMQKAMNMPTTLRECKVNCDELKSLENEIAQLALKDACTESNPRVPDENDIISILNKIK

SEQ ID NO: 39525 - DNA, 1158 bp, Clostridium perfringens str. 13
  CDS (1)..(1158): transl_table=11
atgagaatgtacgattatttagtaccaagtgtaaactttatgggagctaactcaatatcagtagttggtgaaagatgtaaaatattaggtggaaagaaagctttaatagttacagataaattcttaagaggattaaaaggtggagcagttgaattaactgaaaaatacctaaaagaagcaggaatcgaagttgcttattatgatggagttgaaccaaacccaaaagatacaaacgttaaagatggtttaaaaatattccaagacgaaaactgtgatatgatcgttacagttggtggaggaagctcacatgactgtggtaaaggaataggtatagctgcaactcacgaaggagatctttatgactatgctggaatagaaactttaacaaatccacttcctccaatagtagcagtaaacactacagctggaactgcaagtgaagtaactagacactgtgttataacaaacactaaaactaaagttaaattcgttatagtaagctggagaaacttacctttagtttcaatcaatgacccaatgttaatggttggaaaaccagcaggattaacagctgcaacaggaatggacgctttaactcatgctgtagaagcatacgtatcaaaagatgctaaccctgtaacagatgctgctgcaatacaagctataaaattaatatcaagcaatttaagacaagctgttgctttaggagaaaacttagtagctagagaaaacatggcttacggttcattattagctggtatggcattcaacaatgctaacttaggatatgtacatgctatggctcaccaattaggcggattatatgatatgcctcatggagtagctaacgctatgttattaccacacgtatgtaaatataacttaatatctaacccacaaaaattcgctgatatagctgaatttatgggagaaaacatagaaggattatcagtaatggacgctgctcaaaaagctatagatgcaatgttcagattatcaactgatatcggaataccagcaaaattaagagacatgggagtaaaagaagaagacttcggatacatggctgaaatggctcttaaagatggtaatgcattcagtaacccaagaaaaggtaacgaaagagacatcgttgaaatattcaaagctgcattctaa

SEQ ID NO: 39526 - protein, 385 aa, Clostridium perfringens str. 13
MRMYDYLVPSVNFMGANSISVVGERCKILGGKKALIVTDKFLRGLKGGAVELTEKYLKEAGIEVAYYDGVEPNPKDTNVKDGLKIFQDENCDMIVTVGGGSSHDCGKGIGIAATHEGDLYDYAGIETLTNPLPPIVAVNTTAGTASEVTRHCVITNTKTKVKFVIVSWRNLPLVSINDPMLMVGKPAGLTAATGMDALTHAVEAYVSKDANPVTDAAAIQAIKLISSNLRQAVALGENLVARENMAYGSLLAGMAFNNANLGYVHAMAHQLGGLYDMPHGVANAMLLPHVCKYNLISNPQKFADIAEFMGENIEGLSVMDAAQKAIDAMFRLSTDIGIPAKLRDMGVKEEDFGYMAEMALKDGNAFSNPRKGNERDIVEIFKAAF

SEQ ID NO: 39527 - DNA, 1167 bp, Clostridium perfringens str. 13
  CDS (1)..(1167): transl_table=11
atggcaagatttactttaccaagggacatatatcatggaaaagattccttagaagtattaaagagtttagaaggtaaaaaggcctttatagttattggtggcggatcaatgaaaagatttggctttttagataaggttttaagttatttaaaggaagctaatatggaaacaaaggtttttgaaggagtagaaccagatccatcagtagaaactgttatgaagggtgcaaaggaaatggaggaatttaatccagactggatagtttccataggaggaggttcacctattgatgcagcaaaggctatgtggattttctacgagtatcctgattttacttttgaaaaggccattgttccttttggattacctaagcttagaagaaaagcaaagtttgtagctattccatcaacttctggaactgctacagaggtaactgccttctcagtaataactgattataaggctaagattaaatatcctttagcagattttgaaataactccagatatagctattgttgatcctagcttagcagaaactatgccagagaagttagtagctcacacaggaatggatgccttaactcatgctattgaggcttatactgcaagtttaagatcaaactttacagatcctttagctttaaaggcaattgaaatggttaatatgcacttagtaaattcatataagggagatatggaagctaggggagaaatgcatgaggctcaatgtttagcaggaatggccttctctaatgcccttttaggaatagtacattctatggctcataaggtaggggctgtattccatataccacatggatgtgctaatgctatcttcttgccatatgtaattaaatataatagaaaagcttgtgaaaatagatatgctaacattgcaagacatattggattaaagggagaaagtgaaagagaattaacagatgacctaatagatttaataaataagtttaataaggaattaaatataccttcatcaatgaaagagtatggaatagatgagaatgaatttaaagctaatcttaaatttatagctcataatgctgttttagatccatgcacaggatcaaatccaagggagattaatgatgaaactatggaaaaattatatacttgtgcatattacggcagtgatgtggatttttaa

SEQ ID NO: 39528 - protein, 388 aa, Clostridium perfringens str. 13
MARFTLPRDIYHGKDSLEVLKSLEGKKAFIVIGGGSMKRFGFLDKVLSYLKEANMETKVFEGVEPDPSVETVMKGAKEMEEFNPDWIVSIGGGSPIDAAKAMWIFYEYPDFTFEKAIVPFGLPKLRRKAKFVAIPSTSGTATEVTAFSVITDYKAKIKYPLADFEITPDIAIVDPSLAETMPEKLVAHTGMDALTHAIEAYTASLRSNFTDPLALKAIEMVNMHLVNSYKGDMEARGEMHEAQCLAGMAFSNALLGIVHSMAHKVGAVFHIPHGCANAIFLPYVIKYNRKACENRYANIARHIGLKGESERELTDDLIDLINKFNKELNIPSSMKEYGIDENEFKANLKFIAHNAVLDPCTGSNPREINDETMEKLYTCAYYGSDVDF

SEQ ID NO: 39529 - DNA, 2598 bp, Clostridium perfringens str. 13
  CDS (1)..(2598): transl_table=11
atgaaagtaacaaacgtagatgaattaatgcttagattagagaaagttagagcagctcaaaaagagttctcaaaattctctcaagagcaagtagatgaaatatttagacaagcagcagtagcagctaataatgagagaatcagattagcaaaaatggctgttgaagaatcaggaatgggtatagttgaagataaagttataaaaaaccattttgctgcagaatatatatacaataaatataaagatgaaaaaacttgtggagttatagaaaaagatgaatcatttggtatcactaaaatagctgaaccaataggagttgtagcagcaatcgttcctactacaaacccaacatcaacagctatattcaaagctttaatatcattaaagactagaaacgctgtattcttttcaccacatccaagagctaaaaactcaacaatagaagcagctagagttgttttagaagcagctgttaaagctggagctccaaaagatataatcggatggatagatgagccatcagttgaaatgtcacaagtattaatggcagaagctgatatcatactagctactggtggtccaggaatggttaaagcagcttactcatcaggaaaaccagctatcggggttggagcaggtaatacaccagcaatcatagatgaaacagctcacttaaaaatggcagtaaactcaatattattatcaaaaactttcgataacggtgttatctgtgcatcagagcaaacagtattagttgttgataaagtttatgatgaggtaagaaaagagttcgctgatagaggagcttacttcttaaaagataaagaaatagataaagtaagaaaaacaattttaataaatggtaacttaaatgctaacatagttggtcaatcagcatggaaaatagctgacatggcaggtgttaaggttccaaaagatactaaagttttaattggtgaagttgagtcagttgaattagaagaaccattctcacatgaaaaattatcaccagtattaggaatgtacagagtagctaactttgaagaagctttagttaaagctgaaagattagttgaacttggtggattcggacatacttcagttttatacactgatacaatgaaatcacaagacagagttcaaaaattcggtgcaactatgaaaactggtagaacaataataaatatgccatcaactcaaggagctatcggagatatatacaacttcaagctagcaccatcattaacattaggttgtggatcatggggtggaaactcagtttcagaaaacgttggtcctaaacacttaatgaatgttaagagtgtagctgagaggagagaaaatatgctttggttcagagttccagaaaaagtttacttcaaatatggtgctttaggagttgctcttagagaattaaaagatttaaacaagaaaaaagtatttatagtaacagacaacgtactagctagtctaggatatgttgataaaataacaagtgttttagaagaaataggtgtagatttcagagtattctcagaagttactccagacccaactttagcatgtgctaaaaaaggtgctgaagcaatgagaagctatcaaccagatgcaatcatagctcttggtggaggttcaccaatggacgctgctaagattatgtgggtaatgtatgagcatccagaagttgctttcgaagatttagcaatgagattcatggatataagaaagagagtttacccattcccaactatgggtcaaaaagctatgatgatttcagttccaacatcagctggtactggttcagaagtaacaccattcgcagttataactgatgaagaatcaggagtaaaatatccattagcagattacgagttaactccagatatggctatcatagatgctgagcttatgatgaacatgccaaaaggattaacagctgcatcaggtatagacgcattaactcatgctttagaagcttacgtttcagttttagcatcagagtacactaatggattagctttagaagctataagattaatatttaaatacttaccacaagcttacgctgaaggtactacaaacataaaagcaagagaaaaaatggctcatgcttcaacaatggctggtatggcattcgctaacgcattcttaggagtatgtcactcaatggcacacaaattaggatcagaacaccatatagcacacggagttgctaacggaatcttaatagaccatgtaataagattcaacgctgttgacaacccaagaaaacaagctgcattcccacaatacaaatatccaaatgctaaatggagatatgcagtaatcgctgactacttaggattaggtggaaagaacgaagaagaaaaagttaataacttaatcaaggctatagataaccttaagaaaacagttggaattcctgcaacaatagctgactgtggagtttcaaaagaatcattctacgctacattagaaaaaatgagtgaagatgcattcgatgaccaatgtacaggtgctaacccaagatacccattaataagtgaaatcaagcaaatgtacatcaatgctttcgaaggtaaaaaagacagagtttaa

SEQ ID NO: 39530 - protein, 865 aa, Clostridium perfringens str. 13
MKVTNVDELMLRLEKVRAAQKEFSKFSQEQVDEIFRQAAVAANNERIRLAKMAVEESGMGIVEDKVIKNHFAAEYIYNKYKDEKTCGVIEKDESFGITKIAEPIGVVAAIVPTTNPTSTAIFKALISLKTRNAVFFSPHPRAKNSTIEAARVVLEAAVKAGAPKDIIGWIDEPSVEMSQVLMAEADIILATGGPGMVKAAYSSGKPAIGVGAGNTPAIIDETAHLKMAVNSILLSKTFDNGVICASEQTVLVVDKVYDEVRKEFADRGAYFLKDKEIDKVRKTILINGNLNANIVGQSAWKIADMAGVKVPKDTKVLIGEVESVELEEPFSHEKLSPVLGMYRVANFEEALVKAERLVELGGFGHTSVLYTDTMKSQDRVQKFGATMKTGRTIINMPSTQGAIGDIYNFKLAPSLTLGCGSWGGNSVSENVGPKHLMNVKSVAERRENMLWFRVPEKVYFKYGALGVALRELKDLNKKKVFIVTDNVLASLGYVDKITSVLEEIGVDFRVFSEVTPDPTLACAKKGAEAMRSYQPDAIIALGGGSPMDAAKIMWVMYEHPEVAFEDLAMRFMDIRKRVYPFPTMGQKAMMISVPTSAGTGSEVTPFAVITDEESGVKYPLADYELTPDMAIIDAELMMNMPKGLTAASGIDALTHALEAYVSVLASEYTNGLALEAIRLIFKYLPQAYAEGTTNIKAREKMAHASTMAGMAFANAFLGVCHSMAHKLGSEHHIAHGVANGILIDHVIRFNAVDNPRKQAAFPQYKYPNAKWRYAVIADYLGLGGKNEEEKVNNLIKAIDNLKKTVGIPATIADCGVSKESFYATLEKMSEDAFDDQCTGANPRYPLISEIKQMYINAFEGKKDRV

SEQ ID NO: 39531 - DNA, 1128 bp, Pyrococcus furiosus DSM 3638
  CDS (1)..(1128): transl_table=11
atgtttttcctaaagactaagattatcgagggaaggggaagtttggagtatcttcaaaaggaagctattgggttcgagagggctttaatcttagcgtcaagctctatgaaaaggttagggtttctgaaggaagctgaagactatctaagggaaggtggagttgaggtaatttcaatagcaggccttcctcctgagcccacgaaagacgttgtcgacgagttcctcccaaaagttagggagttttctccagagatcctcattgcaattggtggaggaagtgttatcgatatggccaaagctctaaaggtattttacgatgtcccaggaatttcatttgaggaagttgcaatcaagagtagattttcgaagccgagacccgttccaaagctgaaaactccccttatagctattccctcaacgagcggtgctggaagtgaggtttcagcagcgagcgtgattaaggtaggggacgttaagtacacgattgtaactcccgagatagctcctgaagtggctatacttgaccctagattacccgaaggaatgcccccagaagttgccaggaattctggaatggatgttttagttcatgcgatagaggcttatgtttcaaaggcttcctcaccctttacagatgcaatggcagttaaagcggcaaaagctgtgttggagcatttagaggagagcattagaggagacaaaaatgccagagagaaaatccactatgcagctacaatggctggcatagctttcttaaacgcaaggcttggactcgttcatgcgatgagtcataaggccgcatggataggaccgcatggtctcgtaaatgccattctacttccctatgtgatggagtataacatggcacgcaggagagagaaatatgatgcattggcgagggaattgggatttgacaatgctgaagagctccttgaagagataaaagctctgaacgaaaggcttggaataggacccatctcaagttacgtcagcgaggaggagttcttagcgaagcttgatgaaatggtagagagagcctatgaagatcccctcgttaacttcaacccagttgagccgagaaaagaggacattagaagaatttatgagagggccttctatggagattga

SEQ ID NO: 39532 - protein, 375 aa, Pyrococcus furiosus DSM 3638
MFFLKTKIIEGRGSLEYLQKEAIGFERALILASSSMKRLGFLKEAEDYLREGGVEVISIAGLPPEPTKDVVDEFLPKVREFSPEILIAIGGGSVIDMAKALKVFYDVPGISFEEVAIKSRFSKPRPVPKLKTPLIAIPSTSGAGSEVSAASVIKVGDVKYTIVTPEIAPEVAILDPRLPEGMPPEVARNSGMDVLVHAIEAYVSKASSPFTDAMAVKAAKAVLEHLEESIRGDKNAREKIHYAATMAGIAFLNARLGLVHAMSHKAAWIGPHGLVNAILLPYVMEYNMARRREKYDALARELGFDNAEELLEEIKALNERLGIGPISSYVSEEEFLAKLDEMVERAYEDPLVNFNPVEPRKEDIRRIYERAFYGD

SEQ ID NO: 39533 - DNA, 1119 bp, Fusobacterium nucleatum subsp. nucleatum ATCC 25586
  CDS (1)..(1119): transl_table=11
atgaaagaatttagactacaacctaaaatattatttggagaagattccttagattatttgaaaacattaaaatgtaagaaagttatgatagtgactgatgaagttatgacacagttaagattaacggattttgttacaaatagtttatcttcaacaactgaaataaatatttttgataaagttgaacctaatcccagtgtagcaacgatagaaaatggtttaaaagattttattggttttgagccagaatgtgttattgcattaggaggaggttcttcaatagatgcttgtaaagggattttatattttgcttataaattgtataaaaagttgaatataaataagaagaaaatattttttatagcaattccaacaacaagtggaacaggctcagaagtaacttcctatagtgttgtaactaatggagaacataaaatagccttagcaaatgacttaatgttaccagatgtagcattattgagtacaaaatttttaggtgctttaccagcaaaagttgttgcagatacaggaatggatgttttaactcatgcacttgaagcttatgtttcaacaaatgctaatccattttcaagttcacttgcaataaaatcaattaagatgatttttgaaaatttagtaacacactataatgatagaaaaattgagggtccaaaaagaaatgtccaatttgcctcttgtatggcagggatagcttttgataattcttcacttggaattaaccacagcattgcacatactgttggagcaaagtttcatatagcacatggaagagccaatgctattattatgccttatgtaattgaagttaatactgaggcaaataagaaatattatgaagtttcaagagaattaggcttaccagctaatactattgaggaagggaaatattcacttttaagttttgtgagaattctaaaagaaaaattaggtattgaaaaatgcttaaaagattatggagttgattttgaaacttttaaaagagaaattccgagtatattatcagatataaagaaagatatatgtactatatataatccaaataaattaagtgatgaggaatatataagattacttttaaaaatttattttggtgaataa

SEQ ID NO: 39534 - protein, 372 aa, Fusobacterium nucleatum subsp. nucleatum ATCC 25586
MKEFRLQPKILFGEDSLDYLKTLKCKKVMIVTDEVMTQLRLTDFVTNSLSSTTEINIFDKVEPNPSVATIENGLKDFIGFEPECVIALGGGSSIDACKGILYFAYKLYKKLNINKKKIFFIAIPTTSGTGSEVTSYSVVTNGEHKIALANDLMLPDVALLSTKFLGALPAKVVADTGMDVLTHALEAYVSTNANPFSSSLAIKSIKMIFENLVTHYNDRKIEGPKRNVQFASCMAGIAFDNSSLGINHSIAHTVGAKFHIAHGRANAIIMPYVIEVNTEANKKYYEVSRELGLPANTIEEGKYSLLSFVRILKEKLGIEKCLKDYGVDFETFKREIPSILSDIKKDICTIYNPNKLSDEEYIRLLLKIYFGE

SEQ ID NO: 39535 - DNA, 2643 bp, Streptococcus pyogenes MGAS8232
  CDS (1)..(2643): transl_table=11
atgactgaaggacataatactgttgaaacaacctctgtttctgtgacaattgatgctcttgttcaaaaaggtttagctgctcttgaagagatgcgtaagcttgaccaagaacaagttgattatatcgtagccaaagcttctgttgctgctttggatgctcacggtgaacttgctaaacatgcttatgaagaaacaggtcgcggtgtctttgaagataaagcaacaaaaaatctatttgcttgtgagcatgtggttaataacatgcgccatcaaaaaacagtaggaattattgaagaagatgatgtgacaggtttgacattaattgctgagccggtgggtgttatctgtgggattacaccaacaactaacccaacttcaacagctatctttaaatctttgatctcgttaaaaacacgtaatccaattatttttgcctttcacccatcagcacaagaatcatcagcgcatgccgctcgtattgttcgtgatgctgctattgccgctggtgctcctgaaaattgtgtgcagtgggttgaaacaccatcacttgaagcaacaaatgctttgatgaatcatgacggcattgccactatccttgcgacaggtggaaatgcgatggttaaagcggcatactcatgtgggaaacctgcccttggggtaggtgctggtaacgttccagcttatgttgaaaaatcagctaatatccgtcaagccgctcatgatattgtgatgtctaaatcatttgataatggtatggtctgtgcctctgaacaagctgttatcatcgataaagaaatctatgacaattttgtagcagaattcaaatcttaccacacttattttgttaataaaaaagaaaaagcccttcttgaagaattctgttttggtgcaaaagcaaatagcaaaaactgtgctggtgcaaaattaaatccaaatattgtaggaaaaccagctacttggattgcagcacaagctggatttactgttccagaaggaacaaatattcttgccgcagaatgtactgaagttagtgaaaaagaacctttgacacgggaaaaattatcaccagtcattgctgttttgaaatctgaatcacgtgaagacggtgttgaaaaagctcgtcaaatggttgaatttaatggacttggtcactcagctgccattcatacagcagatgcagagttggcaaaagaatttggaactagaatccgtgctatccgcgtcatctggaattcaccttctacatttggtggtatcggggatgtttacaatgctttcttaccatcattgactcttggttgtggttcgtatggacgtaacgcagttggtgataacgttagtgctataaatctcttgaacatcaaaaaagtaggaagacgtagaaataatatgcaatggtttaaagttccttcaaaaacatacttcgaacgtgattcaattcaatatttgcaaaaatgtcgtgatgttgaacgtgtcatgattgttacagatcacgctatggttgagcttggtttcttggatcgtatcattgaacaacttgatcttcgtcgcaataaagttgtttatcagatctttgctgaagtagaaccagatccagacattacaactgttatgaaaggtactgaattaatgcgtaccttcaaaccagacaccattattgcccttggcgggggatctcctatggatgcagccaaagttatgtggctcttttatgaacaaccagaagttgatttccatgacctcgttcaaaaattcatggatatccgcaaacgtgcgttcaaattcccagaacttggtaagaaaacaaaatttgttgctatcccaacaacttctggaacaggttcagaggtgacaccatttgccgttatctctgacaaagcaaataatcgtaaatatccaatcgctgattactcattaacaccaactgtagccattgttgacccagctttggtattgactgttccaggctttattgctgctgatactggtatggacgttttgacacacgcaaccgaagcttacgtgtcacaaatggccaatgactttacggatggtttagctcttcaagccattaaaattgtttttgataatcttgaaaaatcagttaaaacagccgattttgaagcacgtgaaaagatgcacaatgcgtcaactatggcaggtatggctttcgccaatgcattcttaggtatttctcactcaatggcgcataaaattggcgcacaattccataccgtacacggacgtacaaatgcaattcttttgccgtatgttatccgctataatggaactcgtccagctaaaacggcgacatggcctaagtataattactaccgtgcggatgaaaaataccaagacattgcgaaattgttagggcttccagcttctacaccagaagaagcagtggaatcttatgcgaaagctgtttatgatctgggttgccgagttggtattcaaatgaacttcaaagctcaaggtatcgacgaaaatgaatggaaagaacattctcgtgaattggcttaccttgcttatgaagaccaatgttcacctgctaacccacgtcttccaatggttgatcacatgcaagaaattattgaagatgcttactatggttatgctgaacgtccaggacgacgtaagtga

SEQ ID NO: 39536 - protein, 880 aa, Streptococcus pyogenes MGAS8232
MTEGHNTVETTSVSVTIDALVQKGLAALEEMRKLDQEQVDYIVAKASVAALDAHGELAKHAYEETGRGVFEDKATKNLFACEHVVNNMRHQKTVGIIEEDDVTGLTLIAEPVGVICGITPTTNPTSTAIFKSLISLKTRNPIIFAFHPSAQESSAHAARIVRDAAIAAGAPENCVQWVETPSLEATNALMNHDGIATILATGGNAMVKAAYSCGKPALGVGAGNVPAYVEKSANIRQAAHDIVMSKSFDNGMVCASEQAVIIDKEIYDNFVAEFKSYHTYFVNKKEKALLEEFCFGAKANSKNCAGAKLNPNIVGKPATWIAAQAGFTVPEGTNILAAECTEVSEKEPLTREKLSPVIAVLKSESREDGVEKARQMVEFNGLGHSAAIHTADAELAKEFGTRIRAIRVIWNSPSTFGGIGDVYNAFLPSLTLGCGSYGRNAVGDNVSAINLLNIKKVGRRRNNMQWFKVPSKTYFERDSIQYLQKCRDVERVMIVTDHAMVELGFLDRIIEQLDLRRNKVVYQIFAEVEPDPDITTVMKGTELMRTFKPDTIIALGGGSPMDAAKVMWLFYEQPEVDFHDLVQKFMDIRKRAFKFPELGKKTKFVAIPTTSGTGSEVTPFAVISDKANNRKYPIADYSLTPTVAIVDPALVLTVPGFIAADTGMDVLTHATEAYVSQMANDFTDGLALQAIKIVFDNLEKSVKTADFEAREKMHNASTMAGMAFANAFLGISHSMAHKIGAQFHTVHGRTNAILLPYVIRYNGTRPAKTATWPKYNYYRADEKYQDIAKLLGLPASTPEEAVESYAKAVYDLGCRVGIQMNFKAQGIDENEWKEHSRELAYLAYEDQCSPANPRLPMVDHMQEIIEDAYYGYAERPGRRK

SEQ ID NO: 39537 - DNA, 1203 bp, Methanosarcina acetivorans C2A
  CDS (1)..(1203): transl_table=11
ttgttaaacgaagctgttgttaaacaaagctgttgccaaaaggagttgagaagcatgacatatacctatctgaacccgaaagtagctcttatgggggctggttgtgtaaaagaaatcggcaagcatgcaaaagagcttgggggtactaaagccctgatcgtttcaggaaggagcaggcatggagaagaacttgcaggagatatccggaaaatccttgaaaccgccgggctgaaaatagcaatctttccaggagcggatccgaacccgacagacagttcggttatggaaggggcaataatatacgaaaaagagaactgtgacctgatcgttgctgtcggaggtggaagcccgatggattgtgcaaaagccatcggcatcgtagctaaaaacggaggggagattaacgactacgaaggcatcggaaaggtcacgaagggtgtccctccgcttatcacggtaaatacaaccgccggcaccgcaagtgagatgacgagttttacaattattacggacacgaaaagacacatcaaaatggcaatcgttgatccccgcatcacacccgacgtagcagttaacgaccccgaactgatggtaagtatgccaccggcgcttacggctgcaaccggaatggatgctcttacccatgcagttgaagcttatgtttccactattgctactccgaccaccgatgcggcggctatcaaggcaatcgagctaatctcaaaatatctgcccgaagctgttgcccacgggggagatgtgaggacaagagacatgatggctcatgccgaatatcttgcaggcattgctttcaataacgctagccttggctatgtgcactccatggcccaccagctcggcggattatatgacctcccgcacggcatctgcaatgcaattctccttccctatgtggaaatgtacaacaaggaagtctgtcccgaacggtttgccgatattgcaaaggcaatgggagaaaaagttgagggtctgagcccggaagaagctgcagacaaagccatagctgccattaaaaagcttgcagctgacattggaattccctcgggtctgaaagagctcggagccagggaggaagacctcgaactgctggcggaaaatgccatgcaggacgtctgccaccttacaaatccaagagagctctcaaaagaagaggtgattgaaatttacaggaaagcaatgtga

SEQ ID NO: 39538 - protein, 400 aa, Methanosarcina acetivorans C2A
MLNEAVVKQSCCQKELRSMTYTYLNPKVALMGAGCVKEIGKHAKELGGTKALIVSGRSRHGEELAGDIRKILETAGLKIAIFPGADPNPTDSSVMEGAIIYEKENCDLIVAVGGGSPMDCAKAIGIVAKNGGEINDYEGIGKVTKGVPPLITVNTTAGTASEMTSFTIITDTKRHIKMAIVDPRITPDVAVNDPELMVSMPPALTAATGMDALTHAVEAYVSTIATPTTDAAAIKAIELISKYLPEAVAHGGDVRTRDMMAHAEYLAGIAFNNASLGYVHSMAHQLGGLYDLPHGICNAILLPYVEMYNKEVCPERFADIAKAMGEKVEGLSPEEAADKAIAAIKKLAADIGIPSGLKELGAREEDLELLAENAMQDVCHLTNPRELSKEEVIEIYRKAM

SEQ ID NO: 39539 - DNA, 1275 bp, Methanosarcina mazei Go1
  CDS (1)..(1275): transl_table=11
ttgcagagcaaaactttattacttgcagggaaaaaatcagttctattaatattttgtatttttataatagcaccgggaagatttgaacagaacttatcgaggggagtagaaggcatgatagaaaagatgacatacacttacctgaacccaaagatagccctgatgggacctggatgtgtaaacgggatcggcacgcatgcaaaagacctggggggtacgaaagccctgatagtttcaggcaagagcaggcatgggaaagagcttgcagcggatattcgcagaattcttgaacgtgcggggatagaagcagcaatctttccgggagcagacccgaaccctaccgatacttcagttatggaaggggcagacatttacaggaaagaaaactgtaacatgatagttgctgtcggaggcgggagccctatggactgtgcaaaggcaatcggcattgtggtatataatggaggaaggataaatgattacgaaggagtgggtaaagttaccagaggaattcctcctcttatcacggtaaacacgacagcgggcactgcgagcgagatgaccagttttacaattattactgatactgaaaggcacatcaaaatggctatcgtcgacccccggatcacacctgatgtggcggttaacgaccccgaactgatggtcagcatgccgccagcacttacggctgcaacagggatggatgctctgacccatgctgtggaagcttatgtttctaccatggctaccccgactaccgatgcggctgccataaaagcaatagagcttatatcaaaatacctgcccgaagccgtcctccacggggaagatatacgggccagggacatgatggcacacgcagaatatcttgcaggcattgctttcaacaatgcaagtcttgggtatgttcattccatggctcatcagctcggaggcttttatgacctcccgcatggggtctgcaatgccatcctcctgccttatgtggagatgtataacaagcaggtttgccctgaacgttttgcagacatcgcaaaggcaatgggagaaaaagttgagggattgagcccggacgaggcagcggataaagcaatagatgcaatcaaaaagcttgcagcagaaatcggaattccttcaggcctgaaagagctcggggcaagagaagaagaccttgaacttctggctgaaaatgccatgcaggacgtctgccgccttacaaatccaagagaactctcaaaagaagatatcatcgagatttacagaaaagccctgtga

SEQ ID NO: 39540 - protein, 424 aa, Methanosarcina mazei Go1
MQSKTLLLAGKKSVLLIFCIFIIAPGRFEQNLSRGVEGMIEKMTYTYLNPKIALMGPGCVNGIGTHAKDLGGTKALIVSGKSRHGKELAADIRRILERAGIEAAIFPGADPNPTDTSVMEGADIYRKENCNMIVAVGGGSPMDCAKAIGIVVYNGGRINDYEGVGKVTRGIPPLITVNTTAGTASEMTSFTIITDTERHIKMAIVDPRITPDVAVNDPELMVSMPPALTAATGMDALTHAVEAYVSTMATPTTDAAAIKAIELISKYLPEAVLHGEDIRARDMMAHAEYLAGIAFNNASLGYVHSMAHQLGGFYDLPHGVCNAILLPYVEMYNKQVCPERFADIAKAMGEKVEGLSPDEAADKAIDAIKKLAAEIGIPSGLKELGAREEDLELLAENAMQDVCRLTNPRELSKEDIIEIYRKAL

SEQ ID NO: 39541 - DNA, 1149 bp, Yersinia pestis KIM
  CDS (1)..(1149): transl_table=11
atgagtttcatgttggcactaccgaaaatcagcttgcacggcacgggtgcaatcggcgatatggttaaattactcagtgacaaacagtgggggaaagcactgattgttactgacgggcaactggttgaactcggcttattggacagtttattcgcggcgatggcgcagtatcagttaccttacgggctgtttggggaggtattccctaatccaacagaagagttggtccaggccggttttgccgcctttacccagcatcaatgtgactatttgattgccttcggtggcggcagccccattgataccgccaaagccatcaaaatactgactgccaatccggggccatccaccgcttattccggtgtaggtaaagtcaaacaaacgggtgttccgttgatagccatcaataccacggcaggaacggcagcggaattgaccagtaatgcggtgattattgatagccagcggcaagttaaggaggtgattatcgataccaatctcatccctgatattgcggttgacgatccctcagtaatgctcaatattcccgccagtgtcacggcggcgacggggatggatgcccttacccacgctgtcgaagcgtatgtctcgttaggtgcacatacgttaacggaccattcagcgctcgaatcaatccgtcttatcagccaatggttgccattagcggtcgctgacggcaaaaacctacaagcgcgcgaaatgatggcatgtgggcaatatttggcgggtatggcgtttaacagtgctgggctaggtttggttcacgcactggcccaccaaccgggtgccacacataatcttcctcatggcgtctgcaatgctatcttgctgccggtaattgaagaatataatcgcccgcaggctacccgccgttttgcccgaattgcacaggcaatgggggtagacactcaggacatgagtgatgagcaagcaagtcatcaggcgatagcggccattcgtcagttatcgctgcaagttggtattcctgccgggttctccgccttaggtattgaggaaagtgatattgaaggttggttagataaagcgctggctgacccttgtgctccttgtaacccacgttctgcagatcgggaacaaattcgcacactgtacttacaggcactttaa

SEQ ID NO: 39542 - protein, 382 aa, Yersinia pestis KIM
MSFMLALPKISLHGTGAIGDMVKLLSDKQWGKALIVTDGQLVELGLLDSLFAAMAQYQLPYGLFGEVFPNPTEELVQAGFAAFTQHQCDYLIAFGGGSPIDTAKAIKILTANPGPSTAYSGVGKVKQTGVPLIAINTTAGTAAELTSNAVIIDSQRQVKEVIIDTNLIPDIAVDDPSVMLNIPASVTAATGMDALTHAVEAYVSLGAHTLTDHSALESIRLISQWLPLAVADGKNLQAREMMACGQYLAGMAFNSAGLGLVHALAHQPGATHNLPHGVCNAILLPVIEEYNRPQATRRFARIAQAMGVDTQDMSDEQASHQAIAAIRQLSLQVGIPAGFSALGIEESDIEGWLDKALADPCAPCNPRSADREQIRTLYLQAL

SEQ ID NO: 39543 - DNA, 2676 bp, Yersinia pestis KIM
  CDS (1)..(2676): transl_table=11
atggctgtaacgaatgtcgctgaacttaacgagctagtagcacgcgtcaagaaagcccagcgcgagtatgccaacttttcgcaagagcaagttgataaaatcttccgtgctgcagcattagccgctgcggatgcccgtattccactagccaaactggctgtaacagagtctggcatgggtattgttgaagacaaagtgatcaaaaaccactttgcttctgaatatatttacaatgcttataaagatgaaaaaacctgtggtattttgtgtgaagataagaccttcgggacgatcactatcgcagaacctattggtctaatctgcggtatcgtaccaaccactaaccctacgtctaccgctatttttaaagcactgattagcttgaagacacgtaacggtattatcttctccccacatccacgcgctaaagacgcaaccaataaagctgcggatatcgtgcttcaagccgctatcgcagcaggtgcgccagcggatattattggttggattgatgctccaacagttgaattatctaatcaactgatgcatcacccagacattaatcttattctggcaaccggtgggccaggtatggttaaagcggcctatagctctggtaaaccagccatcggcgtaggtgcgggtaatacgccagtcgtcgttgacgaaactgcagatattaaacgtgttgtcgcatctattctgatgtctaaaacctttgataacggtgttatctgcgcgtcagagcagtccatcatcgttgttgactcggtttacgatgcggttcgcgagcgttttgcttctcatggtggctacctgttacaaggtaaagaattgaaagccgttcaggatattatcctgaaaaatggcggtctaaacgcagccatcgtgggccagccagcaactaagatcgctgagatggctggcattaaagtgccaagtaataccaagatacttatcggtgaagtcaaagttgtcgatgaatcagagccatttgctcatgaaaaactgtcgcctacactggcaatgtatcgtgctaaaaactttgaagaagcggttgaaaaagcagagaaactggtggagatgggcggtatcggtcatacctcttgtctgtacaccgaccaagataaccagactgcacgcgttaaatatttcggcgataaaatgaagaccgcccgaattctaatcaacacccctgcctctcaaggtggtatcggtgacttgtataacttcaagctggcaccgtctctgacgctgggttgtggttcttggggtggtaactccatctctgaaaacgtcggtccgaaacacttgatcaacaagaaaactgtggctaagcgagcagaaaacatgttgtggcataaactaccgaaatctatttacttccgtcgcggctctctgcctatagcgttggaagaagtggcaactgacggtgcaaaacgtgccttcatcgtgactgaccgctacttgttcaacaacggttatgcagaccaagtcaccagcgtactgaaatctcacggtattgaaactgaagttttcttcgaagtagaagctgcccctaccctgagtatcgtgcgtaaaggtgcagagcagatgaactccttcaagccagacgttattattgctctgggtggtggttcaccgatggatgctgcaaaaatcatgtgggtaatgtacgaacatcctgaaacgcatttcgaagaactggcattgcgttttatggatatccgtaaacgcatttataagttcccgaaaatgggtgtaaaagcgaaattggtcgctattacaaccacatcaggtaccggttcagaagtcaccccgtttgccgtggttactgatgacgcaacaggccagaaatatccattggcagactatgcattgacaccagatatggccattgttgatgccaaccttgttatgaatatgcctaagtctctgtgtgccttcggtggtctggatgcagtaacgcacgcactggaagcctatgtgtctgtactggctaatgaatactctgacggccaggcgctgcaagcactgaagctgttgaaagaattcttgccagccagctacaacgaaggggctaaaaacccagttgctcgcgaacgtgtacataatgcagcaacaattgccggtatcgcctttgctaacgccttcttgggtgtctgtcactctatggcccacaaactgggttctgagttccatatcccacacggcttggcaaatgctatgttgatttctaacgttattcgctacaacgcgaatgacaacccaacaaaacagactgccttcagccaatatgaccgcccacaagcgcgtcgtcgttatgcagaaattgcagatcatttggggctgagtgcaccgggcgaccgtactgcacaaaaaatccagaaactgctggcttggttagatgaaatcaaagctgaactgggtatcccggcatcgattcgcgaagcgggtgttcaggaagctgacttcttagctaaagtagacaaattgtctgaagatgcatttgatgaccagtgcacaggtgctaacccacgctacccactgatctcagagctgaaacagatccttatggatacttattacggtcgcgaatatgttgaagagtttgaccgcgaagaagaagtcgcggcagctactgcgcctaaagctgagaaaaagaccaaaaagtaa

SEQ ID NO: 39544 - protein, 891 aa, Yersinia pestis KIM
MAVTNVAELNELVARVKKAQREYANFSQEQVDKIFRAAALAAADARIPLAKLAVTESGMGIVEDKVIKNHFASEYIYNAYKDEKTCGILCEDKTFGTITIAEPIGLICGIVPTTNPTSTAIFKALISLKTRNGIIFSPHPRAKDATNKAADIVLQAAIAAGAPADIIGWIDAPTVELSNQLMHHPDINLILATGGPGMVKAAYSSGKPAIGVGAGNTPVVVDETADIKRVVASILMSKTFDNGVICASEQSIIVVDSVYDAVRERFASHGGYLLQGKELKAVQDIILKNGGLNAAIVGQPATKIAEMAGIKVPSNTKILIGEVKVVDESEPFAHEKLSPTLAMYRAKNFEEAVEKAEKLVEMGGIGHTSCLYTDQDNQTARVKYFGDKMKTARILINTPASQGGIGDLYNFKLAPSLTLGCGSWGGNSISENVGPKHLINKKTVAKRAENMLWHKLPKSIYFRRGSLPIALEEVATDGAKRAFIVTDRYLFNNGYADQVTSVLKSHGIETEVFFEVEAAPTLSIVRKGAEQMNSFKPDVIIALGGGSPMDAAKIMWVMYEHPETHFEELALRFMDIRKRIYKFPKMGVKAKLVAITTTSGTGSEVTPFAVVTDDATGQKYPLADYALTPDMAIVDANLVMNMPKSLCAFGGLDAVTHALEAYVSVLANEYSDGQALQALKLLKEFLPASYNEGAKNPVARERVHNAATIAGIAFANAFLGVCHSMAHKLGSEFHIPHGLANAMLISNVIRYNANDNPTKQTAFSQYDRPQARRRYAEIADHLGLSAPGDRTAQKIQKLLAWLDEIKAELGIPASIREAGVQEADFLAKVDKLSEDAFDDQCTGANPRYPLISELKQILMDTYYGREYVEEFDREEEVAAATAPKAEKKTKK

SEQ ID NO: 39545 - DNA, 2658 bp, Thermosynechococcus elongatus BP-1
  CDS (1)..(2658): transl_table=11
atgaatgccccaaccttgaccagtgacccccccgttcaaagccttgccgatctggaagggctgattgagcgcgtccaacgggcgcagagtcagtacgcccaatttacccaagagcaagtggatcacattttccacgaagcagccatggcggccaaccaagcccggattcccctggccaaacaagccgtagccgaaacgggcatgggggttgtcgaagataaagttattaaaaatcactttgcttcggaatacatctacaacaagtacaaaaatgagaaaacctgcggcgtcattgaggatgaccccatctttggtatccaaaaaattgctgaaccggtggggatcattgccggtgtggtgccggtcacgaaccccacttcaacgaccatctttaaggcactgattgccctgaagactcgcaatggcattatcttttcgccccacccccgggcaaaggcctgtacggttgcagcggccaaggtagtgttggatgcagcggtcgctgccggcgcaccccccgatattattggctggattgatgagccgacgattgaactctcccaagccctgatgcagcacccgcagatcaagctgattttggccacggggggaccaggtatggtcaaggcagcctattcctctggccatccggcgatcggggtcggggccgggaatacccccgtgctcattgatgccacagccgatattcccacggcagtgagttcgattctcctcagtaaggcctttgacaatggcatgatctgtgcctcggagcaggcagtgattgttgtggatgagatttatgacgcacttaaagctgagtttcaacggcgaggggcctaccttctctcccctgaggaacggcagcaggtggcacaactactgctgaaggatggtcgcctcaatgccgccattgttggtcaatcggccgccaccattgccgcaatggccaatatccaagtaccgccagaaacccgggtactcattggcgaggtgagtgaagtggggccgcaggagccattttcctatgagaaactctgtccggtattggcgttatatcgggcaccccagttccataaaggggtggagattgcggcccagttggtgaattttgggggcaaggggcatacatctgtgctctataccgatccccgcaatcaagatgatattgcctatttcaaataccgcatgcaaacggcgcgggttctgattaacaccccttcttcccagggggcaattggcgatctctacaacttcaagttagatccgtcgctaacccttggttgtggtacgtggggcggcaacgtcacatcggaaaatgttggtccccgtcacttgctgaatattaaaacggtgagcgatcgccgggaaaatatgctttggtttcgggtgccgcccaagatctacttcaaacccggctgtttgcccattgccctgcgggagctggcggggaaaaaacgcgccttcctcgtgacggataaacccctctttgacttggggatcactgaaccgattgtccataccctcgaagaactgggcatcaagtatgacatcttccatgaagtggaaccagatccaaccctcagtaccgttaaccgcggtctagggttgctgcggcaatatcagccggatgtgattgttgctgtggggggtggctcacctatggatgcagccaaggtgatgtggctgttgtatgagcatccggaggtggagtttgacggccttgcgatgcgcttcatggatattcgcaagcgggtgtatcaactgcctcccttgggtcaaaaggcaatcctggtggctattcccaccacctcggggacgggttcagaggtgaccccctttgccgtggttaccgacgatcgcgtggggattaaatatcccttggcagactatgcccttacgccaacgatggcgattgtggatcccgacttggtgctgcacatgcccaagaaactgacggcctacggtggcattgatgcgctgacccatgccctggaggcctatgtgtcggtgctctcgacggagtttacggagggactggctctagaggccattaaactgctctttacctacctaccccgtgcctatcgcttgggggcggcggatccggaggcacgggagaaggtccactatgcggcgacgatcgctggcatggcctttgcgaatgccttcttgggggtctgccactcgctggcccacaaactaggctccaccttccacgtgccccacggcttggcgaatgcactcatgatttcccatgtgattcgctacaatgccacggatgctcccctgaagcaggcgattttcccgcagtacaagtatccccaagcgaaggagcgctatgcccaaattgccgacttcctcgaattggggggcacgaccccagaggaaaaagtggagcgtctcattgcggcaattgaggatttgaaagcccaattagaaattcccgccacgattaaggaggccctcaacagtgaggatcaagcgttctatgagcaggtggagagcatggccgaactggcctttgacgatcagtgcacgggggccaatccccgctatccgctgatccaagacctcaaggagttgtatatcctggcctatatggggtgtcggcgggatgcggcagcctactatgggggggaggcaacggggagttga

SEQ ID NO: 39546 - protein, 885 aa, Thermosynechococcus elongatus BP-1
MNAPTLTSDPPVQSLADLEGLIERVQRAQSQYAQFTQEQVDHIFHEAAMAANQARIPLAKQAVAETGMGVVEDKVIKNHFASEYIYNKYKNEKTCGVIEDDPIFGIQKIAEPVGIIAGVVPVTNPTSTTIFKALIALKTRNGIIFSPHPRAKACTVAAAKVVLDAAVAAGAPPDIIGWIDEPTIELSQALMQHPQIKLILATGGPGMVKAAYSSGHPAIGVGAGNTPVLIDATADIPTAVSSILLSKAFDNGMICASEQAVIVVDEIYDALKAEFQRRGAYLLSPEERQQVAQLLLKDGRLNAAIVGQSAATIAAMANIQVPPETRVLIGEVSEVGPQEPFSYEKLCPVLALYRAPQFHKGVEIAAQLVNFGGKGHTSVLYTDPRNQDDIAYFKYRMQTARVLINTPSSQGAIGDLYNFKLDPSLTLGCGTWGGNVTSENVGPRHLLNIKTVSDRRENMLWFRVPPKIYFKPGCLPIALRELAGKKRAFLVTDKPLFDLGITEPIVHTLEELGIKYDIFHEVEPDPTLSTVNRGLGLLRQYQPDVIVAVGGGSPMDAAKVMWLLYEHPEVEFDGLAMRFMDIRKRVYQLPPLGQKAILVAIPTTSGTGSEVTPFAVVTDDRVGIKYPLADYALTPTMAIVDPDLVLHMPKKLTAYGGIDALTHALEAYVSVLSTEFTEGLALEAIKLLFTYLPRAYRLGAADPEAREKVHYAATIAGMAFANAFLGVCHSLAHKLGSTFHVPHGLANALMISHVIRYNATDAPLKQAIFPQYKYPQAKERYAQIADFLELGGTTPEEKVERLIAAIEDLKAQLEIPATIKEALNSEDQAFYEQVESMAELAFDDQCTGANPRYPLIQDLKELYILAYMGCRRDAAAYYGGEATGS

SEQ ID NO: 39547 - DNA, 2643 bp, Streptococcus agalactiae 2603V/R
  CDS (1)..(2643): transl_table=11
atgactgaaaaaactaaagcagtagaaactacagatgttgctcttgcaattgatacattggttcaaaatggtttaaaagcacttgatgagatgcgtcaacttaatcaagaacaagttgattatattgtagctaaagcttctgttgcagccttggatgcccatggagaacttgctcttcatgcagtagaagaaactggtcgtggtgtctttgaagataaagcgacaaaaaatttatttgcatgtgaacacgtcgttaacaacatgcgtcatacaaagacagtgggagttattgaagaagacgatgtcacaggcttgacattaattgctgaaccagtgggagttgtctgtggtatcacgccaacaaccaacccaacttcaactgctattttcaagtcattaatctctcttaaaacacgtaatccaattatttttgccttccacccatcagcacaagaatcatcagcacatgcagcacgtattgttcgtgatgctgctattgctgctggagctcctgaaaattgtgtccaatggattgaacaaccatcaattgatgcaactaatgctttgatgaaccatgatggtattgccactatccttgcgacaggtggtaatgcgatggttaaagctgcctactcatgtgggaaacctgcccttggtgtaggtgctgggaatgttccagcttatgttgaaaaatcagctaatatccgacaagccgctcacgatattgttatgtctaaatcatttgataacggtatggtatgtgcatcagaacaggctgttattattgataaagaaatttataaagaatttgttgaagaatttaaatcttatcatacctatttcgttaataagaaagaaaaagctcttcttgaagaattctgttttggtgcaaaagcaaatagcaaaaactgtgctggtgcaaaattaaatccaaatattgttggaaaatcagcagtttggattgctgaacaagctggatttactgttccagaaggaacaaatattcttgccgcagaatgtactgaagttagtgaaaaagaacctttgacacgtgaaaaactatcacctgttattgcagtattgaaagctgaatctacagaagatggtgttgaaaaagctcgtcaaatggttgagtttaatggtctagggcactcagctgctattcatacaaaagatgcagacttagctcgtgaatttggaactagaattcgtgctatccgtgttatttggaattctccttctacttttggtggtattggggatgtttacaatgctttcttgccatcattgactcttggttgtggttcgtatggacgtaactcagttggtgataacgttagtgctataaatctcttgaatatcaaaaaagtaggaagacgtagaaataatatgcaatggtttaaagtcccttcaaaaacatacttcgaacgtgattctattcaatatttgcaaaaatgtcgcgatgttgaacgtgtcatgattgttacagatcacgccatggttgagcttggtttcttggatcgtatcattgaacaacttgatcttcgtcgcaataaagttgtttatcagatttttgctgaagtagaaccagatccagacattacaacagtaatgaaaggaacagatttgatgcgtaccttcaaaccagacactattattgcattaggtggtggttctcctatggatgctgcgaaagttatgtggctcttctatgaacaaccagaagttgatttccatgacctcgttcaaaaattcatggatatccgtaaacgtgcgttcaaattcccagaacttggtaagaaaacaaaatttgttgctattccaacaacttctggaacaggttctgaagtgacaccatttgccgttatctctgacaaagcaaataatcgtaaatatccaatcgctgattattcattaacaccaactgtagctatcgttgatccggcccttgttatgactgttcctggttttattgcggctgatacgggtatggatgtattgacacatgcaacagaggcttatgtttcacagatggcaaatgattatacagacggacttgctcttcaagcaattaaaattgtgtttgactacttagaacgctcagtaaaagatgctgattttgaagcacgtgaaaagatgcacaatgcgtcaactatggcaggtatggctttcgccaatgcattcttaggtatttctcactcaatggcgcataaaattggcgcacaattccataccgtacacggacgtacaaatgcaattcttttgccgtatgttatccgctataatggaactcgtccagctaaaacagcaacatggcctaagtacaattactatcgtgctgacgaaaagtatcaagatatcgctaaattactcggcttaccagcagcaacaccagaagaagctgtcgaatcatatgcaaaagctgtgtatgaccttggaacacgtttaggtattaagatgaatttccgcgaccaaggcattgatgaaaaagaatggaaagaaaaatctcgtgaactagctttcttagcatatgaagatcaatgttcaccagcaaatccacgccttccgatggtagatcacatgcaagaaatcatcgaagatgcttattatggttatgaggaacgtccaggacgtcgtaagtaa

SEQ ID NO: 39548 - protein, 880 aa, Streptococcus agalactiae 2603V/R
MTEKTKAVETTDVALAIDTLVQNGLKALDEMRQLNQEQVDYIVAKASVAALDAHGELALHAVEETGRGVFEDKATKNLFACEHVVNNMRHTKTVGVIEEDDVTGLTLIAEPVGVVCGITPTTNPTSTAIFKSLISLKTRNPIIFAFHPSAQESSAHAARIVRDAAIAAGAPENCVQWIEQPSIDATNALMNHDGIATILATGGNAMVKAAYSCGKPALGVGAGNVPAYVEKSANIRQAAHDIVMSKSFDNGMVCASEQAVIIDKEIYKEFVEEFKSYHTYFVNKKEKALLEEFCFGAKANSKNCAGAKLNPNIVGKSAVWIAEQAGFTVPEGTNILAAECTEVSEKEPLTREKLSPVIAVLKAESTEDGVEKARQMVEFNGLGHSAAIHTKDADLAREFGTRIRAIRVIWNSPSTFGGIGDVYNAFLPSLTLGCGSYGRNSVGDNVSAINLLNIKKVGRRRNNMQWFKVPSKTYFERDSIQYLQKCRDVERVMIVTDHAMVELGFLDRIIEQLDLRRNKVVYQIFAEVEPDPDITTVMKGTDLMRTFKPDTIIALGGGSPMDAAKVMWLFYEQPEVDFHDLVQKFMDIRKRAFKFPELGKKTKFVAIPTTSGTGSEVTPFAVISDKANNRKYPIADYSLTPTVAIVDPALVMTVPGFIAADTGMDVLTHATEAYVSQMANDYTDGLALQAIKIVFDYLERSVKDADFEAREKMHNASTMAGMAFANAFLGISHSMAHKIGAQFHTVHGRTNAILLPYVIRYNGTRPAKTATWPKYNYYRADEKYQDIAKLLGLPAATPEEAVESYAKAVYDLGTRLGIKMNFRDQGIDEKEWKEKSRELAFLAYEDQCSPANPRLPMVDHMQEIIEDAYYGYEERPGRRK

SEQ ID NO: 39549 - DNA, 1200 bp, Oceanobacillus iheyensis HTE831
  CDS (1)..(1200): transl_table=11
atgcaagagtacgcagtttttcgcacaccagaaacgataaattatgggcgaaattcatttaaaaaaatagggatagaagcagcagcatgtggtaataaggcggttattattagcgataaaataatggaaaatctggggtatgtaagtgaatgtagagatctacttcgcaaggaaggaattgaaagcgctatctatttaggtgtggaatccgagccaacagatcgatatgtggaggaagcattgcaattattaaagtctgaacaatgtgatgttgttatttccctgggtggaggaagttgtatcgatacagcaaaagcaattgcagtgattgcaacgaatggtggctatataggagattatatggggatgaagaaattagcagtactgccacctttaccacatatatccattccgacaacagctggtactggatcagaagctactgatgctacgattattaccaatacaagtaataacgtaaagatgatgattaaacaaccagcatttatgccaaatgttgctattgtggatccgatattatcgatatcttctccaaaaactgttacggctgcgactggaattgatgcattaagtcatgcaattgaggcatatatttctcagaaatctcaaccgatgacagaaatgttagcgctttcttcaatggagaaaattgtaaacagcttaaagagagcatatgagaatggagaggatattttagcaagagaagaaatgtctctaggttcattacaagcaggtatgtcttttacgaacgcatcagtttgtctcgtccatgggatgtccaggccgataggagccttgttccatgttccacatggtttttccaatgcgatgttacttcccgctgtgctggaatttagtaaagaacattgtgtggaacgacttgcggatttaggaagattttttcaacctgataatcagattgtatctgatagagaggcagcagatattgcagttgagtcggtaaaacagttgtgtctggaattaaatattccaaacttagaaggatggggaattaaaaaatcggagtttcagcaagccattagtaaaatggcagaagatgcaatagccagtggcagtccagggaataatccgagagtaccaaccaaacaagaaatagagaaactttatcaaacttgttataactatcaattttcatcacaaaagtcggtaagtaattaa

SEQ ID NO: 39550 - protein, 399 aa, Oceanobacillus iheyensis HTE831
MQEYAVFRTPETINYGRNSFKKIGIEAAACGNKAVIISDKIMENLGYVSECRDLLRKEGIESAIYLGVESEPTDRYVEEALQLLKSEQCDVVISLGGGSCIDTAKAIAVIATNGGYIGDYMGMKKLAVLPPLPHISIPTTAGTGSEATDATIITNTSNNVKMMIKQPAFMPNVAIVDPILSISSPKTVTAATGIDALSHAIEAYISQKSQPMTEMLALSSMEKIVNSLKRAYENGEDILAREEMSLGSLQAGMSFTNASVCLVHGMSRPIGALFHVPHGFSNAMLLPAVLEFSKEHCVERLADLGRFFQPDNQIVSDREAADIAVESVKQLCLELNIPNLEGWGIKKSEFQQAISKMAEDAIASGSPGNNPRVPTKQEIEKLYQTCYNYQFSSQKSVSN

SEQ ID NO: 39551 - DNA, 2730 bp, Bifidobacterium longum NCC2705
  CDS (1)..(2730): transl_table=11
gtggcagaagcaaagaagaaggtcgaagctaccaagccgactccagaagagaagcaggccgcagctgaggccgaagttgacgcgctggttgcccgcgccaagaaggctctcgtcgaattcgagaacctcgaccagaagcaagttgatcgtatcgtcgccaaggcctccatcgccgctctgaacaagcacctcgttctcgccaagatggctgtcgacgagaccggccgtggtctcgtggaagacaaggccaccaagaacatcttcgcctgcgagcacgtcaccaactacttggccggccagaagaccgtcggcatcatccgcgaagacgatgtgatgggcatcgatgaggtcgccgagcccgtcggcgtggtcgccggcgtcaccccggtcaccaacccgacctccaccgccatcttcaagtccctcatcgccctgaagacccgttgcccgatcgtcttcggcttccaccccggcgcgcagaagtgctccgtcgaggccgccaagattgtgcgcgacgccgccatcgaagccggtgctcccgagaactgtatccagtggatcgagcacccgtccatccaggccacaggcgccctgatgaagcatccgggcgtggccacgatcctcgccaccggtggtccgggcatggtcaaggccgcttactcctccggcaagcccgccctcggcgtgggtgccggcaacgccccggcctatgttgattccgatgtggacatcgtgcgcgccgccaacgatctggtgctctccaagcacttcgattacggcatgatctgcgccaccgagcaggccatcatcgcccacaaggacgtctacgaccagctcatcaaggagctcaaggtccgtaaggcctacttcgtcaacgccgaagagaaggccaagctggaacagtacatgttcggctgcactgccggttccggcgtcaagcccgtgctgaactccgcggtgccaggcaagtccccgcagttcatcgccaaggctgctggcttcgagattccgtccgacgccaccattctggccgccgagtgcaaggaagtctccgacgacgagcctctgacccacgagaagctcgctccggtgcaggccgtgctcaaggccgacaacaaggagcaggccttcgagatgtgcgagaagatgctcaagctgggtgccggccacaccgccgccatccacaccaacaaccaggagctcgtgcgtgagtacggcgtccgtatgcacgcctgccgcatcatctggaaccagccttcctcccttggcggcatcggcgacatctacaacgccatcgccccgtcgctgaccctgggctgcggctcctacggcggcaactcggtgtccggcaacgtgcaggccgtgaatctcgttaacatcaagcgcattgctcggaggaacaacaacatgcagtggttcaagatcccggccaagacctacttcgagccgaacgccatcaagtacctgcgcgacatgtacggcatcgagaaggccgtcatcgtgtgcgataaggtcatggagcagctcggcattgttgacaagatcatcgaccagctgcgcgcccgctctaaccgtgtgaccttccgcatcatcgactacgtcgagccggagccctccgtcgagaccgtcgaaaagggcgctgagatgatgcgcgaggagttcgagccggacacgatcatcgcggttggcggcggctccccgatggatgcctccaagattatgtggctgctctacgagcacccggaaatcgccttctccgacgtgcgcgagaagttcttcgatatccgtaagcgcgccttcaagatcccgccgctgggcaagaaggccaagctggtgtgcatcccgacctcctccggcaccggttccgaggtcaccccgttcgccgtgatcaccgatcacaagaccggctacaagtacccgatcaccgactacgcgctgaccccgtccgtggccatcgtggacccggtgctggctcgcacccagccgcgcaagctggcctccgacgccggcttcgacgccctgacccactcgatggaagcctacgtgtccgtgtacgcgaacgacttcaccgacggcatggccctgcacgcggccaagctcatctgggacaacctggctgagtccgtcaatggcgagcccggcctggtcaagaccaacgctcaggagaagatgcacaacgccgccaccatggccggcatggcattcggctccgcgttcctcggcatgtgccacggcatggcccacaccatcggtgccctgtgccacatcgcccacggccgtaccaactccatcctgctgccgtacgtgattcgttacaacggccagattcctgaggagcccacttcttggccgaagtacaacaagtacatcgccccggaacgctaccaggatatcgcccgcaacctcggcatcgacaccggcaagaccccggccgaagccgtggagaacctggcgaaggccgtcgaggactaccgtgacaacaagctcggcatgaacaagagcttccaggattgcggtgtggacgaggactacttctggtccgtgctcgatcagatcggcatgcgcgcctacgaggaccagtgcaccccggccaacccgcgcatcccgctgatcaacgacatgaaggacatcgccgtcggtgcttactacggtgtctcccaggcggaaggccacaagctgcgcatcgagcgcgagggtgaggccgccactgaggaagcctccgagcgttga

SEQ ID NO: 39552 - protein, 909 aa, Bifidobacterium longum NCC2705
MAEAKKKVEATKPTPEEKQAAAEAEVDALVARAKKALVEFENLDQKQVDRIVAKASIAALNKHLVLAKMAVDETGRGLVEDKATKNIFACEHVTNYLAGQKTVGIIREDDVMGIDEVAEPVGVVAGVTPVTNPTSTAIFKSLIALKTRCPIVFGFHPGAQKCSVEAAKIVRDAAIEAGAPENCIQWIEHPSIQATGALMKHPGVATILATGGPGMVKAAYSSGKPALGVGAGNAPAYVDSDVDIVRAANDLVLSKHFDYGMICATEQAIIAHKDVYDQLIKELKVRKAYFVNAEEKAKLEQYMFGCTAGSGVKPVLNSAVPGKSPQFIAKAAGFEIPSDATILAAECKEVSDDEPLTHEKLAPVQAVLKADNKEQAFEMCEKMLKLGAGHTAAIHTNNQELVREYGVRMHACRIIWNQPSSLGGIGDIYNAIAPSLTLGCGSYGGNSVSGNVQAVNLVNIKRIARRNNNMQWFKIPAKTYFEPNAIKYLRDMYGIEKAVIVCDKVMEQLGIVDKIIDQLRARSNRVTFRIIDYVEPEPSVETVEKGAEMMREEFEPDTIIAVGGGSPMDASKIMWLLYEHPEIAFSDVREKFFDIRKRAFKIPPLGKKAKLVCIPTSSGTGSEVTPFAVITDHKTGYKYPITDYALTPSVAIVDPVLARTQPRKLASDAGFDALTHSMEAYVSVYANDFTDGMALHAAKLIWDNLAESVNGEPGLVKTNAQEKMHNAATMAGMAFGSAFLGMCHGMAHTIGALCHIAHGRTNSILLPYVIRYNGQIPEEPTSWPKYNKYIAPERYQDIARNLGIDTGKTPAEAVENLAKAVEDYRDNKLGMNKSFQDCGVDEDYFWSVLDQIGMRAYEDQCTPANPRIPLINDMKDIAVGAYYGVSQAEGHKLRIEREGEAATEEASER

SEQ ID NO: 39553 - DNA, 1152 bp, Bifidobacterium longum NCC2705
  CDS (1)..(1152): transl_table=11
atggtgtaccgcatgattttcaaccagactgcatacttcggacgtggcgcgatcaaggagattccggccgtcgccaagcagcacggcttcaccaaggcatttatcgtcaccgacccggtgctgctggagaccggcaccgccgagaaggtcaccaaggttctggatgaggccggcctgccgtacgaggtgttctccaacgtcaagccgaacccgccggtcgagtgcatcaaggacggcgtcgccaagttcgccgagtccggtgcggacttcctgatcggcctgggcggtggctccccgcaagacacctgcaagggcatcggcatcatcaccgccaacccggagttcgccgacgtgctttctctggaaggcgtcgcggataccaagaacccgtccgtcccgatcttcggcgtgccgaccaccgccggcaccgcctcggagacgaccatcaactacgtggtcaccgacacggccaacaagcgcaagttcgtggctgtcgacccgcacgacatcccgatcgtcgctttcgtggacccggatctgaccgactcgatgccgcgcggcctgaaggtcgccaccggacttgacgccctgacccacgccatcgagggttacattaccccgggtgcctggagcctgtccgactgcctgtccatgcagaccatccgcatgattgccaagaacctggccaagtccgccgacggcgacattccggccggcgagcagatggcctacgcgtcctacatcaccggtatggcctactccaacgtgggcctcggtctggtgcacggcatggctcacccgctgggcggccgtctgggcgtggcccacggtgtggccaacggtattctgctggccccggtcatggaatacaacaaggacttcaccggtgagaagtaccgcgacatcgccgatgcgttcggtgttgaggacgcctacaccggcgacctggagaaggtgcgcgaagaggccgtgcaggccgtccacaagctgaccgtggatctgaagaacccgaccacgatttccgaagtgggcgccaccgaggccgaccttgagccgctggctcacgatgccttcaacgacgtgtgcacccccggcaacccgcgtcaggcaaccgaagaggacatcctcgcgatttacaagtcgctgatgtga

SEQ ID NO: 39554 - protein, 383 aa, Bifidobacterium longum NCC2705
MVYRMIFNQTAYFGRGAIKEIPAVAKQHGFTKAFIVTDPVLLETGTAEKVTKVLDEAGLPYEVFSNVKPNPPVECIKDGVAKFAESGADFLIGLGGGSPQDTCKGIGIITANPEFADVLSLEGVADTKNPSVPIFGVPTTAGTASETTINYVVTDTANKRKFVAVDPHDIPIVAFVDPDLTDSMPRGLKVATGLDALTHAIEGYITPGAWSLSDCLSMQTIRMIAKNLAKSADGDIPAGEQMAYASYITGMAYSNVGLGLVHGMAHPLGGRLGVAHGVANGILLAPVMEYNKDFTGEKYRDIADAFGVEDAYTGDLEKVREEAVQAVHKLTVDLKNPTTISEVGATEADLEPLAHDAFNDVCTPGNPRQATEEDILAIYKSLM

SEQ ID NO: 39555 - DNA, 1170 bp, Brucella suis 1330
  CDS (1)..(1170): transl_table=11
atgaccacattgaccgcgaaatggaactttccgaccactgtgcttttcgggccggggcacatcaaggagcttccagccgtcctgaaagccgcaggcatcgagcacccgcttttcgtcaccgatccgggcctcgccaaactgcctgtggtcgcctcgacattggccgttctggatgcggcgggcgtgcaatatggcgtgttttccgatgtgaaacccaatccggtcgagagcaatcttcatgccggcgtaaaggttttccgggaaggcaggcatgacggcgtcatcgcctttggcggcggttccgcgctcgatctcggcaagctcatcgcctttcaggccggacagacccggcccgtctgggattttgaagatatcggcgactggtggacccgcgccgacagcaacgccatagctcccgtcattgccgtgccgaccaccgcaggcaccggctcggaagtggggcgcgcgggcgttctcaccaatgaatccatccatacgaagaaggtcatcttccaccccaaaatgctgcccgtaacggtgatcgccgatcccgaactttccactggcatgccgcccttcatcacggtgggtacgggcatggatgcactggcgcactgccttgaagcctattgcgcaccgggcttccatcccatggccgatggcattgccgtggagggcatccgccttgtctttgagaacctgcccaaagcctatgccaatggcggggatatcgaagcgcgtgccaatatgatggcagccgctgccatgggcgccacggccttccagaagggcctcggtgcgatccattcgctctcgcaccccatcggcgcgctctatgacacacatcacggcatgaccaatgccgtcttcatgccctatgtgctgcaccacaaccgggctgccatcgaaaagcgcattgcccggctggccgattatctcggcatcgaaggcgggttcgacggctttgccgatgcgatcatgaagctgcgcgccgaacttggcgtgccgcgcaccctgcccgatctcatcaagaaccttcagatggacaatgcccgcaaggagctgatcgccgaaatggcagtggcagatcccaccgcaggcggaaacccggttgaacttacaaaaaacgacgcgctaaagttgctcaatgcagcattggaaggtagataa

SEQ ID NO: 39556 - protein, 389 aa, Brucella suis 1330
MTTLTAKWNFPTTVLFGPGHIKELPAVLKAAGIEHPLFVTDPGLAKLPVVASTLAVLDAAGVQYGVFSDVKPNPVESNLHAGVKVFREGRHDGVIAFGGGSALDLGKLIAFQAGQTRPVWDFEDIGDWWTRADSNAIAPVIAVPTTAGTGSEVGRAGVLTNESIHTKKVIFHPKMLPVTVIADPELSTGMPPFITVGTGMDALAHCLEAYCAPGFHPMADGIAVEGIRLVFENLPKAYANGGDIEARANMMAAAAMGATAFQKGLGAIHSLSHPIGALYDTHHGMTNAVFMPYVLHHNRAAIEKRIARLADYLGIEGGFDGFADAIMKLRAELGVPRTLPDLIKNLQMDNARKELIAEMAVADPTAGGNPVELTKNDALKLLNAALEGR

SEQ ID NO: 39557 - DNA, 2676 bp, Shigella flexneri 2a str. 301
  CDS (1)..(2676): transl_table=11
atggctgttactaatgtcgctgaacttaacgcactcgtagagcgtgtaaaaaaagcccagcgtgaatatgccagtttcactcaagagcaagtagacaaaatcttccgcgccgccgctctggctgctgcagatgctcgaatcccactcgcgaaaatggccgttgccgaatccggcatgggtatcgtcgaagataaagtgatcaaaaaccactttgcttctgaatatatctacaacgcctataaagatgaaaaaacctgtggtgttctgtctgaagacgacacttttggtaccatcactatcgctgaaccaatcggtattatttgcggtatcgttccgaccactaacccgacttcaactgctatcttcaaatcgctgatcagcctgaagacccgtaacgccattatcttctccccgcacccgcgtgcaaaagatgcaaccaacaaagcggctgatatcgttctgcaggctgctatcgctgccggtgctccgaaagatctgatcggctggatcgatcaaccttctgttgaactgtctaacgcactgatgcaccacccagacatcaacctgatcctcgcgactggtggtccgggcatggttaaagccgcatacagctccggtaaaccagctatcggtgtaggcgcgggtaacactccagttgttattgatgaaactgctgatatcaaacgtgcagttgcatctgtactgatgtccaaaaccttcgacaacggcgtaatctgtgcttctgaacagtctgttgttgttgttgactctgtttatgacgcagtacgtgaacgtttcgcaacccacggcggctatctgttgcagggtaaagagctgaaagctgttcaggatgttatcctgaaaaatggtgcgctgaacgcggctatcgttggtcagccagcctataaaattgctgaactggcaggcttctctgtaccagaaaacaccaagattctgatcggtgaagtgaccgttgttgatgaaagcgaaccgttcgcacatgaaaaactgtccccgactctggcaatgtaccgcgctaaagatttcgaagacgcggtagaaaaagcagagaaactggttgctatgggcggtatcggtcatacctcttgcctgtacactgaccaggataaccaaccggctcgcgtttcttacttcggtcagaaaatgaaaacagctcgtatcctgattaacaccccggcttctcagggtggtatcggtgacctgtataacttcaaactcgcaccttccctgactctgggttgtggttcctggggtggtaactccatctctgaaaacgttggtccgaaacacctgatcaacaagaaaaccgttgctaagcgagctgaaaacatgttgtggcacaaacttccgaaatctatctacttccgccgtggctccctgccaatcgcgctggatgaagtgattactgatggccacaaacgtgcgctcatcgtgactgaccgcttcctgttcaacaatggttatgctgatcagatcacttccgtactgaaagcagcaggcgttgaaactgaagtcttcttcgaagtagaagcggacccgaccctgagcatcgttcgtaaaggtgcagaactggcaaactccttcaaaccagacgtgattatcgcgctgggtggtggttccccgatggacgccgcgaagatcatgtgggttatgtacgaacatccggaaactcacttcgaagagctggcgctgcgctttatggatatccgtaaacgtatctacaagttcccgaaaatgggcgtgaaagcgaaaatgatcgctgtcaccaccacttctggtacaggttctgaagtcactccgtttgcggttgtaactgacgacgctactggtcagaaatacccgctggcggactatgcgctgaccccggatatggcgattgtcgacgccaacctggttatggacatgccgaagtccctgtgtgctttcggtggtctggacgcagtaactcacgccatggaagcttatgtttctgtactggcatctgagttctctgatggtcaggctctgcaggcactgaaactgctgaaagaatatctgccagcgtcctaccacgaagggtctaaaaatccggtagcgcgtgaacgtgttcacagtgcagcaactatcgcgggtatcgcatttgcgaacgccttcctgggtgtatgtcactcaatggcgcacaaactgggttcccagttccatattccgcacggtctggcaaacgccctgctgatttgtaacgttattcgctacaatgcgaacgacaacccgaccaagcagactgcattcagccagtatgaccgtccgcaggctcgccgtcgttatgctgaaattgccgaccacctgggtctgagcgcaccgggcgaccgtactgctgctaagatcgagaaactgctggcatggctggaaacgctgaaagctgaactgggtattccgaaatctatccgtgaagctggcgttcaggaagcagacttcctggcgaacgtggataaactgtctgaagatgcattcgatgaccagtgcaccggcgctaacccgcgttacccgctgatctccgagctgaaacagattctgctggatacctactacggtcgtgattatgtagaagatgaaactgcagcgaaaaaagaagccgctccggctaaagctgagaaaaaagcgaaaaaatccgcttaa

SEQ ID NO: 39558 - protein, 891 aa, Shigella flexneri 2a str. 301
MAVTNVAELNALVERVKKAQREYASFTQEQVDKIFRAAALAAADARIPLAKMAVAESGMGIVEDKVIKNHFASEYIYNAYKDEKTCGVLSEDDTFGTITIAEPIGIICGIVPTTNPTSTAIFKSLISLKTRNAIIFSPHPRAKDATNKAADIVLQAAIAAGAPKDLIGWIDQPSVELSNALMHHPDINLILATGGPGMVKAAYSSGKPAIGVGAGNTPVVIDETADIKRAVASVLMSKTFDNGVICASEQSVVVVDSVYDAVRERFATHGGYLLQGKELKAVQDVILKNGALNAAIVGQPAYKIAELAGFSVPENTKILIGEVTVVDESEPFAHEKLSPTLAMYRAKDFEDAVEKAEKLVAMGGIGHTSCLYTDQDNQPARVSYFGQKMKTARILINTPASQGGIGDLYNFKLAPSLTLGCGSWGGNSISENVGPKHLINKKTVAKRAENMLWHKLPKSIYFRRGSLPIALDEVITDGHKRALIVTDRFLFNNGYADQITSVLKAAGVETEVFFEVEADPTLSIVRKGAELANSFKPDVIIALGGGSPMDAAKIMWVMYEHPETHFEELALRFMDIRKRIYKFPKMGVKAKMIAVTTTSGTGSEVTPFAVVTDDATGQKYPLADYALTPDMAIVDANLVMDMPKSLCAFGGLDAVTHAMEAYVSVLASEFSDGQALQALKLLKEYLPASYHEGSKNPVARERVHSAATIAGIAFANAFLGVCHSMAHKLGSQFHIPHGLANALLICNVIRYNANDNPTKQTAFSQYDRPQARRRYAEIADHLGLSAPGDRTAAKIEKLLAWLETLKAELGIPKSIREAGVQEADFLANVDKLSEDAFDDQCTGANPRYPLISELKQILLDTYYGRDYVEDETAAKKEAAPAKAEKKAKKSA

SEQ ID NO: 39559 - DNA, 1152 bp, Shigella flexneri 2a str. 301
  CDS (1)..(1152): transl_table=11
atggcatcttcaactttctttattccttctgtgaatgtcatcggcgctgattcattgactgatgcaatgaatatgatggcagattatggatttacccgtaccttaattgtcactgacaatatgttaacgaaattaggtatggcgggtgatgtgcaaaaagcactggaagaacgcaatatttttagcgttatttatgatggcacccaacctaaccccaccacggaaaacgtcgccgcaggtttgaaattacttaaagaaaataattgcgatagcgtgatctccttaggcggtggttctccacacgactgcgcaaaaggtattgcgctggtggcagccaatggcggcgatattcgcgattacgaaggcgttgaccgctctgcaaaaccgcagctgccgatgatcgccatcaataccacggcgggtacggcctctgaaatgacccgtttctgcatcatcactgacgaagcgcgtcataacaaaatggcgattgttgataagcacgtgactccgctgctttctgtcaatgactcctctctgatgattggtatgccgaagtcactgaccgccgcaacgggtatggatgccttaacgcacgctatcgaagcgtatgtttctattgccgccacgccgatcactgacgcttgtgcactgaaagccgtgaccatgattgccgaaaacctgccgttagccgttgaagatggcagtaatgcgaaagcgcgtgaagcaatggcttatgcccagttccttgccggtatggcgttcaataatgcttctctgggttatgttcatgcgatggcgcaccagctgggcggtttctacaacctgccacacggtgtatgtaacgccgttctgctgccgcatgttcaggtattcaacagcaaagtcgccgctgcacgtctgcgtgactgtgccgctgcaatgggcgtgaacgtgacaggtaaaaacgacgcggaaggtgctgaagcctgcattaacgccatccgtgaactggcgaagaaagtggatatcccggcaggcctacgcgacctgaacgtgaaagaagaagatttcgcggttctggcgactaatgccctgaaagatgcctgtggctttactaacccgatccaggcaactcacgaagaaattgtggtgatttatcgcgccgcaatgtaa

SEQ ID NO: 39560 - protein, 383 aa, Shigella flexneri 2a str. 301
MASSTFFIPSVNVIGADSLTDAMNMMADYGFTRTLIVTDNMLTKLGMAGDVQKALEERNIFSVIYDGTQPNPTTENVAAGLKLLKENNCDSVISLGGGSPHDCAKGIALVAANGGDIRDYEGVDRSAKPQLPMIAINTTAGTASEMTRFCIITDEARHNKMAIVDKHVTPLLSVNDSSLMIGMPKSLTAATGMDALTHAIEAYVSIAATPITDACALKAVTMIAENLPLAVEDGSNAKAREAMAYAQFLAGMAFNNASLGYVHAMAHQLGGFYNLPHGVCNAVLLPHVQVFNSKVAAARLRDCAAAMGVNVTGKNDAEGAEACINAIRELAKKVDIPAGLRDLNVKEEDFAVLATNALKDACGFTNPIQATHEEIVVIYRAAM

SEQ ID NO: 39561 - DNA, 1149 bp, Shewanella oneidensis MR-1
  CDS (1)..(1149): transl_table=11
atggctgctaaattttttattccttccgtcaacgtactaggcaaaggcgctgtagatgatgctattggtgatatcaaaaccttaggctttaagcgcgcgcttatcgtaacggataaacctttagtcaatattggtctggtcggtgaagtggccgaaaaactcggccagaatggcattacatcaaccgtatttgatggcgtacaacctaacccaacggttggtaacgttgaagcaggtcttgcgctgttaaaagccaatcaatgtgatttcgtgatttcattaggtggtggctcgccccacgattgcgctaaaggtatcgccctggtggcaactaacggcggtagcattaaagactacgaaggcttagacaaatccactaagccacaactgccgttagtggcaatcaacacgaccgctggtactgccagtgagatgacacgtttctgtatcatcaccgacgaagctcgccatatcaaaatggcaattgtcgataaacacaccacgccaatactttcagtaaatgatccagagttgatgctgaaaaagcctgcaagtctcacagcagcaacgggcatggatgcgctcacccatgcggttgaagcctatgtgtctattgccgcgaatcccattactgatgcctgtgcaattaaggcgattgaactcattcaaggcaacttagtgaatgcggtaaaacaaggccaagatattgaagcccgtgagcaaatggcttatgcgcaattcttagcgggtatggcctttaacaacgccagcttaggttatgtgcacgccatggcgcaccaattaggcggtttctacgatctaccccatggtgtgtgtaacgccctattattaccccatgttcaagaatacaacgctaaagtggtgccacatcgcctaaaagatattgccaaagcgatgggtgtagatgtggcgaagatgaccgatgagcaaggtgcagctgcagctatcaccgccattaaaaccttatccgttgcggtgaatatccctgaaaatctgacattactcggcgtgaaagcagaagatattccaacgttggctgacaacgcattgaaggatgcctgtggtttcacaaaccctaaacaggcaacccatgcagagatctgtcagatctttactaacgcgttataa

SEQ ID NO: 39562 - protein, 382 aa, Shewanella oneidensis MR-1
MAAKFFIPSVNVLGKGAVDDAIGDIKTLGFKRALIVTDKPLVNIGLVGEVAEKLGQNGITSTVFDGVQPNPTVGNVEAGLALLKANQCDFVISLGGGSPHDCAKGIALVATNGGSIKDYEGLDKSTKPQLPLVAINTTAGTASEMTRFCIITDEARHIKMAIVDKHTTPILSVNDPELMLKKPASLTAATGMDALTHAVEAYVSIAANPITDACAIKAIELIQGNLVNAVKQGQDIEAREQMAYAQFLAGMAFNNASLGYVHAMAHQLGGFYDLPHGVCNALLLPHVQEYNAKVVPHRLKDIAKAMGVDVAKMTDEQGAAAAITAIKTLSVAVNIPENLTLLGVKAEDIPTLADNALKDACGFTNPKQATHAEICQIFTNAL

SEQ ID NO: 39563 - DNA, 2601 bp, Shewanella oneidensis MR-1
  CDS (1)..(2601): transl_table=11
atgacagtaacgaatgcccaaaaactggatctcatggtcgagcgcgtagccagagcgcaagccgaatatgccagttttagccaagcacaagttgatgcgattttccgtgccgccgctctcgccgcagcagatgcacggatttcactggcaaaaatggccgctgccgaaactagaatgggggtgattgaagacaaagtgattaaaaaccactttgcctccgagtatatttacaacaagtacaaggatgaaaagacctgtgggattttatccgaagatcctactttcggcacaatcactattgccgagcccgttggcattatctgcggtatcgtccccactactaatccaacgtccactgccatctttaaggcactcatcagccttaaaacccgcaatgcaattattttctcccctcacccaagggcaaaagtctcgaccaccactgcggccaaactggtgttagatgcggccattgccgcaggcgcacccaaagatattatcggttggattgatgagcctagtgttgcgctctcaaaccagctaatgacgcaccctaaagtgaatcttatcctcgccacaggcggcccaggtatggtgaaagcggcctattcttcaggtaaacccgccattggtgtcggcgcaggtaacaccccaattgtgattgatgaaaccgccgacattaaacgcgcagtgagctcgattctgatgtctaaaaccttcgataacggcgttgtgtgtgcctcggagcaagcggtaattgtggtcgacagcatctacgagcaagttaaagagcgctttgcgacccatggcggttatctcttaaatgcggcgcaaactgaagctatgcaacaggttatccttaaaaatggcggtttaaatgccgatatcgtcggccaaagtgctgcgaccatagcgcaaatggcgggaattgaagtcccccacaccactaaggtattgattggtgaagtcaccgatattagtgagacagaagcctttgcccacgaaaaactttcacctttactcggcatgtaccgcgccgctgattttaatgacgccgtcgataaggctgaaacactggtcgccttaggtggcataggccatacatctggcctgtataccgaccaagacacccaaaccgaacgggtcaaatcctttggttttagaatgaaaaccgcacgcattttgatcaataccccagcctctcagggtgggatcggcgatctgtacaactttaaactagccccctcgctcaccttaggttgcggctcttggggcggaaactcgatttctgaaaacgtcggtccaagtcatttgattaacaagaaaaccgtcgctaagagggctgaaaacatgctgtggcacaagcttccttcatctatctacttccgccgtggcagtttaccgattgcgctggaagaactgagtgataagaaacgcgcactgatagtgaccgacccatttctgttcaaccaaggttattgcgatgaaaccttaaaaatccttaaggcacagggtttagaaaccgaagtgttttacgaagttgaagctgaccccactctggccaccgtgcgccaaggcgctaaagtggccaatagctttaaacccgatgtgattattgccttaggtggtggctcacctatggatgcggccaagattatttgggtgatgtacgagcatcccgatgtcgactttgccgatttagccctgcgttttatggatatccgtaaacgtatctataaatttcctaaaatgggcgtaaaagctaccatggtcgcgattcctacgacatcgggtacaggttctgaggtcacccccttcgccgtagtgaccgatgaacaaaccggcaaaaaatatcccattgccgactatcaactcacccctaacatggccattgttgacccgaatctggtgatggatatgcctaaatccttaaccgctttcgggggcatcgatgcaatcacccacgcgctcgaagcctatgttagcgtgatggcgaacgagtacagcgatggtcaagccctgcaagcactcgatctgctgtgcaaatatctgccagatgcctatcagctcggcgctgcatcccccatcgcccgagagaaagtccacaatggcgcaaccatcgctggtatcgcctttgctaacgccttccttgggatctgccactctatggcccacaagctgggcgccgagttccacttagcccatggactggctaacgcgctgctgatcagtaacgtgatccgctttaatgcgaccgacttacccactaagcaagccgcattcagtcaatacgacagacctaaagccctgtgtcgttacgcggccattgccgatcatttagccttaggcggcaactcagatgcacaaaaagttgaaaaattgctggagaaaatcgagcagctcaagaagacgctgggcattcctgcgtcaatccaagaagccggtgttaatgaagccgacttcctcgccaagttagatatgcttgccgaggatgccttcgatgaccaatgtaccggtgcaaatcctcgctatccgttaattagcgagctaaaacagctactactagacagctactacggccgcccttttaccgaacaataa

SEQ ID NO: 39564 - protein, 866 aa, Shewanella oneidensis MR-1
MTVTNAQKLDLMVERVARAQAEYASFSQAQVDAIFRAAALAAADARISLAKMAAAETRMGVIEDKVIKNHFASEYIYNKYKDEKTCGILSEDPTFGTITIAEPVGIICGIVPTTNPTSTAIFKALISLKTRNAIIFSPHPRAKVSTTTAAKLVLDAAIAAGAPKDIIGWIDEPSVALSNQLMTHPKVNLILATGGPGMVKAAYSSGKPAIGVGAGNTPIVIDETADIKRAVSSILMSKTFDNGVVCASEQAVIVVDSIYEQVKERFATHGGYLLNAAQTEAMQQVILKNGGLNADIVGQSAATIAQMAGIEVPHTTKVLIGEVTDISETEAFAHEKLSPLLGMYRAADFNDAVDKAETLVALGGIGHTSGLYTDQDTQTERVKSFGFRMKTARILINTPASQGGIGDLYNFKLAPSLTLGCGSWGGNSISENVGPSHLINKKTVAKRAENMLWHKLPSSIYFRRGSLPIALEELSDKKRALIVTDPFLFNQGYCDETLKILKAQGLETEVFYEVEADPTLATVRQGAKVANSFKPDVIIALGGGSPMDAAKIIWVMYEHPDVDFADLALRFMDIRKRIYKFPKMGVKATMVAIPTTSGTGSEVTPFAVVTDEQTGKKYPIADYQLTPNMAIVDPNLVMDMPKSLTAFGGIDAITHALEAYVSVMANEYSDGQALQALDLLCKYLPDAYQLGAASPIAREKVHNGATIAGIAFANAFLGICHSMAHKLGAEFHLAHGLANALLISNVIRFNATDLPTKQAAFSQYDRPKALCRYAAIADHLALGGNSDAQKVEKLLEKIEQLKKTLGIPASIQEAGVNEADFLAKLDMLAEDAFDDQCTGANPRYPLISELKQLLLDSYYGRPFTEQ

SEQ ID NO: 39565 - DNA, 1152 bp, Shewanella oneidensis MR-1
  CDS (1)..(1152): transl_table=11
atgagtactacattttatatgcctccaatgtctctgatgggacaacatgctatcaaattgttaggcacagaactgcaggcaagaaacttcaacaaggcactgattgttacagataaggcattagtagatatcaagttggtggataagctgacagatgagttatctgcccacgatatcgcattcgcaatttttgatggcgttaagccgaacccaacagaaaaaaatattgttcagggtttagctctgctcgaagcgcaaaaatgtgatttcgttatttcattcggcggaggttcttcacatgactgtgctaaaggcatcgcattggtcgcagccaacggcggtcacattcgtgattactctaaaggggttcatctgtcggctaagccacaacttcctctggtgacggtgaatactacagctggcactgcagcggagatgacgatatttgccatcgtgaccaatgaggaagatgaaactaaatacccgattgtagataaaaacctgaccccaataattgcagtaaacgactcagagctgatggttgcaatgcctaagttcctcacggcagcgactggtatggatgcattgactcatgcggtagaagcttatgtgtcgacggcagcaacgccaataaccgatgcgtcagcaattaaagctattgaacttattgcccaaaacctgaaagcggcagtcgacaatggtgaagatcgtgaagctcgtgaggctatgcaatacggtgagtaccttgccggtatggcattctctaatgcttcattaggttatgtacactcgatggctcaccaactcggtggtgtctatgacctggtgcacggtctctgtaacgccatcttgttaccggtagtgtcacgttttaactcggctgaaaaagtggagcgttttgccgaggtggcgaaagcaatgggtgtagatactgtaggcatgacgttaatcgatgctgctgaatctggcatccttgctatcgagaagctatccgcttcggttggtacagatcagaaactgtctgaccttggtgttaaggaggacaagcttgagtttatggcaatcaacgccctgaatgatgcctgctccttaacaaatccaagaaaggcaaccactgaagatattattaatattttcaagaaagctatgtaa

SEQ ID NO: 39566 - protein, 383 aa, Shewanella oneidensis MR-1
MSTTFYMPPMSLMGQHAIKLLGTELQARNFNKALIVTDKALVDIKLVDKLTDELSAHDIAFAIFDGVKPNPTEKNIVQGLALLEAQKCDFVISFGGGSSHDCAKGIALVAANGGHIRDYSKGVHLSAKPQLPLVTVNTTAGTAAEMTIFAIVTNEEDETKYPIVDKNLTPIIAVNDSELMVAMPKFLTAATGMDALTHAVEAYVSTAATPITDASAIKAIELIAQNLKAAVDNGEDREAREAMQYGEYLAGMAFSNASLGYVHSMAHQLGGVYDLVHGLCNAILLPVVSRFNSAEKVERFAEVAKAMGVDTVGMTLIDAAESGILAIEKLSASVGTDQKLSDLGVKEDKLEFMAINALNDACSLTNPRKATTEDIINIFKKAM

SEQ ID NO: 39567 - DNA, 1164 bp, Pseudomonas putida KT2440
  CDS (1)..(1164): transl_table=11
atgcagcctttcagctttgccaccactgcgcagatcctctgcgaacccggcgcggtgcagcgccttgcaggtctgtgccgtgagcgcggtgccaagcgtgttttgattatcagtgacccgggtatcgcccgccttggcatgctcgatgacctgctgccggggttcacggcagccaaggtcggtgtggcgatcttcagtgaggttacggccgaccccagcgaggcatgcgtgctggcggccgcccagcgcgcccggcatatcggcgccgacctggtggtggggttcggcggcggcagctcgatggatgtggccaagctggttgcgctgctggcccaccgcgattgttcgcagcccatcgccgagctgtacggcatcgacagggccaagggccgccggctgccgttgatccaggtgcccaccacggcaggtaccggttcggaggtgacgccgatcgccatcgtcaccaccggcgccaccaccaagatgggcattgtttcgccgctgctgttgccagacctggcagtgctcgacgccgtctgcaccctcggcctgccatcggcggtgactgctgctaccggtatcgatgccatggtgcatgccatcgaagcctataccagccgcctcaaacgtaacccgctgtccagcctgctggcccgtgaggcgctgcggctgctggcggataaccttgaccaggctgtgcacaacggcggcaacctgcaggcccgccaggccatgctgttgggggcttgcctggccggccaggcctttgccaatgcaccggtggcggcggtgcatgccctggcctatccgctgggtgggcactttcatgttccccatggcctggccaacgcgctggtgttgccgcatgtgctgcgcttcaacctgccggtggcggcagtggactacgccgaattggccgtgccgctgttgggggcccgtttgcagcccggtgatcagcgccagcaggcagaacaattcgtggccgagctggccgcgctgagcagccgctgcgggttacctgaccgcctgcgcgacgccgatgtaccgcgtcatcggcttggccagctggccgaagacgcgatgcaacagcagcgccttttggtcaataacccgcgtgaagtcacccaggccgatgcgttggccatctatgaggcagcctactga

SEQ ID NO: 39568 - protein, 387 aa, Pseudomonas putida KT2440
MQPFSFATTAQILCEPGAVQRLAGLCRERGAKRVLIISDPGIARLGMLDDLLPGFTAAKVGVAIFSEVTADPSEACVLAAAQRARHIGADLVVGFGGGSSMDVAKLVALLAHRDCSQPIAELYGIDRAKGRRLPLIQVPTTAGTGSEVTPIAIVTTGATTKMGIVSPLLLPDLAVLDAVCTLGLPSAVTAATGIDAMVHAIEAYTSRLKRNPLSSLLAREALRLLADNLDQAVHNGGNLQARQAMLLGACLAGQAFANAPVAAVHALAYPLGGHFHVPHGLANALVLPHVLRFNLPVAAVDYAELAVPLLGARLQPGDQRQQAEQFVAELAALSSRCGLPDRLRDADVPRHRLGQLAEDAMQQQRLLVNNPREVTQADALAIYEAAY

SEQ ID NO: 39569 - DNA, 1143 bp, Pseudomonas putida KT2440
  CDS (1)..(1143): transl_table=11
atgtccctgatcaactacatcacccagatccaattcgatatcggtgccatcgcctgcctgcctgccgaatgtgagcgcattggtataaccaggcctttgatcgtgaccgaccgtggcgtgcgtgccgccggtatcgtcgatacggcgttgaacaccttcggcagcgacaccacacaactgccgatctacgacggtacgccacccaaccccaacgagcatgccgtgcgtgaggccgtggccatgttcaaggcaaatggctgtgatggcatcatcgccattggtggtggctcggcgatcgacctggccaagggggtggccgtgtgtgcccggcacgacggcccgttgaagagctttgcggtgatcgagggcggcctggcccggatcaccccggcaaccgcgccggtgattgcggtgccgaccacggccggcacggggagcgaggtcgggcgcggtgccatcctgatactcgatgacgggcgcaaggtgggggtgatctcgccccatgtggtgcccaaggccgccatctgtgacccgtcattgaccctcgggctgccggcacaactcacggctgccaccggcatggacgcgattgcccactgcctggaaaccttcatggcacctgcgttcaacccgcctgccgacggcattgccctggacggcctgtggagggcctggcgcttcatcgaacgagccacccgcgcgccgggcaacctggacgggcgcatcaacatgatgagcgcatcgctgcaaggtgcgctggccttccagaaaggcctgggctgcgtgcacagccttagccacgcgctgggcgggatcaacccgcgcctgcaccacggcaccctcaatgcgatcttcctgcctgccgtcatccgcttcaaccgcacggccgaaacggtggtgaatgaacacaagatgcaacgcatcgcccaggcgatggggctggccgatgacagccagatcgaagatgccattcgccacatgacccgtacgctgggcctgccgaccggccttggcgaactggatgtcaacccggacctgttcccgcgcatcgtccagggtgcgttggccgatcacagccaccgcaccaacccgcgtgaggcatctgccgaggactaccagtggctgcttgaagcgtcgatgtaa

SEQ ID NO: 39570 - protein, 380 aa, Pseudomonas putida KT2440
MSLINYITQIQFDIGAIACLPAECERIGITRPLIVTDRGVRAAGIVDTALNTFGSDTTQLPIYDGTPPNPNEHAVREAVAMFKANGCDGIIAIGGGSAIDLAKGVAVCARHDGPLKSFAVIEGGLARITPATAPVIAVPTTAGTGSEVGRGAILILDDGRKVGVISPHVVPKAAICDPSLTLGLPAQLTAATGMDAIAHCLETFMAPAFNPPADGIALDGLWRAWRFIERATRAPGNLDGRINMMSASLQGALAFQKGLGCVHSLSHALGGINPRLHHGTLNAIFLPAVIRFNRTAETVVNEHKMQRIAQAMGLADDSQIEDAIRHMTRTLGLPTGLGELDVNPDLFPRIVQGALADHSHRTNPREASAEDYQWLLEASM

SEQ ID NO: 39571 - DNA, 1164 bp, Pseudomonas putida KT2440
  CDS (1)..(1164): transl_table=11
atgagccagagtttcagcccccttcgcaagttcgtatcgcctgaaatcatctttggtgccggctgccggcacaatgtggccaattacgccaaaaccttcggtgcgcgcaaggtactggtggtcagcgaccctggcgtgatcgccgccggctgggtggcggatgtggaggccagcctgcaggcccagggtatcgactactgcctgtacacagcggtgtcacccaacccgcgggtcgaggaggtgatgctcggcgccgagatctatcggcagaaccactgtgacgtgatcgtcgccgtcggtggcggcagcccgatggattgcggcaaggccatcggtatcgtggtggcccatgggcgcagcatcctcgaattcgaaggcgtggacatgatccgcgtgcccagcccgccgctgatcctgatcccgaccaccgccggcacctcggcggacgtgtcgcagttcgtgatcatttccaaccagcaggaacgcatgaagttctccatcgtcagcaaggcggtggtgccggacgtgtcgctgatcgacccgcagaccaccctgagcatggacccgttcctgtcggcctgcaccggcatcgatgcgttggtgcatgccatcgaggccttcgtgtctaccggccacgggccgctgaccgacccccatgcgctggaagccatgcgcctgatcaatggcaacctggtggagatgatcgccaaccctactgatattgcgctgcgcgagaagatcatgctcggcagcatgcaggcggggctggcgttctccaatgcgatcctgggcgcagtgcacgccatgtcgcacagcctgggcggcttcctcgacttgccccatggcttgtgcaacgcggtgctggtggagcacgtggtggcgttcaactacagctcggcgccggagcgtttcaaggtgatcgccgaggtgtttggtatcgactgccgcggtctcaatcaccggcagatctgcgggcggctggtggagcacctgattgccctgaagcgtgccatcggcttccatgaaaccctgggcctgcacggggtgcgcacgtctgatatcccgttcctgtcgcaacacgcgatggacgacccgtgcatcctcaccaacccccgtgcgtccagccagcgtgatgtcgaggtggtctatggcgaggccctctga

SEQ ID NO: 39572 - protein, 387 aa, Pseudomonas putida KT2440
MSQSFSPLRKFVSPEIIFGAGCRHNVANYAKTFGARKVLVVSDPGVIAAGWVADVEASLQAQGIDYCLYTAVSPNPRVEEVMLGAEIYRQNHCDVIVAVGGGSPMDCGKAIGIVVAHGRSILEFEGVDMIRVPSPPLILIPTTAGTSADVSQFVIISNQQERMKFSIVSKAVVPDVSLIDPQTTLSMDPFLSACTGIDALVHAIEAFVSTGHGPLTDPHALEAMRLINGNLVEMIANPTDIALREKIMLGSMQAGLAFSNAILGAVHAMSHSLGGFLDLPHGLCNAVLVEHVVAFNYSSAPERFKVIAEVFGIDCRGLNHRQICGRLVEHLIALKRAIGFHETLGLHGVRTSDIPFLSQHAMDDPCILTNPRASSQRDVEVVYGEAL

SEQ ID NO: 39573 - DNA, 1185 bp, Pseudomonas putida KT2440
  CDS (1)..(1185): transl_table=11
atgacaacaattgagcaagaggtacgtatggaattcaagtttctactccccagcaaaatcgtgatggaaccgggcctgcgcgagcgcaccggtgaacacctgcggcaactcggcctggcccgcgtgttgatcgtgaccgatgccggggtcaaggcagcaggcctgctggacagcgtctacgccagcctcgacaaggccggtatcgcctacgaggaagtggcggacatcaaggccaacccgcgcagtgacgacatcaaccacaccgcccagcgctatcggggcacgggtatcgacggcctgctggccgtgggtggcggcagcgcgatggatgcggccaaggccatcagcctgctgctcacccacgacggccgtatcgaggactacgaagggtcgttcacgcttacccatgccatcccgcccatcgtcgccatcccgaccacggccggcaccggcagcgaagtgacctgcttctcggtgatcaccgacaccgcccgccacttcaaaatgaacgtgctggactatcgcatcggcccggtgctggcattgctcgactcccatatcaccgacacgctgccgccgtcgattgcagccgcaaccggcatggatgccctgacccatgccatcgaagcctacacctgccgcgtggcaaacccgatcagcgacggcctggcgctgcatgccatccgcctgatcagccagcacctcaaggcggccgtgcaggagcccgacaaccaggcggcccgggagcagatgctggtggccagcctgattgccggcatggccttcggcaacgccgacgtcggcagcgtgcactgcatttccgaagccatcggcggcatgtacgacacgccccacggtgtgggcaacgcgatcttcctgcccttcgtgttcggtcacaaccgtgatgccgatatcgtccgccatgcccaggtcgcctacgcgttggggatcgaccccacgctgtctccggtcgatgccgccgaggccgccgtcggccatctgttccagatgagcaaggacctgggcatcccccgcttcgccgaggtcaagggtgtgcgcgaggaagacttcccgaccattgccgagaagtccaagcagaacttctcggacgccagcaatgccaaggcgatgtccgtagaggcctaccacgacatcatcaccaccgcttaccacttcgtcgcgtaa

SEQ ID NO: 39574 - protein, 394 aa, Pseudomonas putida KT2440
MTTIEQEVRMEFKFLLPSKIVMEPGLRERTGEHLRQLGLARVLIVTDAGVKAAGLLDSVYASLDKAGIAYEEVADIKANPRSDDINHTAQRYRGTGIDGLLAVGGGSAMDAAKAISLLLTHDGRIEDYEGSFTLTHAIPPIVAIPTTAGTGSEVTCFSVITDTARHFKMNVLDYRIGPVLALLDSHITDTLPPSIAAATGMDALTHAIEAYTCRVANPISDGLALHAIRLISQHLKAAVQEPDNQAAREQMLVASLIAGMAFGNADVGSVHCISEAIGGMYDTPHGVGNAIFLPFVFGHNRDADIVRHAQVAYALGIDPTLSPVDAAEAAVGHLFQMSKDLGIPRFAEVKGVREEDFPTIAEKSKQNFSDASNAKAMSVEAYHDIITTAYHFVA

SEQ ID NO: 39575 - DNA, 2676 bp, Escherichia coli CFT073
  CDS (1)..(2676): transl_table=11
atggctgttactaatgtcgctgaacttaacgcactcgtagagcgtgtaaaaaaagcccagcgtgaatatgccagtttcactcaagagcaagtagacaaaatcttccgcgccgccgctctggctgctgcagatgctcgaatcccactcgcgaaaatggccgttgccgaatccggcatgggtatcgtcgaagataaagtgatcaaaaaccactttgcttctgaatatatctacaacgcttataaagatgaaaaaacctgtggtgttctgtctgaagacgacacttttggtaccatcactatcgctgaacccatcggtattatttgcggtatcgttccgaccactaacccgacttcaactgctatcttcaaatcgctgatcagcctgaagacccgtaacgccattatcttctccccgcacccgcgtgcaaaagatgcaaccaacaaagcggctgatatcgttctacaggctgctatcgctgccggtgctccgaaagatctgatcggctggatcgatcaaccttctgttgagctgtctaacgcactgatgcaccacccagacatcaacctgatcctcgcgactggtggtccgggcatggttaaagccgcatacagctccggtaaaccagctatcggcgtaggcgcgggcaacactccggttgttatcgatgaaactgctgatatcaaacgtgcagttgcatctgtactgatgtccaaaaccttcgacaacggtgtaatctgtgcttctgaacagtctgttgttgttgttgactctgtttatgacgcagtacgtgaacgtttcgcaacccacggcggctatctgttgcagggtaaagagctgaaagctgttcaggacgttatcctgaaaaacggtgcgctgaacgcggctatcgttggtcagccagcctataaaattgctgaactggcaggcttctctgtaccagaaaacaccaagattctgatcggtgaagtgatcgttgttgatgaaagcgaaccgttcgcacatgaaaaactgtccccgactctggcaatgtaccgtgctaaagatttcgaagacgcggtagaaaaagcagagaaactggttgctatgggcggtatcggtcatacctcttgcctgtacactgaccaggataaccaaccggctcgcgtttcttacttcggtcagaaaatgaaaacggctcgtatcctgattaacaccccggcttctcagggtggtatcggtgacctgtataacttcaaactcgcaccttccctgactctgggttgtggttcctggggtggtaactccatctctgaaaacgttggtccgaaacacctgatcaacaagaaaaccgttgctaagcgagctgaaaacatgttgtggcacaaacttccgaaatctatctacttccgccgtggctccctgccaatcgcgctggatgaagtgattactgatggccacaaacgtgcgctcatcgtgactgaccgcttcctgttcaacaatggttatgctgatcagatcacttccgtattgaaagcagcaggcgttgaaactgaagtcttcttcgaagtagaagctgacccgaccctgagcatcgttcgtaaaggtgcagaactggcaaactccttcaaaccagacgtgattatcgcgctgggtggaggttccccgatggacgctgcgaagatcatgtgggttatgtacgaacatccggaaactcacttcgaagaactggcgctgcgctttatggatatccgtaaacgtatctacaagttcccgaaaatgggtgtgaaagcgaaaatgatcgctgtcaccaccacttctggtacaggttctgaagtcactccgtttgcggttgtaactgacgacactactggtcagaaatatccgctggcagactatgcactgaccccggatatggcgattgtcgacgccaacctggttatggacatgccgaagtccctgtgtgctttcggtggtctggacgcagtaactcacgccatggaagcttatgtttctgtactggcatctgagttctctgatggtcaggctctgcaggcactgaaactgctgaaagaatatctgccagcgtcctaccacgaagggtctaaaaatccggtagcgcgtgaacgtgttcacagtgcagcgactatcgcgggtatcgcgtttgcgaacgccttcctgggtgtatgtcactcaatggcgcacaaactgggttcccagttccatattccgcacggtctggcaaacgccctgctgatttgtaacgttattcgctacaacgcgaatgacaacccgaccaagcagactgcattcagccagtatgaccgtccgcaggctcgccgtcgttatgctgaaattgctgaccacctgggtctgagcgcaccgggcgaccgtactgcagctaagatcgagaaactgctggcatggctggaaacgctgaaagctgaactgggtattccgaaatctatccgtgaagctggcgttcaggaagcagacttcctggcgaacgtggataaactgtctgaagatgcattcgatgaccagtgcaccggcgctaacccgcgttacccgctgatctccgagctgaaacagattctgctggatacctactacggtcgtgattatgtagaaggcgaaactgcagcgaagaaagaagctgctccggctaaagctgagaaaaaagcgaaaaaatccgcttaa

SEQ ID NO: 39576 - protein, 891 aa, Escherichia coli CFT073
MAVTNVAELNALVERVKKAQREYASFTQEQVDKIFRAAALAAADARIPLAKMAVAESGMGIVEDKVIKNHFASEYIYNAYKDEKTCGVLSEDDTFGTITIAEPIGIICGIVPTTNPTSTAIFKSLISLKTRNAIIFSPHPRAKDATNKAADIVLQAAIAAGAPKDLIGWIDQPSVELSNALMHHPDINLILATGGPGMVKAAYSSGKPAIGVGAGNTPVVIDETADIKRAVASVLMSKTFDNGVICASEQSVVVVDSVYDAVRERFATHGGYLLQGKELKAVQDVILKNGALNAAIVGQPAYKIAELAGFSVPENTKILIGEVIVVDESEPFAHEKLSPTLAMYRAKDFEDAVEKAEKLVAMGGIGHTSCLYTDQDNQPARVSYFGQKMKTARILINTPASQGGIGDLYNFKLAPSLTLGCGSWGGNSISENVGPKHLINKKTVAKRAENMLWHKLPKSIYFRRGSLPIALDEVITDGHKRALIVTDRFLFNNGYADQITSVLKAAGVETEVFFEVEADPTLSIVRKGAELANSFKPDVIIALGGGSPMDAAKIMWVMYEHPETHFEELALRFMDIRKRIYKFPKMGVKAKMIAVTTTSGTGSEVTPFAVVTDDTTGQKYPLADYALTPDMAIVDANLVMDMPKSLCAFGGLDAVTHAMEAYVSVLASEFSDGQALQALKLLKEYLPASYHEGSKNPVARERVHSAATIAGIAFANAFLGVCHSMAHKLGSQFHIPHGLANALLICNVIRYNANDNPTKQTAFSQYDRPQARRRYAEIADHLGLSAPGDRTAAKIEKLLAWLETLKAELGIPKSIREAGVQEADFLANVDKLSEDAFDDQCTGANPRYPLISELKQILLDTYYGRDYVEGETAAKKEAAPAKAEKKAKKSA

SEQ ID NO: 39577 - DNA, 1215 bp, Escherichia coli CFT073
  CDS (1)..(1215): transl_table=11
gtgggcgagagaaagcggaggggatctatgcaaagtgaattgcaaacggcgctttttcaggcgttcgataccctgaatctgcaacgggtaaaaacatttagcgttccaccggtgacgctttgcggtccgggcgcggtgagcagttgtgggcagcaagcgcaaacgcgtgggttgaaacatctgttcgtgatggcagacagctttttgcatcaggcagggatgaccgccgggctgacacgtagcctggccgttaaaggtatcgccatgacgctctggccatgtccggtgggcgaaccgtgcatcaccgacgtgtgtgcagccgtggcgcagttgcgtgaatcaggttgtgacggggtgatcgcgtttggcggcggctcggtgctggatgcggcgaaagccgttgcgttgctggtgacgaaccccgatagcacgctggcagaaatgtcagaaaccagcgtcctgcaaccgcgcctgccgttgattgccattccaacgaccgccggaaccggctctgaaacgactaacgtgacggtgattatcgatgcggtaagcgggcgcaaacaggtgttagcccatgcctcgctgatgccggatgtcgcgattctcgacgctgcgctgaccgaaggcgtgccgtcgcatgtcacggcgatgactggcattgatgcgttaacccatgccattgaagcgtacagcgcgctgaacgctacaccgtttaccgacagcctggcgattggtgccattgcgatgattggcaaatcactgccgaaagcggtgggctacggccatgaccttgccgcgcgcgagagcatgttgctggcttcatgtatggcgggaatggcgttttccagcgccgggcttgggttatgccacgcgatggcgcatcagccaggggcggcgctgcatattccgcacggtctggcgaacgccatgttgttgccaacggtgatggaatttaaccggatggtttgtcgtgatcggtttagtcagattggtcgggcgctgcgaactaaaaaatccgacgatcgtgacgctattaacgcggtaagtgagctgattgctgaagttgggattggtaaacgactgggcgatgttggtgcgacatctgcgcattacggcgcatgggcgcaggccgcgctggaagatatttgtctgcgcagtaacccgcgtaccgccagcctggagcagattgtcggcctgtacgcagcggcgcaataa

SEQ ID NO: 39578 - protein, 404 aa, Escherichia coli CFT073
MGERKRRGSMQSELQTALFQAFDTLNLQRVKTFSVPPVTLCGPGAVSSCGQQAQTRGLKHLFVMADSFLHQAGMTAGLTRSLAVKGIAMTLWPCPVGEPCITDVCAAVAQLRESGCDGVIAFGGGSVLDAAKAVALLVTNPDSTLAEMSETSVLQPRLPLIAIPTTAGTGSETTNVTVIIDAVSGRKQVLAHASLMPDVAILDAALTEGVPSHVTAMTGIDALTHAIEAYSALNATPFTDSLAIGAIAMIGKSLPKAVGYGHDLAARESMLLASCMAGMAFSSAGLGLCHAMAHQPGAALHIPHGLANAMLLPTVMEFNRMVCRDRFSQIGRALRTKKSDDRDAINAVSELIAEVGIGKRLGDVGATSAHYGAWAQAALEDICLRSNPRTASLEQIVGLYAAAQ

SEQ ID NO: 39579 - DNA, 1152 bp, Escherichia coli CFT073
  CDS (1)..(1152): transl_table=11
atggcagcttcaaccttttttattccttccgtgaatgttattggtgctgattcattgaatgatgcaatgaatatgatggcagattatggatttacccgtaccttaattgtcaccgacaacatattaacgaaattgggtatggcgggtgatgtgcaaaaagcactggaagaacgcaatatttttagcgttatttatgatggcacccaacctaaccccaccacggaaaacgtcgccgcaggtttgaaattacttaaagaaaataattgcgatagcgtgatttccttaggcggtggttctccacacgactgcgcaaaaggtattgcgctggttgcagccaacggcggtgacatccgcgattatgaaggcgttgaccgctctgcaaaaccgcagctgccgatgatcgccatcaacaccacggcgggtacggcctctgaaatgacccgtttctgcatcatcactgacgaagcgcgtcacatcaaaatggcgattgtggataaacatgtaactccgctgctttctgtcaatgactcctctctgatgatcggtatgccgaagtcactgaccgctgcaacgggtatggatgccttaacgcacgctatcgaagcgtatgtttctattgccgccacgccgatcactgacgcttgtgcactgaaagccgtgaccatgattgccgaaaacctgccgttagccgttgaagatggcagcaatgctaaagcgcgtgaagcaatggcttatgcccagttcctcgccggtatggcgttcaataatgcttctctgggttatgttcatgcgatggcgcaccagctgggcggtttctacaacctgccacatggtgtatgtaatgccgttctgctgccacacgttcaggtgttcaacagcaaagtcgctgctgcgcgtctgcgtgactgtgctgctgccatgggcgttaacgtgacaggcaaaaatgacgcggaaggcgcagaagcgtgcatcaatgccatccgtgaactggcgaagaaagtgaatatcccggcaggcctgcgtgacctgaacgtgaaagaagaagatattccagtgctggcaaccaatgccctgaaagatgcgtgtgggtttactaacccgattcaggcaactcacgaagaaattatggcgatttatcgcgcagcgatgtaa

SEQ ID NO: 39580 - protein, 383 aa, Escherichia coli CFT073
MAASTFFIPSVNVIGADSLNDAMNMMADYGFTRTLIVTDNILTKLGMAGDVQKALEERNIFSVIYDGTQPNPTTENVAAGLKLLKENNCDSVISLGGGSPHDCAKGIALVAANGGDIRDYEGVDRSAKPQLPMIAINTTAGTASEMTRFCIITDEARHIKMAIVDKHVTPLLSVNDSSLMIGMPKSLTAATGMDALTHAIEAYVSIAATPITDACALKAVTMIAENLPLAVEDGSNAKAREAMAYAQFLAGMAFNNASLGYVHAMAHQLGGFYNLPHGVCNAVLLPHVQVFNSKVAAARLRDCAAAMGVNVTGKNDAEGAEACINAIRELAKKVNIPAGLRDLNVKEEDIPVLATNALKDACGFTNPIQATHEEIMAIYRAAM

SEQ ID NO: 39581 - DNA, 1119 bp, Escherichia coli CFT073
  CDS (1)..(1119): transl_table=11
atggcccgctattatttttcgtgccccaaaatttattttggtgaagaggcaataacctctctatgccaatttaataataaacgagtcggtattgtcaccgatgattttatgatgtcatcaggtaaaactcgttatttaataagccatatgcctgaggcatcggtatgcattttcggcgaggttactccggatccagatattgatattctgacttccggcgcggcgcgttttaaagcctttaagcccgacgttattatcgccctcggcggcggctcgtcgctggacgctgcgaaaggaattaaagtcacattggaagagtattttggagatcatcaaatcgatctcattgctattcccacaaccagcggatccggctctgaagtgacgtcctacgcgatcatctctgatccgcaaaatggccgcaaatatccgttgatctccgggcaactggtgccggaaatcgccattctcgatcctaacctagtgttaaccgcgccgcgtcatgtcgcggtagataccggcatggacgtgctgacccatgccattgaagcctttgtctctactggctcaaatgactttagcgatgcgctggcggaaaaagccatcgcgttgacctggcgctatctgccgcaggtgtttaacgacgaaaaagacattgcggcgcgcacccacatgcacaatgcctcctgtatggcaggcatggcatttaactccgccgggctggggttggttcacggcatggcacacgccatcggcgggatgctgcatattcctcatggcaaaattaacgccatgctgctgccgattgtcatcgacttcaacagcaaacgggccagcactgaaacccgcgatcgctatcaccgttgcgcgcaaatcataggcattgaccatgcggtaccggagcaggccatcgcgctgatgactcaggagatccgccagatcaatcgccatttctgcatccccgtcactctcagcgaactgggcatcgaccgtgcaaaaatcatcgagttgcgcagcgcactggtgaattcgacgctggccgacggttgtaccgcgtcgaacccgcggcaggtgacgacgcatgatgtcgaagggttgatcgacctgattaccggctag

SEQ ID NO: 39582 - protein, 372 aa, Escherichia coli CFT073
MARYYFSCPKIYFGEEAITSLCQFNNKRVGIVTDDFMMSSGKTRYLISHMPEASVCIFGEVTPDPDIDILTSGAARFKAFKPDVIIALGGGSSLDAAKGIKVTLEEYFGDHQIDLIAIPTTSGSGSEVTSYAIISDPQNGRKYPLISGQLVPEIAILDPNLVLTAPRHVAVDTGMDVLTHAIEAFVSTGSNDFSDALAEKAIALTWRYLPQVFNDEKDIAARTHMHNASCMAGMAFNSAGLGLVHGMAHAIGGMLHIPHGKINAMLLPIVIDFNSKRASTETRDRYHRCAQIIGIDHAVPEQAIALMTQEIRQINRHFCIPVTLSELGIDRAKIIELRSALVNSTLADGCTASNPRQVTTHDVEGLIDLITG

SEQ ID NO: 39583 - DNA, 2661 bp, Vibrio vulnificus CMCP6
  CDS (1)..(2661): transl_table=11
atggctgaactagatgcgatgattgcacgcgttaagaaagcgcaagaagagttcgctacttactctcaagagcaagtagatgcaatcttccgtgcagcttctctagccgctaaccaagctcgtatcccgctagcacaaatggcggttgaagaatctggtatgggtattgttgaagataaagtaatcaagaaccactttgcatctgagtttatctacaacaaatacaaggacgaaaaaacgtgtggcatcctagaagaggatgacaacctaggtacgatgactatcgctgaaccagtaggtatcatctgcggtatcgttccaaccactaacccaacttcgactgcaatcttcaaatcactgatctctttgaagactcgtaacggtatcatcttctcgccacacccacgtgcgaaaaactcgactaacgacgcagcgaaactggttctagaagcagcggtagcagctggcgcaccaaaagacatcatcggttggatcgaccagccatctgtagagctttctaacgcgcttatgaagcacgatgacatcgcacttatccttgcaactggtggtccaggcatggttaaagctgcttactcttctggtaagccagcaatcggtgtaggtgcaggtaacgttcctgttgttatcgatgaaactgcggacatcaaacgtgcagttgcatctatcctaatgtctaagacgttcgataacggcgtagtatgtgcttctgagcaagctgcaatcgttgttgacgcagtatacgacgaagtgaaagagcgttttgcttctcacaaagcatacgtacttagcaaagctgaagcagaaaaagtacgtaaagtactgctaatcgatggcgcactaaatgcgaaaatcgttggccagccagctgcagcaatcgctgaaatggcaggtgttaaagttcctgctgatactaaagttctcgttggtgaaggcctaggcaaagtgtcttacgatgacgcatttgctcacgagaagctatctccaactctaggtctattccgtgctgatgacttcgaagacgcagttgcacaagcagtaaccatggttgaaatcggcggtatcggtcacacatctggtctatacactaaccaagacgtaaacgcagaccgtatccgttacttcggtgacaaactgaagactgcacgtatccttgtaaacatcccaactactcacggtggtatcggtgacctttacaactttaacgttgcaccatctctaactcttggttgtggttcatggggtggtaactctatctctgagaacgtaggtcctaagcacctaatcaacaagaaaactgttgcgaagcgagctgaaaacatgttgtggcacaaactacctaagtcaatctacttccgtcgtggtagccttccaatcgcactaagcgacctagaaggtaagaaacgcgcattcctagtaactgaccgtttcctattcaacaacggttacgcagatgacgtagtacaacttcttaaagctcaaggcatggaagttcaaacattctttgatgttgaagctgacccaacgctatctgttgtagagaaaggcgcagcggcaatgcaaagcttccagccagatgtgattctagcgctaggcggtggttcaccaatggatgctgcgaagatcatgtgggtaatgtacgagcacccagaaactcacttcgaagaacttgcaatgcgctttatggatatccgtaaacgtatctacaagttccctaaaatgggtaagaaagctgaacttgtatgtatcactaccacttcaggtacaggttcagaagttacaccattcgcggttgtgactgacgacaagactggtgctaagtacccactagcggattacgaattgactcctcaaatggcaatcgtagatgcgaacctagtgatgaacatgcctaagtctctaaccgcattcggtggttacgatgcagtgactcacgctctagaagcttacgtatctgttcttgcgaacgaatactcagatggtcaggctctacaagcacttaagatgctaaaagagtacctaccttcaagctacgcgaacggtgcaaaagacccaatcgctcgtgagaaagtacacaacgcagcgaccatcgctggtatcgcattcgcgaacgcgttcttaggtgtatgtcactctatggcgcacaagatcggtgcagagttccacctaccacacggtttggcgaacgctctacttatctctaacgtggtacgttacaacgcgaacgataacccaactaagcaaactgcgttctctcaatacgaccgtccacaagcacgtcgtcgttacgctgaagttgctgaccacctaggcctaagccaagctggtgaccgcactgctcagaagattgaacgtctactagcatggttggatgagctaaaaggtaacctagacatcccaatgtctatccaagcggcaggtgttgctgaagctgacttcctagcgaaagttgatgaactagcagtagaagcgttcgatgaccagtgtactggtgcgaacccacgctacccactaatcgctgagctaaaagaagttctactggcttcttactacggtaaagctttcgttgaaggtgaaactttcgaaggtacgactgtaatcaagaagaaagcagaccaagtagcgccaaaagcgaaaaaataa

SEQ ID NO: 39584 - protein, 886 aa, Vibrio vulnificus CMCP6
MAELDAMIARVKKAQEEFATYSQEQVDAIFRAASLAANQARIPLAQMAVEESGMGIVEDKVIKNHFASEFIYNKYKDEKTCGILEEDDNLGTMTIAEPVGIICGIVPTTNPTSTAIFKSLISLKTRNGIIFSPHPRAKNSTNDAAKLVLEAAVAAGAPKDIIGWIDQPSVELSNALMKHDDIALILATGGPGMVKAAYSSGKPAIGVGAGNVPVVIDETADIKRAVASILMSKTFDNGVVCASEQAAIVVDAVYDEVKERFASHKAYVLSKAEAEKVRKVLLIDGALNAKIVGQPAAAIAEMAGVKVPADTKVLVGEGLGKVSYDDAFAHEKLSPTLGLFRADDFEDAVAQAVTMVEIGGIGHTSGLYTNQDVNADRIRYFGDKLKTARILVNIPTTHGGIGDLYNFNVAPSLTLGCGSWGGNSISENVGPKHLINKKTVAKRAENMLWHKLPKSIYFRRGSLPIALSDLEGKKRAFLVTDRFLFNNGYADDVVQLLKAQGMEVQTFFDVEADPTLSVVEKGAAAMQSFQPDVILALGGGSPMDAAKIMWVMYEHPETHFEELAMRFMDIRKRIYKFPKMGKKAELVCITTTSGTGSEVTPFAVVTDDKTGAKYPLADYELTPQMAIVDANLVMNMPKSLTAFGGYDAVTHALEAYVSVLANEYSDGQALQALKMLKEYLPSSYANGAKDPIAREKVHNAATIAGIAFANAFLGVCHSMAHKIGAEFHLPHGLANALLISNVVRYNANDNPTKQTAFSQYDRPQARRRYAEVADHLGLSQAGDRTAQKIERLLAWLDELKGNLDIPMSIQAAGVAEADFLAKVDELAVEAFDDQCTGANPRYPLIAELKEVLLASYYGKAFVEGETFEGTTVIKKKADQVAPKAKK

SEQ ID NO: 39585 - DNA, 1113 bp, Vibrio vulnificus CMCP6
  CDS (1)..(1113): transl_table=11
atgggcgcaggctgtcttaaagacgcagcagacagcattaaagctcaaggctttaccaaagggcttattgttaccgacaaaattcttaatcaaatcggcgttgtaaaacaagttcaagacctactaagcgagcgtcatgtagaaacggttgtcttcgatggtactcagcccaacccaaccatcggcaacgtcaatgcaggtttggcactactgaagcaaaatgagtgtgattttgtgatttcactcggtggtggttctccgcacgactgtgcaaaaggcattgcgcttgtcgcagcaaacggcggcgagattgcggattacgaaggcgtggacaaatcagcgaaaccaatgctaccgctgatcgcaattaacaccaccgcaggcaccgcatctgaaatgacccgtttctgcatcattaccgatgaagaacgtcatattaaaatggcgatcgtcgataaacacaccacgccactaatctctgtgaacgatccggaactgatgctggcaaaacctgcatcactaactgcggcaacaggaatggacgccttgactcacgcggtagaagcgtacgtttctattgctgcgacgccgattaccgatgcagttgcaatcaaagcgattgagcttatccaagcccatcttcgtactgccgtcgcacacggcgatgatattgaagcgcgtgagcaaatggcgtacgcacagtttatggcaggtatggcgttcaacaatgcctcactaggttacgtacacgcaatggcgcaccaattgggtggcttctacgatctaccacacggtgtttgtaacgcgatcttgttaccacacgtacaacgctacaatgcgcaggtttgtccagagcgtctacgtgatgtggcaaaagcaatgggtgtcaatgtcgaaggcatgagtgcagagcaaggcgcagaagccgccattgatgcgattgtggcactggcgaaagacgtgggtattccagcaggtattcgcgagcttggtgcaaaatctgaagatatcccaaccttggctgacaatgcactcaaagacgcttgtggtttcactaacccgaaacaagccacgcacgaagaaatctctgcgattttcgaagcggcaatgtaa

SEQ ID NO: 39586 - protein, 370 aa, Vibrio vulnificus CMCP6
MGAGCLKDAADSIKAQGFTKGLIVTDKILNQIGVVKQVQDLLSERHVETVVFDGTQPNPTIGNVNAGLALLKQNECDFVISLGGGSPHDCAKGIALVAANGGEIADYEGVDKSAKPMLPLIAINTTAGTASEMTRFCIITDEERHIKMAIVDKHTTPLISVNDPELMLAKPASLTAATGMDALTHAVEAYVSIAATPITDAVAIKAIELIQAHLRTAVAHGDDIEAREQMAYAQFMAGMAFNNASLGYVHAMAHQLGGFYDLPHGVCNAILLPHVQRYNAQVCPERLRDVAKAMGVNVEGMSAEQGAEAAIDAIVALAKDVGIPAGIRELGAKSEDIPTLADNALKDACGFTNPKQATHEEISAIFEAAM

SEQ ID NO: 39587 - DNA, 2610 bp, Staphylococcus epidermidis ATCC 12228
  CDS (1)..(2610): transl_table=11
atgttatctgtaactaaaaaaaatacatatgaatcaaacaaagatgaagtcacacaaatgattgattcattagcagaaaaaggacaagaagctctaaaagaactatctaaaaaatcacaacaagagattaatgacattgtacatcagatgagcatggctgctgttgatcagcatatgcatttagctaaactagcttacgacgaaacaggtagaggtatttatgaagacaaagctatcaaaaatttatatgcctcagagtacatatggaattcaatcaaagacaataaaacagtaggtatcataggtgaagataaacaaaaaggattaacgtatgtagctgaacctataggcgttatttgtggagtgacaccaacgaccaaccctacatctacaactattttcaaagcaatgattgctattaaaacaggtaatccaattattttcgcatttcatccaagtgcacaacaatcatcaaaatatgctgctaaagtcattttagaagctgcaacaaaagcaggtgctcctaaagattgtattcaatggatagaagtgccatcaattgtggcaactaaacaattaatgaatcataaagatattgctttagttctagcgactggaggctctggaatggtaaagtccgcatattcgacaggtaaacctgcattaggagtcggtccaggtaatgttcctacttatattgaaaaaactgctcatatcaaacgtgctgttaatgatatcattggttctaaaacttttgataatggtatgatttgtgcttctgaacaagtcatggttgttgataaagaagtatacactgacgtcgttaaagaattcaaattacaccaaacatattttgttaataaaaatgaactacaacaattagaagatgccatcatgaatgaagataaaactgcagttaaacctgatatagttggtaaatctgctgtagatatagcgaaattgtcaggaattagtgttccagaaaaaacaaaattattagtcgcagaaattgatggaattggaaaagattatcctttatcacgtgaaaaattatcacctgtactcgcaatggtaactgcaaaatcaacaggacatgcactacaaatttgtgaagacacattaaaatttggtggtttaggtcacactgctgtaattcacaccgaggatagtcaattacaacaaaaattcggtctaaaaatgaaagcttgccgtgtattggtaaatacaccttctgctgtcggaggaattggaaatatgtataatgaactcattccttcactcacgttaggttgtggttcacatggtagaaattctatttctcataatgtaagcgcagtagacttattaaatattaaaacaatagcaaaacgtcgtaataatatgcaatggtttaaactcccacctaaagtttattttgaagaaaattcagttatgtatttgacagagatggataatgttgaacgtgtaatgatagtttgtgatccaggaatggttaatattggttatactgatatagttgaacaagtgctgagacgccgagaaaaccaaccacaaatcaaagtgtttaacgaagttgaacctaatccatcaactcatacagtctataaggggttagaaatgtttataaatttccaacctgatactattattgcactcggtggcggttcggcaatggatgcagccaaagcaatatggatgttctttgagcatccagaaacttcattttttggggcaaaacaaaagttcttagatattcgtaaacgtacttataaaattaccaaacctaaaaacgcaaaatttatatgtataccaacgacatcaggaactggttctgaagtgacaccttttgcagtaattactgatagcgagacacacgttaagtatccactagcagattatgcgttaactcccgatattgctatcgtcgatccacaattcgtattaagtgtacctaaagatgttaccgcagatacaggaatggatgttttgacacatgccattgaatcttacgtctctgtcatggcttcagattatacaagaggcttaagcttacaagcaataaagttaacttttgattatctaaaatcatcagttcaagaaaatgacaaacactcacgagaaaaaatgcataatgcttcaacaatggccggtatggcatttgccaatgcttttttaggaatttctcattctatcgcacataaaattggtggtgaatatggtattccccacggcagaacaaatgctattttattaccacatgtcattcgctataatgccaaagatccacaaaaacatgcactgtttcctaaatatgatttctttagagcagatactgactatgctgacattgcaaaatttttaggactcaaaggtaatacaactgatgaattagtggatgctctagctaatgcggtgtatgatttaggatgttcagttggtattgatatgaatttaaaatcacaaggcgtaactgaagagcttcttcactctactatagacagaatggctgaattagcatttgaagatcaatgtacaactgctaatccaaaagaaccgctaattagtgaacttaaaggcattatcgaaacagcatatgattatgaaagataa

SEQ ID NO: 39588 - protein, 869 aa, Staphylococcus epidermidis ATCC 12228
MLSVTKKNTYESNKDEVTQMIDSLAEKGQEALKELSKKSQQEINDIVHQMSMAAVDQHMHLAKLAYDETGRGIYEDKAIKNLYASEYIWNSIKDNKTVGIIGEDKQKGLTYVAEPIGVICGVTPTTNPTSTTIFKAMIAIKTGNPIIFAFHPSAQQSSKYAAKVILEAATKAGAPKDCIQWIEVPSIVATKQLMNHKDIALVLATGGSGMVKSAYSTGKPALGVGPGNVPTYIEKTAHIKRAVNDIIGSKTFDNGMICASEQVMVVDKEVYTDVVKEFKLHQTYFVNKNELQQLEDAIMNEDKTAVKPDIVGKSAVDIAKLSGISVPEKTKLLVAEIDGIGKDYPLSREKLSPVLAMVTAKSTGHALQICEDTLKFGGLGHTAVIHTEDSQLQQKFGLKMKACRVLVNTPSAVGGIGNMYNELIPSLTLGCGSHGRNSISHNVSAVDLLNIKTIAKRRNNMQWFKLPPKVYFEENSVMYLTEMDNVERVMIVCDPGMVNIGYTDIVEQVLRRRENQPQIKVFNEVEPNPSTHTVYKGLEMFINFQPDTIIALGGGSAMDAAKAIWMFFEHPETSFFGAKQKFLDIRKRTYKITKPKNAKFICIPTTSGTGSEVTPFAVITDSETHVKYPLADYALTPDIAIVDPQFVLSVPKDVTADTGMDVLTHAIESYVSVMASDYTRGLSLQAIKLTFDYLKSSVQENDKHSREKMHNASTMAGMAFANAFLGISHSIAHKIGGEYGIPHGRTNAILLPHVIRYNAKDPQKHALFPKYDFFRADTDYADIAKFLGLKGNTTDELVDALANAVYDLGCSVGIDMNLKSQGVTEELLHSTIDRMAELAFEDQCTTANPKEPLISELKGIIETAYDYER

SEQ ID NO: 39589 - DNA, 1155 bp, Clostridium tetani E88
  CDS (1)..(1155): transl_table=11
atggcatataaaattaatattcctggaaatattatatatggaaagaatgctctgaaggaatcatcaaaaaacataaaagagctaggaggaaaagctttaatagttactgataaaataatgattgaaataggtaatgttaaaaaagtcagtgaagttcttgatgatattggtataaaatatgaaatatatgacggaattaattcagaacctacagacgtaatggtagataaaggaatagaaatatataataattctcattgtgattttttaattgctataggaggaggaagtcctatagatgcttcaaaggcaattggagctatgataacaaatttaggaaatataaatgactacatgggaaaaataatagaaaatgcctcgccaagcattgtagcaattccaaccactgctggaacaggatcagaagcaaccgaatttacaatcatatcaaatacaaaagacaacataaaaatgttgctaaaaggaaaaagtttaattcctactttggcaatagttgacccgcaattttctataacagtaccccaaaacattacggcaactacaggaatagatgctttgacgcacgccattgaatcatatacatcaaaacatgcaaattcattttcagataccttcgcactatcagcagtaaagcgtatttttaataatttaataaaagcatataaagatgggaagaattttgaagctagaaatgaaatggctctaggtgccttagaagcaggaattgcttttaataattcttcggtaactatagttcatggaatgagtagaccaattggagctttatttaaagtaccacatgggctttctaatgcagtacttttacccaaatgtttagaatttgcaattcaaggggaagaaaaaagatttgcagatattgcaaaagcaatagaaatatgtaaagaagaaacatcagataaagaagctgcagaaaaacttgtaaaagaaattgaaagtttgtgcaaagatattaatataccaaccttggaggagtacggtatagaaaaaaatgaattttatgaagaaataaataagatggcagaagatgcattaaatagtggaagtcctgcaaatactagacgacaacctactaaagaagatattgttaatatatataaacagttgtatatataa

SEQ ID NO: 39590 - protein, 384 aa, Clostridium tetani E88
MAYKINIPGNIIYGKNALKESSKNIKELGGKALIVTDKIMIEIGNVKKVSEVLDDIGIKYEIYDGINSEPTDVMVDKGIEIYNNSHCDFLIAIGGGSPIDASKAIGAMITNLGNINDYMGKIIENASPSIVAIPTTAGTGSEATEFTIISNTKDNIKMLLKGKSLIPTLAIVDPQFSITVPQNITATTGIDALTHAIESYTSKHANSFSDTFALSAVKRIFNNLIKAYKDGKNFEARNEMALGALEAGIAFNNSSVTIVHGMSRPIGALFKVPHGLSNAVLLPKCLEFAIQGEEKRFADIAKAIEICKEETSDKEAAEKLVKEIESLCKDINIPTLEEYGIEKNEFYEEINKMAEDALNSGSPANTRRQPTKEDIVNIYKQLYI

SEQ ID NO: 39591 - DNA, 2631 bp, Clostridium tetani E88
  CDS (1)..(2631): transl_table=11
atgaaggtagaaaatgttcaacagcttatggaaaagatagaaaatgtaagaaaggcacaaaaagaatttgcaaattataatcaaaaacaggtagatgagatatttagaagtgcagctatagctgcaaatgaggcaagaatagaactggctaaactagctgtagaagaaacaggtatgggaattattgaagataaggtaataaaaaatcattttgcatcagaatacatttataataaatataaagatgaaaagacttgtggaattattgaaagggatgaatcctttggaatttctaaggtagcggaaccaagaggagttatagcagctattattccaattactaatccaacatctacaacaatatttaaagcacttatttgtctaaaagctagaaatggaataatattttctccacaccctaaagcaaaaaaatctaccattgctgctgctaaaatagttcttcaagcagcaatagatgctggagctccaaaagaaataatagcatggatagatgaaccttccctagagctttctcaaaaacttatgcatgaaggagatatgattttagctacaggcggacctggaatggttaaagctgcatactcttcaggaaaacctgccataggtgttggtgctggaaatacaccagcaattatagatgaaacagcacatataaaaatggcagtaaactcaataattatgtcaaagagttttgataatggagttatatgtgcatcagaacaatcagtacttgtagtagatgaagtatatgaagatgttaaacaagagtttgaagaaagaggagcttatatattaaaaggagatgaagtagataaactaagaaatataatactaataaatggagcagttaatcctgatattgttggacaacctccttataaaatagcaaaactagcgggagttgaaatacctcaaagcagtagaattattataggagaagttaaatcggtagaaattgatgaaccctttgctcatgaaaaattatcccctgttcttgctatgtatagagtaaaggattttaatgaggcgctagataaagctgtaacattaatagaagatggaggaagagggcatacttcggttttatatacaaatattgtaaagtcaaaagatagagtggacaaatttagtcttactatgaaaacaggaagaacaataataaatatgcctgcatctcaaggtgccatgggagatgtatataattttaaacttcagccatcattaactttaggttgcggtacttggggaggaaactctgtttcagaaaacgttggagttaaacatttaataaatataaaaagtgtagctgagaggagagaaaatatgctatggtttagagttccagaaaagatatattttaaatatggctgtcttgctatggcactaaatgaactaaaggatatgaagaaaaaaagagcctttatagtaacagatagagtactttataatcttggatttgcagaaaaaatagaaaagattttagaggaaattggaattgagttcaaagtattctttgatgttgaatctgacccaacattaaaaacggcaaaaaagggtgctgaagatatgaaaagttttaaaccagatacaattattgccctaggtggtggttcgcctatggatgctgcaaaaatcatgtggataatgtatgaacaccctgatgtgaagtttgaagatcttactatgagatttatggatataagaaaaagagtatacaagtttccgaaaatgggagaaaaagctatgatggttgcaataccaactacagctggaactggctcagaggttactccctttgcagtaattaccgatgagaatacaggaattaagtatcctttagctgattacgagttgactccagatatggctataatagatgctgaattaatgttaaatataccaaaggaattaacagcagcatcaggtatagatgccttaactcatggtatagaagcatatgtatctgtacttgcttcagaatataccaatggtttagccctagaggcaataagacttgtatttaaatatttacccgatgcttataatgaaggagctaataatataaaggcaagagaaaagatggcacatgcatctactatggcaggtatggcttttgccaatgctttcttaggagtatgtcattccatggctcataaattaggagcaatgcataatctatcccatggcctttctaatgctcttcttataaatgaggtaatcaaatttaatgcagttgataaccctagaaaacaagcttcgtatccgcaatataaatatcctaatgctaaatggagatatggaaggatagcagatcatttaaatttaggaggaaatacagatgatgaaaaagtagagcttttaattaaagctattgatgaattaaatgaaaaagtaggaatacctaaaactattagtgaagctggggttcctaaagaaaaattctatgcaactttagatgaaatgagtgaacaagcctttgatgatcaatgcacggtggcaaatccaagatatccacttattagtgaaataaaagagatgtatataaatgtttatgaagatacagataaggagcataagactgaaaagcataagaatgaagaatgcaaataa

SEQ ID NO: 39592 - protein, 876 aa, Clostridium tetani E88
MKVENVQQLMEKIENVRKAQKEFANYNQKQVDEIFRSAAIAANEARIELAKLAVEETGMGIIEDKVIKNHFASEYIYNKYKDEKTCGIIERDESFGISKVAEPRGVIAAIIPITNPTSTTIFKALICLKARNGIIFSPHPKAKKSTIAAAKIVLQAAIDAGAPKEIIAWIDEPSLELSQKLMHEGDMILATGGPGMVKAAYSSGKPAIGVGAGNTPAIIDETAHIKMAVNSIIMSKSFDNGVICASEQSVLVVDEVYEDVKQEFEERGAYILKGDEVDKLRNIILINGAVNPDIVGQPPYKIAKLAGVEIPQSSRIIIGEVKSVEIDEPFAHEKLSPVLAMYRVKDFNEALDKAVTLIEDGGRGHTSVLYTNIVKSKDRVDKFSLTMKTGRTIINMPASQGAMGDVYNFKLQPSLTLGCGTWGGNSVSENVGVKHLINIKSVAERRENMLWFRVPEKIYFKYGCLAMALNELKDMKKKRAFIVTDRVLYNLGFAEKIEKILEEIGIEFKVFFDVESDPTLKTAKKGAEDMKSFKPDTIIALGGGSPMDAAKIMWIMYEHPDVKFEDLTMRFMDIRKRVYKFPKMGEKAMMVAIPTTAGTGSEVTPFAVITDENTGIKYPLADYELTPDMAIIDAELMLNIPKELTAASGIDALTHGIEAYVSVLASEYTNGLALEAIRLVFKYLPDAYNEGANNIKAREKMAHASTMAGMAFANAFLGVCHSMAHKLGAMHNLSHGLSNALLINEVIKFNAVDNPRKQASYPQYKYPNAKWRYGRIADHLNLGGNTDDEKVELLIKAIDELNEKVGIPKTISEAGVPKEKFYATLDEMSEQAFDDQCTVANPRYPLISEIKEMYINVYEDTDKEHKTEKHKNEECK

SEQ ID NO: 39593 - DNA, 1149 bp, Clostridium tetani E88
  CDS (1)..(1149): transl_table=11
gtgtatatgaaagaatttagtattaatacagatgtttattttggagaaggctctttagatagactaaatgaaattaaaaataaaagagtactaattgtatgcgataagtttatggaaacttcaggtatggttacaaaagtacaacaaaagcttactgactgtgaagtaaccatatacagtgatattgttcctgacccatctgtagaagttattgcatctggtattcaaaaattacagagttgtaatgcacagattataatagcccttggcggaggttcatcaattgatggagctaaagctataaaagaatattcaaaaaaagttactggaaaaactatcaatatagaagagttttatgctatacctactacaagtggtacaggctctgaagtaactgaatatgcagtaattacaaataaacaagaaggattaaagtatgcaatcacagataaatcccttcttccaacagttgccattctagatcctcagttggtaaaatcagtacctaaagctataactgctgatacaggaatggatgtaatcacacatgccttggaagcttacgtttcaaaaaatgctacggatttttcagatgcccttgcagaaaaagcttttactttagcatttagatttttaccacaagcctatgctgatggagaggatataatagcaagagaaaaacttcataatgcatcctgtcttgctggtatggcatttaatgcagctggacttggaattacccatagtttagcccatgctgtaggtggaaaattacatatctctcacggaagaagtaatgcaataatacttccgtatgtagttgaatacaatgctaatttaaacaaagaatctttcaatgcagaatatagcatagcagctaaaaaatatcaaaggcttgctaaattattaaagctacatgcaccaaatgtaactattggtgttaataatttaattaagagcattgtaaaacttcaaaatacattgatgattccccaaacattaaaacaacaacgtgaggatataaatttggatgaaacatcaaaagaagaaattattaatgcagctcttagggatgtatgcacaacatcaaatcctagagaaactaaaaaagaagattttctaaaaattctagataaggttttaggataa

SEQ ID NO: 39594 - protein, 382 aa, Clostridium tetani E88
MYMKEFSINTDVYFGEGSLDRLNEIKNKRVLIVCDKFMETSGMVTKVQQKLTDCEVTIYSDIVPDPSVEVIASGIQKLQSCNAQIIIALGGGSSIDGAKAIKEYSKKVTGKTINIEEFYAIPTTSGTGSEVTEYAVITNKQEGLKYAITDKSLLPTVAILDPQLVKSVPKAITADTGMDVITHALEAYVSKNATDFSDALAEKAFTLAFRFLPQAYADGEDIIAREKLHNASCLAGMAFNAAGLGITHSLAHAVGGKLHISHGRSNAIILPYVVEYNANLNKESFNAEYSIAAKKYQRLAKLLKLHAPNVTIGVNNLIKSIVKLQNTLMIPQTLKQQREDINLDETSKEEIINAALRDVCTTSNPRETKKEDFLKILDKVLG

SEQ ID NO: 39595 - DNA, 1170 bp, Clostridium tetani E88
  CDS (1)..(1170): transl_table=11
atgaataattttaaagtagggcctaaagtttatcatggagctttaagtctagaaaaacttaaagaaattaattgtaaaaaagtatttattgttacagatccatttatggtaacctctggaacaataagcaaagttacagaacatttggataaatccaatattgaatatgctattttttcagatatagtgccagatccacctctagaaataatctcaaaaggaattaaggctatggatgaatttaagccagaggcattaattgcattgggaggaggatcagcaattgatgcagcaaaggctataagttattttagatctcttataaataaaggactaaatccagacatggaaaatgaaaaagttttatttattgctataccaacaactagtggtacaggttctgaagttacatcattttccgttataacagataaaaaatataatgttaaatatccattagtagaagaaattatggtaccagatatagcaatattagatccaatccttgtaaaaacagtgccaaattttataacagcagatactggtatggatgttttaactcatgcaatagaggcatatgtatccactgatcattctgattttagtgatgctctagcagaaaaagctataaaattagtctttgattatttagaaaaagcctataaaaatggtgatgatttgacagcaagagaaaagatgcacaatgcttcttgtatagcaggaatggcatttacaaatgcttcacttggaataaatcatagtatggcacatatactaggcggtaaattccatattcctcatggaaaagcaaatgcaatattattaccctatgttatagaatataatgcagatttaagttttaataatagattggaatatagtgatactgccagaagatatgctcaaattgctcaaattttaaatcttacaagtagtaataatgttagagaaggagttaaatctttaataagagctataaattctctaagaaaaactttaggaataccttgtaatattaaggatatgaatataagtaaggaagactttgaatgtaatatagatgacctttcagagattgcattaaaggatagttgtacaaaaactaatccaaaagagcctaatgtagaagaattaaagacattgtttagaattgtatatgaaggaaaataa

SEQ ID NO: 39596 - protein, 389 aa, Clostridium tetani E88
MNNFKVGPKVYHGALSLEKLKEINCKKVFIVTDPFMVTSGTISKVTEHLDKSNIEYAIFSDIVPDPPLEIISKGIKAMDEFKPEALIALGGGSAIDAAKAISYFRSLINKGLNPDMENEKVLFIAIPTTSGTGSEVTSFSVITDKKYNVKYPLVEEIMVPDIAILDPILVKTVPNFITADTGMDVLTHAIEAYVSTDHSDFSDALAEKAIKLVFDYLEKAYKNGDDLTAREKMHNASCIAGMAFTNASLGINHSMAHILGGKFHIPHGKANAILLPYVIEYNADLSFNNRLEYSDTARRYAQIAQILNLTSSNNVREGVKSLIRAINSLRKTLGIPCNIKDMNISKEDFECNIDDLSEIALKDSCTKTNPKEPNVEELKTLFRIVYEGK

SEQ ID NO: 39597 - DNA, 1170 bp, Clostridium tetani E88
  CDS (1)..(1170): transl_table=11
atgaaaagatttacaattccaagagatatttattatggtaaagggtcattagaggtaataaaatctattaagggaaataaagccgttatagtaattggtggcggatcaatgaaaagatttggttttttagataaggttgaaaattatctaaaggaagcaggtatagaaactaaattaatagaaggtgtagagccagatccttcagtagaaacagttatgaagggtgcagaaatcatgagggaatttaagccagattggataatatctataggtggcggatcaccaattgatgcagctaaagctatgtggcttttctatgaacatcctgatttaacttttgaagaagctgcacaaaaagtactttgtcttccagaattgagaagtaaagctaaatttatggctatcccatctaccagtggaacagcttcagaagtaactgctttttcagtaataacagactacaaaaaacaaataaaatatcccctagcagattttaatttaacaccagatatagctatagtagatccagaattggcagaaacaatgccagctaaacttaccgctcatacaggtatggatgccttaactcatgcaatagaagcttatgtggctacagaaaacactagctttacagatccactagcattacaggcaatattaatggttaaagattatttaattaaatcctatgaagaagacaaagaagcaagagaaagaatgcatgaagctcaatgtcttgcaggaatggctttttctaatgcattactcggaataactcatagtatggctcataaaattggtgctgtatttgatataactcatggttgtgctaatgcaatattcttaccttatgttatacaatttaatagtaaggtttgtgaagaaagatatgcaaatattgcaaagtatttaggattagaaggagaatcagataaagatttagtaaattcattgataaatttcattagggatttaaataaaaaattaagcatagataattcattaaaagaatatggaatagatgaaaatgaatttaaagaaaaggttgaatacatggctcacaatgctgtattagatgcttgcacaggagcaaacccaagaaaaataaatgaagaagaaatgaagaacatgtatacttatgcatttaatggaaaagatatagatttttaa

SEQ ID NO: 39598 - protein, 389 aa, Clostridium tetani E88
MKRFTIPRDIYYGKGSLEVIKSIKGNKAVIVIGGGSMKRFGFLDKVENYLKEAGIETKLIEGVEPDPSVETVMKGAEIMREFKPDWIISIGGGSPIDAAKAMWLFYEHPDLTFEEAAQKVLCLPELRSKAKFMAIPSTSGTASEVTAFSVITDYKKQIKYPLADFNLTPDIAIVDPELAETMPAKLTAHTGMDALTHAIEAYVATENTSFTDPLALQAILMVKDYLIKSYEEDKEARERMHEAQCLAGMAFSNALLGITHSMAHKIGAVFDITHGCANAIFLPYVIQFNSKVCEERYANIAKYLGLEGESDKDLVNSLINFIRDLNKKLSIDNSLKEYGIDENEFKEKVEYMAHNAVLDACTGANPRKINEEEMKNMYTYAFNGKDIDF

SEQ ID NO: 39599 - DNA, 1173 bp, Lactobacillus plantarum WCFS1
  CDS (1)..(1173): transl_table=11
atgactgaacgtaattttgatttcttaatgcctagcgttaactttttcggtcctggtgtcattagtaaaatcggcgagcgtgccaaaactcttggtatgcacaagccagtcatcgtcaccgacaaatttcttgaaagtctgccagacggcgccgttgctcaggtgcggcggtcactggatgctgccgggattgactacgtaatttataatcaagttgagcccaaccctaaaattcataacattcaagctgttaaagccttatatcaagccaatcaagcggactccctgattactattggcggtggttctgcccacgataccggaaaaggtgccggcatcatcatgactaacggcgacgatatcactaagttagcggggatcgaaacactcaagaatgccctaccaccactgattgcggtcaacactaccgctgggactggttctgaattgacccgtcactgtgtcattacgaatgaagaaacgcattataagttcgtcgttgcttcatggcgtaacatgccactcgtgtcctttaacgatcccactctcatgctagatgttcctaagggactcacggccgcaactggcatggatgcttttgtccaggctatcgaaccctttgtttctgtcgatcacaatccgattaccgattcacagtgcatccaggccatcaaattaatcgaaacatcattacgcgaagccgtcgccaatgggcataacctagaagcccggacacacatggtcgaagctgaaatgttagccggcatggcctttaacaacgccaatctaggttacgtgcacgccatggcccaccagctcggcggccaatatgacgcaccccacggtgtctgctgcgcgctgctcttaccctacgttgaagaatataatctaatcgcgtgccccgaacgtttcgccgagctcgccaaaattatgggcgaaaacactgatggcttatcgactcgtgatgctgccgaattagctatcaaagcgatgaaacaactcagcgaagacgttggcattccgcattccatcaaggaaattggcgccaagatcgaggacttcgaacacatggcgactaatgcgcttaaagacggtaacgccttctctaacccacgcaaaggtactaaagaagacatcatcaagattttccaagccgcatatgatgccaagtaa

SEQ ID NO: 39600 - protein, 390 aa, Lactobacillus plantarum WCFS1
MTERNFDFLMPSVNFFGPGVISKIGERAKTLGMHKPVIVTDKFLESLPDGAVAQVRRSLDAAGIDYVIYNQVEPNPKIHNIQAVKALYQANQADSLITIGGGSAHDTGKGAGIIMTNGDDITKLAGIETLKNALPPLIAVNTTAGTGSELTRHCVITNEETHYKFVVASWRNMPLVSFNDPTLMLDVPKGLTAATGMDAFVQAIEPFVSVDHNPITDSQCIQAIKLIETSLREAVANGHNLEARTHMVEAEMLAGMAFNNANLGYVHAMAHQLGGQYDAPHGVCCALLLPYVEEYNLIACPERFAELAKIMGENTDGLSTRDAAELAIKAMKQLSEDVGIPHSIKEIGAKIEDFEHMATNALKDGNAFSNPRKGTKEDIIKIFQAAYDAK

SEQ ID NO: 39601 - DNA, 2604 bp, Lactobacillus plantarum WCFS1
  CDS (1)..(2604): transl_table=11
atgattaagacagaaaaaaatcaaacaagcaaagttactgacgaagttgatcaattagttcaacgttctaagaaagcattagctattttgaagtcatatacccaagcacaaatcgatgatttatgtgaaaaggttgcggttgccgcactggacaatcatatgaagttagccaagttggcggttgaggaaaccggtcggggtgttgttgaagataaggcgattaagaacatctacgccagcgaatatatctggaacagcatgcgccatgataagacagtcggcgtcattaaagaagacgatgaagagcaactaatggaaattgctgaaccagttggtatcgtagccggggttacacccgtaacgaatccaacttcaacaacggttttcaagacgttgatctcattaaaggggcgtaacacgatcgtctttggtttccatcctcaagctcagaaatgtagttctgcggctgctgatgtgatgcgggaagcgattaaagctgctggtggtccagctgatgctgttttatacatcgaacacccaagcattgaagcaaccgacgccttgatgcaccatacggatgttgcgacgatcttggctaccggtggtccaagtatggtgacagccgcttactcatcaggtaaaccagcactgggtgttggtcctggtaacggcccaacttatgttgaaaaaacagctgacattaagcaggcggttaacgacattgttttatcgaagacgtttgataatgggatgatttgtgcttctgaaaatagtgccattatcgacaaggaaatttatgctgaagttaaagctgaatttattcgtttgggttgctactacgttaaacctaaagatgtgcaagccttgagtgatgctgtcattgatcctaaccggcacacagttcgtggtccagttgctggtaaaacagcttatcaaatcgcacaaatggctggcttgaaagatgtcgctaaggactgccgggtcttgattgcggagattaatggtgtcggtatcaagtacccattatccggcgaaaaattatcaccagttctgaccgtttacaaagcggattcgcatgaagcggcgttcaaacgggctaatgaattacttcactatggtggcttaggccatactgctgggattcatacgaccgatgatgcattggtcaaagaatttggcttacaaatgccagcttgccggatcttagttaacacgccatcttcagttggtgggttaggtaacatctacaataacatggcgccttcattaactctgggcacgggatcatatggtggcaactcgatttctcataacgttacagatatggatctgattaatatcaaaactgtggcaaaacggcgtaataacatgcaatgggtcaaaatgcctcccaaagtctacttcgaacgcaattccgttcgctacttggaacacatggccgggattaagaaggttttcctagtttgtgatcctgggatggttgaatttggctatgctgatcgagtaacggcggtcttgaacaagcggactgatccggttgatatcgacatcttctcagaagttgaaccgaacccgtcgactgacacagtctacaaaggggttgcccggatgaaggcctttaagccagatacaatcattgcactcggtggtggttctgcaatggacgccgctaaggggatgtggctcttctatgaacacccagaagcttccttcttaggtgctaaacagaagttcctggatatccggaagcggacgtacaaagtaccagtatccgaaaaagtaacttatattgggattccaacgacttctgggactggttctgaagtaacgccatacgcggttattacggactccaagacgcacgtcaaatacccgattacggactacgcaatgcaaccagatattgcgatcgttgacccacaatttgttgaaacggtgccaaagcggacgacggcttggactggtctcgacgtaattacccacgcaaccgaagcatatgtttcaacgatggcttctgacttcacacgcggctggtcaattcaagccttgcaattagccttcaagtacttgaaagcttcttatgatggtgacaagatggctcgtgagaagatgcacaatgcctcaacgttagctgggatggcctttgccaatgccttcttgggtatcaaccactcgatcgcccataaattaggcggggaattcaacttaccacacggattggcaattgcgatcacttatccgcaagtcgttcgttacaatgctgaaatcccaacgaagttagcaatgtggccgaagtacaaccataatactgccttagccgactatgccaacattgcccgggccttagggttaccaggcaagaccgacgaagaactcaaagaaagcttagttaaagcttacattgacttggctcactcaatggatgtgaccttatccttgaaagctaaccgggtcgaaaagaagcactttgacgccaccgtcgacgaattagccgaactggcctatgaagaccaatgcacgaccgctaacccacgcgaacctttaatcagtgaattaaaggcgattattgaacgtgaatgggacggccaaggtactgaaaaatag

SEQ ID NO: 39602 - protein, 867 aa, Lactobacillus plantarum WCFS1
MIKTEKNQTSKVTDEVDQLVQRSKKALAILKSYTQAQIDDLCEKVAVAALDNHMKLAKLAVEETGRGVVEDKAIKNIYASEYIWNSMRHDKTVGVIKEDDEEQLMEIAEPVGIVAGVTPVTNPTSTTVFKTLISLKGRNTIVFGFHPQAQKCSSAAADVMREAIKAAGGPADAVLYIEHPSIEATDALMHHTDVATILATGGPSMVTAAYSSGKPALGVGPGNGPTYVEKTADIKQAVNDIVLSKTFDNGMICASENSAIIDKEIYAEVKAEFIRLGCYYVKPKDVQALSDAVIDPNRHTVRGPVAGKTAYQIAQMAGLKDVAKDCRVLIAEINGVGIKYPLSGEKLSPVLTVYKADSHEAAFKRANELLHYGGLGHTAGIHTTDDALVKEFGLQMPACRILVNTPSSVGGLGNIYNNMAPSLTLGTGSYGGNSISHNVTDMDLINIKTVAKRRNNMQWVKMPPKVYFERNSVRYLEHMAGIKKVFLVCDPGMVEFGYADRVTAVLNKRTDPVDIDIFSEVEPNPSTDTVYKGVARMKAFKPDTIIALGGGSAMDAAKGMWLFYEHPEASFLGAKQKFLDIRKRTYKVPVSEKVTYIGIPTTSGTGSEVTPYAVITDSKTHVKYPITDYAMQPDIAIVDPQFVETVPKRTTAWTGLDVITHATEAYVSTMASDFTRGWSIQALQLAFKYLKASYDGDKMAREKMHNASTLAGMAFANAFLGINHSIAHKLGGEFNLPHGLAIAITYPQVVRYNAEIPTKLAMWPKYNHNTALADYANIARALGLPGKTDEELKESLVKAYIDLAHSMDVTLSLKANRVEKKHFDATVDELAELAYEDQCTTANPREPLISELKAIIEREWDGQGTEK

SEQ ID NO: 39603 - DNA, 1149 bp, Pseudomonas syringae pv. tomato str. DC3000
  CDS (1)..(1149): transl_table=11
atgagcagcacttttttcattcccgcagtgaacatcattggcgctggctgcatcgatgaagccatgctcgccatacgcaaatacggatttctcaaggcgctgatcgtcaccgatgcagggctggccaaggccggtgtggccagccaggtcgccggactgctggtggagcagggcatcgactcggtggtgtatgacggtgccagacccaacccgaccatcgccaacgtcgaaaacggcctggctttgctgcggaaacgtcagtgcgatttcgtgatttctctgggtggtggctcaccccacgactgcgccaagggcattgccctgtgcgccagcaacggcgggcacatcagcgactatgaaggcgtcgaccgttcggcaaagccgcagttgccgctgatcgcgatcaacaccacagccggaaccgccagcgagatgacccgcttctgcatcatcaccgatgaagcgcgtcacgtaaaaatggccatcatcgaccgcaacgtaacacccctgttatccgtaaacgacccgaacatgatggtcgccatgcccaaatcactgaccgccgccaccggtatggatgccttgacccacgccatcgaagcgtatgtgtcgaccgccgccacgccgatcaccgacgcctgcgcattgcaggccatgtcactgatcgccaacaatctgcgcgaggcagtcagcaacgggacaaacatcactgcgcgcgagaacatggcctatgcccagtttctcgccggcatggctttcaacaatgcctcgctgggttacgtgcacgcgatggcgcatcaactgggcggcttctatgatttgccgcatggcgtgtgcaatgccgtgctgctgcctcatgtgcagcgtttcaacgcgagcgtcagtgctgcacgtctgaccgatgttgcccatgcaatgggggccagcgttcgtggtctgtcgccggaagaaggtgcgcacgcggcaatcgaggctattcgggccttgtctgctgcggtagagatcccggcgggcctgactgcactgggcgtcaaggaagaggatttccctgttcttgccgccaatgcattgaaagacgcttgcggtttcaccaacccacgcccggcggatcttgagcagattcaggaactgttccgccaggcactttga

SEQ ID NO: 39604 - protein, 382 aa, Pseudomonas syringae pv. tomato str. DC3000
MSSTFFIPAVNIIGAGCIDEAMLAIRKYGFLKALIVTDAGLAKAGVASQVAGLLVEQGIDSVVYDGARPNPTIANVENGLALLRKRQCDFVISLGGGSPHDCAKGIALCASNGGHISDYEGVDRSAKPQLPLIAINTTAGTASEMTRFCIITDEARHVKMAIIDRNVTPLLSVNDPNMMVAMPKSLTAATGMDALTHAIEAYVSTAATPITDACALQAMSLIANNLREAVSNGTNITARENMAYAQFLAGMAFNNASLGYVHAMAHQLGGFYDLPHGVCNAVLLPHVQRFNASVSAARLTDVAHAMGASVRGLSPEEGAHAAIEAIRALSAAVEIPAGLTALGVKEEDFPVLAANALKDACGFTNPRPADLEQIQELFRQAL

SEQ ID NO: 39605 - DNA, 1191 bp, Vibrio parahaemolyticus RIMD 2210633
  CDS (1)..(1191): transl_table=11
atgttgaaacattgtttgtatcgcagttacaccaaagggctaaaaatcgcagcgcatgtgctgccacttcctcggccgacgttgttttctggttcgggatccgtatctgagttgttggaggcgatatctgatctaggttttcgacgtttgttgctagtgaccgatgagggattagttcgaatcggtatggtaggtaaagtcttggagcaaacgcaggggttgggtttacaggtgggcgtgttttctgaagtaaaaccagacccaacttacgatcaagtggaagatggattacgggcttacaacgcctctcaatcggaagccattttggcattaggtggcggatctgccattgactgtgcaaaagtgattgctgcaagggtaagtaacaaacgctcaatcaaaaagctctcaggacttttcaaagtatggcgaaccccggcgcctctgtttgttattccaaccacttctggcactggttctgaagtgacgatcgcggcagtggtttcagacccaaatacgcatttaaaaacgcccttgatggacccgaaactggtgccgattatggccgcgctcgatcccgacttgcttatcggtttgccagccaaaatcactgctgacacagggattgatgcgttaactcatgcggtagaagcctacatttcgcgcaatgcgacaccagaaactcaagcgtattcagtcgctgcaatcaaattgatatttcgttatttacccaaagcagtggctcaggggggagatattgaagctcgatacaaaatggccatggcgtcttactacgcagggctagcttttaccaaggcaagtcttgggtacgtgcatgctttcgcgcacaacttaggggcaaggtatggtttgccacatggcatggcaaatggattagcgttgctacccgtcttaaagttctctttgcctgaaattgaagatgagctaagaacgcttgccgagaagaccaatatcaatacgaaagacaacccaagtgctgagcatttcttggaacagattaaatccttgtacgatgctattggtatcgaaaaatgtacaacagccataaaacaagatgatatcgaagacttggttgacctgattctgaaagaggcacattggaattaccccgttcccaagtttatgaattctgaagaatgcgctcgcttattgatagaaataagcgcttag

SEQ ID NO: 39606 - protein, 396 aa, Vibrio parahaemolyticus RIMD 2210633
MLKHCLYRSYTKGLKIAAHVLPLPRPTLFSGSGSVSELLEAISDLGFRRLLLVTDEGLVRIGMVGKVLEQTQGLGLQVGVFSEVKPDPTYDQVEDGLRAYNASQSEAILALGGGSAIDCAKVIAARVSNKRSIKKLSGLFKVWRTPAPLFVIPTTSGTGSEVTIAAVVSDPNTHLKTPLMDPKLVPIMAALDPDLLIGLPAKITADTGIDALTHAVEAYISRNATPETQAYSVAAIKLIFRYLPKAVAQGGDIEARYKMAMASYYAGLAFTKASLGYVHAFAHNLGARYGLPHGMANGLALLPVLKFSLPEIEDELRTLAEKTNINTKDNPSAEHFLEQIKSLYDAIGIEKCTTAIKQDDIEDLVDLILKEAHWNYPVPKFMNSEECARLLIEISA

SEQ ID NO: 39607 - DNA, 2703 bp, Vibrio parahaemolyticus RIMD 2210633
  CDS (1)..(2703): transl_table=11
atgcctgtaactaatatggctgaactagatgcaatgattgctcgcgttaagaaagcgcaagaagagttcgctacttactctcaagagcaagtagacaaaatcttccgtgcagcgtctcttgcagctaaccaagctcgtatccctctagcgcaacaagcggtagaagaatctggtatgggtattgttgaagataaagtaatcaagaaccacttcgcttctgagtttatctacaacaaatacaaagacgaacaaacgtgtggcatcctagaagaggatgacaacctaggtactatgactatcgctgaacctgtaggtatcatctgcggtatcgtaccaacaactaaccctacatctacagcgatcttcaaatctctaatctctctgaagactcgtaacggtatcatcttctcaccacacccacgtgcgaaaaactctactaacgatgcagcgaaacttgttctagatgcagcagtagcagcaggtgcaccaaaagacatcatcggttggatcgaccaaccttcagttgagctatcaaacgctctaatgaaacacgatgacatcgcgcttatccttgcaactggtggtccaggcatggttaaagcagcttactcttctggtaagccagcaatcggtgtaggtgcaggtaacgttcctgtagttatcgatgaaacagcagacatcaaacgtgcagttgcttctgtactaatgtctaaaactttcgataacggcgtagtatgtgcttctgagcaggctgtaatcgtagttgacgaagtttacgacgaagtaaaagagcgttttgcttctcataaagctcacgttctatctaaaacagatgctgacaaagtacgtaaagtgcttctaatcgacggcgcgctaaacgcgaaaatcgttggtcaaccagctacagctatcgctgaaatggcgggtgttaaagttcctgcagatactaaagtgcttatcggtgaaggcctaggcaaagtatcttacgatgacgcatttgctcacgagaaactgtctccaactctaggtatgttccgtgctgacaacttcgaagatgcagttgctcaagcagtaacaatggtagagatcggcggtatcggtcacacatctggtctatacactaaccaagacgtgaatgcagaccgcatccgttacttcggtgacaagatgaagaccgctcgtatcctaatcaacatcccgactacacacggtggtatcggtgacttgtacaacttcaacgttgcaccttctctaactctaggttgtggttcatggggtggtaactctatctctgagaacgtaggtcctaagcacctaatcaacaagaaaactgtagcgaagcgagctgaaaacatgttgtggcataaactacctaagtcaatctacttccgtcgtggtagccttccaatcgcacttggcgacctagaaggtaagaaacgcgcattcctagtaactgaccgtttcctattcaacaacggttacgcagatgacgtagtaagcctactgaaagctcaaggcatggaagttcaaacattcttcgatgttgaagctgacccaacactatctgtagtagaaaaaggtgcggctcaaatggctagctaccaacctgacgttatcctagcgctaggtggtggttcaccaatggatgcagcgaaaatcatgtgggtaatgtacgagcacccagaaactcactttgaagaactagcaatgcgctttatggacatccgtaaacgtatctacaagttccctaaaatgggtaaaaaagctgagcttgtatgtatcactacaacttcaggtactggttcagaagttactccattcgcagttgttactgacgacaagactggtgctaagtacccactagctgactacgaaatcacgccaaacatggctatcgttgatgcgaacctagtaatgaacatgcctaagtctctaacagcgttcggtggttacgatgcagtaactcacgctctagaagcttatgtatctgttcttgcgaacgaatactctgacggtcaggctcttcaagcacttaagatgctaaaagaatacctaccatcaagctacgcgaatggtgcaaatgacccaatcgctcgtgagaaagttcacaacgcagcaactatcgctggtgtagcatttgcgaacgcattcctaggtgtttgtcactcaatggcgcacaaactaggtgcagagttccacttgccacacggcctagctaacgcactactaatctctaacgtggtacgttacaacgcgaacgacaacccaactaaacaaactgcgttctctcaatacgaccgtccacaagcacgtcgtcgttacgctgaagttgcagaccacctaggcctaagccaagctggtgaccgcactgctcagaagattgaacgtctactagcatggttggatgaactaaaagttaacctagacatcccaatgtctatccaagcggcaggtgttgctgaagctgacttcgtagcgaaactagacgagctagcggttgaagcgttcgatgaccaatgtactggtgcgaacccacgctaccctctaattagcgagctaaaagacgttctactagcttcttactacggtaaagctttcgttgaaggtgaaactttcgaaggtactacagtaatcaagaagaaagcagaccaagaagcagcgaaatctgctcctaaagctaaaaaagaaaaagctgacgcgtaa

SEQ ID NO: 39608 - protein, 900 aa, Vibrio parahaemolyticus RIMD 2210633
MPVTNMAELDAMIARVKKAQEEFATYSQEQVDKIFRAASLAANQARIPLAQQAVEESGMGIVEDKVIKNHFASEFIYNKYKDEQTCGILEEDDNLGTMTIAEPVGIICGIVPTTNPTSTAIFKSLISLKTRNGIIFSPHPRAKNSTNDAAKLVLDAAVAAGAPKDIIGWIDQPSVELSNALMKHDDIALILATGGPGMVKAAYSSGKPAIGVGAGNVPVVIDETADIKRAVASVLMSKTFDNGVVCASEQAVIVVDEVYDEVKERFASHKAHVLSKTDADKVRKVLLIDGALNAKIVGQPATAIAEMAGVKVPADTKVLIGEGLGKVSYDDAFAHEKLSPTLGMFRADNFEDAVAQAVTMVEIGGIGHTSGLYTNQDVNADRIRYFGDKMKTARILINIPTTHGGIGDLYNFNVAPSLTLGCGSWGGNSISENVGPKHLINKKTVAKRAENMLWHKLPKSIYFRRGSLPIALGDLEGKKRAFLVTDRFLFNNGYADDVVSLLKAQGMEVQTFFDVEADPTLSVVEKGAAQMASYQPDVILALGGGSPMDAAKIMWVMYEHPETHFEELAMRFMDIRKRIYKFPKMGKKAELVCITTTSGTGSEVTPFAVVTDDKTGAKYPLADYEITPNMAIVDANLVMNMPKSLTAFGGYDAVTHALEAYVSVLANEYSDGQALQALKMLKEYLPSSYANGANDPIAREKVHNAATIAGVAFANAFLGVCHSMAHKLGAEFHLPHGLANALLISNVVRYNANDNPTKQTAFSQYDRPQARRRYAEVADHLGLSQAGDRTAQKIERLLAWLDELKVNLDIPMSIQAAGVAEADFVAKLDELAVEAFDDQCTGANPRYPLISELKDVLLASYYGKAFVEGETFEGTTVIKKKADQEAAKSAPKAKKEKADA

SEQ ID NO: 39609 - DNA, 1149 bp, Vibrio parahaemolyticus RIMD 2210633
  CDS (1)..(1149): transl_table=11
atgacaagtacattttttatccctacggtaaacctaatgggcgctggctgcctaaaagacgcagcaaacagcatccaatctcaaggctttaagaaaggtttgatcgttacggataagatccttaaccaaatcggcgtagtaaaacaggttcaagatcttcttactgaacgcggcgtagcaaccgttgtgttcgatggcactcaaccaaaccctacaatcaccaacgttaatgacggcttagctcttctaaaagagaacgaatgtgacttcgtaatttcacttggtggtggctcaccacacgattgtgcaaaaggcatcgcactggttgcatctaacggcggaaaaatcggcgattacgaaggcgtggatcaatcagcaaaaccaatgctgccactaatcgcaatcaacaccacagcaggtactgcatctgaaatgacccgtttctgcatcatcactgatgaagagcgtcatattaagatggcaatcgttgataaacacacaacgcctcttatctctgtaaacgatccagaattaatgcttgctaagccagcgtctttgacggcagcaacaggtatggacgcgctaactcacgcgattgaagcgtacgtatctatcgcggcaacaccaatcactgacgctgttgcaatcaaagcgatcgagttaattcaagcacacctacgcaccgcagtgaaaaacggcgaaaacctagaagctcgtgagcaaatggcatacgcgcagttcatggctggcatggcgtttaacaacgcatctctaggttacgttcacgctatggcgcaccagctaggtggtttctacgacctaccacacggtgtatgtaacgcaatcttgcttcctcacgtacaacgctacaacgcgcaagtatgtccagagcgtctgcgtgatgtcgcgaaagcaatgggtgtggatgtagaaggtatgtcggcagaacatggtgctgcggcagcgatcgacgctatcgttgcgctagcaaaagacgttggtattccagctggtattaaagagcttggtgcgaagctagaagatatcccaacactagcagacaacgcattaaaagacgcgtgtggtttcactaacccgaaacaagcaactcacgaagagatttctgcaatcttcgaagcggcaatgtaa

SEQ ID NO: 39610 - protein, 382 aa, Vibrio parahaemolyticus RIMD 2210633
MTSTFFIPTVNLMGAGCLKDAANSIQSQGFKKGLIVTDKILNQIGVVKQVQDLLTERGVATVVFDGTQPNPTITNVNDGLALLKENECDFVISLGGGSPHDCAKGIALVASNGGKIGDYEGVDQSAKPMLPLIAINTTAGTASEMTRFCIITDEERHIKMAIVDKHTTPLISVNDPELMLAKPASLTAATGMDALTHAIEAYVSIAATPITDAVAIKAIELIQAHLRTAVKNGENLEAREQMAYAQFMAGMAFNNASLGYVHAMAHQLGGFYDLPHGVCNAILLPHVQRYNAQVCPERLRDVAKAMGVDVEGMSAEHGAAAAIDAIVALAKDVGIPAGIKELGAKLEDIPTLADNALKDACGFTNPKQATHEEISAIFEAAM

SEQ ID NO: 39611 - DNA, 2643 bp, Streptococcus pyogenes SSI-1
  CDS (1)..(2643): transl_table=11
atgactgaaggacataatactgttgaaacaacctctgtttctgtgacaattgatgctcttgttcaaaaaggtttagctgctcttgcagagatgcgtaagcttgaccaagaacaagttgattatatcgtagccaaagcttctgttgctgctttggatgctcacggtgaacttgctaaacatgcttatgaagaaacaggtcgcggtgtctttgaagataaagcaacaaaaaatctatttgcttgtgagcatgtggttaataacatgcgccatcaaaaaacagtaggaattattgaagaagatgatgtgacaggtttgacattaattgctgagccggttggtgttatctgtgggattacaccaacaactaacccaacttcaacagctatctttaaatctttgatctcgttaaaaacacgtaatccaattatttttgcctttcacccatcagcacaagaatcatcagcgcatgccgctcgtattgttcgtgatgctgctattgccgctggtgctcctgaaaattgtgtgcagtgggttgaaacaccatcacttgaagcaacaaatgctttgatgaatcatgacggcattgccactatccttgcgacaggtggaaatgcaatggttaaagcggcatactcatgtgggaaacctgcccttggggtaggtgctggtaacgttccagcttatgttgaaaaatctgctaacatccgccaagccgctcatgatattgtgatgtctaaatcatttgataacggtatggtctgtgcgtctgaacaagctgttatcgtggacaaagaaatctatgacgattttgtagcagaattcaaatcttaccatacttattttgtaaataaaaaagaaaaagcccttcttgaagaattctgttttggtgccaaagcaaatagcaaaaactgtgctggtgcaaaattaaatccaaatattgtaggaaaaccagctacttggatttcagcacaagctggatttactgttccagaaggaaccaatattcttgctgcagaatgtaaagaagtttcagaaaatgagcctttaacacgtgaaaaattatctccagtcattgctgttttgaaatctgaatcacgtgaagacggtgttgaaaaagctcgtcaaatggttgaatttaatggactcggtcactcagctgccattcatacagcagatgcagagttggcaaaagaatttggaactagaatccgtgctatccgcgtcatctggaattcaccttctacatttggtggtatcggggatgtttacaatgctttcttgccatcattgactcttggttgtggttcgtatggacgtaacgcagttggtgataacgttagtgctataaatctcttgaacatcaaaaaagtaggaagacgtagaaataatatgcaatggtttaaagttccttcaaaaacatacttcgaacgtgattcaattcaatatttgcaaaaatgtcgtgacgttgaacgtgtcatgattgttacagatcacgctatggttgagcttggtttcttggatcgtatcattgaacaacttgatcttcgtcgcaataaagttgtttatcagatctttgctgaagtagaaccagatccagacattacaactgttatgaaaggtactgaattaatgcgtaccttcaaaccagacaccattattgcccttggcgggggatctcctatggatgcagccaaagttatgtggctcttttatgaacaaccagaagttgatttccatgacctcgttcaaaaattcatggatatccgcaaacgtgcgttcaaattcccagaacttggtaagaaaacaaaatttgttgctatcccaacaacttctggaacaggttcagaggtgacaccatttgccgttatctctgacaaagcaaataatcgtaaatatccaatcgctgattactcattaacaccaactgtagccattgttgacccagctttggtattgactgttccaggctttattgctgctgatactggtatggacgttttgacacacgcaaccgaagcttacgtgtcacaaatggccaatgactttacggatggtttagctcttcaagccattaaaattgtttttgataatcttgaaaaatcagttaaaacagccgattttgaagcacgtgaaaagatgcacaatgcgtcaactatggcaggtatggctttcgccaatgcattcttaggtatttctcactcaatggcgcataaaattggcgcacaattccataccgtacacggacgtacaaatgcaattcttttgccgtatgttatccgctataatggaactcgtccagctaaaacagcaacatggcctaagtataattactaccgtgcggatgaaaaataccaagacattgcgaaattgttagggctttcagcttctacaccagaagaagcagtggaatcttatgcgaaagctgtttatgatctgggttgccgagttggtattcaaatgaacttcaaagctcaaggtatcgacgaaaacgaatggaaagaacattctcgtgaattggcttaccttgcttatgaagaccaatgttcacctgctaacccacgtcttccaatggttgatcacatgcaagaaattattgaagatgcttactatggttatgctgaacgtccaggacgacgtaagtga

SEQ ID NO: 39612 - protein, 880 aa, Streptococcus pyogenes SSI-1
MTEGHNTVETTSVSVTIDALVQKGLAALAEMRKLDQEQVDYIVAKASVAALDAHGELAKHAYEETGRGVFEDKATKNLFACEHVVNNMRHQKTVGIIEEDDVTGLTLIAEPVGVICGITPTTNPTSTAIFKSLISLKTRNPIIFAFHPSAQESSAHAARIVRDAAIAAGAPENCVQWVETPSLEATNALMNHDGIATILATGGNAMVKAAYSCGKPALGVGAGNVPAYVEKSANIRQAAHDIVMSKSFDNGMVCASEQAVIVDKEIYDDFVAEFKSYHTYFVNKKEKALLEEFCFGAKANSKNCAGAKLNPNIVGKPATWISAQAGFTVPEGTNILAAECKEVSENEPLTREKLSPVIAVLKSESREDGVEKARQMVEFNGLGHSAAIHTADAELAKEFGTRIRAIRVIWNSPSTFGGIGDVYNAFLPSLTLGCGSYGRNAVGDNVSAINLLNIKKVGRRRNNMQWFKVPSKTYFERDSIQYLQKCRDVERVMIVTDHAMVELGFLDRIIEQLDLRRNKVVYQIFAEVEPDPDITTVMKGTELMRTFKPDTIIALGGGSPMDAAKVMWLFYEQPEVDFHDLVQKFMDIRKRAFKFPELGKKTKFVAIPTTSGTGSEVTPFAVISDKANNRKYPIADYSLTPTVAIVDPALVLTVPGFIAADTGMDVLTHATEAYVSQMANDFTDGLALQAIKIVFDNLEKSVKTADFEAREKMHNASTMAGMAFANAFLGISHSMAHKIGAQFHTVHGRTNAILLPYVIRYNGTRPAKTATWPKYNYYRADEKYQDIAKLLGLSASTPEEAVESYAKAVYDLGCRVGIQMNFKAQGIDENEWKEHSRELAYLAYEDQCSPANPRLPMVDHMQEIIEDAYYGYAERPGRRK

SEQ ID NO: 39613 - DNA, 1188 bp, Salmonella enterica subsp. enterica serovar Typhi Ty2
  CDS (1)..(1188): transl_table=11
atgcaagctgaactacagacggcgctgtttcaggcattcaacaccctgaatctgcaacgggtgaaaacgttcagcgtaccgccggtcacgctgtgcgggcttggggcgctcggcgcctgcgggcaggaagcgcaagcgcggggcgtaagccatttgtttgtgatggtcgacagcttcctgcatcaggcgggaatgaccgcgccgctggcacgcagcctggcgatgaaaggcgtggcgatgacggtctggccgtgtccgccaggcgagccgtgcatcaccgatgtctgcgcggcggtggcgcaactgcgtgaggcggcgtgcgacggcgtagtggcctttggcggcggttcggtgttggacgcggcgaaagcggtcgccctgctggtgactaaccctgaccagacgctgagcgccatgaccgagcgcagtacattacgcccgcgtctgccgctgattgcggtgccgaccaccgccggaaccggttcagaaaccaccaacgtgacggtgattatcgacgcggtcagcgggcgcaagcaggtgctggcacacgcgtcactaatgccggatgtggcgattcttgatgctgccgtgaccgaaggcgttccgccaaatgtgacggcgatgaccggtatcgatgcgctgacgcatgcgattgaggcctacagcgcgctcaacgccacgccgtttaccgacagcctggcgattggcgcgatagcgatgattggcaaatcgctgccgaaggccgtcggctatgggcaggatctggcggcgcgtgaaaatatgttgctggcctcctgtatggcgggaatggccttttccagcgccggtctggggctgtgtcatgcgatggcgcaccagccaggggcggcgctgcatattccgcacggccaggccaacgccatgctgctgccgacagtcatgggctttaaccggatggtatgccgcgagcgcttcagtcaaatcggtcgggcgttaaccaataagaaatcggacgatcgcgatgcgattgcggcggtgtgcgagctgattgccgaagtggggcagagcaaacggctggctgacgctggcgccaaacccgaacactacagcgcgtgggcgcaagccgcgctggaggatatttgtctgcgcagtaacccacgcaccgccacacaggcacagattatcgacctgtacgcggctgccgggtaa

SEQ ID NO: 39614 - protein, 395 aa, Salmonella enterica subsp. enterica serovar Typhi Ty2
MQAELQTALFQAFNTLNLQRVKTFSVPPVTLCGLGALGACGQEAQARGVSHLFVMVDSFLHQAGMTAPLARSLAMKGVAMTVWPCPPGEPCITDVCAAVAQLREAACDGVVAFGGGSVLDAAKAVALLVTNPDQTLSAMTERSTLRPRLPLIAVPTTAGTGSETTNVTVIIDAVSGRKQVLAHASLMPDVAILDAAVTEGVPPNVTAMTGIDALTHAIEAYSALNATPFTDSLAIGAIAMIGKSLPKAVGYGQDLAARENMLLASCMAGMAFSSAGLGLCHAMAHQPGAALHIPHGQANAMLLPTVMGFNRMVCRERFSQIGRALTNKKSDDRDAIAAVCELIAEVGQSKRLADAGAKPEHYSAWAQAALEDICLRSNPRTATQAQIIDLYAAAG

SEQ ID NO: 39615 - DNA, 1113 bp, Salmonella enterica subsp. enterica serovar Typhi Ty2
  CDS (1)..(1113): transl_table=11
atgaacaccttctcactacaaacgcggttgtacagcggtcagggcagcctggcggtgctcaagcgctttaccaataagcacatctggataatctgcgatggctttctggcacgctcgccgctgctggataccctgtgtaacgcgctgcccgcagataaccgcatcagcgtctttagcgagataacgccggaccccaccatccataccgtggtgcagggcattgcgcaaatgcaggccctgcagccgcaggtggtgattggttttggcggcggctcggcaatggacgcggcgaaagcgattgtctggtttagccaacaaagcggcatcaatatcgaaacctgcgtggcgatcccgaccaccagcggcactggttcggaagtcaccagcgcctgcgtaattagcgatccggataaaggcatcaagtatccgctgttcaacaatgcgctgtatccggatatggcgatcctcgacccggagctggtggtcagcgtaccgccgcagattaccgccaacaccggcatggacgtgctgacccacgccctggaggcctgggtgtcaccgcacgccagcgactttaccgacgcgctggcggaaaaagccgccaaactggtgttccagtatctgccgacggcggtggaaaaaggcgactgcgtggcgacgcgaggaaaaatgcataacgcctcaacgctcgccgggatggccttcagccaggcggggctggggcttaaccacgcgatagcccaccagcttggcggacagtttcatcttccgcatggcctggccaatgcgctgctgctcacgacggtgatccgttttaacgccggagttccgcgcgcagccaaacgctacgcgcggctggccaaagcctgcggtttttgcccggcagaagccaacgatgtcacggcgatcaatgcgctgattcagcaaatcgaactgcttaagcaacgctgtgcccttccctcactggccgttgcgctaaaagaaggaagatccgacttttccgcacgtattccagcgatggtgcaggccgcgctggcggatgtcacgttgcgcaccaacccgcgcccggccagcgccgaggaaattcgtgaactgctggaggaactgctatga

SEQ ID NO: 39616 - protein, 370 aa, Salmonella enterica subsp. enterica serovar Typhi Ty2
MNTFSLQTRLYSGQGSLAVLKRFTNKHIWIICDGFLARSPLLDTLCNALPADNRISVFSEITPDPTIHTVVQGIAQMQALQPQVVIGFGGGSAMDAAKAIVWFSQQSGINIETCVAIPTTSGTGSEVTSACVISDPDKGIKYPLFNNALYPDMAILDPELVVSVPPQITANTGMDVLTHALEAWVSPHASDFTDALAEKAAKLVFQYLPTAVEKGDCVATRGKMHNASTLAGMAFSQAGLGLNHAIAHQLGGQFHLPHGLANALLLTTVIRFNAGVPRAAKRYARLAKACGFCPAEANDVTAINALIQQIELLKQRCALPSLAVALKEGRSDFSARIPAMVQAALADVTLRTNPRPASAEEIRELLEELL

SEQ ID NO: 39617 - DNA, 2679 bp, Salmonella enterica subsp. enterica serovar Typhi Ty2
  CDS (1)..(2679): transl_table=11
atggctgttactaatgtcgctgaacttaacgcactcgtagagcgtgtaaaaaaagcccagcgtgaatatgccagtttcactcaagaacaggtcgacaaaatcttccgcgccgccgctctggcagccgctgatgcccgcattccgctggccaaaatggccgtcgccgaatcaggtatgggtatcgtggaagacaaagtgattaaaaaccacttcgcttctgaatatatttacaatgcctataaagatgaaaaaacctgcggcgtgctgtcagaagacgacaccttcgggaccatcaccattgctgaacctatcggcattatttgcggtatcgttccaaccactaacccgacctctactgcgatcttcaaatcgctgattagcctgaagacccgtaacgccatcatcttttctccgcatccgcgcgctaaagaagcaactaacaaagcggcagacatcgttctgcaagcggctatcgctgccggcgcaccgaaagatctgattggctggatcgatcaaccttccgtagaactgtctaatgcgctgatgcaccacccggatattaacctgatcctcgccactggcggtccaggcatggttaaagctgcatacagctccggtaaaccggcaatcggcgtaggcgcaggtaacaccccggttgtcattgatgaaaccgctgatatcaaacgcgctgtggcgtctgttctgatgtctaaaaccttcgataacggcgtaatctgtgcttctgaacagtctgttgtcgttgttgattccgtctatgatgccgttcgcgaacgtttcgccagccacggcggctacatgctgcagggccaggagctgaaagcggttcaaaacgttattctgaaaaatggcgctctgaacgccgctatcgtcggtcagccagcctacaaaatcgctgaactggcaggcttctccgtaccagaaaccaccaagattctgatcggtgaagttacggtcgttgacgaaagcgaaccgttcgcacacgaaaaactgtctccgactctagcgatgtaccgtgcgaaagatttcgaagaagcggtagaaaaagcagaaaaactggtcgctatgggcggtatcggtcacacctcctgcctgtacactgaccaggataaccagccagaacgcgttgcttacttcggtcagatgatgaaaaccgcgcgtatcctgatcaacaccccggcctctcagggtggtatcggtgacctgtacaacttcaaactcgcaccttccctgacgttgggttgtggttcctggggtggtaactccatctctgaaaacgttggtccgaaacacctgatcaacaagaaaaccgttgctaagcgagctgaaaacatgttgtggcacaaacttccgaaatctatctacttccgccgtggctctctgcccatcgcgctggatgaagtgattactgatggccacaaacgtgcgctcatcgtgactgaccgcttcctgttcaacaacggctatgcagaccagatcacctctgtgctgaaagcggctggcgttgaaaccgaagtcttcttcgaagttgaagcagacccgacgctttccgttgttcgcaaaggcgctgagctggctaactccttcaaaccggacgtgatcatcgcgctgggcggcggttccccgatggacgccgcgaaaatcatgtgggtcatgtacgaacatccggaaactcacttcgaagaactggcgctgcgctttatggacatccgtaaacgtatctacaagttcccgaaaatgggcgtgaaagcgaaaatgatcgccgtcaccaccacttccggtaccggttctgaagtcacaccgtttgcggttgtgaccgacaatgcaaccggtcagaaatatccgctggctgactatgccctgaccccggatatggcgattgtcgatgccaacctggtgatggatatgccgaagtccctgtgtgcgttcggtggtctggatgcggtaactcacgccctggaagcttacgtttccgtactggcttctgagttctctgacggtcaggctctgcaggctctgaaactgctgaaagaaaacctgccggcgtcttaccacgaagggtctaaaaacccggttgcgcgtgaacgtgttcacagtgcagcgactatcgccggtatcgcgtttgccaacgccttcctcggtgtatgtcactccatggcgcacaaactgggctctcagttccacattccgcacggtctggcgaacgccctgctgatttgtaacgttatccgctacaacgcgaatgacaacccgaccaagcagaccgctttcagccagtacgatcgtccgcaggcacgccgtcgttacgctgaaattgctgaccacctgggcctgagcgcgccgggcgaccgtaccgccgctaagattgaaaaactgctggcatggctggaaagcattaaagctgagctgggcattcctaagtctatacgtgaagcaggcgtgcaggaagctgacttcctggcacacgttgacaaactgtctgaagatgccttcgatgaccagtgcaccggcgctaacccgcgttatccgctgatctccgaactgaaacagattctgctggatacctactacggtcgtgatttcaccgaaggtgaagttgcagcgaagaaagacgtcgttgccgcaccgaaagcagagaaaaaagcgaaaaaatccgcttaa

SEQ ID NO: 39618 - protein, 892 aa, Salmonella enterica subsp. enterica serovar Typhi Ty2
MAVTNVAELNALVERVKKAQREYASFTQEQVDKIFRAAALAAADARIPLAKMAVAESGMGIVEDKVIKNHFASEYIYNAYKDEKTCGVLSEDDTFGTITIAEPIGIICGIVPTTNPTSTAIFKSLISLKTRNAIIFSPHPRAKEATNKAADIVLQAAIAAGAPKDLIGWIDQPSVELSNALMHHPDINLILATGGPGMVKAAYSSGKPAIGVGAGNTPVVIDETADIKRAVASVLMSKTFDNGVICASEQSVVVVDSVYDAVRERFASHGGYMLQGQELKAVQNVILKNGALNAAIVGQPAYKIAELAGFSVPETTKILIGEVTVVDESEPFAHEKLSPTLAMYRAKDFEEAVEKAEKLVAMGGIGHTSCLYTDQDNQPERVAYFGQMMKTARILINTPASQGGIGDLYNFKLAPSLTLGCGSWGGNSISENVGPKHLINKKTVAKRAENMLWHKLPKSIYFRRGSLPIALDEVITDGHKRALIVTDRFLFNNGYADQITSVLKAAGVETEVFFEVEADPTLSVVRKGAELANSFKPDVIIALGGGSPMDAAKIMWVMYEHPETHFEELALRFMDIRKRIYKFPKMGVKAKMIAVTTTSGTGSEVTPFAVVTDNATGQKYPLADYALTPDMAIVDANLVMDMPKSLCAFGGLDAVTHALEAYVSVLASEFSDGQALQALKLLKENLPASYHEGSKNPVARERVHSAATIAGIAFANAFLGVCHSMAHKLGSQFHIPHGLANALLICNVIRYNANDNPTKQTAFSQYDRPQARRRYAEIADHLGLSAPGDRTAAKIEKLLAWLESIKAELGIPKSIREAGVQEADFLAHVDKLSEDAFDDQCTGANPRYPLISELKQILLDTYYGRDFTEGEVAAKKDVVAAPKAEKKAKKSA

SEQ ID NO: 39619 - DNA, 1149 bp, Salmonella enterica subsp. enterica serovar Typhi Ty2
  CDS (1)..(1149): transl_table=11
atggcgaacagaatgattctgaatgaaacggcatggtttggccggggagcggtggacgcattaaccgatgaggtgacgcgccgcggttatcataaggcgctgattgttaccgataaaacgctggtgcaatgcggtgtggtcgataaggttacaagcagaatggatgccgcagggctggcgtgggagatctatgcgggcgtgatccctaatcctacgatttccgttgtccaggaagggcttaaggtctttacccaaagtggcgcggactatctcatcgccattggcggcggttctccgcaggatacctgcaaagcggtcggtattatcagtaacaatccggaatttgccgatgtgcgcagtctggaagggctatcgccgacccgtaaacccagcgtgccgattatggcgatcccgacaacggcgggaaccgcggcggaagtcactatcaattatgtgattaccgatgaagagaaacggcgcaaattcgtttgtgtcgatccgcatgatattccgcaggcggcatttatcgatgccgatatgatggacggtatgccgcccgcgctgaaagcggcaacgggcgtggatgcgctaacccatgctattgaaggctatattacccgggccgcatgggcgctgacggatgcattacatatcaaagccattgagattattgctggcgcgctgcgcggcgccgtagccggagaaaaagaggccggtgaggcgatggcgctggggcaatacgttgccgggatggggttttccaatgtggggctgggactggtgcatgggatggcgcatccgttgggcgcgttttacaacacgccgcacggcgtcgcgaatgctattttgctcccgcatgtgatgcgtttcaatgccgggtctaccaacgagaaattccgtgatatcgcccgggcgatgggggtgaaggtagaaggattgagccttgaagaggcgcgtaatgccgcagtggaagccgtatttacgctaaatcgcgatgtgggaattccgctgcatttgcgtgatgtcggcgttcgaaaagaggatatcccggcgctggcgcaggcggcgttcgatgatgtctgtacgggcggcaatccgcgtgaagcgagtctggcggacattgtcgaactgtatcataccgcctggtaa

SEQ ID NO: 39620 - protein, 382 aa, Salmonella enterica subsp. enterica serovar Typhi Ty2
MANRMILNETAWFGRGAVDALTDEVTRRGYHKALIVTDKTLVQCGVVDKVTSRMDAAGLAWEIYAGVIPNPTISVVQEGLKVFTQSGADYLIAIGGGSPQDTCKAVGIISNNPEFADVRSLEGLSPTRKPSVPIMAIPTTAGTAAEVTINYVITDEEKRRKFVCVDPHDIPQAAFIDADMMDGMPPALKAATGVDALTHAIEGYITRAAWALTDALHIKAIEIIAGALRGAVAGEKEAGEAMALGQYVAGMGFSNVGLGLVHGMAHPLGAFYNTPHGVANAILLPHVMRFNAGSTNEKFRDIARAMGVKVEGLSLEEARNAAVEAVFTLNRDVGIPLHLRDVGVRKEDIPALAQAAFDDVCTGGNPREASLADIVELYHTAW

SEQ ID NO: 39621 - DNA, 1149 bp, Salmonella enterica subsp. enterica serovar Typhi Ty2
  CDS (1)..(1149): transl_table=11
atgagctttatgttggcactgccaaaaattagcctgcatggcgctggagcgattgccgatatggtgaacctcgtggcgaataagcaatggggcaaagcgctgatcgttaccgatggtcaactggtaaagctgggcctgctggatagcctgtttagcgcactggatgaacatcaaatgtcttaccacctgtttgatgaggtgttcccaaacccgacagaagagctggtgcagaaaggttttgcggcgtatcagagcgcagaatgtgactacattatcgccttcggcggcggcagcccgatcgataccgcaaaagcggtgaaaattctgaccgccaacccaggtccatctaccgcctactccggcgtcggcaaagtgaaaaacgccggcgtaccgctggtagcgattaacactacggcaggtaccgcggcagagatgaccagcaacgcggtgattatcgactctgcccgtaaggtcaaagaggtgatcatcgacccgaatatcatcccggatattgccgtggatgacgccagcgtcatgctggaaatcccggcgtctgtgaccgccgcaaccggcatggatgccctgacccatgcggtggaagcctatgtctccgttggcgcgcatccgctcaccgacgctaacgcgctggaagcgattcgcttaatcaatgtgtggctaccgaaagcggttgacgatggtcataacctcgaagcccgtgagcaaatggcattcggccagtacctggcgggtatggcgttcaacagcgccggtttggggctggttcacgcgctggcgcaccagccgggcgcaacccacaacctgccgcacggcgtctgcaacgctatcctgctgccaattgtcgagaactttaaccgtccgaacgccgtcgcgcgttttgcccgcatcgcacaggcgatgggcgtggagacgcgcggtatgtctgacgaagtcgcaagtcaggaagcgattaacgctatccgtacgctgagcaaacgcgtcggcattccagaaggtttcagcaagctgggcgtcacaaaagaagatatcgaaggctggctggataaagccctcgccgacccgtgcgcgccgtgtaacccgcgcaccgccagccgcgatgaagttcgcgagctgtacctggaggcgttatga

SEQ ID NO: 39622 - protein, 382 aa, Salmonella enterica subsp. enterica serovar Typhi Ty2
MSFMLALPKISLHGAGAIADMVNLVANKQWGKALIVTDGQLVKLGLLDSLFSALDEHQMSYHLFDEVFPNPTEELVQKGFAAYQSAECDYIIAFGGGSPIDTAKAVKILTANPGPSTAYSGVGKVKNAGVPLVAINTTAGTAAEMTSNAVIIDSARKVKEVIIDPNIIPDIAVDDASVMLEIPASVTAATGMDALTHAVEAYVSVGAHPLTDANALEAIRLINVWLPKAVDDGHNLEAREQMAFGQYLAGMAFNSAGLGLVHALAHQPGATHNLPHGVCNAILLPIVENFNRPNAVARFARIAQAMGVETRGMSDEVASQEAINAIRTLSKRVGIPEGFSKLGVTKEDIEGWLDKALADPCAPCNPRTASRDEVRELYLEAL

SEQ ID NO: 39623 - DNA, 1155 bp, Bacteroides thetaiotaomicron VPI-5482
  CDS (1)..(1155): transl_table=11
atgaatcgcattattctgaatgagacctcttatttcggtgcaggatgccggagtgtaattgctgtggaagcagccagacgtggctttaagaaagcctttttcgtaacagataaagaccttatcaaatttggtgttgcagccgaaatcattaaagtatttgatgacaatcatattccgtatgaactttatagtgatgtaaaggctaaccctaccattgctaatgtgcagaatggtgtggctgcctataaggcttccggtgcagactttatcgtagctttgggtggtggttcttctatcgacacggcaaaggggattggtattgttgtgaataacccggattttgccgatgtgaaatctctggaaggtgtggctgataccaaacataaggctgttcctacctttgcattgcctactactgccggaactgctgctgaagtgactatcaattatgtgattatcgacgaagatgcacgcaagaaaatggtatgtgtagacccgaacgatatccctgctgtagctattgtagatccggaactgatgtattccatgccgaaaggactgactgccgctacaggtatggacgcgctgactcacgccatcgaaagttatataactccgggtgcatgggctatgagcgatatgttcgaactgaaagcgattgaaatgattgctcagaacttgaaagcagcggtagataacggtaaagacacagttgcccgcgaagcaatgtcgcaggctcaatatattgccggcatgggattctccaatgtaggtttgggaatcgtacattccatggctcacccgttgggcgctttctatgatactcctcacggcgttgccaatgcgctgttgttaccttatgtcatggagtacaatgctgagtctccggctgctccgaaatatatccatattgccaaggcgatgggcgtcaatacagacggtatgacagaaactgaaggtgtgaaggcggctatcgaggcagtgaaagcgctttctctgagtatcggtatcccacagaaattgcatgaaatcaatgtgaaggaagaggatattccggcattggcggtggctgcattcaatgacgtttgcacaggtggtaatccgcgtcctacgtcagtagcggagattgaagtattatatcggaaagcattctga

SEQ ID NO: 39624 - protein, 384 aa, Bacteroides thetaiotaomicron VPI-5482
MNRIILNETSYFGAGCRSVIAVEAARRGFKKAFFVTDKDLIKFGVAAEIIKVFDDNHIPYELYSDVKANPTIANVQNGVAAYKASGADFIVALGGGSSIDTAKGIGIVVNNPDFADVKSLEGVADTKHKAVPTFALPTTAGTAAEVTINYVIIDEDARKKMVCVDPNDIPAVAIVDPELMYSMPKGLTAATGMDALTHAIESYITPGAWAMSDMFELKAIEMIAQNLKAAVDNGKDTVAREAMSQAQYIAGMGFSNVGLGIVHSMAHPLGAFYDTPHGVANALLLPYVMEYNAESPAAPKYIHIAKAMGVNTDGMTETEGVKAAIEAVKALSLSIGIPQKLHEINVKEEDIPALAVAAFNDVCTGGNPRPTSVAEIEVLYRKAF

SEQ ID NO: 39625 - DNA, 1131 bp, Enterococcus faecalis V583
  CDS (1)..(1131): transl_table=11
atgaaaacaattcatttccctaccgaactatgggtaggagaaggcgcattagccaatttggaaacacttcatgatagacgtgttttcattgtcacagatccattcatggttgactctggatttgtgaatgaagtgacaaagcatttaacaaaaagtgaatggcaaatttttagtgatatcatccccgatccaccaattgataagattgctgcgggaattaagcatttagcgacatttcaaggagatacgatattagctttaggtgggggatccgctattgatgcggccaaagcaatgaaattttttggcaaacgtactttgcaaactcagattgctgagtttattgcggttcctacaactagtggaactggttcagaagttacgaatttttcagtgattacggttgctgaaactggcaccaaaatcccgcttgtaacggatgaaattcaaccagaaattgcgattttagatacaaatttagtgatgagtgtcccaccaaaaatcacagcggatacaggaatggacgtcttaacgcatgttattgaagcgtatgtttcaacagaagcaaatccgatttcagatgcgttgtgcgaaaaagtcgttcgcttagtattcgacaatttagaaatagcctttaatgagggtagcaaccaacaagcccgtgaaaatatgcatttagcttcatgtatggcagggatggcgtttaatgttacttcgttaggcttgaatcacggtattgctcatgcggccggtgcacgtttacatgtgccacatggacgaatgaatgcaatgctcttacctgaagtcattgcatataacagtggcttagcgaatggcaaagtcaccaacgaaccaacagctaaacgttatgcgcagttagcaaattgtctaaatgatacacagacaaccaatgcacggattggtgttcaacaatttattcgacaaatcaagcaactccgtcaaaaattaaacatgcctgccacttttagtgactatggtttaccaaaagaagaagtccaggctgcaatcccaaaaatagctgaaggcgcattgatggatggctgcaccaaaacaaatcctgtccaaccaacagcagcagaagtgacaaaaattttaaattctatcttataa

SEQ ID NO: 39626 - protein, 376 aa, Enterococcus faecalis V583
MKTIHFPTELWVGEGALANLETLHDRRVFIVTDPFMVDSGFVNEVTKHLTKSEWQIFSDIIPDPPIDKIAAGIKHLATFQGDTILALGGGSAIDAAKAMKFFGKRTLQTQIAEFIAVPTTSGTGSEVTNFSVITVAETGTKIPLVTDEIQPEIAILDTNLVMSVPPKITADTGMDVLTHVIEAYVSTEANPISDALCEKVVRLVFDNLEIAFNEGSNQQARENMHLASCMAGMAFNVTSLGLNHGIAHAAGARLHVPHGRMNAMLLPEVIAYNSGLANGKVTNEPTAKRYAQLANCLNDTQTTNARIGVQQFIRQIKQLRQKLNMPATFSDYGLPKEEVQAAIPKIAEGALMDGCTKTNPVQPTAAEVTKILNSIL

SEQ ID NO: 39627 - DNA, 1203 bp, Bacillus cereus ATCC 14579
  CDS (1)..(1203): transl_table=11
ttgcaagaggtttctgagtttcgtatgccaaagtcggtattatatggaaggaattcgcttgaaaaactgggagaacaatcaaaaaagttagggaaaagagcttttatagttactgatacaattatggagaaattaggatatgttgaaaagtgtatgcaacaactaaataagaaaggtattactgttagtacatataataaagtggatgctgagcctacaaatatacacgtattagaagcgttatctctttgtaaagaggaaaagtgcgattttattatcggtattggtggtggaagttgtattgatgctgcgaaagcggtagcggttttatatacaaatggtggagaagttgaggattatgtccaaaaggatattaaaatagaaaacaagccactaccacttattgcaattccaacaacttctggtactggatcggaagttacaagtgtagcagtaattacgaataaaaaaacagatgtaaaaatgatgatgaagcatcctagttttataccgaaagtagcaattatagatccagttttgacaagttcgttacccccacaaattacggcagcaacaggaatagatgcgttatgtcatgcgattgaagcttatatttctaaattttcacaaccacttacagatgtacttgctctttcagctattgaaagtattatgaaatatttacgtatagcatatgaagatggacgtaatatggaggcaagagaagcgatgatgattgcttctttacaagctggaattgcattttctaatgcatcagttacattagttcatggaatgtcaaggccagtgggagcattatttcatgtaccgcatggaatatcaaatgccatactattacctacagtgttagagtttacaaaaacaagtgcaatgaaaaggttagcaaaaattggacgtagtttaaataaggatttgtattcgaattctgatgaggaagtagcagactacacacttggtgaaataaaaaaactttgctttgatcttcgtattccaaatttaaaagaatacggaatcgatgaaattgaatttgaaaatgctatttctaaaatggcatcagatgcaattgaaagtggtagcccagctaataacccacgtgttccatcatatgatgaaatcaaagagctgtatcgagagtgttttaattataagtataaagaatttataaaaacatcagattgttaa

SEQ ID NO: 39628 - protein, 400 aa, Bacillus cereus ATCC 14579
MQEVSEFRMPKSVLYGRNSLEKLGEQSKKLGKRAFIVTDTIMEKLGYVEKCMQQLNKKGITVSTYNKVDAEPTNIHVLEALSLCKEEKCDFIIGIGGGSCIDAAKAVAVLYTNGGEVEDYVQKDIKIENKPLPLIAIPTTSGTGSEVTSVAVITNKKTDVKMMMKHPSFIPKVAIIDPVLTSSLPPQITAATGIDALCHAIEAYISKFSQPLTDVLALSAIESIMKYLRIAYEDGRNMEAREAMMIASLQAGIAFSNASVTLVHGMSRPVGALFHVPHGISNAILLPTVLEFTKTSAMKRLAKIGRSLNKDLYSNSDEEVADYTLGEIKKLCFDLRIPNLKEYGIDEIEFENAISKMASDAIESGSPANNPRVPSYDEIKELYRECFNYKYKEFIKTSDC

SEQ ID NO: 39629 - DNA, 2604 bp, Bacillus cereus ATCC 14579
  CDS (1)..(2604): transl_table=11
atggtagtcaaagagaaagttgtaaatgaaatgcaggaagtaaaaaagatgattgatacactagtaaataatggtcaacaagctttacaagcattagaaagttttacacaagaggaaattgacaacattgttcatgaaatggcattagcaggtgttgatcaacatatgccgctagcaaaattggcagttgaagaaactggccgtggtgtatatgaagacaaatgcattaaaaatatttttgccactgaatatatttggcatagtataaaacaagataaaacggtaggaattattcacgaagattctcatgaagaaataatagaaatcgcggaacctgtcggtgtagtagctggggtaacaccagtaacgaatccaacgtcgacaacaatgtttaaagcgttaattgcgataaaaacaagaaatccaattattttcgcgtttcatccttccgcacaaaaatgttctgtggcagcggcgaaaacagtatatgatgcagcgatgaaagctggtgcaccaaaacactgtattcaatggattgaaagaccgtctgttgaagcgacgaaacaattaatgaaccatgatggtgtagcactcgttctagcaactggaggcgctggtatggtgaaatcagcttactctactggaaaaccagcgttaggcgttgggcctggtaatgtaccgtgttatatagaaaaatcagcacatgtaaaacgagctgttaatgatttaattttatcgaaaacatttgataacggtatgatttgtgcatcggaacaagcaatcattgtcgataaagaaatctatgatgatgttaaaacagaaatgattgaaaacaattgttactttgtaacagaagaagaaagaaaaaaattagaaaagcttgttataaatgaaaatacatgtgcagtaaatagtgatattgtagggaaatcagcacagtatattgccgatttagttgggattactgttcctgaacatacaaaaatgcttgtagctgaaattcaaggtatcggagcagcatatccgttatctcgtgagaaactgagtccagtattagcttgtgtgaaggcgaattcattagaagaaggatttacatattgcgaagaaatgttgaacctaggtggtttaggacattcagcagttatccattctacaaataaagatgtgcaaaagcaatttgggttacgtatgaaagcttgccgtctcattgtaaatgcaccttcatcacaaggtggaataggggatatatataatggatttattccatcacttacacttggttgtggttcatacggaaagaattcagtttcccaaaatgtaacagccactcatttattaaatataaaaaggctggcaaatagaaaaaagaatatgcagtggttcaaattgccaccaaaaatttattttgaaaaacatgctacagcttatttagcaaatatgcctaacatttcacgtgcatttattgtaacggaccctggaatggttgaacatggctatgtcgatacagtcgcgcactatttaaacaagcatgcaaatgatgtgaaagttgaagttttctttgaggtcgaaccagatccatcagatgaaactgtttttaaaggtgcggaaatgatgagaagctttaagccagatgtaattatcgcacttggtggtggttcagctatggatgcagcaaaaggaatgtggttattctatgagcatccagaaacgacattctatggcattaaacagaagtttttagatataagaaaacgtacatgtaaatatccggaattaggaaataaggcgcagtttgttgcgattccaacgacatcaggaacgggatcagaagtgacaccatttgcggttattacagataagaaaaataatataaagtatccgcttgcagattatgaattaacaccagatgtagcaattgttgatccgcaatttgtaatgacagtaccaccacatgtaacagcagatactggtatggatgttttaacacatgcaattgaggcgtatgtgtctgttatggcaaatgactatacagatggattagcattaaaagctattgatctcgtattcaaatatttaccgagagcatataaagatggaaatgatgaagaagcaagagaaaaaatgcataacgcttctgcaattgcaggtatggcatttgcaaatgctttcctcggtattaatcacagcttagcacataaaattggaccagaattccatattccgcacggacgcgcaaatgccattctaatgccgcatgtagtccgctataatgctattaagccaagaaaacacgcattgttcccaaaatatgagcactttgtggcagatgaaagatatgcacatatagcgagaatgctcgggcttccagcaagctcggcagcagaaggggtggaatcactcgtcaaagcaattattgagcttggaaaaagcttaaatattaatatgagtattgcaggacaaggagtagataaagagcaatttgaagaggttgttggagtattagcagaaagagcttttgaagatcaatgtacaactgctaatccaaagttgccgcttatttcagaactgaaagaaatttatatgaaagcatataaaggtgaataa

SEQ ID NO: 39630 - protein, 867 aa, Bacillus cereus ATCC 14579
MVVKEKVVNEMQEVKKMIDTLVNNGQQALQALESFTQEEIDNIVHEMALAGVDQHMPLAKLAVEETGRGVYEDKCIKNIFATEYIWHSIKQDKTVGIIHEDSHEEIIEIAEPVGVVAGVTPVTNPTSTTMFKALIAIKTRNPIIFAFHPSAQKCSVAAAKTVYDAAMKAGAPKHCIQWIERPSVEATKQLMNHDGVALVLATGGAGMVKSAYSTGKPALGVGPGNVPCYIEKSAHVKRAVNDLILSKTFDNGMICASEQAIIVDKEIYDDVKTEMIENNCYFVTEEERKKLEKLVINENTCAVNSDIVGKSAQYIADLVGITVPEHTKMLVAEIQGIGAAYPLSREKLSPVLACVKANSLEEGFTYCEEMLNLGGLGHSAVIHSTNKDVQKQFGLRMKACRLIVNAPSSQGGIGDIYNGFIPSLTLGCGSYGKNSVSQNVTATHLLNIKRLANRKKNMQWFKLPPKIYFEKHATAYLANMPNISRAFIVTDPGMVEHGYVDTVAHYLNKHANDVKVEVFFEVEPDPSDETVFKGAEMMRSFKPDVIIALGGGSAMDAAKGMWLFYEHPETTFYGIKQKFLDIRKRTCKYPELGNKAQFVAIPTTSGTGSEVTPFAVITDKKNNIKYPLADYELTPDVAIVDPQFVMTVPPHVTADTGMDVLTHAIEAYVSVMANDYTDGLALKAIDLVFKYLPRAYKDGNDEEAREKMHNASAIAGMAFANAFLGINHSLAHKIGPEFHIPHGRANAILMPHVVRYNAIKPRKHALFPKYEHFVADERYAHIARMLGLPASSAAEGVESLVKAIIELGKSLNINMSIAGQGVDKEQFEEVVGVLAERAFEDQCTTANPKLPLISELKEIYMKAYKGE

SEQ ID NO: 39631 - DNA, 1155 bp, Bordetella pertussis Tohama I
  CDS (1)..(1155): transl_table=11
gtggcgatgtttgagttctgtacgcatgcgaggacgctggttggcgctggcgccagcgacgccctgggagagacgctggcggcccggtggggcgcgagccgcgtcctgctggtgacggacggcgcgctggtttcactgggcctggcgggccggctgcgcgacgcgctgaccagcgcgggccatacggtggccatgttcgatgaggtggtcgcggatccgccggagtcggtggtcgagcgcgccatcacggcggcgcgcgatgcccgggcccagatgatcgtgggctttggcggaggttcttcgatggatgtggccaagctggctgccgcattcgccgggacgacgcaggacttgcgccaagcctatggcataggcctggtcgcggggccgcgcttgccgctggtgcaggtgccgaccacggcgggcaccggctcggaggccacgccgatcgccgtcgtgacgaccggcgagggcgccaaggccggcgtcatctcgcccgtgctgtacgccgacctggccgtcctggacgcctccttgacgctgggcctgccgccggccatcaccgcggccaccggtatcgatgccatggtgcacgcgaccgaagcatataccagccgggtgctcaagaatcccatttccgacgccctggcgcgcgaagcgttgcggttgctgtttcgcgcgttgccggtcgcttgccgcgacggcggcgacctggcggcgcggcaggacatgctgctgggcgcgatgctggcgggccaggcgttcgccaatgcgccggtgggcgccgtgcatgcgctggcctatccgttgggcagcgcattccatgtgccgcacgggctgtccaattccctggtgctggggccggtgctgcggttcaattcgctgcgttgcgagacccagtacgcggagctggcggacgtgatcctgccggggcatgccggcggcgtggcggaaaaggccgccgcgttcgtgcaggcgatggccgaggtggcaggggcgctggaactgccgacgcggctggcgcaggtcggcgtcacggcggcggacatcccggcgctggccgggctggccctgcagcaacagcgcctgctggcgaacaatccgcgcgatgtcacgctggccgacgccacgcgactctacgaagaggcgttctga

SEQ ID NO: 39632 - protein, 384 aa, Bordetella pertussis Tohama I
MAMFEFCTHARTLVGAGASDALGETLAARWGASRVLLVTDGALVSLGLAGRLRDALTSAGHTVAMFDEVVADPPESVVERAITAARDARAQMIVGFGGGSSMDVAKLAAAFAGTTQDLRQAYGIGLVAGPRLPLVQVPTTAGTGSEATPIAVVTTGEGAKAGVISPVLYADLAVLDASLTLGLPPAITAATGIDAMVHATEAYTSRVLKNPISDALAREALRLLFRALPVACRDGGDLAARQDMLLGAMLAGQAFANAPVGAVHALAYPLGSAFHVPHGLSNSLVLGPVLRFNSLRCETQYAELADVILPGHAGGVAEKAAAFVQAMAEVAGALELPTRLAQVGVTAADIPALAGLALQQQRLLANNPRDVTLADATRLYEEAF

SEQ ID NO: 39633 - DNA, 1155 bp, Bordetella parapertussis 12822
  CDS (1)..(1155): transl_table=11
atgaacggattcgagtttcggacacatgcccgcacgctggcgggcgaggggacctcgcaacggttgggcgaggcggtcgcggcgcaatgggggccgtgccgcatcctggtcgtcacggacgagcagctggtgcggctgggtctggtcgcggccctggcgcaaagcctgcgcgacgccggtcacacggtccaggtctacgacggcgtgctggccgatccgcccgaagcggtggtgagccaggcgatcgcgcggggccgggaaacggacgtgcaatgcgtgatcggcttcggcggcggctcgtcgatggatatcgcgaaactggtggcggcgttcgccggctccgcggccgactttcgcgacagctacggcatcgaccgcgtcgccacggcgcgcctgccgctggtgcaggtgccgaccacggccggcaccggctcggaagccacgcccatcgccatcgtgacccgcgaggacgcctccaaggcgggcattgtctcccccgtcctgtactgcgacatcgccgtactggatgccgcgttgacccggggcctgccgccggccgtgaccgccgccaccggcatcgacgccatcgtgcacgccgtcgaggcctataccagccggctgcgcaagaacccgatctccgatggcctggcgcgccaggcgttgcgcctgctgtgccgttccatcggccccgcatgccgcgacggcgccgacatggcggcccgccatgacatgttgctgggcgcgatgctggcggggcaggcgttcgccaatgcgccggtggcggccgtgcatgcgctggcctatccgctgggcggcgttttccacgtgccgcacggcctgtccaatgcattgatgttcggcgcggtgctgcgtttcaacctgccgcaggccggcgccgcctatgcccagcttgcgcagatcgcttgtccgcaggtggacggcccgcagcaggcgcgcgccgaaggattcgtgcaggaaatggccagcctggggccgcgtctggggctgccgcggcgcctggccgaagtcggggtggccgaacgcgatctgcccatgctcgcgcaacaggccatgcagcaacagcgtttgctggtcaacaaccccagggagctcggctacgacgacgccttgcgcctttaccgggaggcgctgtga

SEQ ID NO: 39634 - protein, 384 aa, Bordetella parapertussis 12822
MNGFEFRTHARTLAGEGTSQRLGEAVAAQWGPCRILVVTDEQLVRLGLVAALAQSLRDAGHTVQVYDGVLADPPEAVVSQAIARGRETDVQCVIGFGGGSSMDIAKLVAAFAGSAADFRDSYGIDRVATARLPLVQVPTTAGTGSEATPIAIVTREDASKAGIVSPVLYCDIAVLDAALTRGLPPAVTAATGIDAIVHAVEAYTSRLRKNPISDGLARQALRLLCRSIGPACRDGADMAARHDMLLGAMLAGQAFANAPVAAVHALAYPLGGVFHVPHGLSNALMFGAVLRFNLPQAGAAYAQLAQIACPQVDGPQQARAEGFVQEMASLGPRLGLPRRLAEVGVAERDLPMLAQQAMQQQRLLVNNPRELGYDDALRLYREAL

SEQ ID NO: 39635 - DNA, 1149 bp, Bordetella parapertussis 12822
  CDS (1)..(1149): transl_table=11
atgtttgagttctgtacgcatgcgaggacgctggtcggcgctggcgccagcgacgccctgggagagacgctggcggcccgatggggcgccagccgcgtcctgctggtgacggatggcgcgctggtttcactgggcctggcgggccggctgcgcgacgcgctggccagcgcgggccatacggtggccatgttcgatgaggtggtcgcggatccgccggagtcggtggtcgagcgcgccatcattgcggcgcgcgatgcccgggcccaggtgatcgtgggctttggtggcggttcttcgatggatgtggccaagctggctgccgcattcgccgggacgacgcaggacttgcgccaagcctatggcataggcctggtcgcggggccgcgcttgccgctggtgcaggtgccgaccacggcgggcaccggctcggaggccacgccgatcgccgtcgtgacgaccggcgatggcgccaaggccggcgtcatctcgcctgtgctgtatgccgacctggccgtcctggacgccaccttgacgctgggcctgccgccggccatcaccgcggccaccggtatcgacgccatggtgcacgcgaccgaggcatataccagccgggtgctcaagaatcccatttccgacgccctggcgcgcgaagcgttgcggttgctgtttcgcgcgttgccgctcgcctgccgcgacggcggcgacctggcggcgcggcaggacatgctgctgggcgcgatgctggcgggccaggcgttcgccaatgcgccggtgggcgccgtgcatgcgctggcctatccgttgggcagcgcattccatgtgccgcacgggctgtccaactccctggtgctggggccggtgctgcggttcaattcgctgcgttgcgagacccagtacgcggagctggcggacgtgatcctgccggggtatgccgacggcgtggcggaaaaggccgccgcgttcgtgcaggcgatggccgaggtggcgggggcgctggaactgccgacgcggctggcgcaggtcggcgtcacggcggcggacatcccggcgctggccgggctggccctgcagcaacagcgcctgttggggaacaatccgcgcgatgtcacgctggccgacgccacgcgactctacgaagaggcgttctga

SEQ ID NO: 39636 - protein, 382 aa, Bordetella parapertussis 12822
MFEFCTHARTLVGAGASDALGETLAARWGASRVLLVTDGALVSLGLAGRLRDALASAGHTVAMFDEVVADPPESVVERAIIAARDARAQVIVGFGGGSSMDVAKLAAAFAGTTQDLRQAYGIGLVAGPRLPLVQVPTTAGTGSEATPIAVVTTGDGAKAGVISPVLYADLAVLDATLTLGLPPAITAATGIDAMVHATEAYTSRVLKNPISDALAREALRLLFRALPLACRDGGDLAARQDMLLGAMLAGQAFANAPVGAVHALAYPLGSAFHVPHGLSNSLVLGPVLRFNSLRCETQYAELADVILPGYADGVAEKAAAFVQAMAEVAGALELPTRLAQVGVTAADIPALAGLALQQQRLLGNNPRDVTLADATRLYEEAF

SEQ ID NO: 39637 - DNA, 1155 bp, Bordetella bronchiseptica RB50
  CDS (1)..(1155): transl_table=11
atgaacggattcgagtttcggacacatgcccgcacgctggcgggcgagggggcctcgcaacggttgggcgaggcggtcgcggcgcaatgggggccgtgccgcatcctggtcgtcacggacgagcagctggtgcggctgggcctggtcgcggccctggcgcaaagcctgcgcgacgccggccacacggtccaggtctacgacggcgtgctggccgatccgcccgaagcggtggtgagccaggcgatcgcgcggggccgggaaacggacgtgcaatgcgtgatcggcttcggcggcggctcgtcgatggatatcgcgaaactggtggcggcgttcgccggctccgcggccgactttcgcgacagctacggcatcgaccgcgtcgccacggcgcgcctgccgctggtgcaggtgccgaccacggccggcaccggctcggaagccacgcccatcgccatcgtgacccgcgaggacgcctccaaggcgggcattgtctcccccgtcctgtactgcgacatcgccgtactggatgccgcgttgacccggggcctgccgccggccgtgaccgccgccaccggcatcgacgccatcgtgcacgccgtcgaggcctataccagccggctgcgcaagaacccgatctccgatggcctggcgcgcgaggcgttgcgcctgctgtgccgttccatcggccccgcatgccgcgacggcgccgacatggcggcccgccatgacatgttgctgggcgcgatgctggcggggcaggcgttcgccaatgcgccggtggcggccgtgcatgcgctggcctatccgctgggcggcgttttccacgtgccgcacggcctgtccaatgcattgatgttcggcgcggtgctgcgtttcaacctgccgcaggccggcgccgcctatgcccagcttgcgcagatcgcctgtccgcaggtcgacggcccgcagcaggcgcgcgccgaaggattcgtgcaggaaatggccggcctggggccgcgtctggggctgccgcggcgcctggccgaagtcggggtggccgaacgcgatctgcccatgctcgcgcaacaggccatgcagcaacagcgtttgctggtcaacaaccccagggagctcggctacgacgacgccttgcgcctttaccgggaggcgttgtga

SEQ ID NO: 39638 - protein, 384 aa, Bordetella bronchiseptica RB50
MNGFEFRTHARTLAGEGASQRLGEAVAAQWGPCRILVVTDEQLVRLGLVAALAQSLRDAGHTVQVYDGVLADPPEAVVSQAIARGRETDVQCVIGFGGGSSMDIAKLVAAFAGSAADFRDSYGIDRVATARLPLVQVPTTAGTGSEATPIAIVTREDASKAGIVSPVLYCDIAVLDAALTRGLPPAVTAATGIDAIVHAVEAYTSRLRKNPISDGLAREALRLLCRSIGPACRDGADMAARHDMLLGAMLAGQAFANAPVAAVHALAYPLGGVFHVPHGLSNALMFGAVLRFNLPQAGAAYAQLAQIACPQVDGPQQARAEGFVQEMAGLGPRLGLPRRLAEVGVAERDLPMLAQQAMQQQRLLVNNPRELGYDDALRLYREAL

SEQ ID NO: 39639 - DNA, 1149 bp, Bordetella bronchiseptica RB50
  CDS (1)..(1149): transl_table=11
atgtttgagttctgtacgcatgcgaggacgctggtcggcgctggcgccagcgacgccctgggagagacgctggcggcccgatggggcgccagccgcgtcctgctggtgacggacggcgcgctggtttcactgggcctggcgggccggctgcgcgacgcgctggccagcgcgggccatacggtggccatgttcgatgaggtggtcgcggatccgccggagtcggtggtcgagcgcgccatcattgcggcgcgcgatgcccgggcccaggtgatcgtgggctttggcggcggttcttcgatggatgtggccaagctggctgccgcattcgccgggacgacgcaggacttgcgccaagcctatggcataggcctggtcgcggggccgcgcttgccgctggtgcaggtgccgaccacggcgggcaccggctcggaggccacgccgatcgccgtcgtgacgaccggcgatggcgccaaggccggcgtcatctcgcccgtgctgtatgccgacctggccgtcctggacgccaccttgacgctgggcctgccgccggccatcaccgcggccaccggtatcgacgccatggtgcacgcgaccgaggcatataccagtcgggtgctcaagaatcccatttccgacgccctggcgcgcgaagcgttgcggttgctgtttcgcgcgttgccgctcgcctgccgcgacggcggcgacctggcggcgcggcaggacatgctgctgggcgcgatgctggcgggccaggcgttcgccaatgcgccggtgggtgccgtgcatgcgctggcctatccgttgggcagcgcattccatgtgccgcacgggctgtccaactccctggtgctggggccggtgctgcggttcaattcgctgcgttgcgagacccagtacgcggagctggcggacgtgatcctgccggggtatgccggtggcgtggcggaaaaggccgccgcgttcgtgcaggcgatggccgaggtggcgggggcgctggaactgccgacgcggctggcgcaggtcggcgtcacggcggcggacatcccggcgctggccgggctggccctgcagcaacagcgcctgttggggaacaatccgcgcgatgtcacgctggccgacgccacgcgactctacgaagaggcgttctga

SEQ ID NO: 39640 - protein, 382 aa, Bordetella bronchiseptica RB50
MFEFCTHARTLVGAGASDALGETLAARWGASRVLLVTDGALVSLGLAGRLRDALASAGHTVAMFDEVVADPPESVVERAIIAARDARAQVIVGFGGGSSMDVAKLAAAFAGTTQDLRQAYGIGLVAGPRLPLVQVPTTAGTGSEATPIAVVTTGDGAKAGVISPVLYADLAVLDATLTLGLPPAITAATGIDAMVHATEAYTSRVLKNPISDALAREALRLLFRALPLACRDGGDLAARQDMLLGAMLAGQAFANAPVGAVHALAYPLGSAFHVPHGLSNSLVLGPVLRFNSLRCETQYAELADVILPGYAGGVAEKAAAFVQAMAEVAGALELPTRLAQVGVTAADIPALAGLALQQQRLLGNNPRDVTLADATRLYEEAF

SEQ ID NO: 39641 - DNA, 2664 bp, Chromobacterium violaceum ATCC 12472
  CDS (1)..(2664): transl_table=11
atggcagtcagcaatcaaatcgaactcgacgccctggtggcccgcgtcaagaaggcccagaccgcgttcgcgcagttcactcaggagcaggtcgaccacatcttccgctgcgcggcgctggccgccgccgacgcccgcatcccgctggcgcggatggccgtcgccgaaaccggcatgggcgtgatggaagacaaggtgatcaagaaccacttcgcctccgagtacatctacaacaagtacaaggacgagaagacctgcggcgtgctgtccgaggacgacaccttcggcaccatcaccatcgccgagccgatcggcgtgctgtgcggcatcgtgcccaccaccaacccgacctccaccgccatcttcaaggcgctgatctcgctgaagacccgcaacggcatcatcttctcgccgcacccgcgcgcgcgccgctccacctgcgaggccgcccgcctggtgctggaggccgccgtcgccgccggcgcgccgcaggacatcatcggctggatcgacgagccttcggtcgcgctgtccaaccagctgatgcaccaccccgacgtcaacctgatcctggccaccggcggcccgggcatggtgaaggccgcctactcctccggcaagcccgccatcggcgtcggcgccggcaacaccccggcggtgatagacgaaaccgccgacatcaagcgcgcggtcgcctccatcctgatgtccaagaccttcgacaacggcgtggtgtgcgcgtccgagcagtcggtgatcatcgtcgacgagatctacgacgcggtgcgcgagcgcttctccaagcacggcggctacatcctgaaggggagcgaagccgaggcggtgcgcaaggtgatcctgcaggacggcagcctgaacgccgccatcgtcggccagagcgccgccaagatcgccgccatggccggcatcgaagtgccgccgaccaccaaagtgctgatcggcgaagtgacggaagtgtcggagaaggaggccttcgcccacgaaaagctgtcgccgaccctggccatgtaccgcgccaaggacttcctcgacgcctgcgacaaggccgccgcgctggtgaccatgggcggcatcggccacacctcggcgctgtataccgaccaggacctgcaggaagaacgcgtgcgctacttcggcgacaagatgaagaccgcccgcatcctgatcaacaccccgtcctcgcaaggcggcatcggcgacctgtacaacttcagcctggcgccgtcgctgacgctgggctgcggttcctggggcggcaactccatctccgagaacgtcggtcccaagcacctgatcaacaagaaaaccgtcgccaagagggctgaaaacatgctgtggcacaagctgccgaagtccatttacttccgccgcggctgtctgccggtggcgctggaagacctggccggcaagaaacgctgcctgatcgtcaccggccagtacctgttcgagaacggcttcgtcgacgagccgatccgcctgctgaagaaaatgggcctggaggtggaaaccttcttcgaagtgcccgccgatccgacgctggccgtggtgcgcaagggcgcagaactggcccacgccttcaagcccgacgtgatcatggccatcggcggcggctcgccgatggacgcggccaagatcatgtgggtgatgtacgagcatccggaagtgcacttcgccgatctggcgctgcgcttcatggacatccgcaagcgcatctaccagttcccgaaactgggccagaaagccatgatggtggccgtgccgacgacctcgggcaccggctcggaagtgaccccgttcgcggtggtgaccgacgaggtgaccggcgtgaagtacccgatcgccgactacgagctgacgccgaacatggccatcgtcgacgccaacctggtgatgagcatgcccaagtcgctgaccgccttcggcggcatcgacgccgtcacccacgcgctggaagcgtatgtctcggtgatggccaacgagtactccgacccgcaggcgctgcaggccctgaaactcttgaaggaatacctgccgtcgtcctacctgaacggcgccaacgatcccaaggcgcgcgagcaggtgcacaacgccgccaccatcgccggcgtcgccttcgccaacgccttcctgggcgtctgccactcgatggcgcacaagatcggcgcggagttcggcctggcgcacggcctggccaacgcgctcttgatcagcaatgtgatccgctacaacgccgccgacgtgccgaccaagcagaccgcgttcagccagtacgaccgaccgaagagcgtggcgcgctacgccgagatcgcccgccacctgggcctggaagccagccgcgaccatcagcgcgtggaaaagctgatcgagtgggtggacgagttgaagaagaccctgggcatcccggcttccatccaggccgcgggcgtcgccgagtccgatttcctggccaaggtggatgaagtggccgaagccgctttcgacgaccagtgcaccggcgccaacccgcgctacccgctgatcagcgagctgaagcagctcttgctcgacagcttctatggccgcccgtacaaggaagcctgggagcgcgacgaggccgccgtggaagacaagccggccaagggcaagtccaaagccaaggcctga

SEQ ID NO: 39642 - protein, 887 aa, Chromobacterium violaceum ATCC 12472
MAVSNQIELDALVARVKKAQTAFAQFTQEQVDHIFRCAALAAADARIPLARMAVAETGMGVMEDKVIKNHFASEYIYNKYKDEKTCGVLSEDDTFGTITIAEPIGVLCGIVPTTNPTSTAIFKALISLKTRNGIIFSPHPRARRSTCEAARLVLEAAVAAGAPQDIIGWIDEPSVALSNQLMHHPDVNLILATGGPGMVKAAYSSGKPAIGVGAGNTPAVIDETADIKRAVASILMSKTFDNGVVCASEQSVIIVDEIYDAVRERFSKHGGYILKGSEAEAVRKVILQDGSLNAAIVGQSAAKIAAMAGIEVPPTTKVLIGEVTEVSEKEAFAHEKLSPTLAMYRAKDFLDACDKAAALVTMGGIGHTSALYTDQDLQEERVRYFGDKMKTARILINTPSSQGGIGDLYNFSLAPSLTLGCGSWGGNSISENVGPKHLINKKTVAKRAENMLWHKLPKSIYFRRGCLPVALEDLAGKKRCLIVTGQYLFENGFVDEPIRLLKKMGLEVETFFEVPADPTLAVVRKGAELAHAFKPDVIMAIGGGSPMDAAKIMWVMYEHPEVHFADLALRFMDIRKRIYQFPKLGQKAMMVAVPTTSGTGSEVTPFAVVTDEVTGVKYPIADYELTPNMAIVDANLVMSMPKSLTAFGGIDAVTHALEAYVSVMANEYSDPQALQALKLLKEYLPSSYLNGANDPKAREQVHNAATIAGVAFANAFLGVCHSMAHKIGAEFGLAHGLANALLISNVIRYNAADVPTKQTAFSQYDRPKSVARYAEIARHLGLEASRDHQRVEKLIEWVDELKKTLGIPASIQAAGVAESDFLAKVDEVAEAAFDDQCTGANPRYPLISELKQLLLDSFYGRPYKEAWERDEAAVEDKPAKGKSKAKA

SEQ ID NO: 39643 - DNA, 1134 bp, Chromobacterium violaceum ATCC 12472
  CDS (1)..(1134): transl_table=11
atgagcacaagcgctttcttcatcccctcgctgaacctgatgggcgcgggctgtctgcaacaggccgtcgacgcgatgcgcggccacggtttccgccgcgcgctgatcgtcaccgaccagggcctggtcaaggccggcctggccgccaaggtggccgacatgctgggcaaggccgacatcgaaccggtgatcttcgacggcgtccatcccaatcccagctgcgccaatgtcaacgccggtctggcgctgctcaaggaaaagcagtgcgacgtggtggtgtcgctgggcggcggctcgccgcacgactgcgccaaaggcatcgcgctggtggcggtgaacggcggcaagatccaggactacgagggcgtggacaagtcggccaagccgcagctgccgctggtggcgatcaacaccaccgcaggcaccgcgtccgaaatgacccgcttctgcatcatcaccgacgagtcgcgccatatcaagatggccatcgtcgacaagcacaccacgcccatcctgtcggtcaacgatccggaaaccatggccggcatgccggcctcgctgaccgccgccaccggcatggacgcgctgacccacgcggtggaagcctatgtgtccactatcgccacccccatcaccgacgcctgcgccttgaaggcggtggaactgatcgccggcttcctgcgccgcgcggtgaaggacggcaaggacatggaagcgcgcgagcaaatggcttacgcccagttcctggccggcatggccttcaacaacgcctcgctgggctatgtgcacgcgatggcgcaccagctgggcggcttctacgacctgccgcacggcgtgtgcaacgcggtgctgctgccgcatgtgcaggccttcaacgcagcctcggccggagagcggctgggcgacgtggccatcgcgctgggcgagaagacacgcagcgcccaggcggccatcgcggcgatcaagcgcctggcggcggatgtcggcattccggcaggcttgagggagctgggcgtcaaggaggcggatatcccgacgctggcggacaacgcgctgaaggatgcctgcggtttcaccaatccgcgcaagggcagccatgaggatgtctgcgcgatcttccgcgccgcgatgtag

SEQ ID NO: 39644 - protein, 377 aa, Chromobacterium violaceum ATCC 12472
MSTSAFFIPSLNLMGAGCLQQAVDAMRGHGFRRALIVTDQGLVKAGLAAKVADMLGKADIEPVIFDGVHPNPSCANVNAGLALLKEKQCDVVVSLGGGSPHDCAKGIALVAVNGGKIQDYEGVDKSAKPQLPLVAINTTAGTASEMTRFCIITDESRHIKMAIVDKHTTPILSVNDPETMAGMPASLTAATGMDALTHAVEAYVSTIATPITDACALKAVELIAGFLRRAVKDGKDMEAREQMAYAQFLAGMAFNNASLGYVHAMAHQLGGFYDLPHGVCNAVLLPHVQAFNAASAGERLGDVAIALGEKTRSAQAAIAAIKRLAADVGIPAGLRELGVKEADIPTLADNALKDACGFTNPRKGSHEDVCAIFRAAM

SEQ ID NO: 39645 - DNA, 1152 bp, Photorhabdus luminescens subsp. laumondii TTO1
  CDS (1)..(1152): transl_table=11
atgatgactacgactttttttatgacatcggtaaatatgtttggtgcgggttgtttggttgaagcggtaaatacgatgaaaggtgatggttataagcgagcattgattgtgaccgatcgtgttttaaatgaaattggggtggcagcaaaagttcaagctttattatctgatgttgatattgagagtacggtttatgatggtactaatccgaatccgacgacaattaacgttgaggaaggtttggatattctgcgtcagcataatagcgattgcgttatttctttagggggtggttcgccacatgattgtgcaaaagctattgtgttggtcgctgctaatggaggcgatatccgggattatgtcggtattggccgttcatctaaaccgcatttgccattaatctcagtcaatactaccgcgggtactgcgtcagaaatgtcacgtttctgtgttattaccgatactgaaagccatattaaaatggccattgctgacaagaaaataacacctgttttgtctgtgaacgatccggaattaatggtaggaatgccgaaagggttaaccgccgcaactggaatggatgcaatgactcatgcggttgaagcctatgtttctcctgcggctagcccaataacggatgcttgtgcattgaaagcaatctcaatgattagtcactctttacgccaagcagttgcagatgggagcaatatagaagcacgtgaaaacatggcctatgcacaattcttggcggggatggcgtttaatagtgcattactggggtatgtacacgccatgtctcaccaattgggcggtacttatgatttaccacacggcatatgcaatgctgttttattaccacacgttcaagagttcaacgctaaagcggttgcgggtcgtttgaaagatattgccgctgcgatgggggtagatgtaagcgctatgaatgatcagcaaggggctgcggcatgtattgctgaaattcgtaagttgtcaaaagatattggtattccgtcgggtctagcggaactgaatgtcaaattagaagatttaccagagttagcaactaatgccttgaaagatatatgttgtttgactaatcccactcaagctacccatgaagaaattgtttcgatctttaaagcggccatgtga

SEQ ID NO: 39646 - protein, 383 aa, Photorhabdus luminescens subsp. laumondii TTO1
MMTTTFFMTSVNMFGAGCLVEAVNTMKGDGYKRALIVTDRVLNEIGVAAKVQALLSDVDIESTVYDGTNPNPTTINVEEGLDILRQHNSDCVISLGGGSPHDCAKAIVLVAANGGDIRDYVGIGRSSKPHLPLISVNTTAGTASEMSRFCVITDTESHIKMAIADKKITPVLSVNDPELMVGMPKGLTAATGMDAMTHAVEAYVSPAASPITDACALKAISMISHSLRQAVADGSNIEARENMAYAQFLAGMAFNSALLGYVHAMSHQLGGTYDLPHGICNAVLLPHVQEFNAKAVAGRLKDIAAAMGVDVSAMNDQQGAAACIAEIRKLSKDIGIPSGLAELNVKLEDLPELATNALKDICCLTNPTQATHEEIVSIFKAAM

SEQ ID NO: 39647 - DNA, 2634 bp, Photorhabdus luminescens subsp. laumondii TTO1
  CDS (1)..(2634): transl_table=11
atgactgtaactcatgttactgaactgaacgaactcgttgctcgggtaaaaaaagcacaacgtgaatttgctaacttttctcaggagcaagttgacaaaatcttccgcgcagcagcccttgcagcggcagatgcacgtatccctttagcaaaattagccgtagcagaatccggtatgggcattgtcgaagacaaagtaatcaaaaaccactttgcttccgaatatatctataacgcttataaagatgagaaaacctgcggcattttgtctgaggataaaacattcggcaccatcactatcgccgaacctattggcttaatctgcggtatcgtgccaaccactaacccaacatctaccgctatttttaaggccctcatcagcctaaaaacccgtaacggcattattctctcaccccacccacgcgccaaaaaagcaacaaccaaagcagcagaattggttctatccgctgcggttgccgcgggtgcgccaaaagatattattggctggattgatgaaccctccgttgaactttccaatgcattgatgcaccaccaagacatcaatctcatcctggcaaccggaggcccaggtatggtaaaagcggcatacagctctggtaagcccgcaatcggcgtcggtgccggtaacaccccggttgtcattgatgaatcagctgatattaaacgcgctgttgcatctattctgatgtctaaaacctttgacaacggcgtcatctgcgcttcagaacaatccgttatcgtggtggatgaaatttatgatcaggtgcgtaaacgtttctttactcatggcggttatctgttacaaggcaaggaactgaaagctgttcaagatatcattctgaaaaacggtagtctaaatgcggaaatcgttggtcaatctgcaacaaaaattgccgaaatggcaggcattaatgttcctgaaaagaccaagatcttgattggagaagtgagcttaactgatgaagcagaaccctttgctcacgaaaaattgtctccactgctcgctatgtatcgtggtaatagctttgaagatgccgtagaaaaggcagaaaaattggttgaaatgggcggaattggtcacacttcttgcttgtataccgatcaggacaatcaagccgcacgaatcaagtattttggcgataaaatgaaaacagctcgtattctcgtgaatactcctgcttctcagggcggtatcggtgatctctataacttcaagcttgccccctctctgacactaggctgcggctcttggggaggaaattccatctctgaaaatgtagggcccaaacatctcatcaataccaaaaccgtggcgaaaagagcagaaaatatgctgtggcataaacttccgaaatccatttacttccgtcgcggctccctgcctgtggcattagaagaagttgcaaccgacggtgcaaaacgcgcttttatcgtaacagaccgtttcttatttaatcatggttatgctgatcaagtcactgatgtgctgaaatcccacgggatagaaacagaagttttctttgaagttgaagcagaccctaccctaagcactgttcgtaagggtgcggaacaaatgcactcattcaaaccggacatcattattgctctggggggagggtccccaatggatgcggccaaaattatgtgggtgatgtatgaacaccctgaaacgcatttcgaagagctagctctacggtttatggatatccgtaaacgcatctatagattccccaaaatgggggttaaagcgaaaatggtcgccattaccacaacttccggcacaggttctgaagtgacaccatttgcggttgtcactgatgatgcaaccggccagaaatatccactggctgattatgaattgacgcctaatatagctattgttgatgccaatctagtcatggatatgccgaaatcactctgtgcttttggtgggctggatgcaatcactcacgctttagaagcttatgtatcagtcttagcaaacgaatactctgacggacaagcactgcaagcgctaaaactactgaaagagttcctcccaaccagctatcatgaaggggccacgaacccagttgcccgtgaacgggttcataatgcagcaactattgcagggattgcatttgctaatgccttcttgggggtatgccactctatggcgcataaactgggttctgagttccatatcccgcatggcttggctaacgcattgctgatttgtaacgttatccgctataacgctaacgataacccaaccaaacagactgcattcagtcaatatgatcgcccacaggcccgccgtcgttacgctgaaattgccgatcatcttggtttatcggctacgggtgaccatactgtcacaaaaattgaaaaactgttagcctggctgaaagagctcaagtctgagctaggtatcccgacatctatccgtgaagcgggcgttcaagaagctgactttctggcaaaaattgataagttatctgaagatgccttcgacgaccaatgtaccggtgctaacccacgctacccgctgatttctgagctaaaacaattgctgttggattcatactatggacgagaattcacagaaaccgttgcaacagaaaaaagccaataa

SEQ ID NO: 39648 - protein, 877 aa, Photorhabdus luminescens subsp. laumondii TTO1
MTVTHVTELNELVARVKKAQREFANFSQEQVDKIFRAAALAAADARIPLAKLAVAESGMGIVEDKVIKNHFASEYIYNAYKDEKTCGILSEDKTFGTITIAEPIGLICGIVPTTNPTSTAIFKALISLKTRNGIILSPHPRAKKATTKAAELVLSAAVAAGAPKDIIGWIDEPSVELSNALMHHQDINLILATGGPGMVKAAYSSGKPAIGVGAGNTPVVIDESADIKRAVASILMSKTFDNGVICASEQSVIVVDEIYDQVRKRFFTHGGYLLQGKELKAVQDIILKNGSLNAEIVGQSATKIAEMAGINVPEKTKILIGEVSLTDEAEPFAHEKLSPLLAMYRGNSFEDAVEKAEKLVEMGGIGHTSCLYTDQDNQAARIKYFGDKMKTARILVNTPASQGGIGDLYNFKLAPSLTLGCGSWGGNSISENVGPKHLINTKTVAKRAENMLWHKLPKSIYFRRGSLPVALEEVATDGAKRAFIVTDRFLFNHGYADQVTDVLKSHGIETEVFFEVEADPTLSTVRKGAEQMHSFKPDIIIALGGGSPMDAAKIMWVMYEHPETHFEELALRFMDIRKRIYRFPKMGVKAKMVAITTTSGTGSEVTPFAVVTDDATGQKYPLADYELTPNIAIVDANLVMDMPKSLCAFGGLDAITHALEAYVSVLANEYSDGQALQALKLLKEFLPTSYHEGATNPVARERVHNAATIAGIAFANAFLGVCHSMAHKLGSEFHIPHGLANALLICNVIRYNANDNPTKQTAFSQYDRPQARRRYAEIADHLGLSATGDHTVTKIEKLLAWLKELKSELGIPTSIREAGVQEADFLAKIDKLSEDAFDDQCTGANPRYPLISELKQLLLDSYYGREFTETVATEKSQ

SEQ ID NO: 39649 - DNA, 2676 bp, Vibrio vulnificus YJ016
  CDS (1)..(2676): transl_table=11
atgcctgtaactaatatggctgaactagatgcgatgattgcacgcgttaagaaagcgcaagaagagttcgctacttactctcaagagcaagtagatgcaatcttccgtgcagcttctctagccgctaaccaagctcgtatcccgctagcacaaatggcggttgaagaatctggtatgggtattgttgaagataaagtaatcaagaaccactttgcatctgagtttatctacaacaaatacaaggacgaaaaaacgtgtggcatcctagaagaggatgacaacctaggtacgatgactatcgctgaaccagtaggtatcatctgcggtatcgttccaaccactaacccaacttcgactgcaatcttcaaatcactgatctctttgaagactcgtaacggtatcatcttctcgccacacccacgtgcgaaaaactcgactaacgacgcagcgaaactggttctagaagcagcagtagcagctggcgcgccaaaagacatcatcggttggatcgaccagccatctgtagagctttcgaacgcgcttatgaagcacgatgacatcgcacttatccttgcaactggtggtccaggcatggttaaagctgcttactcttctggtaagccagcaatcggtgtaggtgcaggtaacgttcctgttgttatcgatgaaactgcggacatcaaacgtgcagttgcatctatcctaatgtctaagacgttcgataacggcgtagtatgtgcttctgagcaagctgcaatcgttgttgacgcagtatacgacgaagtgaaagagcgttttgcttctcacaaagcatacgtacttagcaaagctgaagcagaaaaagtacgtaaagtactgctaatcgatggcgcactaaatgcgaaaatcgttggccagccagctgcagcaatcgctgaaatggcaggtgttaaagttcctgctgatactaaagttctcgttggtgaaggcctaggcaaagtgtcttacgatgacgcatttgctcacgagaagctatctccaactctaggtctattccgtgctgatgacttcgaagacgcagttgcacaagcagtaaccatggttgaaatcggcggtatcggtcacacatctggtctatacactaaccaagacgtaaacgcagatcgtatccgttacttcggtgacaaactgaagactgcacgtatccttgtaaacatcccaactactcacggtggtatcggtgacctttacaactttaacgttgcaccatctctaactcttggttgtggttcatggggtggtaactctatctctgagaacgtaggtcctaagcacctaatcaacaagaaaactgttgcgaagcgagctgaaaacatgttgtggcacaaactacctaagtcaatctacttccgtcgtggtagccttccaatcgcactaagcgacctagaaggtaagaaacgcgcattcctagtaactgaccgtttcctattcaacaacggttacgcagatgacgtagtacaacttcttaaagctcaaggcatggaagttcaaacattctttgatgttgaagctgacccaacgctatctgttgtagagaaaggcgcagcggcaatgcaaagcttccagccagatgtgattctagcgctaggtggtggttcaccaatggatgctgcgaagatcatgtgggtaatgtacgagcacccagaaactcacttcgaagaacttgcaatgcgctttatggatatccgtaaacgtatctacaagttccctaaaatgggtaagaaagctgagcttgtatgtatcactaccacttcaggtacaggttcagaagttacaccattcgcggttgtgactgacgacaagactggtgctaagtacccactagcggattacgaattgactcctcaaatggcaatcgtagatgcgaacctagtgatgaacatgcctaagtctctaaccgcattcggtggttacgatgcagtgactcacgctctagaagcttacgtatcagttcttgcgaacgagtactcagatggtcaggctctacaagcacttaagatgctaaaagagtacctaccttcaagctacgcgaacggtgcaaaagacccaatcgctcgtgagaaagtacacaacgcagcgaccatcgctggtatcgcattcgcgaacgcgttcctaggtgtatgtcactctatggcacacaagatcggtgcagagttccacctaccacacggtttggcgaacgctctacttatctctaacgtggtacgttacaacgcgaacgataacccaactaagcaaactgcgttctctcaatacgaccgtccacaagcacgtcgtcgttacgctgaagttgctgaccacctaggcctaagccaagctggtgaccgcactgctcagaagattgaacgtctactagcatggttggatgagctaaaaggtaacctagacatcccaatgtctatccaagcggcaggtgttgctgaagctgacttcctagcgaaagttgatgaactagcagtagaagcgttcgatgaccagtgtactggtgcgaacccacgctacccactaatcgctgagctaaaagaagttctactggcttcttactacggtaaagctttcgttgaaggtgaaactttcgaaggtacgactgtaatcaagaagaaagcagaccaagtagcgccaaaagcgaaaaaataa

SEQ ID NO: 39650 - protein, 891 aa, Vibrio vulnificus YJ016
MPVTNMAELDAMIARVKKAQEEFATYSQEQVDAIFRAASLAANQARIPLAQMAVEESGMGIVEDKVIKNHFASEFIYNKYKDEKTCGILEEDDNLGTMTIAEPVGIICGIVPTTNPTSTAIFKSLISLKTRNGIIFSPHPRAKNSTNDAAKLVLEAAVAAGAPKDIIGWIDQPSVELSNALMKHDDIALILATGGPGMVKAAYSSGKPAIGVGAGNVPVVIDETADIKRAVASILMSKTFDNGVVCASEQAAIVVDAVYDEVKERFASHKAYVLSKAEAEKVRKVLLIDGALNAKIVGQPAAAIAEMAGVKVPADTKVLVGEGLGKVSYDDAFAHEKLSPTLGLFRADDFEDAVAQAVTMVEIGGIGHTSGLYTNQDVNADRIRYFGDKLKTARILVNIPTTHGGIGDLYNFNVAPSLTLGCGSWGGNSISENVGPKHLINKKTVAKRAENMLWHKLPKSIYFRRGSLPIALSDLEGKKRAFLVTDRFLFNNGYADDVVQLLKAQGMEVQTFFDVEADPTLSVVEKGAAAMQSFQPDVILALGGGSPMDAAKIMWVMYEHPETHFEELAMRFMDIRKRIYKFPKMGKKAELVCITTTSGTGSEVTPFAVVTDDKTGAKYPLADYELTPQMAIVDANLVMNMPKSLTAFGGYDAVTHALEAYVSVLANEYSDGQALQALKMLKEYLPSSYANGAKDPIAREKVHNAATIAGIAFANAFLGVCHSMAHKIGAEFHLPHGLANALLISNVVRYNANDNPTKQTAFSQYDRPQARRRYAEVADHLGLSQAGDRTAQKIERLLAWLDELKGNLDIPMSIQAAGVAEADFLAKVDELAVEAFDDQCTGANPRYPLIAELKEVLLASYYGKAFVEGETFEGTTVIKKKADQVAPKAKK

SEQ ID NO: 39651 - DNA, 1149 bp, Vibrio vulnificus YJ016
  CDS (1)..(1149): transl_table=11
atggcatttgcactaaatcttcctaaattgagttactcaggtgtcggagcggtcgatgatgcgatcgcaacgctaagccaacagccaatcaaacgcgcgttagtggtaacggaccataatctggtcgaactgggcatcttggatcatttgtttgagttgcttgatgagttctctattgactacgagttgtttgacaaagtgacgccaaatccaactgcaacgttagtgcgagaaggattagcggtttacaacgatactggctgcgattgtttcatcgcagtcgggggcggtagcccagtcgattgtgccaaagcgatccgtattgtggcgtctaacccaggtgatatcgttgattttgatggggttggcaaagtgaagagtgctggtgatttcttcattgccatcaataccaccgcagggaccgcggccgagatgacctcgaactcggtgatcactgatgagtcgcgccaagtaaaaatggtcattattgacgccaaacagatccctgatgtcgcggttaatgacccgacgttgatggtcaatttgccaccgcacgtaaccgccgcgacggggatggatgcgctcactcacgcggtggaagcctatgtcacaccaggcgcacataccttaactaaaccgactgcgcttgaggcaatcaaactgattgcccagtggttacctatcgcggttgaagatggtaaaaatcttgaagcgcgcgagcaattggctaacgctcagttcttagcgggcatggcgtttaacagtgcgggtttggggttagtgcacgccatggctcatcaacctggcgcgactcataatttacctcatggggtgtgcaatgcgattttgctgccgcaagtgtgtgaatttaacgccgagaaatatcctcaacgttttcgcgatatcgcttcggtgatgggtgggaaaacggaggggctgagcgatagagaagctgccgatttagccgttaatctgatgcggaatttgtcaaaacgagtcaacattcctagcggtttttctttgcttggaataagtcgagcagattgcgagctgtggatagagaaagccctggctgacccgtgtctggggggaaaccctcgccagccaacagccagtgaagtagagtcactctaccttgcgtgtatgtaa

SEQ ID NO: 39652 - protein, 382 aa, Vibrio vulnificus YJ016
MAFALNLPKLSYSGVGAVDDAIATLSQQPIKRALVVTDHNLVELGILDHLFELLDEFSIDYELFDKVTPNPTATLVREGLAVYNDTGCDCFIAVGGGSPVDCAKAIRIVASNPGDIVDFDGVGKVKSAGDFFIAINTTAGTAAEMTSNSVITDESRQVKMVIIDAKQIPDVAVNDPTLMVNLPPHVTAATGMDALTHAVEAYVTPGAHTLTKPTALEAIKLIAQWLPIAVEDGKNLEAREQLANAQFLAGMAFNSAGLGLVHAMAHQPGATHNLPHGVCNAILLPQVCEFNAEKYPQRFRDIASVMGGKTEGLSDREAADLAVNLMRNLSKRVNIPSGFSLLGISRADCELWIEKALADPCLGGNPRQPTASEVESLYLACM

SEQ ID NO: 39653 - DNA, 1149 bp, Vibrio vulnificus YJ016
  CDS (1)..(1149): transl_table=11
atggcaagtgcattttttatcccaactgtgaacctaatgggcgcaggctgtcttaaagacgcagcagacagcattaaagctcaaggctttaccaaagggcttattgttaccgacaaaattcttaatcaaatcggcgttgtaaaacaagttcaagacctactaagcgagcgtcatgtagaagcggttgtcttcgatggtactcagcccaacccaaccatcggcaacgtcaatgcaggtttggcactactgaagcaaaatgagtgtgattttgtgatttcactaggtggtggttctccgcacgactgtgcaaaaggcattgcgcttgtcgcagcaaacggcggcgagattgcggattacgaaggcgtggacaaatcagcgaaaccaatgctaccgctgattgcgattaacactaccgcaggcaccgcatctgaaatgacccgtttctgcatcattaccgatgaagaacgtcatattaaaatggcgattgtcgataaacacaccacgccactaatctctgtgaacgatcctgaactgatgctggcaaaacctgcatcactcactgcggcaacaggaatggacgccttgactcacgcggtagaagcgtacgtttctattgctgcgacaccaattactgacgcagtcgcaatcaaagcgattgagcttatccaagcccatcttcgtactgcggttgcacacggtgacgatattgaagcgcgtgagcaaatggcgtacgcacagttcatggcaggtatggcgttcaacaatgcctcactaggttacgtacacgcaatggcgcaccaattgggtggcttctacgatctaccacacggtgtttgtaacgcgatcttgttgccacacgtacaacgctacaatgcgcaggtttgtccagagcgtctacgtgatgtggcaaaagcaatgggtgtcaatgtcgaaggcatgagtgcagagcaaggcgcagaagccgccattgatgcgattgtggcactggcgaaagacgtgggtattccagcaggtattcgcgagcttggtgcaaaatctgaagatatcccaaccttggctgacaatgcactcaaagacgcttgtggtttcactaacccgaaacaagccacgcacgaagaaatctctgcgattttcgaagcggcaatgtaa

SEQ ID NO: 39654 - protein, 382 aa, Vibrio vulnificus YJ016
MASAFFIPTVNLMGAGCLKDAADSIKAQGFTKGLIVTDKILNQIGVVKQVQDLLSERHVEAVVFDGTQPNPTIGNVNAGLALLKQNECDFVISLGGGSPHDCAKGIALVAANGGEIADYEGVDKSAKPMLPLIAINTTAGTASEMTRFCIITDEERHIKMAIVDKHTTPLISVNDPELMLAKPASLTAATGMDALTHAVEAYVSIAATPITDAVAIKAIELIQAHLRTAVAHGDDIEAREQMAYAQFMAGMAFNNASLGYVHAMAHQLGGFYDLPHGVCNAILLPHVQRYNAQVCPERLRDVAKAMGVNVEGMSAEQGAEAAIDAIVALAKDVGIPAGIRELGAKSEDIPTLADNALKDACGFTNPKQATHEEISAIFEAAM

SEQ ID NO: 39655 - DNA, 1152 bp, Rhodopseudomonas palustris CGA009
  CDS (1)..(1152): transl_table=11
atgaccgcaacgaccttcttcattccctctctcaatctgttcggcgccggctgcgtatcgagcgcagcggaccacgccaaggcacgcggcttcaagcgcgcgctgatcgtcaccgacagcgggctgcacaagctcggcgtcgccgatcagatcgcctcgatgctgatcgagcgcaacgtgaccagcgtcgtcttccccggcgcgaagccaaacccgacgatcaagaacgtcgaagacgggcttgcactgctgaagcaggagaactgcgactgcgtgatctcgctcggcggcggttcagcgcacgattgcgcgaagggcatcgcgctgaccgccaccaatggcggcagcatcaaggactatgaaggcgtcgatcggtcggcgcacgctcagcttccgctgatcgccatcaacaccacggcgggcacggcgagtgagatgacgcggttctgcatcatcaccgacgaggaacgccaggtgaagatggcgatcgtcgaccgccacaccacgccgctgctgtcggtcaacgatccggtactgatgctcggcaagccgccggccctgaccgccgcgaccggcatggacgcgctgacgcacgcgatcgaagcctatgtgtcgatcgccgcaacgccgatcaccgacgcctgcgcgctaaaggcgatgtcgatcatctccaacagtctgcgcaccgtggtcgccgagggccagaacctcgtcgcccgcgaggcgatgtcgtatgcgggcttcctcgccggcatggcgttcaacaacgcctcgctcggctatgtacatgcgatggcgcaccagctcggcggcttctacgacctgccgcacggcgtctgcaacgcggtgctgctgccgcacgtgcaggcctacaacgcgcaagtcgcggcgggacggctgaaggacgtcgcccacgcgctcggcgtcgacaccaccggcatgaccgatgcccaaggcgccgatgccgccattcatgccatccaacggctatcggccgatgtcggcattccgcccggtctcggcggtctcggcatgaaggaaaccgacgtgccgatcctcgccgccaacgcgctgaaggatgcgtgcggcttcaccaatccgaagcaggcgacgcagaccgagatcgaaaccatcttccgggcggccgcctga

SEQ ID NO: 39656 - protein, 383 aa, Rhodopseudomonas palustris CGA009
MTATTFFIPSLNLFGAGCVSSAADHAKARGFKRALIVTDSGLHKLGVADQIASMLIERNVTSVVFPGAKPNPTIKNVEDGLALLKQENCDCVISLGGGSAHDCAKGIALTATNGGSIKDYEGVDRSAHAQLPLIAINTTAGTASEMTRFCIITDEERQVKMAIVDRHTTPLLSVNDPVLMLGKPPALTAATGMDALTHAIEAYVSIAATPITDACALKAMSIISNSLRTVVAEGQNLVAREAMSYAGFLAGMAFNNASLGYVHAMAHQLGGFYDLPHGVCNAVLLPHVQAYNAQVAAGRLKDVAHALGVDTTGMTDAQGADAAIHAIQRLSADVGIPPGLGGLGMKETDVPILAANALKDACGFTNPKQATQTEIETIFRAAA

SEQ ID NO: 39657 - DNA, 1149 bp, Bacillus methanolicus
  CDS (1)..(1149): transl_table=11
atgacaacaaactttttcattccaccagccagcgtaattggacgcggtgcagtaaaggaagtaggaacaagacttaagcaaattggagctaagaaagcgcttatcgttacagatgcattccttcacagcacaggtttatctgaagaagttgctaaaaacattcgtgaagctggcgttgatgttgcgattttcccaaaagctcaaccagatccagcagatacacaagttcatgaaggtgtagatgtattcaaacaagaaaactgtgattcacttgtttctatcggtggaggtagctctcacgatacagctaaagcaatcggtttagttgcagcaaacggcggaagaatcaatgactatcaaggtgtaaacagcgtagaaaaaccagtcgttccagtagttgcaatcactacaacagctggtactggtagtgaaacaacatctcttgcggttattacagactctgcacgtaaagtaaaaatgcctgttattgatgagaaaattactccaactgtagcaattgttgacccagaattaatggtgaaaaaaccagctggattaacaatcgcaactggtatggatgcattgtcccatgcaattgaagcatatgttgcaaaaggtgctacaccagttactgatgcatttgctattcaagcaatgaaacttatcaatgaatacttaccaaaagcggttgcgaacggagaagacatcgaagcacgtgaaaaaatggcttatgcacaatacatggcaggagtggcatttaacaacggtggtttaggactagttcactctatttctcaccaagtaggtggagtttacaaattacaacacggaatctgtaactcagttaatatgccacacgtttgcgcattcaacctaattgctaaaactgagcgcttcgcacacattgctgagcttttaggtgagaatgttgctggcttaagcactgcagcagctgctgagagagcaattgtagctcttgaaagaatcaacaaatccttcggtatcccatctggctatgcagaaatgggcgtgaaagaagaggatatcgaattattagcgaaaaacgcatacgaagacgtatgtactcaaagcaacccacgcgttcctactgttcaagacattgcacaaatcatcaaaaacgctatgtaa

SEQ ID NO: 39658 - protein, 382 aa, Bacillus methanolicus
MTTNFFIPPASVIGRGAVKEVGTRLKQIGAKKALIVTDAFLHSTGLSEEVAKNIREAGVDVAIFPKAQPDPADTQVHEGVDVFKQENCDSLVSIGGGSSHDTAKAIGLVAANGGRINDYQGVNSVEKPVVPVVAITTTAGTGSETTSLAVITDSARKVKMPVIDEKITPTVAIVDPELMVKKPAGLTIATGMDALSHAIEAYVAKGATPVTDAFAIQAMKLINEYLPKAVANGEDIEAREKMAYAQYMAGVAFNNGGLGLVHSISHQVGGVYKLQHGICNSVNMPHVCAFNLIAKTERFAHIAELLGENVAGLSTAAAAERAIVALERINKSFGIPSGYAEMGVKEEDIELLAKNAYEDVCTQSNPRVPTVQDIAQIIKNAM

SEQ ID NO: 39659 - DNA, 1203 bp, Bacillus cereus ATCC 10987
  CDS (1)..(1203): transl_table=11
ttgcaagaagttgctgaatttcgtatgccgaagtctgtattatatggaagaaattcgcttgaaaaactgggggaacaatccaagaagtttggaaaaagagcttttatagtaactgatacaattatggagaatttaggatatgttgagagttgtatacaacaattaaatacaaaaggtattaccgttattacatataataaagtaaatgctgagcctacaaatatacatgtgttagaggcgttaactatttgtaaagaggaaaagtgtgattttattatcggtcttggtggtggaagttgtattgatgcagcaaaagcagttgcggtgttatatacaaatggcggagaagtagaagattatgtccaaaaggatatggaaatagacaatgatccgctaccgctcattgcaattccaacaacttcgggtactgggtcagaagtaacaagtgtagcagtaattacgaataaacgaacagatgtaaaaatgatgatgaaacatccgagttttaccccgcaagtagcgattattgatccgattttaacacgttctgtaccacctcatattacagcagcaacagggatagatgcattatgtcatgcagtcgaagcatatatttctaaagtttcacaatcacttacagatgtactcgctctttccgctattgaaagtattatgaaatatttacgtattgcatatgaagatggagagaatatggaggcaagagaagcgatgatgattgcttccttacaagctgtaattgcattttcaaacgcatctgttacattagttcatggaatgtcaagaccagtaggagcgttatttcatgtaccacatggtatatcaaatgcaatactattacctacagttttagagtatacaaaagtgagtgcagtaaaaagactagcagaaattggacgctgtttaaataaagatatgtattcctattgtgatgaagaagtagccgattacacgctcggggaaataaaaaaactttgctttgatcttcgtattccaaatttaaaagaatacggaattggtgaggttgaatttgaaaaagctatttctaaaatggcatcagatgcaattgaaagtggaagtccagcaaataatccacgagtaccatcctatgatgaaattaaacagttgtatcgagaatgttttcattatcgatatgaagattctataaaaacattagagttttaa

SEQ ID NO: 39660 - protein, 400 aa, Bacillus cereus ATCC 10987
MQEVAEFRMPKSVLYGRNSLEKLGEQSKKFGKRAFIVTDTIMENLGYVESCIQQLNTKGITVITYNKVNAEPTNIHVLEALTICKEEKCDFIIGLGGGSCIDAAKAVAVLYTNGGEVEDYVQKDMEIDNDPLPLIAIPTTSGTGSEVTSVAVITNKRTDVKMMMKHPSFTPQVAIIDPILTRSVPPHITAATGIDALCHAVEAYISKVSQSLTDVLALSAIESIMKYLRIAYEDGENMEAREAMMIASLQAVIAFSNASVTLVHGMSRPVGALFHVPHGISNAILLPTVLEYTKVSAVKRLAEIGRCLNKDMYSYCDEEVADYTLGEIKKLCFDLRIPNLKEYGIGEVEFEKAISKMASDAIESGSPANNPRVPSYDEIKQLYRECFHYRYEDSIKTLEF

SEQ ID NO: 39661 - DNA, 2604 bp, Bacillus cereus ATCC 10987
  CDS (1)..(2604): transl_table=11
atggtagtcaaagagaaaattgtaaatgaaatgcaggaagtaaaagagatgattgatacgttagtgaataacggtcgaaaggctttacaagcattagaaagttttacacaagagcaaattgacaacattgttcatgaaatggcattagcaggtgttgatcaacatatgccacttgcgaagttggctgttgaagaaacaggtcgtggtgtatacgaagataaatgtattaaaaatatttttgctactgaatatatttggcatagcataaagaaagataaaacagtagggattattcacgaagatcctcatgaagaaataatagaaattgcggagcccgtcggtgtagtagctggggtaacaccagtaacgaatccaacatcgacaacaatgtttaaagcattaatcgcgataaaaacgagaaatccaattattttcgcatttcatccttccgcacaaaactgttctattgcagctgcgaaaacagtatacgatgcagcggtgaaggcgggggcaccaaaatattgtattcagtggattgaaaagccttctgtcgaagcaacgaaacaattaatgaaccatgaaggtgttgcgcttgttttggcaactggaggggctggtatggtgaaatcagcttattctactggaaaaccagcgctaggtgtaggtcctggtaatgtaccatgttatatagagaaatcagcgcatataaaacgagcggttaatgatttgattttatctaaaacatttgataatggtatgatttgtgcatcagaacaagcaattattgtagacaaggaaatttatgatgatgtgaaaacagaaatgattgcaaatgattgttattttgtaaccgaggaagagagaagtaaattagaaaagcttgttattaatgaaaatacatgtgcagtaaatagtgatattgtagggaaatccgcacagtatattgccaaattagttggaattactgtacctaaaaatacaaaaatgcttgtagctgaaatacaaggcatcggagccgcatatccactatctcgtgagaagttaagtccagtattagcttgtgtaaaagcaaattcattagaagaaggatttacatattgtgaagaaatgttaaacctcggtggtttaggacattcagcagttatccattctgtaaataaagaagtgcaaaagcaatttggattacgtatgaaagcttgccgccttattgtaaatgccccttcatcacaaggtggaatcggtgacatatataatggatttattccatcacttacgcttggctgcggttcctacgggaaaaactcgatttctcaaaacgtaacagcgacgcatttattaaatataaaaaggttggcaaatagaaaaaagaatatgcaatggttcaaattaccaccaaaaatttattttgaaaaacatgcgacagcatatttagcaaatatgcctaacatttcacgtgcatttattgtaacggatccaggaatggttgagcacggatatgtagatacggtcacgcattatttacgtaaacatgtaaatgatgtgaaagttgaagttttctttgaggttgagccggatccatcagatgaaactgtgtttaaaggtgcagaaatgatgagaagttttcagccagatgtaattatcgcacttggtggtggttcagcgatggatgccgcgaaagggatgtggcttttctatgagcatccagaaacaacattctatggaattaaacagaagtttttagatataagaaaacgaacatgtaaatatccggaattaggaagtaaggcgcagtttattgccattccaacaacatctggaacaggatcagaagtgacaccatttgcggttattacagataagaaaaataatataaagtatccactcgcggattatgaattaacgccagatgtagcaattgttgatccacaatttgtaatgacagtaccaccacatgtaacagcagacaccggcatggacgtattaacgcatgcaatcgaggcgtatgtgtctgttttagcgaatgactatacagatggattagcattaaaggccattgatctcgtatttaaatatttaccaagagcatttaaagatggaaatgatgaagaagcacgagaaaaaatgcacaatgcttctgcaatcgcaggaatggcatttgcaaatgcttttctaggtattaatcacagcttagcacataaaattggaccagaatttcatattccacatgggcgtgcgaatgcaattcttatgccgcacgtagttcgctataatgctattaagccaagaaaacacgcattgttcccaaaatatgagcactttgtagccgatgaacgctatgcacatattgcgagaatgctcgggcttccagcaagttcgactgcagaaggtgtggaatcacttgtcaaagcaattattgagctcggaaaaagtttaaatataaatatgagtattgcaggacaaggagttgctaaagaccaatttgaagaggttgttggattattagcagaaagagcttttgaagatcaatgtacaacagctaatccaaaattacctctcatttcagagctgaaagaaatttatatgaaagcatataaaggtgagtaa

SEQ ID NO: 39662 - protein, 867 aa, Bacillus cereus ATCC 10987
MVVKEKIVNEMQEVKEMIDTLVNNGRKALQALESFTQEQIDNIVHEMALAGVDQHMPLAKLAVEETGRGVYEDKCIKNIFATEYIWHSIKKDKTVGIIHEDPHEEIIEIAEPVGVVAGVTPVTNPTSTTMFKALIAIKTRNPIIFAFHPSAQNCSIAAAKTVYDAAVKAGAPKYCIQWIEKPSVEATKQLMNHEGVALVLATGGAGMVKSAYSTGKPALGVGPGNVPCYIEKSAHIKRAVNDLILSKTFDNGMICASEQAIIVDKEIYDDVKTEMIANDCYFVTEEERSKLEKLVINENTCAVNSDIVGKSAQYIAKLVGITVPKNTKMLVAEIQGIGAAYPLSREKLSPVLACVKANSLEEGFTYCEEMLNLGGLGHSAVIHSVNKEVQKQFGLRMKACRLIVNAPSSQGGIGDIYNGFIPSLTLGCGSYGKNSISQNVTATHLLNIKRLANRKKNMQWFKLPPKIYFEKHATAYLANMPNISRAFIVTDPGMVEHGYVDTVTHYLRKHVNDVKVEVFFEVEPDPSDETVFKGAEMMRSFQPDVIIALGGGSAMDAAKGMWLFYEHPETTFYGIKQKFLDIRKRTCKYPELGSKAQFIAIPTTSGTGSEVTPFAVITDKKNNIKYPLADYELTPDVAIVDPQFVMTVPPHVTADTGMDVLTHAIEAYVSVLANDYTDGLALKAIDLVFKYLPRAFKDGNDEEAREKMHNASAIAGMAFANAFLGINHSLAHKIGPEFHIPHGRANAILMPHVVRYNAIKPRKHALFPKYEHFVADERYAHIARMLGLPASSTAEGVESLVKAIIELGKSLNINMSIAGQGVAKDQFEEVVGLLAERAFEDQCTTANPKLPLISELKEIYMKAYKGE

SEQ ID NO: 39663 - DNA, 1143 bp, Desulfovibrio vulgaris subsp. vulgaris str. Hildenborough
  CDS (1)..(1143): transl_table=11
atgcgtatcaccaagttcgccattcccgagatcatcttcggtaatggaagcctcaaccatcttgcgccctgcgcacgcagactcggggctgcgcgggtgctcctcgtcagcgacaaggggctggaggccagcggctgggtggagcgtgtcgtggacatcctcgaagccgacggtctcgaatgggtgtatttcaacgactgcaactccaatccgcgtgaccatcaggtgcatcacggggcgcgggtctatcaggaagagcgtgccgacgtcgtcatcgcgctgggcggcggaagccccatggacaccgccaagggcatcggcaccatcgtcggcaacggtgggcgcatcaacgactacgagggggccaaccgcatcatgcggcccctgccgcccatgatctttctgcccaccacggcgggcagcggttcggacatctcgcaattctgcatcatcactgatgtggagcgtcggctgaagatgtccatcatcagccggtcactggtgcccaacgtatcgatcatcgacccgcaggtgctcatgaccatgagcgaggaactcgtcatcgcctccgccatcgacgccttcgcccatgccgtcgaatcgtacctttcgcgccttgcctcgccgttcaccgaccatcaggcgttgcgtgccatggaactgatcatggacaacctcatgcctgccgtcgaacggcgcgaccctgccgcgctggagagactcagcatcgccagcaccgaggcgggcatgtcgttcagcaatgcgggactcggcatcgggcactccctcgcccattcgcttggcggcatgttcgacgtgatgcacggtctggtgcatccggtgttgctgccgcatgtcatgcggttcaatcttccggtcagcgtggaaaagctggcggccatcgggcgcatcgtcgtcgggccgcgtgtcgccagtgccgagtgcatcgcgcgggcgggcatcgaacggttgcacgagttcttctccgcactgggggttccggtgcgtctcgggcaactgctgcccgacaggggcgtgctcgagaccatcgcccggacggcgctcaatgatgcctgcactgtgaccaacccgcgcgaggccacctgcgagaacctgctcgccctgtgcgaagaggcgtggtga

SEQ ID NO: 39664 - protein, 380 aa, Desulfovibrio vulgaris subsp. vulgaris str. Hildenborough
MRITKFAIPEIIFGNGSLNHLAPCARRLGAARVLLVSDKGLEASGWVERVVDILEADGLEWVYFNDCNSNPRDHQVHHGARVYQEERADVVIALGGGSPMDTAKGIGTIVGNGGRINDYEGANRIMRPLPPMIFLPTTAGSGSDISQFCIITDVERRLKMSIISRSLVPNVSIIDPQVLMTMSEELVIASAIDAFAHAVESYLSRLASPFTDHQALRAMELIMDNLMPAVERRDPAALERLSIASTEAGMSFSNAGLGIGHSLAHSLGGMFDVMHGLVHPVLLPHVMRFNLPVSVEKLAAIGRIVVGPRVASAECIARAGIERLHEFFSALGVPVRLGQLLPDRGVLETIARTALNDACTVTNPREATCENLLALCEEAW

SEQ ID NO: 39665 - DNA, 1182 bp, Desulfovibrio vulgaris subsp. vulgaris str. Hildenborough
  CDS (1)..(1182): transl_table=11
atggcagtacaggaacaggtctacggtttcttcattccccgggtgaccctcatcggcatcggtgcctccaaggccattcctgaaaagatcaaggcgcttggcgggtcgaagccgctcatcgtcaccgacatgggcatcgtcaaggctggcatcctgaagcagataaccgaccttctcgacgccgcgaagatggcctacagcgtgtatgacgagaccatccccaaccccacggacgacaacgtccacaagggtgtcgacgtctacaagaagaacaagtgcgacagcctcatcaccctcggtggcggcagctcgcacgactgtggcaagggcatcggcctcgtcgtcgccaacggcggcaagattcacgacttcgaaggcgtggacaagtcgacccagcgcatgcccccctaccttgcggtcaacaccacggcaggcaccgcttcggagatgacccgcttctgcatcatcaccgacaccagccgcaaggtgaagatggccatcgtcgactggcgcgtgaccccgaacatcgccctcgacgaccccctgctgatgctcggaatgccccccgcactcaccgcggccaccggcatggacgccctgacccacgccgtggaagcctacgtctccaccatcgccacccccatgaccgacgcctgcgcagaacaggccatcacgctcatcgccaccttcctgcgccgtgccgttgccaacggtcaggacctcgaggcccgcgaacgcatgtgcttcgcgcagtaccttgccggcatggccttcaacaatgccagcctcggccatgtccatgccatggcgcaccagcttggcggtttctacgacctgccgcacggcgagtgcaacgccatcctgctgccccacgtctccaagttcaacctcatcgccaagcttgaccgctacgcccgcatcgcacagctgatgggcgagaacatcgccggtctgtccacgcgtgaagccgccgaaagggccatcagcgccatcaagtgcctgtccaccgatgtgggcatccccgccggtctggtggcgcttggcaagcgttacggcaaggacgtcaaggccgccgacatcgccatcatgaccaagaacgcgcagaaggacgcctgcggcctgaccaatccgcgttgtccgacggatgctgacgtcgcagccatttacgaagcggccctgtaa

SEQ ID NO: 39666 - protein, 393 aa, Desulfovibrio vulgaris subsp. vulgaris str. Hildenborough
MAVQEQVYGFFIPRVTLIGIGASKAIPEKIKALGGSKPLIVTDMGIVKAGILKQITDLLDAAKMAYSVYDETIPNPTDDNVHKGVDVYKKNKCDSLITLGGGSSHDCGKGIGLVVANGGKIHDFEGVDKSTQRMPPYLAVNTTAGTASEMTRFCIITDTSRKVKMAIVDWRVTPNIALDDPLLMLGMPPALTAATGMDALTHAVEAYVSTIATPMTDACAEQAITLIATFLRRAVANGQDLEARERMCFAQYLAGMAFNNASLGHVHAMAHQLGGFYDLPHGECNAILLPHVSKFNLIAKLDRYARIAQLMGENIAGLSTREAAERAISAIKCLSTDVGIPAGLVALGKRYGKDVKAADIAIMTKNAQKDACGLTNPRCPTDADVAAIYEAAL

SEQ ID NO: 39667 - DNA, 1161 bp, Desulfovibrio vulgaris subsp. vulgaris str. Hildenborough
  CDS (1)..(1161): transl_table=11
atggaatccgcaagggagcttcgcaagttcgtcgcgccggagttcgtcttcggcaacggcgcggcccggctggcaggtcgatatgtgcataatctcgggggtacccgctgcctcgtggtcaccgaccccggggtcatgcgaaatggacatgccgacaccgtcattggcagcctcaccgcctatggcatagcccatgcggtcttccaggacatttcgcccaacccgcgtgatgtggaagtccagcgcggggtcgaggcctaccaccgcgaagggtgcgacgccatcgtcgccgtggggggcggcagccccatagactgcgccaagggcatcggcatcgtggcaagcaatggtggcagcatcagcctctacgaaggggtcgacgccatccccaagccgatgccacccctcgtatgcgtccccaccaccgctggcagcgcagccgacgtctcgcaattcgccatcatcaccgacacgacccgcatggtgaaaatcgccatcgtcagcaaggcggctgtggcggatgtatcgctcatcgacccctcgaccacgaaatccatgagccgcgacctcacggcagccacgggcatagacaccctcacccacgccatcgaagccttcgcctccaacgccagcggccccataaccgacatgttcgcgctggaagccatcagtctcgtgaacacgcatctgccgcaggtgcttgcagacggtgatgacgacaccgcccgcgaaggcatggcactcgcctgcctcaacgccggactggccttctccaacgccattctgggtgctgtccacgccatggcgcacagcctcggcgggctgcttgacctgccccatggcgaatgcaacgccattctgctgccctttgtggtgcggcgcaacttcgacgcagcccccgtgcggtacgcccgagtggcgaacgccctcggcatcgacgttggaggcacccccgccaccgccatccgcgacgcgctcttcgacaggttgatgacgctgcgcacggccgccgggttcacgcgcgggctttccgccttcggagtcacccgtgagcagataggacgccttgcccgccttgccgtggaagacccctgccttgccaccaaccccgaagcactcgacatcgcagacatcgagagcctgtatgcagaagccctctag

SEQ ID NO: 39668 - protein, 386 aa, Desulfovibrio vulgaris subsp. vulgaris str. Hildenborough
MESARELRKFVAPEFVFGNGAARLAGRYVHNLGGTRCLVVTDPGVMRNGHADTVIGSLTAYGIAHAVFQDISPNPRDVEVQRGVEAYHREGCDAIVAVGGGSPIDCAKGIGIVASNGGSISLYEGVDAIPKPMPPLVCVPTTAGSAADVSQFAIITDTTRMVKIAIVSKAAVADVSLIDPSTTKSMSRDLTAATGIDTLTHAIEAFASNASGPITDMFALEAISLVNTHLPQVLADGDDDTAREGMALACLNAGLAFSNAILGAVHAMAHSLGGLLDLPHGECNAILLPFVVRRNFDAAPVRYARVANALGIDVGGTPATAIRDALFDRLMTLRTAAGFTRGLSAFGVTREQIGRLARLAVEDPCLATNPEALDIADIESLYAEAL

SEQ ID NO: 39669 - DNA, 1119 bp, Listeria monocytogenes str. 4b F2365
  CDS (1)..(1119): transl_table=11
atgaacagctttcaaattaaaacaaaagtagcttttggtacgaatagtttacaagttttaaaagaaattaaaaataaaaatgtctggattatctgtgaccgttttttggctgatggggaagggcttcaaggtttaattggacaattagatacatccaataatgtgcatatttttaccgatgtcgtacctgatccacctatttccaaagtagctggaggggttagtgaggcaggcaaaatccaaccgcaagtcatgattgcttttggtggtggttcagcgattgatacggctaaaggaatctactatttcgccaaacgtttggaaaaaatcaatatcagtacttttattgcaattccaaccaccagcggtacgggttcagaagttacagccgcaaccgttatcactgatccaacaacgaaaattaaatatccgcttttcttagatgaactaattccggatatggctattttggatgcgcaactggttgttacggtacctccagctattacagcgaacacagggatggacgtcttaacacacgcaattgaagcttatgtctctaaagatgcaagcgattataccgatgctcttggtgaaaaaagtgtgcaattaacgttacgtttcttaacgagctgttatgatgatggtcgtaatttagcgaatcgagaaaaaatgcataatgcttctactatggctggaatggcatttaactgcgccaatttaggcttgaatcacagtattgcgcatcaacttggtgcacagtttcacgtaccacacgggctagccaatgcgatcttactagatgcagtgattcgttttaacgcctttaaaaatcgtgaaacagaacaaaaatatgcagaaatggcacgcatttgtggcattgcttccagatcagactcgaacgaaacagctgtccgcttacttcgcgaaagaattgtagcgatgatggaacatatgcaaatgccgcgcacattgacagacgccggtgtagcaaaagaaaaagtctatgcaaaaatggacgaaattgcaacgaatgcactgaaagacgcttgcttaccaactagtcctacgacaccctcacatcaagaactaaaagaaattttagaacaaataatttag

SEQ ID NO: 39670 - protein, 372 aa, Listeria monocytogenes str. 4b F2365
MNSFQIKTKVAFGTNSLQVLKEIKNKNVWIICDRFLADGEGLQGLIGQLDTSNNVHIFTDVVPDPPISKVAGGVSEAGKIQPQVMIAFGGGSAIDTAKGIYYFAKRLEKINISTFIAIPTTSGTGSEVTAATVITDPTTKIKYPLFLDELIPDMAILDAQLVVTVPPAITANTGMDVLTHAIEAYVSKDASDYTDALGEKSVQLTLRFLTSCYDDGRNLANREKMHNASTMAGMAFNCANLGLNHSIAHQLGAQFHVPHGLANAILLDAVIRFNAFKNRETEQKYAEMARICGIASRSDSNETAVRLLRERIVAMMEHMQMPRTLTDAGVAKEKVYAKMDEIATNALKDACLPTSPTTPSHQELKEILEQII

SEQ ID NO: 39671 - DNA, 1140 bp, Listeria monocytogenes str. 4b F2365
  CDS (1)..(1140): transl_table=11
atgcaaaaagttagttttaaaacagatctttatattggccaaggagcaacagatcgtttactcgattttaaagacaaacaaatctttatcgtaacagatccatttatggttagttccggaatgattaatgcgattacagaaaaaattgatccatcgaatacatatacgatttttagcgaaatcattccagacccaccgattgaaaacgtggtagcaggaattgaagttttgaatgaatgtgatgctaacttgatgattgcaattggtggcggatcagcgattgatgcggcgaaagcgatgaaattcttcggccaaaaacttggtacggtgcgcgcaatgcctttcattgtcattccaacaactagtggaacgggctccgaagtaactagtttctctgttattactaacaaagaaaaagccattaaatacccactaattacagatgctattttgccagatgaagcaattttagatgcagacttagtaaaatctgttccaccagcaattacagcagatactggtatggatgtgttaacgcatgcgcttgaagcctatgtatctacaaaagcgaatgattactcggatgcaatggcggaaaaagttatccaattagttttcacttatttagaacgtgcttacaaagacggtaatgatttagaagctcgcgaaaaaatgcataatgcgtcttgtcttgcaggaatggcatttaacattacttctcttggcttaaatcacggtattgcgcatacagccggtgcgaaatttaaaattccacatggtcgtatgaatacattacttttaccgcacgtaattagttataatgctggaattacaagtgattttggtaacaatccggataaccgagcagcggaacgttatacagcgattgcaaaattactaaaaatgccagcatcgaatacacgtcttggtgttcgtagcttaattaatgccattaaacaacttcaaaagaaactcaatatgccaactacattaacagaatgtggtattagccgcacagatttaaatgaaaatattgctcaaatcgcggaaggcgcgctaaatgacggatgtactgcaaccaatcctagaataccgacagaaacagatgttagtgcgattcttgaaaaaatgttggcataa

SEQ ID NO: 39672 - protein, 379 aa, Listeria monocytogenes str. 4b F2365
MQKVSFKTDLYIGQGATDRLLDFKDKQIFIVTDPFMVSSGMINAITEKIDPSNTYTIFSEIIPDPPIENVVAGIEVLNECDANLMIAIGGGSAIDAAKAMKFFGQKLGTVRAMPFIVIPTTSGTGSEVTSFSVITNKEKAIKYPLITDAILPDEAILDADLVKSVPPAITADTGMDVLTHALEAYVSTKANDYSDAMAEKVIQLVFTYLERAYKDGNDLEAREKMHNASCLAGMAFNITSLGLNHGIAHTAGAKFKIPHGRMNTLLLPHVISYNAGITSDFGNNPDNRAAERYTAIAKLLKMPASNTRLGVRSLINAIKQLQKKLNMPTTLTECGISRTDLNENIAQIAEGALNDGCTATNPRIPTETDVSAILEKMLA

SEQ ID NO: 39673 - DNA, 2601 bp, Listeria monocytogenes str. 4b F2365
  CDS (1)..(2601): transl_table=11
atggcaattaaagaaaatgcggcccaagaagtattagaagttcaaaaagtgattgacagattagcagacaatggacaaaaagcattgaaagcatttgaaagttacaatcaagaacaagtagacaatatcgttcacgcaatggcacttgccggacttgaccaacatatgccccttgcaaaattagcagtagaagaaactggacgtggattatacgaagataaatgtattaaaaacatcttcgcgacagaatatatttggaacaacattaaaaacaacaaaacagtaggcgttattaatgaagatgtacaaactggtgtgattgaaattgctgaaccagttggagttgttgccggggttacacctgtaactaacccaacatccactactcttttcaaagcaattatcgctatcaaaacacgtaacccaatcatctttgctttccatccaagtgcacagcgttgttcatctgcagcagcgaaagttgtatacgatgcagcaattgcagctggagcaccagaacattgtattcaatgggtagaaaaaccttccctagaagcaacgaaacaattaatgaatcacgataaagtagcacttgtacttgcaactggtggtgctggaatggttaaatcagcatactctactggtaaacctgcactaggtgttggaccaggtaacgtaccagcttacattgacaaaacagccaaaattaaacgttctgttaatgacattattctttctaaatcttttgaccaaggtatgatttgtgcttctgaacaagcagtcatcgtggacaaagaagtagctaaagaagtaaaagcagaaatggaagcaaacaaatgctacttcgttaaaggcgctgaattcaaaaaattagaaagctatgtaatcaatcctgaaaaaggaacacttaacccagatgtagttggtaaatcccctgcatggattgcaaaccaagctggcttcaaagttccagaagatacaaaaattcttgtagctgaaattaaaggtgttggcgacaaatacccactatctcacgaaaaattaagcccagttcttgcattcatcgaagctgctaaccaagcagaagcattcgatcgttgtgaagaaatgttagtatacggaggacttggacactccgcagttattcactctacggataaagaagttcaaaaagcatttggtattcgtatgaaagcttgccgtatcatcgtaaatgcaccaagcgcacaaggcggtatcggtgacatttataacggcttcatcccttccctaacactaggttgtggatcttacggtaaaaactctgtatcacaaaatgtaagtgcgactaacttgctgaacgttaaacgtatcgcggatcggagaaataatatgcaatggttcaaacttccaccaaaaattttctttgaaaaatattccactcaataccttcaaaaaatggaaggcgttgaacgcgtatttatcgtaactgacccaggaatggttcaattcaaatacgtggatgtcgtaatcgaacacctgaaaaaacgtggcaacgatgtagcttaccaagtatttgctgacgttgaaccagatccatctgacgtaacagtttacaaaggtgcagaactaatgaaagacttcaaacctgatacaattatcgctcttggtggtggttctgcaatggatgctgccaaaggtatgtggttattctatgaacacccagaagcttcattcttcggcttgaaacaaaaattcttagatatccgtaaacgtacattcaaatatcctaaacttggtggaaaagcgaaattcgttgcaattccaacaacaagtggtacaggttctgaagtaactccatttgcggttattacagacaaagaaaacaacattaaataccctcttgcagactacgaattaactccagatgttgcgattgtcgatgcacaatatgtaactactgttccagcacacattactgctgacactggtatggacgttctaactcacgcaattgaatcttatgtatccgtaatggcaagcgattatactcgtggattatctatccgcgcaatcgaacttgtatttgaaaacttacgtgaatctgttcttactggtgatccagatgcgcgtgaaaaaatgcataatgcttctgccctagctggtatggcgtttgcaaatgcgttcctaggaattaaccacagcttggcacacaaaattggacctgaattccacattcctcacggtcgtgcgaatgcaatccttatgccacatgttattcgttataacgcacttaaacctaaaaaacatgcgttattccctagatatgaaagcttccgtgctgatgaagattatgctcgtatctctcgtattatcggcttccctgcagcaactacagaagaaggcgttaaatcacttgtagatgaaatcatcaaacttggtaaagacgttggtatcgacatgagtcttaaaggacaaaatgttgctaaaaaagatttggatgcagttgtagatacacttgcagatcgcgcattcatggaccaatgtactactgccaaccctaaacaaccacttgtaagtgaactaaaagaaatctacctagaagcttacaaaggtgtttga

SEQ ID NO: 39674 - protein, 866 aa, Listeria monocytogenes str. 4b F2365
MAIKENAAQEVLEVQKVIDRLADNGQKALKAFESYNQEQVDNIVHAMALAGLDQHMPLAKLAVEETGRGLYEDKCIKNIFATEYIWNNIKNNKTVGVINEDVQTGVIEIAEPVGVVAGVTPVTNPTSTTLFKAIIAIKTRNPIIFAFHPSAQRCSSAAAKVVYDAAIAAGAPEHCIQWVEKPSLEATKQLMNHDKVALVLATGGAGMVKSAYSTGKPALGVGPGNVPAYIDKTAKIKRSVNDIILSKSFDQGMICASEQAVIVDKEVAKEVKAEMEANKCYFVKGAEFKKLESYVINPEKGTLNPDVVGKSPAWIANQAGFKVPEDTKILVAEIKGVGDKYPLSHEKLSPVLAFIEAANQAEAFDRCEEMLVYGGLGHSAVIHSTDKEVQKAFGIRMKACRIIVNAPSAQGGIGDIYNGFIPSLTLGCGSYGKNSVSQNVSATNLLNVKRIADRRNNMQWFKLPPKIFFEKYSTQYLQKMEGVERVFIVTDPGMVQFKYVDVVIEHLKKRGNDVAYQVFADVEPDPSDVTVYKGAELMKDFKPDTIIALGGGSAMDAAKGMWLFYEHPEASFFGLKQKFLDIRKRTFKYPKLGGKAKFVAIPTTSGTGSEVTPFAVITDKENNIKYPLADYELTPDVAIVDAQYVTTVPAHITADTGMDVLTHAIESYVSVMASDYTRGLSIRAIELVFENLRESVLTGDPDAREKMHNASALAGMAFANAFLGINHSLAHKIGPEFHIPHGRANAILMPHVIRYNALKPKKHALFPRYESFRADEDYARISRIIGFPAATTEEGVKSLVDEIIKLGKDVGIDMSLKGQNVAKKDLDAVVDTLADRAFMDQCTTANPKQPLVSELKEIYLEAYKGV

SEQ ID NO: 39675 - DNA, 1179 bp, Bacillus anthracis str. 'Ames Ancestor'
  CDS (1)..(1179): transl_table=11
atgccgaagtctgtattatatggaagaaattctcttgaaaagctgtgggaacaatctaagaaattcgggaaaagagcgtttatagttacggatacaattatggaggatttaggatatgttgagaggtgtatacaacaattaaatacgaaaggtataactgttattacatataataaagtaaatgctgagcctacaaatatacacgtgttagaggcgttaactatttgtaaagaaggaaagtgtgattttataatcggtcttggtggtggaagttgtattgatgcagcaaaagcagttgcggtgttatatacaaatggcggagaagtggaagattatgtccaaaaggatagggaaatagacaatgatccgctaccacttattgcaatcccaacaacctctggaactggatcggaagtaacaagtgtagcagtaattacgaataaacgaacagatgtaaaaatgatgatgaagcatccgagttttaccccgcaagtagcaattattgacccaattttaacacgttcggtaccacctcacattacagcagcaacagggatagatgctttatgtcatgcagtcgaagcatatatttctaaagtttcacaatcacttacagatgtattagctctttccgctattgaaagtattatgaaatatttacgtattgcatatgaagatggagagaatatggaggcaagagaagcgatgatgatagcgtccttacaagctggaattgcattttctaatgcatctgttacattagttcatggcatgtcgagaccagtaggagcattatttcatgtaccacatggtatatcgaatgcaatactattacctacagttttagagtatacaaaaggtagtgcggtaaaaagactagcggaaattggccgctgtttaaataaagatttgtattcctattgtgatgaagaagtagccgactacacgctgggggaaataaaaaaactttgttttgatcttcatattccaaatttaaaagaatacggaattggtgagcttgagtttgaaaaagctatttctaaaatggcgtcagatgcaattgaaagtggaagtccagcgaataacccacgtgtgccatcatatgatgaaattaaacagttgtatcgagaatgttttcattataaatatgaagattcaataaaaacattaggggattaa

SEQ ID NO: 39676 - protein, 392 aa, Bacillus anthracis str. 'Ames Ancestor'
MPKSVLYGRNSLEKLWEQSKKFGKRAFIVTDTIMEDLGYVERCIQQLNTKGITVITYNKVNAEPTNIHVLEALTICKEGKCDFIIGLGGGSCIDAAKAVAVLYTNGGEVEDYVQKDREIDNDPLPLIAIPTTSGTGSEVTSVAVITNKRTDVKMMMKHPSFTPQVAIIDPILTRSVPPHITAATGIDALCHAVEAYISKVSQSLTDVLALSAIESIMKYLRIAYEDGENMEAREAMMIASLQAGIAFSNASVTLVHGMSRPVGALFHVPHGISNAILLPTVLEYTKGSAVKRLAEIGRCLNKDLYSYCDEEVADYTLGEIKKLCFDLHIPNLKEYGIGELEFEKAISKMASDAIESGSPANNPRVPSYDEIKQLYRECFHYKYEDSIKTLGD

SEQ ID NO: 39677 - DNA, 1203 bp, Bacillus anthracis str. Sterne
  CDS (1)..(1203): transl_table=11
ttgcaagaagttgctgagtttcgtatgccgaagtctgtattatatggaagaaattctcttgaaaagctgtgggaacaatctaagaaattcgggaaaagagcgtttatagttacggatacaattatggaggatttaggatatgttgagaggtgtatacaacaattaaatacgaaaggtataactgttattacatataataaagtaaatgctgagcctacaaatatacacgtgttagaggcgttaactatttgtaaagaaggaaagtgtgattttataatcggtcttggtggtggaagttgtattgatgcagcaaaagcagttgcggtgttatatacaaatggcggagaagtggaagattatgtccaaaaggatagggaaatagacaatgatccgctaccacttattgcaatcccaacaacctctggaactggatcggaagtaacaagtgtagcagtaattacgaataaacgaacagatgtaaaaatgatgatgaagcatccgagttttaccccgcaagtagcaattattgacccaattttaacacgttcggtaccacctcacattacagcagcaacagggatagatgctttatgtcatgcagtcgaagcatatatttctaaagtttcacaatcacttacagatgtattagctctttccgctattgaaagtattatgaaatatttacgtattgcatatgaagatggagagaatatggaggcaagagaagcgatgatgatagcgtccttacaagctggaattgcattttctaatgcatctgttacattagttcatggcatgtcgagaccagtaggagcattatttcatgtaccacatggtatatcgaatgcaatactattacctacagttttagagtatacaaaaggtagtgcggtaaaaagactagcggaaattggccgctgtttaaataaagatttgtattcctattgtgatgaagaagtagccgactacacgctgggggaaataaaaaaactttgttttgatcttcatattccaaatttaaaagaatacggaattggtgagcttgagtttgaaaaagctatttctaaaatggcgtcagatgcaattgaaagtggaagtccagcgaataacccacgtgtgccatcatatgatgaaattaaacagttgtatcgagaatgttttcattataaatatgaagattcaataaaaacattaggggattaa

SEQ ID NO: 39678 - protein, 400 aa, Bacillus anthracis str. Sterne
MQEVAEFRMPKSVLYGRNSLEKLWEQSKKFGKRAFIVTDTIMEDLGYVERCIQQLNTKGITVITYNKVNAEPTNIHVLEALTICKEGKCDFIIGLGGGSCIDAAKAVAVLYTNGGEVEDYVQKDREIDNDPLPLIAIPTTSGTGSEVTSVAVITNKRTDVKMMMKHPSFTPQVAIIDPILTRSVPPHITAATGIDALCHAVEAYISKVSQSLTDVLALSAIESIMKYLRIAYEDGENMEAREAMMIASLQAGIAFSNASVTLVHGMSRPVGALFHVPHGISNAILLPTVLEYTKGSAVKRLAEIGRCLNKDLYSYCDEEVADYTLGEIKKLCFDLHIPNLKEYGIGELEFEKAISKMASDAIESGSPANNPRVPSYDEIKQLYRECFHYKYEDSIKTLGD

SEQ ID NO: 39679 - DNA, 2604 bp, Bacillus anthracis str. Sterne
  CDS (1)..(2604): transl_table=11
atggtagtcaaagagaaagttgtaaatgaaatgcaggaagtaaaagagatgattgatacgttagtgaataacggtcggaaggctttacaagcattagaaagttttacacaagagcaaattgacaacattgttcatgaaatggcattagcaggtgttgatcaacatatgcctcttgcgaagttggctgttgaagaaacaggtcgtggtgtatacgaagataaatgcattaaaaatatttttgctactgaatatatttggcatagcataaagaaagataaaacagtagggattattcacgaagaccctcatgaagaaataatagaaattgcggagcccgtcggtgtagtagctggggtaacaccagtaacgaatccaacatcgacaacaatgtttaaagcattaatagcgataaaaacgagaaatccaattattttcgcatttcatccttcagcacaaaactgttctgttgcagccgcgaaaacagtatacgatgcagcggtgaaggcgggggcaccaaaacattgtattcagtggattgaaaagccttctgtcgaagcaacgaaacaattaatgaaccatgaaggtgttgcgcttgttttagcaactggaggggctggtatggtgaaatcagcttattctactggaaaaccagcgctaggtgtaggtcctggtaatgtaccatgttatatagagaaatcagcgcatataaaacgagcggttaatgatttgattttatcaaaaacgtttgataacgggatgatttgtgcatcagaacaagcaatcattgtagacaaggaaatttatgatgatgtgaaaacagaaatgattacaaatgattgttactttgtaacagaggaagagagaagaaaattagaaaagcttgttattaatgaaaatacatgtgcagtaaatagtgatattgtagggaaatctgcacagtatattgccgaattagttggaattactgtacctaaaaatacaaaaatgcttgtagctgaaatacaaggcatcggagccgcatatccactatctcgtgagaagttaagtccagtattagcttgtgtaaaagcaaattcattagaagaaggatttacatattgtgaagaaatgttaaacctcggtggcttagggcattcagcagttatccattctgtaaataaagaagtgcaaaagcaatttggattacgtatgaaagcttgccgccttattgtaaatgctccttcatcacaaggtggaatcggtgacatatataatggatttattccatcacttacgcttggctgcggttcctacgggaaaaactcggtttctcaaaacgtaacagcgacgcacttattaaatataaaaaggttggcaaatagaaaaaagaatatgcagtggttcaaattaccaccaaaaatttattttgaaaaacatgcgacagcatatttagcaaatatgcctaacatttcacgtgcgtttattgtaacggatccaggaatggttgagcatggatatgtagatacggtcgcgcattatttacgtaaacatgcaaatgatgtgaaagtagaagttttctttgaggttgagccagatccatcagatgaaactgtttttaaaggtgcggaaatgatgagaagttttcagcctgatgtcatcatcgcacttggtggtggttcagcgatggatgcagcgaaagggatgtggcttttctatgagtacccagaaacaacattctatggaattaaacagaagtttttagatataagaaaacgtacatgtaaatatccggaattaggaagtaaggcgcagtttgttgccattccaacaacatctggaacaggatcagaagtgacaccatttgcggttattacagataagaaaaataatataaagtatccacttgccgattatgaattaacgccagatgtagcaattgttgatccgcaatttgtaatgacagtaccaccacatgtaacagcagatactgggatggacgtattaacgcatgcaatcgaggcatatgtgtctgttttagcaaatgattatacagatggattagcattaaaggccattgatctcgtatttaaatatttaccaagagcatttaaagatggacatgatgaagaagcacgagaaaaaatgcataatgcttctgcaattgcagggatggcatttgcaaatgcattcctaggtattaatcacagtttagcgcataaaattggaccagaattccatattccgcatggacgtgcgaatgcaattcttatgccgcacgtaattcgttataatgctattaagccaagaaaacatgcattgttcccaaaatatgagcactttgtggctgatgaacgctatgcacatattgcgagaatgctcgggctaccagcaagttcggtggcagaaggtgtagaatcactcgacaaagcaattattgatctcggaaaaagtttaaatataaatatgagtattgcgggacaaggagttgctaaagaccaatttgaagaggttgttggattattagcagaaagagcttttgaagatcaatgtacaacagctaatccgaaattacctctcatttcagagctgaaagaaatttatatgaaagcatataaaggtgagtaa

SEQ ID NO: 39680 - protein, 867 aa, Bacillus anthracis str. Sterne
MVVKEKVVNEMQEVKEMIDTLVNNGRKALQALESFTQEQIDNIVHEMALAGVDQHMPLAKLAVEETGRGVYEDKCIKNIFATEYIWHSIKKDKTVGIIHEDPHEEIIEIAEPVGVVAGVTPVTNPTSTTMFKALIAIKTRNPIIFAFHPSAQNCSVAAAKTVYDAAVKAGAPKHCIQWIEKPSVEATKQLMNHEGVALVLATGGAGMVKSAYSTGKPALGVGPGNVPCYIEKSAHIKRAVNDLILSKTFDNGMICASEQAIIVDKEIYDDVKTEMITNDCYFVTEEERRKLEKLVINENTCAVNSDIVGKSAQYIAELVGITVPKNTKMLVAEIQGIGAAYPLSREKLSPVLACVKANSLEEGFTYCEEMLNLGGLGHSAVIHSVNKEVQKQFGLRMKACRLIVNAPSSQGGIGDIYNGFIPSLTLGCGSYGKNSVSQNVTATHLLNIKRLANRKKNMQWFKLPPKIYFEKHATAYLANMPNISRAFIVTDPGMVEHGYVDTVAHYLRKHANDVKVEVFFEVEPDPSDETVFKGAEMMRSFQPDVIIALGGGSAMDAAKGMWLFYEYPETTFYGIKQKFLDIRKRTCKYPELGSKAQFVAIPTTSGTGSEVTPFAVITDKKNNIKYPLADYELTPDVAIVDPQFVMTVPPHVTADTGMDVLTHAIEAYVSVLANDYTDGLALKAIDLVFKYLPRAFKDGHDEEAREKMHNASAIAGMAFANAFLGINHSLAHKIGPEFHIPHGRANAILMPHVIRYNAIKPRKHALFPKYEHFVADERYAHIARMLGLPASSVAEGVESLDKAIIDLGKSLNINMSIAGQGVAKDQFEEVVGLLAERAFEDQCTTANPKLPLISELKEIYMKAYKGE

SEQ ID NO: 39681 - DNA, 1203 bp, Bacillus thuringiensis serovar konkukian str. 97-27
  CDS (1)..(1203): transl_table=11
ttgcaagaagttgctgagtttcgtatgccgaagtctgtattatatggaagaaattctcttgaaaagctgtgggaacaatctaagaaattcgggaaaagagcgtttatagttacggatacaattatggaggatttaggatatgttgagaggtgtatacaacaattaaatacgaaaggtataactgttattacatataataaagtaaatgctgagcctacaaatatacacgtgttagaggcgttaactatttgtaaagaaggaaagtgtgattttataatcggtcttggtggtggaagttgtattgatgcagcaaaagcagttgcggtgttatatacaaatggcggagaagtggaagattatgtccaaaaggatagggaaatagacaatgatccgctaccacttattgcaatcccaacaacttctggaactggatcggaagtaacaagtgtagcagtaattacgaataaacgaacagatgtaaaaatgatgatgaagcatccgagctttaccccgcaagtagcgattattgacccaattttaacacgttcggtaccacctcacattacagcagcaacagggatagatgctttatgtcatgcagtcgaagcatatatttctaaagtttcacaatcacttacagatgtattagctctttccgctattgaaagtattatgaaatatttacgtattgcatatgaagatggagagaatatggaggcaagagaagcgatgatgatagcgtccttacaagctggaattgcattttctaatgcatctgttacattagttcatggcatgtcgagaccagtaggagcattatttcatgtaccacatggtatatcgaatgcaatactattacctacagttttagagtatacaaaaggtagtgcggtaaaaagactagcggaaattggccgctgtttaaataaagatttgtattcctattgtgatgaagaagtagccgactacacgctgggggaaataaaaaaactttgttttgatcttcatattccaaatttaaaagaatacggaattggtgagcttgagtttgaaaaagctatttctaaaatggcgtcagatgcaattgaaagtggaagtccagcgaataacccacgtgtgccatcatatgatgaaattaaacagttgtatcgagaatgttttcattataaatatgaagattcaataaaaacattagggaattaa

SEQ ID NO: 39682 - protein, 400 aa, Bacillus thuringiensis serovar konkukian str. 97-27
MQEVAEFRMPKSVLYGRNSLEKLWEQSKKFGKRAFIVTDTIMEDLGYVERCIQQLNTKGITVITYNKVNAEPTNIHVLEALTICKEGKCDFIIGLGGGSCIDAAKAVAVLYTNGGEVEDYVQKDREIDNDPLPLIAIPTTSGTGSEVTSVAVITNKRTDVKMMMKHPSFTPQVAIIDPILTRSVPPHITAATGIDALCHAVEAYISKVSQSLTDVLALSAIESIMKYLRIAYEDGENMEAREAMMIASLQAGIAFSNASVTLVHGMSRPVGALFHVPHGISNAILLPTVLEYTKGSAVKRLAEIGRCLNKDLYSYCDEEVADYTLGEIKKLCFDLHIPNLKEYGIGELEFEKAISKMASDAIESGSPANNPRVPSYDEIKQLYRECFHYKYEDSIKTLGN

SEQ ID NO: 39683 - DNA, 2604 bp, Bacillus thuringiensis serovar konkukian str. 97-27
  CDS (1)..(2604): transl_table=11
atggtagtcaaagagaaagttgtaaatgaaatgcaggaagtaaaagagatgattgatacgttagtgaataacggtcggaaggctttacaagcattagaaagttttacacaagagcaaattgacaacattgttcatgaaatggcattagcaggtgttgatcaacatatgccacttgcgaaattggctgttgaagaaacaggtcgtggtgtatacgaagataaatgcattaaaaatatttttgctactgaatatatttggcatagcataaagaaagataaaacagtagggattattcacgaagatcctcatgaagaaataatagaaattgcggagcccgtcggtgtagtagctggggtaacaccagtaacaaatccaacatcgacaacaatgtttaaagcattaatcgcgataaaaacgagaaatccaattattttcgcatttcatccttcagcacaaaactgttctattgcagccgcgaaaacagtatacgatgcagcggtgaaggcgggggcaccaaaacattgtgtgcagtggattgaaaagccttctgtcgaagcaacgaaacaattaatgaaccatgaaggtgttgcgcttgttttggcaactggaggggctggtatggtgaaatcagcttattctactggaaaaccagcgctaggtgtaggtcctggtaatgtaccatgttatatagagaaatcagcgcatataaaacgagcggttaatgatttgattttatcaaaaacatttgataacgggatgatttgtgcatcagaacaagcaattattgtagataaggaaatttatgatgatgtgaaaacagaaatgattgcaaatgattgttactttgtaacagaggaagagagaagaaaattagaaaagcttgttattaatgaaaatacatgtgcagtaaatagtgatattgtagggaaatccgcacagtatattgccgaattagttggaattactgtacctaaaaatacaaaaatgcttgtagctgaaatacaaggcatcggagccgcatatccactatcacgtgagaagttaagtccagtattagcttgtgtaaaagcaaattcattagaagaaggatttacatattgtgaagaaatgttaaacctcggtggtttagggcattcagcagttatccattctgtaaataaagaagtgcaaaagcaatttggattacgtatgaaagcttgtcgccttattgtaaatgctccttcatcacaaggtggaatcggtgacatatataatggatttattccatcacttacgcttggctgcggttcctacgggaaaaactcggtttctcaaaacgtaacagcgacgcatttattaaatataaaaaggttggcaaatagaaaaaagaatatgcagtggttcaaattaccaccaaaaatttattttgaaaaacatgcgacagcatatttagcaaatatgcctaacatttcacgtgcgtttattgtaacggatccaggaatggttgagcacggatatgtagatacggtcgctcattatttacgtaaacatgcaaatgatgtgaaagtagaagttttctttgaggttgagccagatccatcagatgaaactgtgtttaaaggtgcggaaatgatgagaagttttcagcctgacgtcattatcgcacttggtggtggttcagcgatggatgcagcgaaagggatgtggcttttctatgagcatccagaaacaacattctatggaattaaacagaagtttttagatataagaaaacgcacatgtaaatatccggaattaggaagtaaggcgcagtttgttgccattccaacaacatctggaacaggatcagaagtgacaccatttgcggttattacagataagaaaaataatataaagtacccactcgcggattatgaattaacgccagatgtagcaattgtagatccgcaatttgtaataacagtaccgccacatgtaacagcagacactgggatggacgtattaacgcatgcaatcgaggcgtatgtgtctgttttagcaaatgactatacagatggactagcattaaaggctattgatctcgtatttaaatatttaccaagagcatttaaagatggacatgatgaagaagcacgagaaaaaatgcataatgcttctgcaattgcagggatggcatttgcaaatgcattcctaggtattaatcacagtttagcgcataaaattggaccagaattccatattccgcatggacgtgcgaatgccattcttatgccgcacgtaattcgttataatgctattaagccaagaaaacatgcattgttcccaaaatatgagcactttgtggctgatgaacgctatgcacatattgcgagaatgctcgggcttccagcaagttcggcggcagaaggtgtggaatcactcgtcaaagcaattattgatctcggaaaaagtttaaatataaatatgagtattgcgggacaaggagttgctaaagaccaatttgaagaggttgttggattattagcagaaagagcttttgaagatcaatgtacaacagctaatccgaaattacctctcatttcagagctgaaagaaatttatatgaaagcatataaaggtgagtaa

SEQ ID NO: 39684 - protein, 867 aa, Bacillus thuringiensis serovar konkukian str. 97-27
MVVKEKVVNEMQEVKEMIDTLVNNGRKALQALESFTQEQIDNIVHEMALAGVDQHMPLAKLAVEETGRGVYEDKCIKNIFATEYIWHSIKKDKTVGIIHEDPHEEIIEIAEPVGVVAGVTPVTNPTSTTMFKALIAIKTRNPIIFAFHPSAQNCSIAAAKTVYDAAVKAGAPKHCVQWIEKPSVEATKQLMNHEGVALVLATGGAGMVKSAYSTGKPALGVGPGNVPCYIEKSAHIKRAVNDLILSKTFDNGMICASEQAIIVDKEIYDDVKTEMIANDCYFVTEEERRKLEKLVINENTCAVNSDIVGKSAQYIAELVGITVPKNTKMLVAEIQGIGAAYPLSREKLSPVLACVKANSLEEGFTYCEEMLNLGGLGHSAVIHSVNKEVQKQFGLRMKACRLIVNAPSSQGGIGDIYNGFIPSLTLGCGSYGKNSVSQNVTATHLLNIKRLANRKKNMQWFKLPPKIYFEKHATAYLANMPNISRAFIVTDPGMVEHGYVDTVAHYLRKHANDVKVEVFFEVEPDPSDETVFKGAEMMRSFQPDVIIALGGGSAMDAAKGMWLFYEHPETTFYGIKQKFLDIRKRTCKYPELGSKAQFVAIPTTSGTGSEVTPFAVITDKKNNIKYPLADYELTPDVAIVDPQFVITVPPHVTADTGMDVLTHAIEAYVSVLANDYTDGLALKAIDLVFKYLPRAFKDGHDEEAREKMHNASAIAGMAFANAFLGINHSLAHKIGPEFHIPHGRANAILMPHVIRYNAIKPRKHALFPKYEHFVADERYAHIARMLGLPASSAAEGVESLVKAIIDLGKSLNINMSIAGQGVAKDQFEEVVGLLAERAFEDQCTTANPKLPLISELKEIYMKAYKGE

SEQ ID NO: 39685 - DNA, 2610 bp, Staphylococcus aureus subsp. aureus MRSA252
  CDS (1)..(2610): transl_table=11
atgttaactatacctgaaaaagaaaatcgtggatcgaaagaacaagaagtggcaattatgattgatgctctagctgacaaagggaaaaaggcattagaagcattatctaaaaagtcacaagaagaaattaatcatattgttcatcaaatgagcttagcagctgttgatcaacatatggtgctagcaaaattagcacatgaagaaactggaagaggtatatacgaagataaagcgattaaaaatttatacgcttctgaatatatatggaattcaataaaagacaataagacagtagggattattggtgaagataaagaaaaaggattaacgtatgtagcggaaccaattggtgttatttgtggtgttacgccaacaacaaatcctacgtcgacaactatttttaaagcgatgattgcaattaagacaggaaatccaatcatttttgcattccatccaagtgcgcaagaatcgtcgaagcgtgcagcagaagttgtattagaagcggcaatgaaggcaggtgcacctaaagatattattcaatggattgaagtgccctctatcgaagcaacaaaacaattaatgaatcacaaaggtattgcattagttctagcaacaggtggttcgggcatggttaagtctgcatattcaactggcaaaccggcattaggtgtgggaccaggtaacgtgccgtcttacattgaaaaaacagcacacattaagcgtgcagtaaatgatatcattggttcaaaaacatttgataatggtatgatttgtgcttctgaacaagttgtagtcattgataaagaaatttataaagatgttactaatgaatttaaagcacatcaagcatactttgttaaaaaagatgaattacaacgcttagaaaatgcaattatgaatgaacaaaaaacaagtattaaacctgatattgtcggtaaatctgcagttgaaatagctgaattagcaggtatacctgtccccgaaaatacaaaacttatcatagccgaaattagcggtgtaggttcagactatccgttatctcgtgaaaaattatctccagtattagccttagtaaaagcccaatctacaaaacaagcatttcaaatttgtgaagacacactacattttggtggattaggacacacagccgttatccatacagaagatgaaacattacaaaaagattttggactaagaatgaaagcttgtcgtgtacttgtaaatacaccatcagcggttggaggtattggtgatatgtataacgaattgattccgtctttaacattaggttgtggttcgtacggtagaaactcaatttcacataatgttagtgcgacagatttattaaacattaaaacaattgctaaacgacgtaataatactcaaattttcaaggtgcctgctcaaatttattttgaagaaaatgcaatcatgagtctaacaacaatggacaagattgaaaaagtgatgattgtctgtgaccctggtatggtcgaattcggttatacaaaaacagttgagaatgtattaagacaaagaacggaacagcctcaaattaaaatatttagcgaagtcgaaccgaacccatcaacgaatacagtatataaaggtctggaaatgatggttgatttccaaccggatacaatcattgcacttggtggtggttcagcgatggatgctgcaaaagcaatgtggatgttctttgaacaccctgagacatcattcttcggtgctaaacaaaagttcctagacatcggtaaacgtacttataaaataggcatgcctgaaaatgcgacgttcatttgtatccctacgacatcaggtacaggttcagaagtaacaccatttgcagttatcacagatagtgaaacaaatgtaaaatatccgttggctgattttgctttaacacctgatgttgcaattattgaccctcaatttgtgatgagtgtgccaaaaagcgttacagcagatacaggaatggatgtactaacgcatgcaatggaatcatatgtatctgtaatggcttcagattacacaagaggtttgagtctacaagcgattaaattgacgttcgaatatttaaaatcatctgttgaaaaaggtgataaagtttcaagagagaaaatgcataacgcatcaactttggctggtatggcatttgcaaatgcattcttaggcattgcacactcaattgcgcataaaattggtggggaatatggtattccgcatggtagagcgaatgcgatattactaccgcatattatccgttataatgccaaagacccgcaaaaacatgcattattccctaaatatgagttcttcagagcagatacagattatgcagatattgccaaattcttaggattaaaaggtaatacgacagaagcactcgtagaatcattagctaaagctgtctacgaattaggtcaatcagtcggaattgaaatgaatttgaaatcacaaggtgtgtctgaagaagaattaaatgagtcaattgatagaatggcagagctcgcatttgaagatcagtgtacaactgctaatcctaaagaagcgctaatcagtgaaatcaaagatatcattcaaacatcatatgattataagcaataa

SEQ ID NO: 39686 - protein, 869 aa, Staphylococcus aureus subsp. aureus MRSA252
MLTIPEKENRGSKEQEVAIMIDALADKGKKALEALSKKSQEEINHIVHQMSLAAVDQHMVLAKLAHEETGRGIYEDKAIKNLYASEYIWNSIKDNKTVGIIGEDKEKGLTYVAEPIGVICGVTPTTNPTSTTIFKAMIAIKTGNPIIFAFHPSAQESSKRAAEVVLEAAMKAGAPKDIIQWIEVPSIEATKQLMNHKGIALVLATGGSGMVKSAYSTGKPALGVGPGNVPSYIEKTAHIKRAVNDIIGSKTFDNGMICASEQVVVIDKEIYKDVTNEFKAHQAYFVKKDELQRLENAIMNEQKTSIKPDIVGKSAVEIAELAGIPVPENTKLIIAEISGVGSDYPLSREKLSPVLALVKAQSTKQAFQICEDTLHFGGLGHTAVIHTEDETLQKDFGLRMKACRVLVNTPSAVGGIGDMYNELIPSLTLGCGSYGRNSISHNVSATDLLNIKTIAKRRNNTQIFKVPAQIYFEENAIMSLTTMDKIEKVMIVCDPGMVEFGYTKTVENVLRQRTEQPQIKIFSEVEPNPSTNTVYKGLEMMVDFQPDTIIALGGGSAMDAAKAMWMFFEHPETSFFGAKQKFLDIGKRTYKIGMPENATFICIPTTSGTGSEVTPFAVITDSETNVKYPLADFALTPDVAIIDPQFVMSVPKSVTADTGMDVLTHAMESYVSVMASDYTRGLSLQAIKLTFEYLKSSVEKGDKVSREKMHNASTLAGMAFANAFLGIAHSIAHKIGGEYGIPHGRANAILLPHIIRYNAKDPQKHALFPKYEFFRADTDYADIAKFLGLKGNTTEALVESLAKAVYELGQSVGIEMNLKSQGVSEEELNESIDRMAELAFEDQCTTANPKEALISEIKDIIQTSYDYKQ

SEQ ID NO: 39687 - DNA, 2610 bp, Staphylococcus aureus subsp. aureus MSSA476
  CDS (1)..(2610): transl_table=11
atgttaactatacctgaaaaagaaaatcgtggatcgaaagaacaagaagtggcaattatgattgatgctctagctgacaaagggaaaaaagcattagaagcattatctaaaaagtcacaagaagaaattgatcatattgttcatcaaatgagcttagcagctgttgatcaacatatggtgctagcaaaattagcacatgaagaaactggaagaggtatatacgaagataaagcgattaaaaatttatacgcttctgaatatatatggaattcaataaaagacaataagacagtagggattattggtgaagataaagaaaaaggattaacgtatgtagcggaaccaattggtgttatttgtggtgttacgccaacaacaaatcctacgtcgacaactatttttaaagcgatgattgcaattaagacaggaaatccaatcatttttgcattccatccaagtgcacaagaatcgtcgaagcgtgcagcagaagttgtattagaagcggcaatgaaggcaggtgcacctaaagatattattcagtggattgaagtgccttctatcgaagcaacaaaacaattaatgaatcacaaaggtattgcattagttctagcaacaggtggttcgggcatggttaagtctgcatattcaactggcaaaccggcattaggtgtgggaccaggtaacgtgccgtcttacattgaaaaaacagcacacattaaacgtgcagtaaatgatatcattggttcaaaaacatttgataatggtatgatttgtgcttctgaacaagttgtagtcattgataaagaaatttataaagatgttactaatgaatttaaagcacatcaagcatactttgttaaaaaagatgaattacaacgcttagaaaatgcaattatgaatgaacaaaaaacaggtattaagcctgatattgtcggtaaatctgcagttgaaatagctgaattagcaggtatacctgtccccgaaaatacaaaacttatcatagccgaaattagcggtgtaggttcagactatccgttatctcgtgaaaaattatctccagtattagccttagtaaaagcccaatctacaaaacaagcatttcaaatttgtgaagacacactacattttggtggattaggacacacagccgttatccatacagaagatgaaacattacaaaaagattttggactaagaatgaaagcttgtcgtgtacttgtaaatacaccatcagcggttggaggtattggtgatatgtataacgaattgattccgtctttaacattaggttgtggttcgtacggtagaaactcaatttcacataatgttagtgcgacagatttattaaacattaaaacgattgctaaacgacgtaataatactcaaattttcaaggtgcctgctcaaatttattttgaagaaaatgcaatcatgagtctaacaacaatggacaagattgaaaaagtgatgattgtctgtgaccctggtatggtagaattcggttatacaaaaacagttgagaatgtattaagacaaagaacggaacagcctcaaattaaaatatttagcgaagtcgaaccgaacccatcaactaatacagtatataaaggtctggaaatgatggttgatttccaaccggatacaatcattgcacttggtggtggttcagcgatggatgctgcaaaagcaatgtggatgttctttgaacaccctgagacatcattcttcggtgctaaacaaaagttcctagacatcggtaaacgtacttataaaataggcatgcctgaaaatgcgacgttcatttgtatccctacgacatcaggtacaggttcagaagtaacaccatttgcagttatcacagatagtgaaacaaatgtaaaatatccgttggctgattttgctttaacacctgacgttgcaattattgaccctcaatttgtgatgagtgtgccaaaaagcgttacagcagatacaggaatggatgtactaacgcatgcaatggaatcatatgtatctgtaatggcttcagactacacaagaggtttgagtctacaagcgattaaattgacgttcgaatatttaaaatcatctgttgaaaagggtgataaagtttcaagagagaaaatgcataacgcatcaactttggctggtatggcatttgcaaatgcattcttaggcattgcacactcaattgcgcataaaattggtggcgaatatggtattccgcatggtagagcgaatgcgatattactaccgcatattatccgttataatgccaaagacccgcaaaaacatgcgttattccctaaatatgagttcttcagagcagatacagattatgcagatattgccaaattcttaggattaaaaggtaatacgacagaagcacttgtagaatcattagctaaagctgtctacgaattaggtcaatcagtcggaattgaaatgaatttgaaatcacaaggtgtgtctgaagaagaattaaatgagtcaattgatagaatggcagagctcgcatttgaagatcaatgtacaactgctaatcctaaagaagcactaatcagtgaaatcaaagatatcattcaaacatcatatgattataagcaataa

SEQ ID NO: 39688 - protein, 869 aa, Staphylococcus aureus subsp. aureus MSSA476
MLTIPEKENRGSKEQEVAIMIDALADKGKKALEALSKKSQEEIDHIVHQMSLAAVDQHMVLAKLAHEETGRGIYEDKAIKNLYASEYIWNSIKDNKTVGIIGEDKEKGLTYVAEPIGVICGVTPTTNPTSTTIFKAMIAIKTGNPIIFAFHPSAQESSKRAAEVVLEAAMKAGAPKDIIQWIEVPSIEATKQLMNHKGIALVLATGGSGMVKSAYSTGKPALGVGPGNVPSYIEKTAHIKRAVNDIIGSKTFDNGMICASEQVVVIDKEIYKDVTNEFKAHQAYFVKKDELQRLENAIMNEQKTGIKPDIVGKSAVEIAELAGIPVPENTKLIIAEISGVGSDYPLSREKLSPVLALVKAQSTKQAFQICEDTLHFGGLGHTAVIHTEDETLQKDFGLRMKACRVLVNTPSAVGGIGDMYNELIPSLTLGCGSYGRNSISHNVSATDLLNIKTIAKRRNNTQIFKVPAQIYFEENAIMSLTTMDKIEKVMIVCDPGMVEFGYTKTVENVLRQRTEQPQIKIFSEVEPNPSTNTVYKGLEMMVDFQPDTIIALGGGSAMDAAKAMWMFFEHPETSFFGAKQKFLDIGKRTYKIGMPENATFICIPTTSGTGSEVTPFAVITDSETNVKYPLADFALTPDVAIIDPQFVMSVPKSVTADTGMDVLTHAMESYVSVMASDYTRGLSLQAIKLTFEYLKSSVEKGDKVSREKMHNASTLAGMAFANAFLGIAHSIAHKIGGEYGIPHGRANAILLPHIIRYNAKDPQKHALFPKYEFFRADTDYADIAKFLGLKGNTTEALVESLAKAVYELGQSVGIEMNLKSQGVSEEELNESIDRMAELAFEDQCTTANPKEALISEIKDIIQTSYDYKQ

SEQ ID NO: 39689 - DNA, 1173 bp, Acinetobacter sp. ADP1
  CDS (1)..(1173): transl_table=11
atggcttttaaaaatattgctgaccaaacaaacggtttttatatcccttgtgtctccctttttggccctggttgtgccaaagaaattggtaccaaagcacaaaatttaggtgcaaaaaaagcactcatcgtgactgatgctggtttatttaaatttggtgtagctgacactatcgcagcataccttaaagaagctggcgtagacagtcatattttcccaggcgctgaacccaatccgacagataaaaacgtacataatggcgttgatgcatataataccaatggatgtgactttattgtatcgctcggtggtggatcatctcacgactgtgcaaaaggtattggattagttaccgcaggcggtggtcacattcgtgattacgaaggaattgataaaagtactgttccaatgacgccgttaattgcagtcaataccactgcaggcacagcatctgaaatgacacgtttctgtattattaccaatacagatacacatgtaaaaatggcgattgtagattggcgttgtaccccactgattgccattgatgaccctaagctcatgattgctaagcctgcaagcctgactgctgcgactggtatggatgcgctgacacatgctgtcgaagcttatgtatctactgctgcgaacccaatcacagacgcctgtgccgaaaaagcaatcagcatgatcagtgaatggctcagcccagctgttgccaatggtgaaaaccttgaagcacgtgatgcaatgagctatgcccaatatcttgcaggtatggcatttaacaatgcgtcattaggttatgttcatgccatggcgcaccaacttggcggtttctacaatctgccacacggcgtatgtaatgcggtattgttgccacacgtttgtgagttcaacctgattgcttgcccagagcgttatgcacgtatcgcagaattaatgggcgtaaatacacacggccttacggtgactgaagctgcatatgctgcaatcgatgcaattcgtacattatcaaaatcaattggtatcccatctggcttgaccgagcttggtgtaaaaactgaagatcttgcagtaatggccgaaaatgcacaaaaagacgcgtgtatgttgactaatccacgcaaagcaaatcacgctcaagttgtagatattttcacagcagcattgtaa

SEQ ID NO: 39690 - protein, 390 aa, Acinetobacter sp. ADP1
MAFKNIADQTNGFYIPCVSLFGPGCAKEIGTKAQNLGAKKALIVTDAGLFKFGVADTIAAYLKEAGVDSHIFPGAEPNPTDKNVHNGVDAYNTNGCDFIVSLGGGSSHDCAKGIGLVTAGGGHIRDYEGIDKSTVPMTPLIAVNTTAGTASEMTRFCIITNTDTHVKMAIVDWRCTPLIAIDDPKLMIAKPASLTAATGMDALTHAVEAYVSTAANPITDACAEKAISMISEWLSPAVANGENLEARDAMSYAQYLAGMAFNNASLGYVHAMAHQLGGFYNLPHGVCNAVLLPHVCEFNLIACPERYARIAELMGVNTHGLTVTEAAYAAIDAIRTLSKSIGIPSGLTELGVKTEDLAVMAENAQKDACMLTNPRKANHAQVVDIFTAAL

SEQ ID NO: 39691 - DNA, 1185 bp, Acinetobacter sp. ADP1
  CDS (1)..(1185): transl_table=11
atggcaaagccttattacgaatttttttgtccagtaaaagtgattgcaggcaatgctgctttagaacatattccatttgaacttgcgaccttaggttcaaaacgtccaatgatcatcaccgataaaggtgtaagagccaatcacctgcttgaacccattgaagccgctttcagctctactgatgccgaaattggttatatctttgatgatgtgccacctgattcaagtttacaaacggtaagaaaagcagctcagctttatcgcgatcatcattgtgatgcgattattgcaattggcggcggttcagtcattgatacttcaaaagctaccaatattttagtctctgaaggcggagatgacctgctaaaatattctggcgctcacaatttacccaaaccccttaagccattttttgtgattcccactacgtctggtacaggctctgaagccaccatggtggctgtggtatccgacacagaaaaaaatgtcaaaatggcttttgcatcgtattacttgatgccacacgcggccattcttgacccacgtatgacactgaccttgcctgctcatttaaccgccatgacaggtatggatgccttaacgcattgtgttgaagcatatacctgtttagcatctaatccgctcagtgatgcttacgccagcgcaggtatcaagaaaatcagtgaacacctttttaacgttattgaaaacccaagcgattcacaagggcgtctggagcttgcacaagcatcaaccatggcgggcattgccttctcaaattcgatggtaggtttggtacattcgctgggacatgcacttggtgcagtagcacatctgccccatggcttatgcatgaatttatttttaccctatgtactggagtacaataaggaagtaaacggcgataaaattggtgagttgttattgccacttgcaggcgcagatatttatgcgcaaacacctgcaaatttacgcgcagataaagccatttcaaccattctggcaatgcgtgatcgcctgtttagcttaacaaagttaccgcgtacattacgtgaaacaggtaaaattaccgaagcccaactggatgaagtggctgaaaaggcgctcaatgatggttcgattatttacaacccgaaagaagcgaatattcaggatttaaaagcaatattacacaaagcctggtaa

SEQ ID NO: 39692 - protein, 394 aa, Acinetobacter sp. ADP1
MAKPYYEFFCPVKVIAGNAALEHIPFELATLGSKRPMIITDKGVRANHLLEPIEAAFSSTDAEIGYIFDDVPPDSSLQTVRKAAQLYRDHHCDAIIAIGGGSVIDTSKATNILVSEGGDDLLKYSGAHNLPKPLKPFFVIPTTSGTGSEATMVAVVSDTEKNVKMAFASYYLMPHAAILDPRMTLTLPAHLTAMTGMDALTHCVEAYTCLASNPLSDAYASAGIKKISEHLFNVIENPSDSQGRLELAQASTMAGIAFSNSMVGLVHSLGHALGAVAHLPHGLCMNLFLPYVLEYNKEVNGDKIGELLLPLAGADIYAQTPANLRADKAISTILAMRDRLFSLTKLPRTLRETGKITEAQLDEVAEKALNDGSIIYNPKEANIQDLKAILHKAW

SEQ ID NO: 39693 - DNA, 1155 bp, Erwinia carotovora subsp. atroseptica SCRI1043
  CDS (1)..(1155): transl_table=11
atgatggttaacagaatgatccttaacgaaacatcctattttggcacaggcgctatcgctcagattgccgatgaagtaaaacggcgcgggttcaagaaagccctgctggtgacggacaaagatttggttaaattcggtgtcgccgccaaggttacggcgaagctggatgcggcagggttgccctacgatatctacgatgaggtgattcccaaccctaccatcggcgtggtggaaagaggcatcgagcacttcaaggcatcgcaggccgattacctgatcgcgattggcggcggctcaccgcaggatacctgcaaagccatcggaattattatcaataatcctgagttcgccgatgtccgcagcctcgaaggcgttgcgcccacccgacgcccctcggtgccgattatcgctatcccgaccacttcaggcacagccgcagaggttacgatcaattacgtgatcaccgacgaagaaaaacgccgcaaattcgtgtgcgtcgatccacatgacattccaattgtcgccatcgtcgatcctgacatgatgatgagcatgcctgcctcgctgaaagcggcaacggggattgacgctctgacgcacgccattgagggtttcaccaccaaagccgcctgggaactgactgatacgctgcacctgaaggccattgaaattatcagccgttcactgcgtgattccgttgccgggaagccgaaaggcgtggaagagatggcgctgggacaatacatcgccggtatggggttctcgaacgttgggcttgggctggtacacggcatggcgcacccactcggcgcgttctacaacaccccgcacggcgtcgctaatgcgatcctactgccgcatatcatggcctacaacgcagattacaccggtgaaaaattccgggatatcgccgttgcgatgggggtaaacggcgcgacagatatgtcgattgctcaggcgagggaagcagctattcatgcggtgcgacagctttctcacgatgtagatatcccaccgagattgcgcgatgtcggcgtgagagaagaggatattccagcgctggcgcaggccgcctttgacgatgtctgcaccggcggtaacccgcgcgataccaacatcgacgacataaaagcgctgtatcaatctatttattaa

SEQ ID NO: 39694 - protein, 384 aa, Erwinia carotovora subsp. atroseptica SCRI1043
MMVNRMILNETSYFGTGAIAQIADEVKRRGFKKALLVTDKDLVKFGVAAKVTAKLDAAGLPYDIYDEVIPNPTIGVVERGIEHFKASQADYLIAIGGGSPQDTCKAIGIIINNPEFADVRSLEGVAPTRRPSVPIIAIPTTSGTAAEVTINYVITDEEKRRKFVCVDPHDIPIVAIVDPDMMMSMPASLKAATGIDALTHAIEGFTTKAAWELTDTLHLKAIEIISRSLRDSVAGKPKGVEEMALGQYIAGMGFSNVGLGLVHGMAHPLGAFYNTPHGVANAILLPHIMAYNADYTGEKFRDIAVAMGVNGATDMSIAQAREAAIHAVRQLSHDVDIPPRLRDVGVREEDIPALAQAAFDDVCTGGNPRDTNIDDIKALYQSIY

SEQ ID NO: 39695 - DNA, 2676 bp, Erwinia carotovora subsp. atroseptica SCRI1043
  CDS (1)..(2676): transl_table=11
atggccgtaaccaacgttgctgaacttaacgcactggtcgaaagagttaaaaaggcacagcaggaatttgccacttacactcaggaacaagtggacaagatcttccgcgctgccgcactcgctgcatcggatgcccgtatcccgctggcaaaaatggcggttgctgaatccggtatggggatcgtggaagataaagtcatcaaaaaccacttcgcatccgaatacatttataacgcctatcaggatgaaaaaacctgtggcgtcctctctactgatgacactttcggtactattaccattgcagagcctattggcctgatttgcggtattgttcccaccaccaaccccacttctaccgcgatttttaaagcgctgatcagcctgaagactcgtaacgggattatcttctctccccatccacgtgcaaaaaatgcgaccaataaagccgcagacattgtactgcaagctgcgattgccgctggcgccccgaaagatatcatcggctggattgatcaaccgtccgtcgatttatccaaccaactgatgcaccacccagatatcaacctgattctggctaccggcgggccgggtatggtgaaagcggcatacagctcaggtaaaccggcgatcggcgtaggtgcaggtaacacccccgttgttattgacgaaacggcggatattaagcgtgccgttgcctctatcctgatgtcgaaaaccttcgataacggcgtcatttgtgcgtcagaacagtcagtcatcgtggtagacagcgcctatgatgccgtacgtgagcgtttcgccacccacggcggctacatgctgaaaggcaaagaacttcatgccgtacaaggcattctgctgaaaaacggctcactgaatgccgacattgtgggccagccagcaccaaagatcgctgaaatggcgggtatcaccgtccctgcgaacaccaaagtgctgatcggtgaagtgacggccgttgatgaatccgaaccgtttgcccatgaaaaactgtctccgacgctggcgatgtaccgggcgaaagacttcaatgacgccgtcattaaagcggaaaaactggtggcaatgggtggcatcggtcacacatcctgcctgtataccgatcaggacaatcagccagagcgtgtaaatcatttcgggaatatgatgaaaacggcacgtatcctgattaacacgccggcttctcagggtggtatcggcgatctctacaacttcaaactcgctccgtctctgacactgggctgtggctcatggggcggaaactccatctccgaaaacgtcggtccgaagcacttgatcaacaaaaaaacggtagccaagcgagcagagaatatgttgtggcataaacttcctaaatccatttacttccgtcgtggctcactgcctatcgcacttgaagaagtcgcatccgatggtgcaaaacgcgcatttatcgtgactgaccgcttcctgttcaataatggctacgttgatcaggtaacttccgtactgaaacaacacggactggaaaccgaagttttctttgaagttgaagctgacccgacactgagcatcgtgcgcaaaggcgcggaacaaatgcactccttcaagcccgatgtgattattgcactgggtggcggttctccgatggatgctgcgaagatcatgtgggtgatgtatgagcaccctactacacacttcgaagagctggcgctgcgctttatggatatccgtaaacgtatctataagttcccgaaaatgggtgtcaaagccaagatggtggcgattaccactacatccggtactggttccgaagtcacgccatttgccgtggtgaccgacgatgcaactggacagaaatatccgttggcggactatgcgctgaccccagatatggccattgttgatgccaatctggtgatgaacatgccgaaatcgctgtgtgcctttggtgggctcgatgccgtaacccactcgctggaagcctatgtttccgtgctggcaaatgaatattcagacggacaggcgttacaagcgctgaaactgctgaaggaaaatctgccggacagctaccgtgacggtgcgaaaaacccggttgcccgtgagcgcgtgcacaacgccgcgacgattgcgggtatcgcgtttgccaacgccttcctcggcgtctgtcactcaatggcgcataaactgggctcggagttccatattccgcacggtctggctaatgccatgctgatctcgaacgtgattcgctataacgcgaacgataacccgaccaaacaaacaacgttcagccaatatgaccgtccgcaagctcgtcgtcgttacgctgaaatagccgaccacctacgtttgactgcgcctagcgaccgtactgcacagaaaatcgagaaattactgaactggctggaagaaataaagaccgaactggggatcccagcgtccattcgtgaagcgggcgtacaggaggccgatttcctggctaaggtcgataaactgtcagaagatgcgttcgacgatcagtgtactggtgctaacccacgctacccgctgatttctgaattgaaacagattctgctggacacttactatggtcgtaagttctctgaagaggtaaaaacggaaaccgttgaacctgtagcaaaagccgccaaaaccggcaagaaagccgcacattaa

SEQ ID NO: 39696 - protein, 891 aa, Erwinia carotovora subsp. atroseptica SCRI1043
MAVTNVAELNALVERVKKAQQEFATYTQEQVDKIFRAAALAASDARIPLAKMAVAESGMGIVEDKVIKNHFASEYIYNAYQDEKTCGVLSTDDTFGTITIAEPIGLICGIVPTTNPTSTAIFKALISLKTRNGIIFSPHPRAKNATNKAADIVLQAAIAAGAPKDIIGWIDQPSVDLSNQLMHHPDINLILATGGPGMVKAAYSSGKPAIGVGAGNTPVVIDETADIKRAVASILMSKTFDNGVICASEQSVIVVDSAYDAVRERFATHGGYMLKGKELHAVQGILLKNGSLNADIVGQPAPKIAEMAGITVPANTKVLIGEVTAVDESEPFAHEKLSPTLAMYRAKDFNDAVIKAEKLVAMGGIGHTSCLYTDQDNQPERVNHFGNMMKTARILINTPASQGGIGDLYNFKLAPSLTLGCGSWGGNSISENVGPKHLINKKTVAKRAENMLWHKLPKSIYFRRGSLPIALEEVASDGAKRAFIVTDRFLFNNGYVDQVTSVLKQHGLETEVFFEVEADPTLSIVRKGAEQMHSFKPDVIIALGGGSPMDAAKIMWVMYEHPTTHFEELALRFMDIRKRIYKFPKMGVKAKMVAITTTSGTGSEVTPFAVVTDDATGQKYPLADYALTPDMAIVDANLVMNMPKSLCAFGGLDAVTHSLEAYVSVLANEYSDGQALQALKLLKENLPDSYRDGAKNPVARERVHNAATIAGIAFANAFLGVCHSMAHKLGSEFHIPHGLANAMLISNVIRYNANDNPTKQTTFSQYDRPQARRRYAEIADHLRLTAPSDRTAQKIEKLLNWLEEIKTELGIPASIREAGVQEADFLAKVDKLSEDAFDDQCTGANPRYPLISELKQILLDTYYGRKFSEEVKTETVEPVAKAAKTGKKAAH

SEQ ID NO: 39697 - DNA, 2643 bp, Streptococcus pyogenes MGAS10394
  CDS (1)..(2643): transl_table=11
atgactgaaggacataatactgttgaaacaacctctgtttctgtgacaattgatgctcttgttcaaaaaggtttagctgctcttgaagagatgcgtaagcttgaccaagaacaagttgactatatcgtagcaaaagcttctgttgctgccttggatgcacacggagaacttgctaaacatgcttacgaagaaacaggtcgtggtgtctttgaagataaagcaacaaaaaatctatttgcttgtgagcatgtggttaataacatgcgccatcaaaaaacagtaggaattattgaagaggatgacgtgacaggtttgacgttgattgctgagccggttggtgttatctgtgggattacaccaacaactaacccaacttcaacagctatctttaaatctttgatctcgttaaaaacacgtaatccaattatttttgcctttcacccatcagcacaagaatcatcagcacatgccgctcgtattgttcgtgatgctgctattgccgctggtgctcctgaaaattgtgtgcagtgggttgaaacaccatcacttgaagcaacaaatgctttgatgaatcatgacggcattgccactatccttgcgacaggtggaaatgcgatggttaaagcagcttactcatgtggaaaacctgctcttggggtaggtgcaggtaatgttccagcctatgtggaaaaatctgctaatatccgtcaagccgctcatgatattgtgatgtctaaatcatttgataatggtatggtctgtgcctctgaacaagctgttatcatcgataaagaaatctatgacgattttgtagcagaattcaaatcttaccacacttattttgttaataaaaaagaaaaagctcttcttgaagaattctgttttggtgcaaaagcaaatagcaaaaactgtgctggtgcaaaattaaatccaaatattgtaggaaaaccagctacttggattgcagcacaagctggatttactgttccagaaggaacgaatattcttgctgcagaatgtaaagaagtttcagaaaatgagcctttaacacgtgaaaaattatctccagtcattgctgttttgaaatctgaatcacgtgaagacggtgttgaaaaagctcgtcaaatggttgaatttaatggacttggtcactcagctgccattcatacagcagatgcagagttggcaaaagaatttggaactagaatccgtgctatccgcgtcatctggaattcaccttctacatttggtggtatcggggatgtttacaatgctttcttaccatcattgactcttggttgtggttcgtatggacgtaacgcagttggtgataacgttagtgctataaatctcttgaacatcaaaaaagtaggaagacgtagaaataatatgcaatggtttaaagttccttcaaaaacatacttcgaacgtgattcaattcaatatttgcaaaaatgtcgtgatgttgaacgtgtcatgattgttacagatcacgctatggttgagcttggtttcttggatcgtatcattgaacaacttgatcttcgtcgcaataaagttgtttatcagatctttgctgaagtagaaccagatccagacattacaactgttatgaaaggtactgaattaatgcgtaccttcaaaccagacaccattattgcccttggcgggggatctcctatggatgcagccaaagttatgtggctcttttatgaacaaccagaagttgatttccatgacctcgttcaaaaattcatggatatccgcaaacgtgcgttcaaattcccagaacttggtaagaaaacaaaatttgttgctatcccaacaacttctggaacaggttcagaggtgacaccatttgccgttatctctgacaaagcaaataatcgtaaatatccaatcgctgattactcattaacaccaactgtagccattgttgacccagctttggtattgactgttccaggctttattgctgctgatactggtatggacgttttgacacacgcaaccgaagcttacgtgtcacaaatggccaatgactttacggatggtttagctcttcaagccattaaaattgtttttgataatcttgaaaaatcagttaaaacagccgattttgaagcacgtgaaaagatgcacaatgcgtcaactatggcaggtatggctttcgccaatgcattcttaggtatttctcactcaatggcgcataaaattggcgcacaattccataccgtacacggacgtacaaatgcaattcttttgccgtatgttatccgctataatggaactcgtccagctaaaacggcgacatggcctaagtataattactaccgtgcggatgaaaaataccaagacattgcgaaattgttagggcttccagcttctacaccagaagaagcagtggaatcttatgcgaaagctgtttatgatctgggttgccgagttggtattcaaatgaacttcaaagctcaaggtatcgacgaaaatgaatggaaagaacattctcgtgaattggcttaccttgcttatgaagaccaatgttcacctgctaacccacgtcttccaatggttgatcacatgcaagaaattattgaagatgcttactatggttatgctgaacgtccaggacgacgtaagtga

SEQ ID NO: 39698 - protein, 880 aa, Streptococcus pyogenes MGAS10394
MTEGHNTVETTSVSVTIDALVQKGLAALEEMRKLDQEQVDYIVAKASVAALDAHGELAKHAYEETGRGVFEDKATKNLFACEHVVNNMRHQKTVGIIEEDDVTGLTLIAEPVGVICGITPTTNPTSTAIFKSLISLKTRNPIIFAFHPSAQESSAHAARIVRDAAIAAGAPENCVQWVETPSLEATNALMNHDGIATILATGGNAMVKAAYSCGKPALGVGAGNVPAYVEKSANIRQAAHDIVMSKSFDNGMVCASEQAVIIDKEIYDDFVAEFKSYHTYFVNKKEKALLEEFCFGAKANSKNCAGAKLNPNIVGKPATWIAAQAGFTVPEGTNILAAECKEVSENEPLTREKLSPVIAVLKSESREDGVEKARQMVEFNGLGHSAAIHTADAELAKEFGTRIRAIRVIWNSPSTFGGIGDVYNAFLPSLTLGCGSYGRNAVGDNVSAINLLNIKKVGRRRNNMQWFKVPSKTYFERDSIQYLQKCRDVERVMIVTDHAMVELGFLDRIIEQLDLRRNKVVYQIFAEVEPDPDITTVMKGTELMRTFKPDTIIALGGGSPMDAAKVMWLFYEQPEVDFHDLVQKFMDIRKRAFKFPELGKKTKFVAIPTTSGTGSEVTPFAVISDKANNRKYPIADYSLTPTVAIVDPALVLTVPGFIAADTGMDVLTHATEAYVSQMANDFTDGLALQAIKIVFDNLEKSVKTADFEAREKMHNASTMAGMAFANAFLGISHSMAHKIGAQFHTVHGRTNAILLPYVIRYNGTRPAKTATWPKYNYYRADEKYQDIAKLLGLPASTPEEAVESYAKAVYDLGCRVGIQMNFKAQGIDENEWKEHSRELAYLAYEDQCSPANPRLPMVDHMQEIIEDAYYGYAERPGRRK

SEQ ID NO: 39699 - DNA, 1164 bp, Desulfotalea psychrophila LSv54
  CDS (1)..(1164): transl_table=11
gtgactaacatgctccatacattcaaatccgtaagtaagattgttcacggtgcaggctctattgctgacgcaggtaaagaggtaaaacgtcttggtggcaagcgcgccatcatcgtgactgatccaggtcttgcttcactgggtttgcacattgcagtagaggaagctcttgcccatgcaggtattgaatttgttctttatgcaaaagcagagcttgaaccaaacgcaacctctattcagcattgtgctgatgttgctaaggaattcaaggcagacgttatcatcggttttggtggtggtagtgctcttgataccgccaaggctgcatccgttcttgccgttcacgaaggtccaatctctaaatatttcggtgttgatgttgttcctggaccatgtatgccacttattgcagtgccaaccaccgctggtaccggtagcgagatgacctctatctctgtactcaccaacaacgagaccggcgcaaagcttggtatcgttagtgactatatctacgcatctgctgttatccttgacccagcattgactacaggtcttccaccacatataaccgcaatgaccggtgttgatgcctttgttcacgccatggaatcctttgtaggccttatgtctactccattcacggatgcccttaatcttcaggcaatgaagattattgctaagaatatccgcaaggcatatgccaacggtaataatcttgaggctcgtgaggcaatgctttacggttctgcccttgctggaatgggttttggtaatacccagaacggtgttatccacgctgttggtacctctgttcctgcaaagtataagttgccacacggtttgcttatggcagcagtagctccaatcggtatcgattacaactacatgtctaacccagagaagtatgcagttgttgctgatatcttgagccacgttgtggagagcgacgagccagtagaagatcgcgcagcttactgtgcagatgcatttgtgcaaatgcttgaagatcttgatattgctccaggccttgctccttatggtgtgaccgcagaagatctgccaggaattgctacccgcgctgcagcagctaagcgtttgatggataataatccacgtcagggtaatgagaagcaactcttgaccatgttggaaaaacatttctag

SEQ ID NO: 39700 - protein, 387 aa, Desulfotalea psychrophila LSv54
MTNMLHTFKSVSKIVHGAGSIADAGKEVKRLGGKRAIIVTDPGLASLGLHIAVEEALAHAGIEFVLYAKAELEPNATSIQHCADVAKEFKADVIIGFGGGSALDTAKAASVLAVHEGPISKYFGVDVVPGPCMPLIAVPTTAGTGSEMTSISVLTNNETGAKLGIVSDYIYASAVILDPALTTGLPPHITAMTGVDAFVHAMESFVGLMSTPFTDALNLQAMKIIAKNIRKAYANGNNLEAREAMLYGSALAGMGFGNTQNGVIHAVGTSVPAKYKLPHGLLMAAVAPIGIDYNYMSNPEKYAVVADILSHVVESDEPVEDRAAYCADAFVQMLEDLDIAPGLAPYGVTAEDLPGIATRAAAAKRLMDNNPRQGNEKQLLTMLEKHF

SEQ ID NO: 39701 - DNA, 1164 bp, Desulfotalea psychrophila LSv54
  CDS (1)..(1164): transl_table=11
gtgattaatatgcttcatacatttaaatctgtaagtaagatcgttcacggtgcaggatctattgctgacacaggtaaagaggtgaaacgtcttggtggcgagcgtgccattatcgtaactgatccaggtcttgcttcacttggtttgcatgtagctgtggaagaggcattggctcttgctggtattgagtttgttctttacgccaaggcagagcttgaaccaaatgcaacctctattcaagactgtgctgatgctgctaaggcttttaacgcagacgttatcatcggttttggtggtggtagtgctcttgataccgccaaggctgcatccgttcttgccgttcacgaaggtccaatctctaaatacttcggtgttgatgttgttcctggaccatgtatgccacttattgcagtgccaaccaccgctggtaccggtagcgagatgacctctatctctgtactcaccaacaacgagaccggcgcaaaacttggtatcgttagtgactatatctacgcagctgctgttattcttgacccagcattgactacaggtcttccaccacatataactgcaatgaccggtgttgatgcctttgttcacgccatggaatcctttgtaggccttatgtctactccattcacagatgcccttaatcttcaggcgatgaagattattgctaagaatatccgtaaggcatatgccaacggtaataatcttgaggctcgtgaggcgatgctttacggttctgctcttgctggtatgggttttggtaatacccagaacggtgttatccacgctgttggtacctctgttcctgcaaagtataagttgccacacggtttgcttatggcagcagtagctccaattggtatcgattacaactatatggctaacccagagaagtatgcagttgttgctgatatccttacccacgttgtggctggtgaagagtcggtagaagatcgtgccgcttattgtgcagatgcatttgtgcaaatgcttgaagatcttgatattgctccaggcctttctccctacggtgtaaccgaggaagatctgccaggaatcgctacccgcgccgccgcagccaagcgtttgatggataataatccacgccaaggtaacgagaaacaactcttgaccatgttgcaaaagcacttctag

SEQ ID NO: 39702 - protein, 387 aa, Desulfotalea psychrophila LSv54
MINMLHTFKSVSKIVHGAGSIADTGKEVKRLGGERAIIVTDPGLASLGLHVAVEEALALAGIEFVLYAKAELEPNATSIQDCADAAKAFNADVIIGFGGGSALDTAKAASVLAVHEGPISKYFGVDVVPGPCMPLIAVPTTAGTGSEMTSISVLTNNETGAKLGIVSDYIYAAAVILDPALTTGLPPHITAMTGVDAFVHAMESFVGLMSTPFTDALNLQAMKIIAKNIRKAYANGNNLEAREAMLYGSALAGMGFGNTQNGVIHAVGTSVPAKYKLPHGLLMAAVAPIGIDYNYMANPEKYAVVADILTHVVAGEESVEDRAAYCADAFVQMLEDLDIAPGLSPYGVTEEDLPGIATRAAAAKRLMDNNPRQGNEKQLLTMLQKHF

SEQ ID NO: 39703 - DNA, 1182 bp, Desulfotalea psychrophila LSv54
  CDS (1)..(1182): transl_table=11
atggctattcaagagcaagtatacggttttttcattccaagtgtgactcttatcggcattggtgctgcccgggaaatccctgcacgcatacagtcacttggtggcagaaagcccctcatcgtcaccgataagggcatcacaggcgctggcatcaccaaacagatcactgatctctgtgacggagcaggaatggaatatgcgatatatgataagactgttcccaatccaacagacattaatgtccatgaaggcatagatgtatacaagagaaatggttgtgatagtcttatcacccttgggggtggttcatcccacgattgtggtaagggaattggccttgttgttgccaacggcggtagaattaatgattatgagggagtggataaagccaccaagccaatgccaccctatattgccgtaaacaccacggcaggcacagcatctgagatgactagatttgctgttatcaccgatacccgccgtagggtaaagatggccatcgccgattggcgagtaaccccgggtatcgcccttgatgatccaatgctgatgatgggaatgccaccagcacttaccgcagccaccggcatggatgcccttactcactcagttgaagcctatgtatcaactgcggcaaccccactgaccgactccgctgcagagaaatctatccaactcatttctcaacacctccgcccagccgtcgccaatggcagcgacatcaatgcgcgggagggtatgtgctacgcccaataccttggcggcatggccttcaacaatgcaagccttggccacgtacacgccatggcccatcagcttggcggtttctacgatctaccccatggtgaatgtaacgccatcctcctcccccatgtaagtcgctttaacctgattgccaaggtcgcgcgttatgcaaaaattgcagaactgctgggcgaagatatcaaaggactctctcagcgtgatgcggcagaacttgccattgagtccatagaacagctctctcaggatgttggcataccagcagggcttgttgagctgggcagacgttatggtaaagatgttgaggaaaaagacatcgatatcatgacggtaaatgcccagaaagatatctgtggcctgaccaatccacgctgtctcagagacagcgacgtaaaagaaatttacagggccgctctctag

SEQ ID NO: 39704 - protein, 393 aa, Desulfotalea psychrophila LSv54
MAIQEQVYGFFIPSVTLIGIGAAREIPARIQSLGGRKPLIVTDKGITGAGITKQITDLCDGAGMEYAIYDKTVPNPTDINVHEGIDVYKRNGCDSLITLGGGSSHDCGKGIGLVVANGGRINDYEGVDKATKPMPPYIAVNTTAGTASEMTRFAVITDTRRRVKMAIADWRVTPGIALDDPMLMMGMPPALTAATGMDALTHSVEAYVSTAATPLTDSAAEKSIQLISQHLRPAVANGSDINAREGMCYAQYLGGMAFNNASLGHVHAMAHQLGGFYDLPHGECNAILLPHVSRFNLIAKVARYAKIAELLGEDIKGLSQRDAAELAIESIEQLSQDVGIPAGLVELGRRYGKDVEEKDIDIMTVNAQKDICGLTNPRCLRDSDVKEIYRAAL

SEQ ID NO: 39705 - DNA, 1182 bp, Desulfotalea psychrophila LSv54
  CDS (1)..(1182): transl_table=11
atggctattcgtgaacaagtaaacggtttttttatcccaagcgtaactcttatcggtattggcgctgctaaagaaatccctgcacgcctccagtcacttggtggaaaaaagcctctcattgttactgataaaggaattactggcgctggaatcaccaagcagatcaccgatctctgtgatgcggcaggaatgacatacgtaatatatgacaagactatccccaatccaaccgatctcaatgttgctgaaggtgaacaggcatataaagatggtgagtgtgatagtcttatcacccttggcggtggttcatcccacgattgcggcaaaggcattggccttgttattgccaacggtggcaccattcatgattacgaaggagtagatcagtctacccaggcaatgcctccttatattgcagtaaacaccacagcaggtacagcctctgagatgactcgtttctgtatcatcaccgataccagccgtaaggtaaaaatggccatcgttgattggcgagtaactccaggtatcgccctcgatgatccaatgttaatgatgggaatgccacctgcacttaccgcagccactggtatggacgcactcactcactcaattgaagcctatgtttctactgcagctaccccacttaccgactctgctgcagaaaaatctattcaactcatctcccaacatcttcgtcctgccgttgctaatggcagtgacattgatgcacgagagggcatgtgctacgcccagtaccttggcggcatggcattcaacaatgcaagtcttggtcacgttcatgctatggctcatcagcttggcggtttctacgacctgccccatggcgagtgtaatgccatcctccttccccatgtgagtcgctttaaccttattgccaaggttggacgttatgcaaaaattgcagaattactgggtgaagatgtcgctggactttcagaacgtgatgcggcagagcttgccattcaatccatagagcaactttctaaagatgttggtattccatctggccttaaagagctaggcagacgttatggcaaagatgtagaagcagaagacatcgacaccatgacagctaatgcccaaaaagatgcctgtggccttaccaatccacgtatccttagagatatcgatgtaaaaaatatatataaagctgctctctag

SEQ ID NO: 39706 - protein, 393 aa, Desulfotalea psychrophila LSv54
MAIREQVNGFFIPSVTLIGIGAAKEIPARLQSLGGKKPLIVTDKGITGAGITKQITDLCDAAGMTYVIYDKTIPNPTDLNVAEGEQAYKDGECDSLITLGGGSSHDCGKGIGLVIANGGTIHDYEGVDQSTQAMPPYIAVNTTAGTASEMTRFCIITDTSRKVKMAIVDWRVTPGIALDDPMLMMGMPPALTAATGMDALTHSIEAYVSTAATPLTDSAAEKSIQLISQHLRPAVANGSDIDAREGMCYAQYLGGMAFNNASLGHVHAMAHQLGGFYDLPHGECNAILLPHVSRFNLIAKVGRYAKIAELLGEDVAGLSERDAAELAIQSIEQLSKDVGIPSGLKELGRRYGKDVEAEDIDTMTANAQKDACGLTNPRILRDIDVKNIYKAAL

SEQ ID NO: 39707 - DNA, 1218 bp, Desulfotalea psychrophila LSv54
  CDS (1)..(1218): transl_table=11
atgcacagacaacccatacaaatgaggaaaaaattcatggctattcgagagcaagtatacggttatttcattcccagtgtaactcttatcggcattggcgctgctaaagaaatccctgcccgcctccaatcacttggtggcaaaaagcctctgattgtaacagacaaaggcattacaggcgctggaatcaccaaacagatcaccgatctctgtgatgcggcaaaaatggaatatgctgtatacgatgagactattccaaatccaaccgatattaatgttgctcacggtgtagaggcctatagcaaaaatggttgtgatagtcttattaccctcggtggcggttcatcccatgattgtggtaaaggcgtcggccttgttattgccaacggtggcaagattcatgactacgagggggtagatcaatccaccaagccaatgcctccatatattgccgtaaacaccactgcaggcacagcctctgaaatgacccgtttctgtatcatcaccgataccagccgtaaggtaaaaatggccatcgttgactggcgagtaaccccgggtatcgccctcgatgatccaatgttaatgatgggaatgccaccagcacttaccgcagccacaggtatggacgctcttactcactcaattgaagcctatgtttcaactgcggccaccccacttaccgactccgctgcagaaaaatcaattcagctcattgcccaacatcttcgccctgccgttgccaatggcagtgacatcaacgcccgagagggtatgtgctacgcccagtaccttggcggtatggcattcaacaatgcaagtcttggtcacgtccatgctatggctcatcagcttggcggtttctacgacctgccccatggcgaatgtaatgcaatcctccttccccacgtaagtcgctttaaccttattgccaaggttggacgttatgcaaaaattgcagaactgttgggcgaagatatcaccggactttcacagcgtgatgcggcagagcttgccatccaatccatagaacagctcgcccaggatgttggtattccagcaggccttaaggaattaggcagacgttatggcaaggatgtagaagagaaagacatcgatatcatgacagcgaatgcccaaaaagatgcctgtggccttaccaatccacgtggcctcagagatgctgatgtaaaagcaatttacaaggctgctctctag

SEQ ID NO: 39708 - protein, 405 aa, Desulfotalea psychrophila LSv54
MHRQPIQMRKKFMAIREQVYGYFIPSVTLIGIGAAKEIPARLQSLGGKKPLIVTDKGITGAGITKQITDLCDAAKMEYAVYDETIPNPTDINVAHGVEAYSKNGCDSLITLGGGSSHDCGKGVGLVIANGGKIHDYEGVDQSTKPMPPYIAVNTTAGTASEMTRFCIITDTSRKVKMAIVDWRVTPGIALDDPMLMMGMPPALTAATGMDALTHSIEAYVSTAATPLTDSAAEKSIQLIAQHLRPAVANGSDINAREGMCYAQYLGGMAFNNASLGHVHAMAHQLGGFYDLPHGECNAILLPHVSRFNLIAKVGRYAKIAELLGEDITGLSQRDAAELAIQSIEQLAQDVGIPAGLKELGRRYGKDVEEKDIDIMTANAQKDACGLTNPRGLRDADVKAIYKAAL

SEQ ID NO: 39709 - DNA, 1230 bp, Desulfotalea psychrophila LSv54
  CDS (1)..(1230): transl_table=11
atgctatatctttcctgttactttttggttcagggaacaaaaaggttattgctcttttttgcacacagaggagaaagtttgatgtacattaccaagtttgcaattccagagattatttttggccggggaagcctaaaacatacgggcaaatgtgccctacgcctcggggcaaaaaaggtctttcttgtcagcgactccggcattgaaaaggccggctgggtggccaaactgatcagcatactcgaagcagaaggcgttgattcggtgtattactcacatgtttcacccaacccaagagatttcgaagtagaagagggggcaaagatttaccaggaagaaggtgccgatgtgattattgctctcggaggagggagcgccatcgacacggccaaaggaatcgccatcatcgccagtaatggtggcagaatacgagattatgaaggtgctaaccgggtcaaccttcccctgccgccaatgattctgatcaccaccacggcaggaagtggctctgaaatttctcaattctgcatcatcaccgatatggccagaaaggtgaaaatgtcaatcatcacccgtaccatagtggccaacctcgctattatagatccctccctgctgacaaccaagagcacccaactcattattcactcagcagttgatgcctttgcccatgcagttgaagcctatctctctaaaattgcatccccttttactgaaactcattcactccaggccatcgctctcatttacgaatacctacccaaagccatcattaccggctcactcgatgatctggaacaactcagtatcgcttcggtttctgcatctatggcctttagcaatgcaagccttggcgcggaacatgcccttgcccatactctgggcggctatttcgatattgcccatggggcaatacaccccatacttcttcccgctgtcatgcgctttcacctcaaatgtagcacaaagaaattggccaaaattgcccgtactatttcagtgagacaggcggcaacagaatacgacactgcccttgccggcatcatggagctcgaacattttttttcaaaaatgcccgttgccacaaaactctcagaaataattacctatacagaagaagatcgtctgaaaaaaatctgtaaggttgcaatagaagatgcctgcattcttaccaacccacgcccagtctcttgggaagatctcttctcaatatgccaggaggtatggtaa

SEQ ID NO: 39710 - protein, 409 aa, Desulfotalea psychrophila LSv54
MLYLSCYFLVQGTKRLLLFFAHRGESLMYITKFAIPEIIFGRGSLKHTGKCALRLGAKKVFLVSDSGIEKAGWVAKLISILEAEGVDSVYYSHVSPNPRDFEVEEGAKIYQEEGADVIIALGGGSAIDTAKGIAIIASNGGRIRDYEGANRVNLPLPPMILITTTAGSGSEISQFCIITDMARKVKMSIITRTIVANLAIIDPSLLTTKSTQLIIHSAVDAFAHAVEAYLSKIASPFTETHSLQAIALIYEYLPKAIITGSLDDLEQLSIASVSASMAFSNASLGAEHALAHTLGGYFDIAHGAIHPILLPAVMRFHLKCSTKKLAKIARTISVRQAATEYDTALAGIMELEHFFSKMPVATKLSEIITYTEEDRLKKICKVAIEDACILTNPRPVSWEDLFSICQEVW

SEQ ID NO: 39711 - DNA, 1185 bp, Desulfotalea psychrophila LSv54
  CDS (1)..(1185): transl_table=11
atgtgtaatcagacgacaaagcctgttgagtttattatgccaccgataacggttataggttcaggagcaatcagagagttaccggaacgacttgttgcaattcagggaacaaagcccctggttgttactgataaggggatgactgctcttggcgttactgcaaccatcgtaggtatattagaaaaggctggcatggcctgtgctgtttatgatgagactgtgcccaacccaaccgataaaaatgttgaagctggtcttgccgcatatgtggcccatggttgtgactctattattacccttggtggtggtagtgcccatgattgtggtaagggtattggcctggtggcaaccaacggtggcagaattcatgactatgaaggtgtcaataaatctcatgctcgtatgccgagttttattgcgattaacaccacagcaggaactgcctcggagatgactcgtttctgtatcatcaccgacagtgtgcgtaaggtgaagatgacaattgtcgatcgtcgtgtaactcctcgccttgccatggatgatcctgatctgatgttgggccttcctcccggtcttaccgctgcaaccggtcttgacgccctgactcacgctattgaagcatttgtctccaccgatgctacccatatgaccgatgccaatgctgaaaaggcaattaagttgattgccaagtatctgcgtcgtgccgtggggaatggtcgcaatgttgaggctcgtgaggcgatgtgttatgcccagtatcaggcggggatggcctttaataacgcagggcttggctatgtgcatgccatggcccatcagcttggcggttatctcaatttaccccatggtgagtgtaacgcaatccttctgccctatgtctgtgagttcaatatgattgcctgtatggatcgttttgccgagatggcagacctccttggggtcaaagagggggcccgcactcagagggagatggctcttaatgtaattaaggcgatcagggatctgatggatgatgtggctattccaccaagccttaccgctctggcagctaagtatggtaagacagtcaatccggaagattttgttatgatggccgaaaatgccatgaaggatgcctgtgctgccaccaatccgcggcggatgagcatggaaaatattattgccatctaccaggccgttctctag

SEQ ID NO: 39712 - protein, 394 aa, Desulfotalea psychrophila LSv54
MCNQTTKPVEFIMPPITVIGSGAIRELPERLVAIQGTKPLVVTDKGMTALGVTATIVGILEKAGMACAVYDETVPNPTDKNVEAGLAAYVAHGCDSIITLGGGSAHDCGKGIGLVATNGGRIHDYEGVNKSHARMPSFIAINTTAGTASEMTRFCIITDSVRKVKMTIVDRRVTPRLAMDDPDLMLGLPPGLTAATGLDALTHAIEAFVSTDATHMTDANAEKAIKLIAKYLRRAVGNGRNVEAREAMCYAQYQAGMAFNNAGLGYVHAMAHQLGGYLNLPHGECNAILLPYVCEFNMIACMDRFAEMADLLGVKEGARTQREMALNVIKAIRDLMDDVAIPPSLTALAAKYGKTVNPEDFVMMAENAMKDACAATNPRRMSMENIIAIYQAVL

SEQ ID NO: 39713 - DNA, 1152 bp, Desulfotalea psychrophila LSv54
  CDS (1)..(1152): transl_table=11
atggcgaaatttattgttccaaaagaaatattccacggcttaggcactcttgagaatcttaaagggttgaaaggcagcaaagcagttattgtcattggtggtagctcagttcagaaaaacggagctctggaaagaactcagaactgcctctctgaagcaaacattgaatctgttgttttctccggtgtagaagctgatccatctattgagacagttcttaaaggagcagagttcttcaccgaggaacagcccgatgttattgtcggattgggcggatgttcagccatcgatgctgctaaagcaatgtgggttttttacgagtatcctgagtcaaagcttgaagaattgtcagctccatttgctgttaaggccctgcgtaataaggcttatttcgttgcaattccctcaacaagcggtacaggtacagaaatcaccggtctttccgtaattacagacagagagaaaggtacaaaataccctatcgtttctcacgagctgactcctgacgtggctattattgatggcgagctttgcgctagcatgcctaagcatgtaactgcaaataccggacttgatgccctgagccatggcgtggaagcttatgcctcaaacattgccgaccgttatagcgattctctggccaaaggttctattgacctggtattcaagaatctcctcattgttgtagaagagcccaaaaacctggaagcccgccaggcaatgcacgatgcttcctgcatggcaggtatggcatttaccaatgtatggctgggaattgttcactccatgtcacatcagattggtggaactttcggtatacctcatggttgtggtaatgctattcttatgcctaacgtcatccgtttcaattccaaggtaacagataagtatgccgatcttgcagctctgtccggcaaatcaactgctgaagagttcgcccaggaagtatcaaacctccgagcatctgcaggtgttgtagggtcactcaaagagtatggtattggtgagaaagagtgggaagcaaagttggatactctgactgagaatgcactgaacgatccctgtacccttttcaacctcagaaaacctacgtttgaagagatcaaggcaatctaccaggcatgctacgacggaacagcgattaatttctaa

SEQ ID NO: 39714 - protein, 383 aa, Desulfotalea psychrophila LSv54
MAKFIVPKEIFHGLGTLENLKGLKGSKAVIVIGGSSVQKNGALERTQNCLSEANIESVVFSGVEADPSIETVLKGAEFFTEEQPDVIVGLGGCSAIDAAKAMWVFYEYPESKLEELSAPFAVKALRNKAYFVAIPSTSGTGTEITGLSVITDREKGTKYPIVSHELTPDVAIIDGELCASMPKHVTANTGLDALSHGVEAYASNIADRYSDSLAKGSIDLVFKNLLIVVEEPKNLEARQAMHDASCMAGMAFTNVWLGIVHSMSHQIGGTFGIPHGCGNAILMPNVIRFNSKVTDKYADLAALSGKSTAEEFAQEVSNLRASAGVVGSLKEYGIGEKEWEAKLDTLTENALNDPCTLFNLRKPTFEEIKAIYQACYDGTAINF

SEQ ID NO: 39715 - DNA, 1149 bp, Yersinia pseudotuberculosis IP 32953
  CDS (1)..(1149): transl_table=11
atgagtttcatgttggcactaccgaaaatcagcttgcacggcacgggtgcaatcggcgatatggttaaattactcagtgacaaacagtgggggaaagcactgattgttactgacgggcaactggttgaactcggcttattggacagtttattcgcggcgctggcgcagtatcagttaccttacgggctgtttggggaggtattccctaatccaacagaagagttggtccaggccggttttgccgcctttacccagcatcaatgtgactatttgattgccttcggtggtggcagccccattgataccgccaaagccatcaaaatactgactgccaatccggggccatccaccgcttattccggtgtaggtaaagtcaaacaaacgggtgttccgttgatagccatcaataccacggcaggaacggcggcggaattgaccagtaatgcggtgattattgatagccagcggcaagtgaaggaggtgattatcgataccaatctcatccctgatattgcggttgacgatccctcagtaatgctcaatattcccgccagtgtcacggcggcgacggggatggatgcccttacccacgctatcgaagcgtatgtctcgttaggtgcacatacgttaacggaccattcagcgctcgaatcaatccgtcttatcagccaatggttgccattagcggtcgctgacggcaaaaacctacaagcgcgcgaaatgatggcatgtgggcaatatttggcgggtatggcgtttaacagtgctgggctaggtttggttcacgcactggcccaccaaccgggtgccacacataatcttcctcatggcgtctgcaatgctatcttgctgccggtaattgaagaatataatcgcccgcaggctacccgccgttttgcccgaattgcacaggcaatgggggtagacactcaggacatgagtgatgagcaagcaagtcatcaggcgatagcggccattcgtcagttatcgctgcaagttggtattcctgccgggttctccgccttaggtattgaggaaagtgatattgaaggttggttagataaagcgctggctgacccttgtgctccttgtaacccacgttctgcagatcgggaacaaattcgcacactgtacttacaggcactttaa

SEQ ID NO: 39716 - protein, 382 aa, Yersinia pseudotuberculosis IP 32953
MSFMLALPKISLHGTGAIGDMVKLLSDKQWGKALIVTDGQLVELGLLDSLFAALAQYQLPYGLFGEVFPNPTEELVQAGFAAFTQHQCDYLIAFGGGSPIDTAKAIKILTANPGPSTAYSGVGKVKQTGVPLIAINTTAGTAAELTSNAVIIDSQRQVKEVIIDTNLIPDIAVDDPSVMLNIPASVTAATGMDALTHAIEAYVSLGAHTLTDHSALESIRLISQWLPLAVADGKNLQAREMMACGQYLAGMAFNSAGLGLVHALAHQPGATHNLPHGVCNAILLPVIEEYNRPQATRRFARIAQAMGVDTQDMSDEQASHQAIAAIRQLSLQVGIPAGFSALGIEESDIEGWLDKALADPCAPCNPRSADREQIRTLYLQAL

SEQ ID NO: 39717 - DNA, 2676 bp, Yersinia pseudotuberculosis IP 32953
  CDS (1)..(2676): transl_table=11
atggctgtaacgaatgtcgctgaacttaacgagctagtagcacgcgtcaagaaagcccagcgcgagtatgccaacttttcgcaagagcaagttgataaaatcttccgtgctgcagcattagccgctgcggatgcccgtattccactagccaaactggctgtaacagagtctggcatgggtattgttgaagacaaagtgatcaaaaaccactttgcttctgaatatatttacaatgcttataaagatgaaaaaacctgtggtattttgtgtgaagataagaccttcgggacgatcactatcgcagaacctattggtctaatctgcggtatcgtaccaaccactaaccctacgtctaccgctatttttaaagcactgattagcttgaagacacgtaacggtattatcttctccccacatccacgcgctaaagacgcaaccaataaagctgcggatatcgtgcttcaagccgctatcgcagcaggtgcgccagcggatattattggttggattgatgctccaacagttgaattatctaatcaactgatgcatcacccagacattaatcttattctggcaaccggtgggccaggtatggttaaagcggcctatagctctggtaaaccagccatcggcgtaggtgcgggtaatacgccagtcgtcgttgacgaaactgcagatattaaacgtgttgtcgcatctattctgatgtctaaaacctttgataacggtgttatctgcgcgtcagagcagtccatcatcgttgttgactcggtttacgatgcggttcgcgagcgttttgcttctcatggtggctacctgttacaaggtaaagaattgaaagccgttcaggatattatcctgaaaaatggcggtctaaacgcagccatcgtgggccagccagcaactaagatcgctgagatggctggcattaaagtgccaagtaataccaagatacttatcggtgaagtcaaagttgtcgatgaatcagagccatttgctcatgaaaaactgtcgcctacactggcaatgtatcgtgctaaaaactttgaagaagcggttgaaaaagcagagaaactggtggagatgggcggtatcggtcatacctcttgtctgtacaccgaccaagataaccagactgcacgcgttaaatatttcggcgataaaatgaagaccgcccgaattctaatcaacacccctgcctctcaaggtggtatcggtgacttgtataacttcaagctggcaccgtctctgacgctgggttgtggttcttggggtggtaactccatctctgaaaacgtcggtccgaaacacttgatcaacaagaaaactgtggctaagcgagcagaaaacatgttgtggcataaactaccgaaatctatttacttccgtcgcggctctctgcctatagcgttggaagaagtggcaactgacggtgcaaaacgtgccttcatcgtgactgaccgctacttgttcaacaacggttatgcagaccaagtcaccagcgtactgaaatctcacggtattgaaactgaagttttcttcgaagtagaagctgaccctaccctgagtatcgtgcgtaaaggtgcagagcagatgaactccttcaagccagacgttattattgctctgggtggtggttcaccgatggatgcggcaaaaatcatgtgggtaatgtacgaacatcctgaaacgcatttcgaagaactggcattgcgttttatggatatccgtaaacgtatttataagttcccgaaaatgggtgtaaaagcgaaattggtcgctattacaaccacatcaggtaccggttcagaagtcaccccgtttgccgtggttactgatgacgcaacaggccagaaatatccattggcagactatgcattgacaccagatatggccattgttgatgccaaccttgttatgaatatgcctaagtctctgtgtgccttcggtggtctggatgcagtaacgcacgcactggaagcctatgtgtctgtactggctaatgaatactctgacggccaggcgctgcaagcactgaagctgttgaaagaattcttgccagccagctacaacgaaggggctaaaaacccagttgctcgcgaacgtgtacataatgcagcaacaattgccggtatcgcctttgctaacgccttcttgggtgtctgtcactctatggcccacaaactgggttctgagttccatatcccacacggcttggcaaatgctatgttgatttctaacgttattcgttacaacgcgaatgacaacccaacaaaacagactgccttcagccaatatgaccgcccacaagcgcgtcgccgttatgcagaaattgcagatcatttggggctgagcgcaccgggcgaccgtactgcacaaaaaatccagaaactgctggcttggttagatgaaatcaaagctgaactgggtatcccagcatcgattcgcgaagcgggtgttcaggaagctgacttcttagctaaagtagacaaattgtctgaagatgcatttgatgaccagtgcacaggtgctaacccacgctacccactgatctcagagctgaaacagatccttatggatacttattacggtcgcgaatatgttgaagagtttgaccgcgaagaagaagtcgcggcagctactgcgcctaaagctgagaaaaagaccaaaaagtaa

SEQ ID NO: 39718 - protein, 891 aa, Yersinia pseudotuberculosis IP 32953
MAVTNVAELNELVARVKKAQREYANFSQEQVDKIFRAAALAAADARIPLAKLAVTESGMGIVEDKVIKNHFASEYIYNAYKDEKTCGILCEDKTFGTITIAEPIGLICGIVPTTNPTSTAIFKALISLKTRNGIIFSPHPRAKDATNKAADIVLQAAIAAGAPADIIGWIDAPTVELSNQLMHHPDINLILATGGPGMVKAAYSSGKPAIGVGAGNTPVVVDETADIKRVVASILMSKTFDNGVICASEQSIIVVDSVYDAVRERFASHGGYLLQGKELKAVQDIILKNGGLNAAIVGQPATKIAEMAGIKVPSNTKILIGEVKVVDESEPFAHEKLSPTLAMYRAKNFEEAVEKAEKLVEMGGIGHTSCLYTDQDNQTARVKYFGDKMKTARILINTPASQGGIGDLYNFKLAPSLTLGCGSWGGNSISENVGPKHLINKKTVAKRAENMLWHKLPKSIYFRRGSLPIALEEVATDGAKRAFIVTDRYLFNNGYADQVTSVLKSHGIETEVFFEVEADPTLSIVRKGAEQMNSFKPDVIIALGGGSPMDAAKIMWVMYEHPETHFEELALRFMDIRKRIYKFPKMGVKAKLVAITTTSGTGSEVTPFAVVTDDATGQKYPLADYALTPDMAIVDANLVMNMPKSLCAFGGLDAVTHALEAYVSVLANEYSDGQALQALKLLKEFLPASYNEGAKNPVARERVHNAATIAGIAFANAFLGVCHSMAHKLGSEFHIPHGLANAMLISNVIRYNANDNPTKQTAFSQYDRPQARRRYAEIADHLGLSAPGDRTAQKIQKLLAWLDEIKAELGIPASIREAGVQEADFLAKVDKLSEDAFDDQCTGANPRYPLISELKQILMDTYYGREYVEEFDREEEVAAATAPKAEKKTKK

SEQ ID NO: 39719 - DNA, 1185 bp, Symbiobacterium thermophilum IAM 14863
  CDS (1)..(1185): transl_table=11
gtgcttccgcggtattatgagttctacaatccggtcaaggtgctctcgggcgaacacgccctcgagaacctgccctatgagatggctcatctccatgcgaagcgccccatcctcctcaccaatcagcagctggtggaagtggggctcacacgcatcctgcaggacgcgctgcggggttcggacctgaccatcgccgcacagtacacggagatcccccaggactcgtcgatccacgtggtcaacgccgccggccgggtcttccgggaagccggctgcgactcgatcatcgccctgggcggcggctcggtcatcgacaccgccaaggggctgcgggtgctgatcggccaggagaccgacgacatcatgcagtacatgggcgcggacatcctgcagccgaagcggcgcgtgcccctggccgtggtgcccaccaccgccggcacgggctcggaggccaccctggtggcggtcatcgcccacccggagcggcaggtgaagatggagttcgtctcccaccacctgctgccggacctggccgtgctcgacccacgcatgacccgctcgctgccgccccgcatcacggcttccacgggcatggacgcgctggtgcacgcgatcgagggctacacctcgatccagcggaacccgctcagcgacgcctatgcctgggcggccatcgagctgatccgggagtacctgccccgggcggtggcgaacggccaggacaccgaggcccgcctcgccatggccaacgcggccctcatggccggcgccgccttctccaacgccatggtggggctggtccatgccatcggccatgcggtgggcggcgtggcccgggtcgcgcacggcgacgccatggcgattctgctgccccacgtcatggagtataacctcgacatgctgagcgaccggtacggccgcctgctcctggccctggccggacccgaggtctatgcggcgactccggacaacgtgcgcggctcccaggccatcgcggtggtgcgggccttcgccgagcggctccaccaggcgtgcggcctccccctccgcctccgggacgtgggcgtcaccgaggcccagctgcccgccatcgcccgcacgaccatgaacgacggcgccctgctgatgaacgccaaggaggcgggtccggacgacgtgatgcagatcctccggaaggccttctga

SEQ ID NO: 39720 - protein, 394 aa, Symbiobacterium thermophilum IAM 14863
MLPRYYEFYNPVKVLSGEHALENLPYEMAHLHAKRPILLTNQQLVEVGLTRILQDALRGSDLTIAAQYTEIPQDSSIHVVNAAGRVFREAGCDSIIALGGGSVIDTAKGLRVLIGQETDDIMQYMGADILQPKRRVPLAVVPTTAGTGSEATLVAVIAHPERQVKMEFVSHHLLPDLAVLDPRMTRSLPPRITASTGMDALVHAIEGYTSIQRNPLSDAYAWAAIELIREYLPRAVANGQDTEARLAMANAALMAGAAFSNAMVGLVHAIGHAVGGVARVAHGDAMAILLPHVMEYNLDMLSDRYGRLLLALAGPEVYAATPDNVRGSQAIAVVRAFAERLHQACGLPLRLRDVGVTEAQLPAIARTTMNDGALLMNAKEAGPDDVMQILRKAF

SEQ ID NO: 39721 - DNA, 969 bp, Symbiobacterium thermophilum IAM 14863
  CDS (1)..(969): transl_table=11
gtgcgccgtctacgccgacgtgatggccgagcccagcgcggagtggctggacccggtcagcaggtgaaggcccaccaggccgaccttgtggtggccgtgggcggcggcagcgcgatcgacgtggccaaggccacagccgtcctggccgccaacggcggcacggcctacgactacttcggcgtcgaccgggtgccccggccggggctgcccgtgatcgccatgcccaccacggccggcaccggcgccgaggccacgcccaacgccatcttcaccaacacccggacgcaggtgaaggaggggatcgtctccccgtacatgatgcccgcggtggccatcgtggaccccgagctgaccctgacagcgccgcccggggtgaccgccgccaccgggatggacgccctgacccacgcggtggaatccttcacctcagtcaaggccgcgcccaccacggacctgttcgccgccgaagccatccgccggatcggccggtcgatccgcaccgcggtcttccgcggcggggacctcgcggcccggaccgatatggccctcggcagcctgtacgccggcatcgccatctgcaacgccggcaccggcgcggtccacgccatggcctacccgctgggcggccagttccgggtgccccacggcatcgccaacgcgtcgctgctgccgcacgtgctcccgtggaacctgcagggcagcgtggagaagttcgcgcaggtcgcccggctgctgggtgagcccgtggacgggctcagcgccctggcggcggcggagcgtgcggtggcggccatccagcggctctgcgccgacctcggcatcccctcccggctgtcggcgttcggcgtccgggaggagcacatccccgccatggcggcggccgcgcacgcgacgcgacggctcatggacaacaacccccgcaacctgacggttgaagaggtagaggcaatctatcgctcggccctgtga

SEQ ID NO: 39722 - protein, 322 aa, Symbiobacterium thermophilum IAM 14863
MRRLRRRDGRAQRGVAGPGQQVKAHQADLVVAVGGGSAIDVAKATAVLAANGGTAYDYFGVDRVPRPGLPVIAMPTTAGTGAEATPNAIFTNTRTQVKEGIVSPYMMPAVAIVDPELTLTAPPGVTAATGMDALTHAVESFTSVKAAPTTDLFAAEAIRRIGRSIRTAVFRGGDLAARTDMALGSLYAGIAICNAGTGAVHAMAYPLGGQFRVPHGIANASLLPHVLPWNLQGSVEKFAQVARLLGEPVDGLSALAAAERAVAAIQRLCADLGIPSRLSAFGVREEHIPAMAAAAHATRRLMDNNPRNLTVEEVEAIYRSAL

SEQ ID NO: 39723 - DNA, 1209 bp, Bacillus licheniformis ATCC 14580
  CDS (1)..(1209): transl_table=11
atgactttaaatatgaaagtagaagcgatgaacaaattccacacgtttgaaatccctaccgtcattaagcacggaatcggagccgttaaacatgtgggggaagaagtgaaaaagcttggcgtttcaaaagcgctgcttgtcacagaccctggcatctacaaagccggtgtaacaaacccggtcgttgtatcccttcaggaagcaggcgtagaagttgccgtctttaataaagtcgagccgaatccgcctgtccgtcttgtcgctgaaggttccaaactgtatgctgaagaaaactgcgacggccttgtcgcggtcggcggcggaagctcaatggatacggcgaaagcgatcggagttgaagccactcatgaaggctcagtccttgactatgaagcggcagaaggaaaaaagccgcttgaaaaccggattcctccgcttacaacgatcccgacgactgccggaaccggctcagaagttacacaatgggcggttatcacagatgaagagcgcgaatttaaattcaatacgggcggcccgctgattgctgctcatttgacaattatcgatcctgaattgcatgtatcaatgcctccgcacgtaacagcgatgaccggcgttgacgctttggctcatgccatcgagtgctatacgatgaaatttgcccagccgattactgacgcggtggcccttcttgcgatcgaatacggcgcacattacatccgcagagcgtttgccgatggagaagatcttgaagcgagatacggcatggcgcaggcggccatgcttgcaggcctttcttacggaagcgaatccgcaggcgctgctcacgcgatgagccagacgctcggagggatcatccctgtcgcgcacggccaatgtgtggcggcgatgatgggccctgtaatggaatacaactggaaaggctaccctgaaaaatttgcccgcattgcaaaagcgttcggaattgacacaagcggcatgtctgcagttgaagcggctaaagctgcggtgaactggatgtatcagcttgtggaagacttagagattcctagtcttgaagagcaaggcgtatcacctgacatgatcgaccgcctttcaaaagaagcgatgaaagatccgcaaacggtcggtaaccctagagacctgaacgaaaaagcgtacaattggatttacaaacgctgcttcaatttaaccccgaaaactgtctga

SEQ ID NO: 39724 - protein, 402 aa, Bacillus licheniformis ATCC 14580
MTLNMKVEAMNKFHTFEIPTVIKHGIGAVKHVGEEVKKLGVSKALLVTDPGIYKAGVTNPVVVSLQEAGVEVAVFNKVEPNPPVRLVAEGSKLYAEENCDGLVAVGGGSSMDTAKAIGVEATHEGSVLDYEAAEGKKPLENRIPPLTTIPTTAGTGSEVTQWAVITDEEREFKFNTGGPLIAAHLTIIDPELHVSMPPHVTAMTGVDALAHAIECYTMKFAQPITDAVALLAIEYGAHYIRRAFADGEDLEARYGMAQAAMLAGLSYGSESAGAAHAMSQTLGGIIPVAHGQCVAAMMGPVMEYNWKGYPEKFARIAKAFGIDTSGMSAVEAAKAAVNWMYQLVEDLEIPSLEEQGVSPDMIDRLSKEAMKDPQTVGNPRDLNEKAYNWIYKRCFNLTPKTV

SEQ ID NO: 39725 - DNA, 1167 bp, Bacillus licheniformis ATCC 14580
  CDS (1)..(1167): transl_table=11
atgccagcgaattatcaatttcggacagccggtcatatcgttgcaggtgaacattccatccgccggctgaaagatcatgtgcgaacgattgtaccgaaggcggacagggcgctgattattacccagccgtcgatcgtcaagctcggcgcgatcggagaggtacaggctcagcttacagagatcggcattcagtcagatgtttgcacagccatattgccggaaccgaccgtacaaaatattgaagacgtatttagaggcatccgtgagaaacgatacgacattctcatcggaatcggcggaggcagcgttttggacggaacgaaaatattgtccgtgctgcaaacgaattcaaaaaaggtcgaggagctgctcgggacagatttggtcgaaaagccgggaatcccgaccgtgctgattccgagtacttcggggacgggcgcagaggtgacgccgaacgcgatcgttacgcttccagaagaggaattgaaagtcggcatcgtcagtccgcttcttttgccgaaacttgtcattcttgacccggtcatcacccttggattgccaaaaccgattacggcggctaccggaatggatgcattcactcattcgcttgaatcgttcatttcgacgaaagcaaacccgatcagcgatatgttcgctttagaatccatcagattgatttcggcaagtattgtggaagcatatgaaaacggttcatcgatacaagcgagagaaaacatgctgctcggttcgacgtatggcggaatggcgctgacggctgccggtactgctgccgttcacgccctcgcctatccgcttggggggaaataccgaatttcccacggtgtcgccaattcgatgctccttccgcatgtgatggagtttaatatggatgccattacagaacggctgtctcttgcggcagaaacaatgggaatcgttgcatctgatttgaccgccgaacaagcggctgaggccgttgtgcagaaaataagagagtggacggagcggctgaatattcctcaggatttaaaagcgttcggcgtaaccgcaagcgacgtggacgatttagccgactcagcttcaaaagtgacgcgcctgcttcataacaatccgaaaccgctcagtctggaaaatataaaagacatctatcgaaaactaatcaactaa

SEQ ID NO: 39726 - protein, 388 aa, Bacillus licheniformis ATCC 14580
MPANYQFRTAGHIVAGEHSIRRLKDHVRTIVPKADRALIITQPSIVKLGAIGEVQAQLTEIGIQSDVCTAILPEPTVQNIEDVFRGIREKRYDILIGIGGGSVLDGTKILSVLQTNSKKVEELLGTDLVEKPGIPTVLIPSTSGTGAEVTPNAIVTLPEEELKVGIVSPLLLPKLVILDPVITLGLPKPITAATGMDAFTHSLESFISTKANPISDMFALESIRLISASIVEAYENGSSIQARENMLLGSTYGGMALTAAGTAAVHALAYPLGGKYRISHGVANSMLLPHVMEFNMDAITERLSLAAETMGIVASDLTAEQAAEAVVQKIREWTERLNIPQDLKAFGVTASDVDDLADSASKVTRLLHNNPKPLSLENIKDIYRKLIN

SEQ ID NO: 39727 - DNA, 2604 bp, Bacillus licheniformis ATCC 14580
  CDS (1)..(2604): transl_table=11
atggcaatcgaagaaaagaacatgaaacaaaagcaaaatgcctcaaacatgattgatcagctagtcgaaaaaggcctaaaggcattggaagaattccgcagctttgatcaggagcagattgatgagatcgtcaaacagatggcgcttgccggccttgatcagcacatgcctctcgccaaacttgccgtcgaagaaacgaagcgcggcgtttatgaagataaaatcattaaaaacatgtttgccacagagtatgtctaccatcatatcaaatacgataaaacagtgggcatcatcaatgaaaacgaacacgacggagtcattgaaatcgcggagcctgtcggtgtcatcgccggcgtgacgccggtgaccaaccctacttccaccaccatgttcaagtccctgatatcaattaaaacaagaaatccaatcgtgtttgctttccatccatccgcccaaaaatgcagccgcgaagcggcgagaatccttcgggacgcagccgtcaaagcaggagcacccgacaactgcatccaatggatcgagacgccttctctggatgcaacgcaagccctaatgacccacccgaacgtttccctgatcctcgcaacaggaggcgcaggcatggtgaaatccgcttacagctccggaaaaccggcccttggcgtcggacctggaaacgttccgtgctacatcgagaagtctgccaacctgaagcaagccgtcaatgatctgatcttatccaaaacatttgacaacggcatgatttgcgcatcagagcaggccgtcatcatagacaaaggcatctactcagacgtcaaagccgaaatgacaagaaacaactgctatttcttaaataaaaccgaaaaatcaaaggtcgaaaaattggtcatcaatgaaaatacttgcgcggtaaacgctgatatcgtcggcatgccggcattcaaaattgctgaaatggccggtatcaaagtgccgcaagatacaaaaatcctcatcgccgaattagaaggtgtaggtccggatgacccgctgtccagagaaaaactgagccctgttttagcgtgctacaaagtcagcgggcttgaagaaggattaaaacgcgccgaagagatgctggcgttcgggggaaccggccactcggcggtgattcatacgaacgatcaagaagccgttaaagaattcggcttaaggatgaaggccggccggatcattgtcaatgcaccgtcgtcacaaggagcgatcggcgacatttacaacgcctatatgccttctttaacgctcggctgcggcacatatggcgggaactccgtctcgtcaaacgtaggggccgttcatttaatcaacacgaaaaaagtggcgaaaaggaatgtcaatatgcagtggtttaaagtgcctccaaaaatctattttgaaaaacacgcaacccaatatttagcgaaaatgcctgacatctcaaaagcgtttattgtgactgatccgggaatggtgaaactcggatatgtagaccgcgcccttcactacttaagaaggcgcccggattacgttcattgcgaaattttttctgatgtcgagcctgatccttcaatcgaaacggtgatgaacggcgtcgacatgatggccaaattccagccggatgtcatcatcgccctcggcggaggttcggcaatggatgccgcaaaaggaatgtggatgttctacgagcaccctgatgctgaattctttggcttaaagcaaaaatttctggacatccgcaagcgcatcgtcaaatacccgaaactgggaggaaaagcaaaattcgtcgcaatcccgacgacatcaggcacaggttctgaagtcacttcattctctgtcattacagacaaagaaacgaatacaaagtacccgctggccgattatgaattaacaccggatgtcgcgatcattgacccgcaatttgtcatgaccgtgccgaaacatatcacggccgacacaggaatggacgtattgacacacgcaattgaatcatacgtatcgtgcatggccaacgactatactgacggcttggccatgaaggccatccagctgatcttcgaatatctgccaagagcatacaaaaacggcagcgacgagctggcccgcgaaaaagtgcataatgcatcaacgattgccggaatggcattttccaatgccttcctcggcatcaaccacagcttagcccataagcttggcgccgagtttcagatcgctcatggacgggcaaacgccatccttctgccgcacgtgatccgctataatgcagcgaagccgaaaaagttcacggcatttcctaaatacagccacttcatagccgaccagcgctacgcggagattgccagaacgctcggcctgcctgcaaaaacaactgcagaaggtgttgaaagcctcatccaggagatcatctcgcttgccaaagagcttaaaattccgatgagcattaaacaaaacggcgtggatgccgccgcattcgaaagcaaagtagatctcatggccgagcgcgcctttgaagatcagtgcacgacagccaatcctaagctgccgctcgtttcagagctggctgagatttaccgttccgcgtataaaggagtttag

SEQ ID NO: 39728 - protein, 867 aa, Bacillus licheniformis ATCC 14580
MAIEEKNMKQKQNASNMIDQLVEKGLKALEEFRSFDQEQIDEIVKQMALAGLDQHMPLAKLAVEETKRGVYEDKIIKNMFATEYVYHHIKYDKTVGIINENEHDGVIEIAEPVGVIAGVTPVTNPTSTTMFKSLISIKTRNPIVFAFHPSAQKCSREAARILRDAAVKAGAPDNCIQWIETPSLDATQALMTHPNVSLILATGGAGMVKSAYSSGKPALGVGPGNVPCYIEKSANLKQAVNDLILSKTFDNGMICASEQAVIIDKGIYSDVKAEMTRNNCYFLNKTEKSKVEKLVINENTCAVNADIVGMPAFKIAEMAGIKVPQDTKILIAELEGVGPDDPLSREKLSPVLACYKVSGLEEGLKRAEEMLAFGGTGHSAVIHTNDQEAVKEFGLRMKAGRIIVNAPSSQGAIGDIYNAYMPSLTLGCGTYGGNSVSSNVGAVHLINTKKVAKRNVNMQWFKVPPKIYFEKHATQYLAKMPDISKAFIVTDPGMVKLGYVDRALHYLRRRPDYVHCEIFSDVEPDPSIETVMNGVDMMAKFQPDVIIALGGGSAMDAAKGMWMFYEHPDAEFFGLKQKFLDIRKRIVKYPKLGGKAKFVAIPTTSGTGSEVTSFSVITDKETNTKYPLADYELTPDVAIIDPQFVMTVPKHITADTGMDVLTHAIESYVSCMANDYTDGLAMKAIQLIFEYLPRAYKNGSDELAREKVHNASTIAGMAFSNAFLGINHSLAHKLGAEFQIAHGRANAILLPHVIRYNAAKPKKFTAFPKYSHFIADQRYAEIARTLGLPAKTTAEGVESLIQEIISLAKELKIPMSIKQNGVDAAAFESKVDLMAERAFEDQCTTANPKLPLVSELAEIYRSAYKGV

SEQ ID NO: 39729 - DNA, 1203 bp, Bacillus cereus E33L
  CDS (1)..(1203): transl_table=11
ttgcaagaagttgctgagtttcgtatgccgaagtctgtattatatggaagaaattctcttgaaaagctgggggaacaatctaagaaattcgggaaaagagcgtttatagttacggatacaattatggaggatttaggatatgttgagaggtgtatacaacaattaaatacgaaaggtataactgttattacatataataaagtaaatgctgagcctacaaatatacacgtgttagaggcgttaactatttgtaaagaaggaaagtgtgattttataatcggtcttggtggtggaagttgtattgatgcagcaaaagcagttactgtgttatatacaaatggcggagaagtggaagattatgtccaaaaggatagtgaaatagacaatgatccgctaccacttattgcaatcccaacaacttctggaactggatcggaagtaacaagtgtagcagtaattacgaataaacgaacagatgtaaaaatgatgatgaagcatccgagttttaccccgcaagtagcgattattgacccgattttaacacgttcggtaccacctcacattacagcagcaacagggatcgatgcattatgtcatgcagtcgaagcatatatttctaaagtttcacaatcacttacagatgtactcgctctttcagcaattgaaagtattatgaaatatttacgtattgcttatgaagatggagagaatatggaggcaagagaagcgatgatgattgcttccttacaagctggaattgcattttccaatgcatctgttacattagttcatggcatgtcgagaccagtaggagcattatttcatgtaccacatggtatatcgaatgcaatactattacctacagttttagaatatacaaaaggtagtgcggtaaaaagactagcggaaattggccgctgtttaaataaagatttgtattcctattgtgatgaagaagtagccgactacacgctgggggaaataaaaaaactttgttttgatcttcgtattccaaatttaaaagaatacggaattggtgaagttgagtttgaaaaagctatttctaaaatggcgtcagatgcaattgaaagtggaagtccagcgaataacccacgtgtgccatcatatgatgaaattaaacagttgtatcgagaatgttttcattataaatatgaagattcagtaaaaacattaggggattaa

SEQ ID NO: 39730 - protein, 400 aa, Bacillus cereus E33L
MQEVAEFRMPKSVLYGRNSLEKLGEQSKKFGKRAFIVTDTIMEDLGYVERCIQQLNTKGITVITYNKVNAEPTNIHVLEALTICKEGKCDFIIGLGGGSCIDAAKAVTVLYTNGGEVEDYVQKDSEIDNDPLPLIAIPTTSGTGSEVTSVAVITNKRTDVKMMMKHPSFTPQVAIIDPILTRSVPPHITAATGIDALCHAVEAYISKVSQSLTDVLALSAIESIMKYLRIAYEDGENMEAREAMMIASLQAGIAFSNASVTLVHGMSRPVGALFHVPHGISNAILLPTVLEYTKGSAVKRLAEIGRCLNKDLYSYCDEEVADYTLGEIKKLCFDLRIPNLKEYGIGEVEFEKAISKMASDAIESGSPANNPRVPSYDEIKQLYRECFHYKYEDSVKTLGD

SEQ ID NO: 39731 - DNA, 2604 bp, Bacillus cereus E33L
  CDS (1)..(2604): transl_table=11
atggtagtcaaagagaaagttgtaaatgaaatgcaggaagtaaaagagatgattgatacgttagtgaataacggtcggaaggctttacaagcattagaaagttttacacaagagcaaattgacaacattgttcatgaaatggcattagcaggtgttgatcaacatatgccacttgcgaaattggctgttgaagaaacaggtcgtggggtatacgaagataaatgcattaaaaatatttttgctactgaatatatttggcatagcataaagaaagataaaacagtagggattattcacgaagatcctcatgaagaaataatagaaattgcggagcccgtcggtgtagtagctggggtaacaccagtaacgaatccaacatcgacaacaatgtttaaagcattaatcgcgataaaaacgagaaatccaattattttcgcatttcatccttcagcacaaaactgttctgttgcagccgcgaaaacagtatatgatgcagcggtgaaggcgggggcatcaaaacattgtattcagtggattgaaaagccttctgtcgaagcaacgaaacaattaatgaaccatgaaggtgttgcgcttgttttggcaactggaggggctggtatggtgaaatcagcttattctactggaaaaccagcgctaggtgtaggtcctggtaatgtaccatgttatatagagaaatcagcgcacataaaacgagcggttaatgatttgattttatcaaaaacatttgataacgggatgatttgtgcatcagaacaagcaatcattgtagacaaggaaatttatgatgatgtgaaaacagaaatgattacaaatgattgttactttgtaacagaggaagagagaagaaaattagaaaagcttgttattaatgaaaatacatgtgcagtaaatagtgatattgtagggaaatctgcacagtatattgccgaattagttggaattactgtacctaaaaatacaaaaatacttgtagctgaaatacaaggcatcggagccgcatatccactatctcgtgagaagttaagtccagtattagcttgtgtaaaagcaaattcattagaagaaggatttacatattgtgaagaaatgttaaacctcggtggtttagggcattcagcagttatccattctgtaaataaagaagtgcaaaagcaatttggattacgtatgaaagcttgtcgccttattgtaaatgctccttcatcacaaggtgggatcggtgacatatataatggatttattccatcacttacgcttggctgcggttcctatgggaaaaactcggtttctcaaaacgtaacagcgacgcatttattaaatataaaaaggttggcaaatagaaaaaagaatatgcagtggttcaaattaccaccaaaaatttattttgaaaaacatgcgacagcatatttagcaaatatgcctaacatttcacgtgcgtttattgtaacggatccaggaatggttgagcacggatatgtagatacggttacgcattatttacgtaaacatgcaaatgatgtgaaagttgaagttttctttgaggtcgagccagatccgtcagatgaaactgtgtttaaaggtgcggaaatgatgagaagttttcagcctgatgtcattatcgcacttggtggtggttcagcgatggatgcagcgaaagggatgtggcttttctatgagcacccagaaacaacattctatggaattaaacagaagtttttagatataagaaaacgtacatgtaaatatccggaattaggaagtaaggcgcagtttgttgctattccaacaacatctggaacaggatcagaagtgacaccatttgcggttattacagataagaaaaataatataaagtatccacttgcagattatgaattaacgccagatgtagcaattgttgatccacaatttgtaatgacagtaccaccacatgtaacagcagacactgggatggacgtattaacgcatgcaatcgaggcgtatgtgtctgttttagcaaatgactatacagatggattagcactaaaggctattgatctcgtatttaaatatttaccaagagcatttaaagatggacatgatgaagaagcacgagaaaaaatgcataatgcttctgcaattgcagggatggcatttgcaaatgctttcctaggtattaatcacagtttagcacataaaattggaccagaatttcatattccgcatgggcgtgcgaatgcaattcttatgccgcacgtagttcgctataatgctattaagccaagaaaacacgcattgttcccaaaatatgagcattttgtagctgatgaacgctatgcacatattgcgagaatgctcgggctaccagcaagttcggtggcagaaggtgtagaatcactcgtcaaagcaattattgatctcggaaaaagtttaaatataaatatgagtattgcgggacaaggagttgctaaagaccaatttgaacaggttgttggattattagcagaaagagcttttgaagatcaatgtacaacagctaatccgaaattacctctcatttcagagctgaaagaaatttatatgaaagcatataaaggtgagtaa

SEQ ID NO: 39732 - protein, 867 aa, Bacillus cereus E33L
MVVKEKVVNEMQEVKEMIDTLVNNGRKALQALESFTQEQIDNIVHEMALAGVDQHMPLAKLAVEETGRGVYEDKCIKNIFATEYIWHSIKKDKTVGIIHEDPHEEIIEIAEPVGVVAGVTPVTNPTSTTMFKALIAIKTRNPIIFAFHPSAQNCSVAAAKTVYDAAVKAGASKHCIQWIEKPSVEATKQLMNHEGVALVLATGGAGMVKSAYSTGKPALGVGPGNVPCYIEKSAHIKRAVNDLILSKTFDNGMICASEQAIIVDKEIYDDVKTEMITNDCYFVTEEERRKLEKLVINENTCAVNSDIVGKSAQYIAELVGITVPKNTKILVAEIQGIGAAYPLSREKLSPVLACVKANSLEEGFTYCEEMLNLGGLGHSAVIHSVNKEVQKQFGLRMKACRLIVNAPSSQGGIGDIYNGFIPSLTLGCGSYGKNSVSQNVTATHLLNIKRLANRKKNMQWFKLPPKIYFEKHATAYLANMPNISRAFIVTDPGMVEHGYVDTVTHYLRKHANDVKVEVFFEVEPDPSDETVFKGAEMMRSFQPDVIIALGGGSAMDAAKGMWLFYEHPETTFYGIKQKFLDIRKRTCKYPELGSKAQFVAIPTTSGTGSEVTPFAVITDKKNNIKYPLADYELTPDVAIVDPQFVMTVPPHVTADTGMDVLTHAIEAYVSVLANDYTDGLALKAIDLVFKYLPRAFKDGHDEEAREKMHNASAIAGMAFANAFLGINHSLAHKIGPEFHIPHGRANAILMPHVVRYNAIKPRKHALFPKYEHFVADERYAHIARMLGLPASSVAEGVESLVKAIIDLGKSLNINMSIAGQGVAKDQFEQVVGLLAERAFEDQCTTANPKLPLISELKEIYMKAYKGE

SEQ ID NO: 39733 - DNA, 1155 bp, Mannheimia succiniciproducens MBEL55E
  CDS (1)..(1155): transl_table=11
atgacatattctttacttcatacaaacaaagttattgcaggagctggttgtgttgctcaaataacagatgttgtgaatagttttgatgcgactaatgtggtgatcattacggatcaaggagtttttaatgcagggcttatcaatgaacctaaaatgttgttggaacaagctggagtcaatgttcatgtaattagtgatacacctccggaaccacctgtagataaagtgaatgatatttataaggttgctatgcaattcaatgtcgaaatggtaatcggtatcgggggaggtagtgcgatggataccgctaaactggtggcgattttattaaataatcatgtagcattacgagatgtagttgatggtaaagtaaaatttaagaatcgcggtattcctacattaatgattccgactacatccggcaccggttcagaagcgacacaaaattctattgtattagtacctgaaagagaacttaaagtcggtattgtagatgaaaaaatgttgccaaactgcgttattttagatcctaaaatgacaacggggttaccaaaacatatcactgcaaatacgggtattgatgctttatgtcatgccattgaatgttatatttctaaaaagtgtagcccgtttaccgagatgtttgctttaaaatcaattgagcttatagctaaaagtattcgtattgcttatgaagacggtcataatctgcaggctcgtgaaaatatgctattaggctcttatttaggtggtgtaagtattgctacgtcaagtacggtagctgttcatgctttatcttacccattaggagggaaatatcatattcctcatggcttatctaatgcaattttattgccagatgtgatgaaatttaatctggatgcctgtgttgagaaatttgctcgaatagctaaggcaatggacttaaatattgcgggcttaacggaacaagaggcggccgaagcaatgattgaagaactttatgcattaattagggatttgaatattaaatgtgatcttaaaacagtgggtatcacagaagatatattagatgaactggttgacgccggatattctgtaagacgattgttagataacaatccaaaagaaatgacaaaacaagatattagaggtatttataaaaaaatactctga

SEQ ID NO: 39734 - protein, 384 aa, Mannheimia succiniciproducens MBEL55E
MTYSLLHTNKVIAGAGCVAQITDVVNSFDATNVVIITDQGVFNAGLINEPKMLLEQAGVNVHVISDTPPEPPVDKVNDIYKVAMQFNVEMVIGIGGGSAMDTAKLVAILLNNHVALRDVVDGKVKFKNRGIPTLMIPTTSGTGSEATQNSIVLVPERELKVGIVDEKMLPNCVILDPKMTTGLPKHITANTGIDALCHAIECYISKKCSPFTEMFALKSIELIAKSIRIAYEDGHNLQARENMLLGSYLGGVSIATSSTVAVHALSYPLGGKYHIPHGLSNAILLPDVMKFNLDACVEKFARIAKAMDLNIAGLTEQEAAEAMIEELYALIRDLNIKCDLKTVGITEDILDELVDAGYSVRRLLDNNPKEMTKQDIRGIYKKIL

SEQ ID NO: 39735 - DNA, 1173 bp, Mannheimia succiniciproducens MBEL55E
  CDS (1)..(1173): transl_table=11
atgggggtagtgcttatgtcaacatattactttttaccaaccagaaacgtattcggagagaacgctgttgaagaagtcggcgagttaatgagaagcttgggcggcaaccgaccgctcatcgtgaccgacggctttcttgctcaaagcggcatggcggaacaactcgccaccatcctaagaggtgccggcttagagcctattatcttcggcggtgcggaacctaacccgacggataaaaacgtggaaagcggtatcgccttctatcacgaccataactgcgattgtattatttctttaggcggcggctcatctcacgactgcgcgaaaggtatcggtttaattgccagtaacggcggtcgcattcaggattatgaaggcgtggatcgttcaaccaacccgatggtgccgttaatggcggtaaacaccactgccggtaccgcttccgaaatcacccgcttttgtatcatcacagatacggcccgcaaagtaaaaatggcgattgtggactggcgcgttactccgcaaattgcggtaaacgatccgctgctgatgaaaggcatgccggcgggtttaacagccgcaaccggtatggatgctctcactcatgccattgaagcctatgtttctaccgcagccaatccgcttacggatgccgcagccttaatggcgatttccatgatccagcaatatttgccgaaagccgtggcaaacggggattacatgaaagcccgcgataaaatggcctacgcccaatacttagcgggtatcgcattcaacaacgcttccttaggttacgtacacgcaatggcgcaccagttaggcggtttctataacctgccgcacggtgtttgtaacgcaattttactgccttatgtggaagaatttaatctaatcggcaacctcaaccgcttccgcgatattgccaacgcaatgggcgaaaacatccagggcttgagtaccgatgacgcagcgctcaaagccatcgccgcgatccgtcgactaagcaaacaggtaggcattcctgccaacttaaaagaactcggcgttaaaccggaagactttgacgtcatggctgaaaatgcaatgaaagacgtttgcatgctcaccaacccgcgcaaagctaccaaacaacaggttatcgaaatcttccaacgcgcctatgacggcaattaa

SEQ ID NO: 39736 - protein, 390 aa, Mannheimia succiniciproducens MBEL55E
MGVVLMSTYYFLPTRNVFGENAVEEVGELMRSLGGNRPLIVTDGFLAQSGMAEQLATILRGAGLEPIIFGGAEPNPTDKNVESGIAFYHDHNCDCIISLGGGSSHDCAKGIGLIASNGGRIQDYEGVDRSTNPMVPLMAVNTTAGTASEITRFCIITDTARKVKMAIVDWRVTPQIAVNDPLLMKGMPAGLTAATGMDALTHAIEAYVSTAANPLTDAAALMAISMIQQYLPKAVANGDYMKARDKMAYAQYLAGIAFNNASLGYVHAMAHQLGGFYNLPHGVCNAILLPYVEEFNLIGNLNRFRDIANAMGENIQGLSTDDAALKAIAAIRRLSKQVGIPANLKELGVKPEDFDVMAENAMKDVCMLTNPRKATKQQVIEIFQRAYDGN

SEQ ID NO: 39737 - DNA, 2631 bp, Mannheimia succiniciproducens MBEL55E
  CDS (1)..(2631): transl_table=11
atgattatgagtaacgctgttgaaaacacagtaagccccgctcaagcggaggtgaactcactggttgagaaaggtttagtggcactggagcaattccgccaactaaatcaggaacaggtggactacattgtagcgaaagcttctgttgccgctttagaccaacatggagcattggcgctacatgcgttagaggaaaccgggcgcggcgtgttcgaggacaaagccactaaaaacctgtttgcctgcgaacatgtagtgaacaaaatgcgacactggaaaaccgccgggattatcagtgacgacgatgtcacaggtatcaccgaaattgccgatccggtgggcgtagtttgcggcattacacctaccactaatcctacttccacggctatcttcaaatcactgatcgctttaaaaacccgcaatcctattgttttcgctttccacccttccgcccaacagtcttccgctcatgccgcacaaatcgtgcgtgatgccgcagtagccgccggtgcgccggaaaactgtattcaatggattgcacaaccttctatggaaggtactaatgcgttaatgaatcacccgggcattgccaccattctggctaccggcggtaatgctatggtgcaggccgcttattcatgcggcaagccggcattgggagtcggtgccggaaatgtgcccgcttatgtggaaaaatccgccgatattaaacaggcaactcacgatatcgtgatgtcgaaatcctttgataacggtatggtatgcgcttcagagcaagccgctattgccgatgcggaaatttatgaggaattcgtcaacgaattaaaatcctacggtgtgtatttcgtcaataaaaaagaaaaaactttattggaagaatttatgttcggtgtaaaagctaacggtgcaaattgcgccggtgcgaaactaaacgccgacgtggtaggtaaatccgcatactggattgctcaacaagcgggctttgaagtgccgaaaaaaaccaatattcttgccgcagaatgtaaagaagtcagcccgaaagaacctttaacccgggaaaaattatcaccggtacttgccgttttaaaatcccgttctaccgaagagggattaacgcttgccgaagccatggtggaatttaacggtttaggacactccgcggcaattcacaccaaagatgcggcgcttgccaaacgcttcggcgagcgcgttaaagccattcgcgttatctggaattcgccttctaccttcggcggtatcggcgacgtttataacgctttcctgccttcattaaccttgggttgcggttcttacggcaaaaattccgtcagcaacaatgtcagcgccatgaacttagtaaatatcaaacgtgtgggaagacggagaaataatatgcaatggtttaaagtaccttcaaaaatctattttgaacgggattcaattcaatatttacaatccgtaccggatatgcgacgagtagttatcgtaaccgaccgcactatggtggatcttgggtttgtacaaaaaatcgcccatcagttggaatcccgtcgcgatccggtttcttaccagttatttgccgatgtagaaccggatccgagcattcaaaccgtgcgccgcggtgtggatttaatccgtaatttcaaaccggacactattatcgcgcttggcggcggttccgccatggatgcggcaaaagtgatgtggttattctatgaacaaccggaaattgacttccgtgatttggttcaaaaattcatggatattcgtaaacgtgcctttaaatttccatcattgggaaaaaaagcccgctatatcggcattccgaccacatccggtacgggttcggaagtgaccccgtttgcggtgattaccgaaggtaacaaaaaatatccgattgcggactattcgctaacgccgactatcgctttagtggatccggcattagttatgacggtacccgcccatgtagcggcggatacgggattagacgtattaacccatgccaccgaagcttatgtttccgtactggccaacgattataccgacggtcttgctttacaggcgattaaactggtattccggtatttggaaaaatccgtaaaagaaaatgatccggaggcaagagaaaagatgcataatgcgtccaccattgcgggtatggcgtttgccaatgcattcttaggtatgaatcattcccttgcacataaacttggcggccatttccatacgcctcacgggcgcactaatgcgatcttaatgccgcacgtgatccgttataacggtactaaaccgacgaaaaccgccacatggccgaaatacaactattacaaagcggacgaaaaatatcaggatatcgcccgtttgttgggcttaccggcggcgaccccggaagagggcgtgaaatcttatgccaaagcggtttacgatttagcggtacgttgcggtattaaaatgtccttcaaagaacagggattggaagaacaagcctggatggatgcccgccatgaaattgcattgcttgcctatgaagaccaatgttcgccggcaaatccgcgattaccgattgtggcggacatggaagaaattctcactaacgcctactatggttatgatgaaagcaaatactaa

SEQ ID NO: 39738 - protein, 876 aa, Mannheimia succiniciproducens MBEL55E
MIMSNAVENTVSPAQAEVNSLVEKGLVALEQFRQLNQEQVDYIVAKASVAALDQHGALALHALEETGRGVFEDKATKNLFACEHVVNKMRHWKTAGIISDDDVTGITEIADPVGVVCGITPTTNPTSTAIFKSLIALKTRNPIVFAFHPSAQQSSAHAAQIVRDAAVAAGAPENCIQWIAQPSMEGTNALMNHPGIATILATGGNAMVQAAYSCGKPALGVGAGNVPAYVEKSADIKQATHDIVMSKSFDNGMVCASEQAAIADAEIYEEFVNELKSYGVYFVNKKEKTLLEEFMFGVKANGANCAGAKLNADVVGKSAYWIAQQAGFEVPKKTNILAAECKEVSPKEPLTREKLSPVLAVLKSRSTEEGLTLAEAMVEFNGLGHSAAIHTKDAALAKRFGERVKAIRVIWNSPSTFGGIGDVYNAFLPSLTLGCGSYGKNSVSNNVSAMNLVNIKRVGRRRNNMQWFKVPSKIYFERDSIQYLQSVPDMRRVVIVTDRTMVDLGFVQKIAHQLESRRDPVSYQLFADVEPDPSIQTVRRGVDLIRNFKPDTIIALGGGSAMDAAKVMWLFYEQPEIDFRDLVQKFMDIRKRAFKFPSLGKKARYIGIPTTSGTGSEVTPFAVITEGNKKYPIADYSLTPTIALVDPALVMTVPAHVAADTGLDVLTHATEAYVSVLANDYTDGLALQAIKLVFRYLEKSVKENDPEAREKMHNASTIAGMAFANAFLGMNHSLAHKLGGHFHTPHGRTNAILMPHVIRYNGTKPTKTATWPKYNYYKADEKYQDIARLLGLPAATPEEGVKSYAKAVYDLAVRCGIKMSFKEQGLEEQAWMDARHEIALLAYEDQCSPANPRLPIVADMEEILTNAYYGYDESKY

SEQ ID NO: 39739 - DNA, 1152 bp, Mannheimia succiniciproducens MBEL55E
  CDS (1)..(1152): transl_table=11
atgtcaaacagatttattttaaacgaaaccgcttatttcggcgccgggtcaattcaacatattgtcaccgaagtacaaaaacgcggttttacgaaagggttaattgttaccgataaatcattgattcaatttaaagtggtggaaaaagtgaccgcacttttagagggtgccaatctggcttatgagatttttgacgaagtattgccgaatccgaccatgaatgtggtaaaagcgggacttgctaaatttaaagcgagcggtgcggattatatgattgcgatcggcggaggttcgccgcaggataccgcgaaagctatcggcattatcgtcaataatccggagtttgcggatattcgcagtctggaagggactgcgccgacgaaaaaaccggcggtacctaccattgcggtgccgactacggcgggaacggccgcggaagttaccattaattatgtgattaccgatgaagagaacaaacgtaaattcgtttgtgtggatcctcattccattccggtcgtggctgtgattgacagcgagatgatggccagtatgccgccgaccttaaaagcggcaaccggggtggatgcactgactcacgctattgaaggtttcatcaccttgggcgcctgggaactttccgatatgttccatctgaaggctattgaaattattgcccgcgctttgcgttcctcggttaaaggcgagcaacagggcgtggaagatatggcattagggcaatacgtcgcgggtatgggcttctcaaatgtgggcttaggattagtacatggtatggcacatccgttaggcgcgttttacagcacaccgcacggtgtcgctaatgccgtattgctgcctcatattatggcgtataacgcagatttcaccggagacaagttccgttcgattgctaaagccatgggggtacggaatacggaaatcctctctattgaacaagcaagagttgcagccgttgaagcggtaaaaaccttaaataaagatgtgggtattccggctacattacgtgaagtgggtatgaaagaagaggatattcccgaactcgccaaagcggcctttgccgatgtttgtaccggaggaaatccgagaccaacttcggtaaatgagattgaacggttatatcgggctatttattaa

SEQ ID NO: 39740 - protein, 383 aa, Mannheimia succiniciproducens MBEL55E
MSNRFILNETAYFGAGSIQHIVTEVQKRGFTKGLIVTDKSLIQFKVVEKVTALLEGANLAYEIFDEVLPNPTMNVVKAGLAKFKASGADYMIAIGGGSPQDTAKAIGIIVNNPEFADIRSLEGTAPTKKPAVPTIAVPTTAGTAAEVTINYVITDEENKRKFVCVDPHSIPVVAVIDSEMMASMPPTLKAATGVDALTHAIEGFITLGAWELSDMFHLKAIEIIARALRSSVKGEQQGVEDMALGQYVAGMGFSNVGLGLVHGMAHPLGAFYSTPHGVANAVLLPHIMAYNADFTGDKFRSIAKAMGVRNTEILSIEQARVAAVEAVKTLNKDVGIPATLREVGMKEEDIPELAKAAFADVCTGGNPRPTSVNEIERLYRAIY

SEQ ID NO: 39741 - DNA, 996 bp, Bacillus licheniformis ATCC 14580
  CDS (1)..(996): transl_table=11
atgaaaacgctttatcattttcgaacggccgcccgaattgaggctggtccacattcactcaatttgctcggcgattacttagatcaaattggattgaatcagattcgttcggtgtttattttaactcagccgtcgatcgtctctctcggctatgcagaccaaattaaagaagggcttgcaaagaaaggcatctcaagtgaagtcaacacggatatacagcctgagccgacggagcaaaatatcgaacaggtttttcagcttttttctgaaggaggccatgacgcgattttgggaattggcggaggcagtgtgcttgatgcggctaaaatcctctctgttctgaaaacaaatgaaaaaccgatttctgctttgattggcacgaatctcgttgaaaagcccggcgttccgcttgtgctgattccgacaacatccggaacagggtcagaagtgacgccgaatgcgattgtaacgttccctgagaaagaattaaagattggtatagtcagtccctatctgctgccgtcgcttgtgattttagatccagttttgacgaccggacttccaaaggcaatcacagctgcaaccggaatggatgcatttacacacgcactcgaatcctatatttccaacaaagcaaatccattcagcgacatgtttgcgcttgaatctatgagactgatttcctccagcattcagcaggcctaccatcatggagataacctggaggcgagagaaaaaatgctcattggcgccatgtatggcggaatggccttgacaagcgcaggaacagcggcggttcatgcgatggcttaccctctagggggaaaatacaagatttcgcacggtgtggccaattcaatgctgcttccgcatgtaacggccttcaacgcggatcatgtaactgaccgcctttcggacgtggccggcgtaattggaatcgagccaaaaggttcgaagtccagccaagcagagcgggttatacgaaaaattgaatag

SEQ ID NO: 39742 - protein, 331 aa, Bacillus licheniformis ATCC 14580
MKTLYHFRTAARIEAGPHSLNLLGDYLDQIGLNQIRSVFILTQPSIVSLGYADQIKEGLAKKGISSEVNTDIQPEPTEQNIEQVFQLFSEGGHDAILGIGGGSVLDAAKILSVLKTNEKPISALIGTNLVEKPGVPLVLIPTTSGTGSEVTPNAIVTFPEKELKIGIVSPYLLPSLVILDPVLTTGLPKAITAATGMDAFTHALESYISNKANPFSDMFALESMRLISSSIQQAYHHGDNLEAREKMLIGAMYGGMALTSAGTAAVHAMAYPLGGKYKISHGVANSMLLPHVTAFNADHVTDRLSDVAGVIGIEPKGSKSSQAERVIRKIE

SEQ ID NO: 39743 - DNA, 1161 bp, Legionella pneumophila subsp. pneumophila str. Philadelphia 1
  CDS (1)..(1161): transl_table=11
atgaaaaaccaatcattaattgtcaattggaattacccgacacgaatcctggttggggctgggcgaatcaatgaactagcgaaagtatgtcgtgagttaggcatgaatgctcctctgttagtcacagacccgggattggcttcgtcgttaatggtgagtaaagtcatacaacaggctcaggcatccggtttgcgaacggggttattttgccaaattaaaacaaatcctaccggtgacaatgtgatgaatggagtctatgcttttaaagctggccagcatgatggcgtgattgctttcggaggtggctcggctttggatgccggcaaagccatcgctttaatggttggccaggatcgacctttatgggattttgaggacgtgggtgataactggactcgggtgaatgtttcagccatggccccagttcttgccattccaacaacagcaggaactggttcagaggtcgggcgagcttctgtaattaccgatgctgaaaagcaggttaaaaaaatcatttttcatcctaaaatgttgcctgctatggttattctggatccagtgttaacagtcggtcttcccaaatcacttactgcagctacaggtatggatgctctttcccattgtcttgaagcttattgttccaattattatcatcctatggcagaaggtattgcgttggaaggaataagattaatcaaggagaacttaattcaagcttacaaggatggtagtgacctggaggcaagaacccatatgctggttgcttcagcaatgggggctaccgcctttcagcgtggtcttggagcgatgcatgccttggctcatccattaggtgcaatttatgatgtccatcacgggcggcttaatgcggttttgatgccctatgttttattggctaatcgtagtgaaattgaaaacaagatagagcacctggcaaattatttgtcaatagcaaatggatttgatggttttttggattggatagagcagatgagattagagttaggaatcgaaaatacattaagtcagttaggtattgatcattcgcagatagacagactggcaaaaatggccaccgaggatgcggcagcagcttccaatcctgttctttttacattagagcaatacaaagaactattgagcaaagccattggtgagtaa

SEQ ID NO: 39744 - protein, 386 aa, Legionella pneumophila subsp. pneumophila str. Philadelphia 1
MKNQSLIVNWNYPTRILVGAGRINELAKVCRELGMNAPLLVTDPGLASSLMVSKVIQQAQASGLRTGLFCQIKTNPTGDNVMNGVYAFKAGQHDGVIAFGGGSALDAGKAIALMVGQDRPLWDFEDVGDNWTRVNVSAMAPVLAIPTTAGTGSEVGRASVITDAEKQVKKIIFHPKMLPAMVILDPVLTVGLPKSLTAATGMDALSHCLEAYCSNYYHPMAEGIALEGIRLIKENLIQAYKDGSDLEARTHMLVASAMGATAFQRGLGAMHALAHPLGAIYDVHHGRLNAVLMPYVLLANRSEIENKIEHLANYLSIANGFDGFLDWIEQMRLELGIENTLSQLGIDHSQIDRLAKMATEDAAAASNPVLFTLEQYKELLSKAIGE

SEQ ID NO: 39745 - DNA, 1155 bp, Bacteroides fragilis YCH46
  CDS (1)..(1155): transl_table=11
atgattaatcgatttatattaaacgaagtttcttacttcggtccgggagcacgtgaagtgctccccaaagagatttcacgtttggggctgcacaaagcatttgtcgcaacagacaaagatttgataaagtttggagtagctgacaaagtacttaaggtgctggaagctgccaagattccttatgaaatattcagtgagattaagcccaatcctacagtgtcgaatgtgaaagccggtgtcgaggcatttgcatcttccggtgcagactttattttggctataggtggcggatcttctatggatacggcaaaggcgattggtattatttccaataacccggaattcagtgatgtcgtttcattggagggagtggcagataccaagaagaaatctgttcccatcatcgcattacctactactgcaggaactgcggcagaggtgactatcaactatgtgataacggatgaacagaaccagaagaagatggtttgtgtagatcctaatgatattccgtctattgcgatagtggatgctgagttgatgtacacacttcctaaaagtctgactgcagctacgggactcgacgcactgactcatgctattgaaggtttaataaccaaaggggcatgggagatgagtgatatgttcgaaattaaagctattgaaatgatcaatcgttatcttgtgactgccgttgaagaaccatcgaatgcagaggcacgtaacggtatggcagtggctcaatatattgcaggtatggctttttcgaatgtaggtctgggagttgtgcatggtatggcacatccgttgggagctattttcgatattcctcatggtgtggccaatgctctattattgcccattattatggagttcaatgctcctgcagctcttgacaaatatgttgagatagctaaagcgatgaatgtgtattctactgacatgactaaagaaaaggcggcagaagcagcagtcgaagctgtaaaaacattatctttgagggtcaatattccgcaacacttgtcggacttgggtattcaggaaagtgatcttgaccgtctggccacagcagcgtttgctgatgtatgtacgccgggcaatccacgggaagtaacaaaagaaattattcttgatttatataagaaagcattatga

SEQ ID NO: 39746 - protein, 384 aa, Bacteroides fragilis YCH46
MINRFILNEVSYFGPGAREVLPKEISRLGLHKAFVATDKDLIKFGVADKVLKVLEAAKIPYEIFSEIKPNPTVSNVKAGVEAFASSGADFILAIGGGSSMDTAKAIGIISNNPEFSDVVSLEGVADTKKKSVPIIALPTTAGTAAEVTINYVITDEQNQKKMVCVDPNDIPSIAIVDAELMYTLPKSLTAATGLDALTHAIEGLITKGAWEMSDMFEIKAIEMINRYLVTAVEEPSNAEARNGMAVAQYIAGMAFSNVGLGVVHGMAHPLGAIFDIPHGVANALLLPIIMEFNAPAALDKYVEIAKAMNVYSTDMTKEKAAEAAVEAVKTLSLRVNIPQHLSDLGIQESDLDRLATAAFADVCTPGNPREVTKEIILDLYKKAL

SEQ ID NO: 39747 - DNA, 1293 bp, Nocardia farcinica IFM 10152
  CDS (1)..(1293): transl_table=11
atgcaggtagacgagctgctcaagccattccccatcaaggagttccaccccttcccgcgggcgctgctgggccccggctcgcacgagatcatcgggccggaggcgctgaagctcggcttcaagaaggtactggtgatgaccagcggcctgcgcggcaccgacatcgtgcccaagatcgtcggctcgctcgagtaccacgggctcgaggtcgtgctctacgacaaggtcgagtcgaaccccaaggactacaacgtgatggacgcggtcgcgctgtaccagcagcacggctgcgacagcttcgtgtcgatcggcggcggctcctcgcacgacgcctgtaagggcgcgcgcatctcgatcgcccacgacgggcgcaacatcaacgagttcgagggcttcaacaagtcggagaacccgaagaacccgccgcacatcgcggtctcgaccaccgcgggcaccggctcggagacctcctgggcctacgtcatcaccgacaccaccaccgatcccgacaacccgcacaagtacgtcgccttcgacgacgcctcggtcgccaccctggccatcgacgacccggtgctgtacttcgactgcccgaccgactacaccgcgcagtgcggtttcgacgtgctcgcgcacggttcggagccgttcgtctcgcggctgaacttcaccccgtcgatcggcaacgcgctctacgcgatcaagctggtcgcggagaacctgcgcaccgccacctggaacccgaccgagctgtccggccgcgagggcatgatgtacgcccagtacatcgcggcgcaggcgttcaactccggcggcctcggcatcatccactccatctcgcacgcggtgtcggcgttctacgacacccaccacggcctgaacaacgcgatcgcgctgccgcgcgtgtgggcgttcaacatgccggtggcgtacaagaagttcgccgagatcgcgggcgcgatgggcgtggacacctacggcatgaccgacgtgcaggccgccgacgcggcactgggcgcggccgtgcggctgctgcgcgacgtgggcatcccggagaagttcaccgacatcaccaaggacacctactcgaagaaccggctgggccagggcccgaccaagtactacgagaacgcctcggtgatcaagggcaacgacgaggacatcgaccggatcacccggcacgtcctcggtgacgcctgcaccccgggcaacccgaaggaatgcaccttcgagaccgtgcgcccggtcgtcgagcactgcatgcacggcagcctggacgacctgctcagctga

SEQ ID NO: 39748 - protein, 430 aa, Nocardia farcinica IFM 10152
MQVDELLKPFPIKEFHPFPRALLGPGSHEIIGPEALKLGFKKVLVMTSGLRGTDIVPKIVGSLEYHGLEVVLYDKVESNPKDYNVMDAVALYQQHGCDSFVSIGGGSSHDACKGARISIAHDGRNINEFEGFNKSENPKNPPHIAVSTTAGTGSETSWAYVITDTTTDPDNPHKYVAFDDASVATLAIDDPVLYFDCPTDYTAQCGFDVLAHGSEPFVSRLNFTPSIGNALYAIKLVAENLRTATWNPTELSGREGMMYAQYIAAQAFNSGGLGIIHSISHAVSAFYDTHHGLNNAIALPRVWAFNMPVAYKKFAEIAGAMGVDTYGMTDVQAADAALGAAVRLLRDVGIPEKFTDITKDTYSKNRLGQGPTKYYENASVIKGNDEDIDRITRHVLGDACTPGNPKECTFETVRPVVEHCMHGSLDDLLS

SEQ ID NO: 39749 - DNA, 1302 bp, Nocardia farcinica IFM 10152
  CDS (1)..(1302): transl_table=11
gtggcccagctgacgcgacccgtaccgggtgttccgaccgatccggtattgcgcacccggacccgcaccgacctccccgccgccgatccggcggcctccgaggtggaactgagcgggccgtgggagccggacacggtgagcgccaccgccgccccgcagctggcgaaattccacacccccgaggtcgtgttcgggccgggcgcaatgggtgaactggggcattgcgcgcggcgggtgggcgcgcggcggccgttcctggtcaccgatcccggcatcatcgagtccgggtgggtcgccgaggcgaccgggcacctgcagcaggtcggcctgcatccggtggtgtggtcgacgatcacgccgaacccgaaggaccacgagatcaccgccgcctacgagcactacctggcgaccggcagcgacgtcgtgatcgcggtcggcggcggttccagcatcgacgcggccaagggggtggcgatcctggccggcaacggcggcgcgatcctcgactacgagggcgtggaccgggtgacccagccgatcccgccgctggtcatggtgccctcgacctccggcaccggcgcggacgtgtcgcagttcgccatcgtcaccgacaccactcagcgcaccaagatcaccatcatcagccggacactcgtgcccgacgtgtcgatcgtcgacccgcggctgctgatcaccatgcccgacgacctcaacgccgccaccggactggacgcgctcacgcacgcgatcgagtcctacgtctcgcgcgcgcacaaccagctcaccgaccatcacgccctgcacgccgcgcacctgatcaccagcaacctgcgccgcaccatgacgcacccgcgcctggccgaaccgcgcatcgcgatggcgcacggcgcgttgcaggcgggcatggccttcaccaacgccatcctcgggatcacccacgccatgagtcaccaggtgggcgggctgctcgacgccccgcacggcgtgctcaacggcatcctgctgccgcactgcatccgcttcaacgccgccgccgacccgaccccgtacgtgccgttggccgccgccgtcgggatcgacgtggcacgcaagcccgccgccgaggtggccgagctgctggccgagcggatccgcgcgctggccgacgagatcggggtgccgcgcgggctggccgcgttgggtgtgaccgaagccgacatcccgacgatggcccgcaccaccctcaacgacgcctgcctggcgaccaacccgcgcgtgcccgacgccgagagcatcgcggagctgttccgcgaggcgttgtga

SEQ ID NO: 39750 - protein, 433 aa, Nocardia farcinica IFM 10152
MAQLTRPVPGVPTDPVLRTRTRTDLPAADPAASEVELSGPWEPDTVSATAAPQLAKFHTPEVVFGPGAMGELGHCARRVGARRPFLVTDPGIIESGWVAEATGHLQQVGLHPVVWSTITPNPKDHEITAAYEHYLATGSDVVIAVGGGSSIDAAKGVAILAGNGGAILDYEGVDRVTQPIPPLVMVPSTSGTGADVSQFAIVTDTTQRTKITIISRTLVPDVSIVDPRLLITMPDDLNAATGLDALTHAIESYVSRAHNQLTDHHALHAAHLITSNLRRTMTHPRLAEPRIAMAHGALQAGMAFTNAILGITHAMSHQVGGLLDAPHGVLNGILLPHCIRFNAAADPTPYVPLAAAVGIDVARKPAAEVAELLAERIRALADEIGVPRGLAALGVTEADIPTMARTTLNDACLATNPRVPDAESIAELFREAL

SEQ ID NO: 39751 - DNA, 1161 bp, Legionella pneumophila str. Paris
  CDS (1)..(1161): transl_table=11
atgaaaaaccaatcattaattgtcaattggaattacccgacacgaatcctggttggggctgggcgaatcaatgaactagcgaaagcatgtcgtgagttaggcatgaatgctcctctgttagtcacagacccgggattggcttcgtcgttaatggtgagtaaagtcatacaacaggctcaggcatccggtttgcgaacggggttattttgccaaattaaaacaaatcctaccggcgacaatgtgatgaatggagtctgtgcttttaaagctggccagcatgatggcgtgattgctttcggaggtggctcggctttggatgccggcaaagccatcgctttaatggttggccaggatcgacctttatgggatttcgaggatgtgggtgataactggactcgagtgaatgtttcagccatggccccagttcttgccattccaacaacagcaggaactggttcagaggtcgggcgagcttctgtaattaccgatgctgaaaagcaggttaaaaaaattatttttcatcctaaaatgttgcctgccatggttattctggatccagagttaacagtcgggcttcccaaattactcactgcagccacaggtatggatgctctttcccattgtcttgaagcttattgttccaattattatcatcctatggcagaaggtattgcgttagaaggaataagattaatcaaggagaatttaattcaagcttacaaggatggtagtgacctggaggcaagaacccatatgctagttgcttcagcaatgggagctactgcctttcagcgtggtcttggagcgatgcatgccttggctcatccattaggtgcaatttatgatatccatcacgggcggcttaatgcggttttgatgccctatgttttattggctaatcgtagtgaaattgaaaacaagatagagcgtctggcaaattatttgtcaatagcaaatggatttgatggttttttggattggatagagcagatgagattagagttaggaatcgaaaatacactaagtcagttaggtattgatcattcgcagatagacagactggcaaaaatggccactgaggatgcggcagcagcttccaatactgttctttttacattcgagcaatacaaagaactattgagcaaagctattggtgagtaa

SEQ ID NO: 39752 - protein, 386 aa, Legionella pneumophila str. Paris
MKNQSLIVNWNYPTRILVGAGRINELAKACRELGMNAPLLVTDPGLASSLMVSKVIQQAQASGLRTGLFCQIKTNPTGDNVMNGVCAFKAGQHDGVIAFGGGSALDAGKAIALMVGQDRPLWDFEDVGDNWTRVNVSAMAPVLAIPTTAGTGSEVGRASVITDAEKQVKKIIFHPKMLPAMVILDPELTVGLPKLLTAATGMDALSHCLEAYCSNYYHPMAEGIALEGIRLIKENLIQAYKDGSDLEARTHMLVASAMGATAFQRGLGAMHALAHPLGAIYDIHHGRLNAVLMPYVLLANRSEIENKIERLANYLSIANGFDGFLDWIEQMRLELGIENTLSQLGIDHSQIDRLAKMATEDAAAASNTVLFTFEQYKELLSKAIGE

SEQ ID NO: 39753 - DNA, 1161 bp, Legionella pneumophila str. Lens
  CDS (1)..(1161): transl_table=11
atgaaaaaccaatcattaattgtcaattggaattacccgacacgaatcctggttggggctgggcgaatcaatgaactagcgaaagtatgtcgtgacttaggtatgaatgctcctctgttagtcacagacccgggattggcttcgtcgttaatggtgagtaaagttatacaacaggctcaggcatccggtttgcgaacggggttattttgccaaattaaaacaaatcctaccggtgacaatgtgatgaatggagtctatgcttttaaagctgggcagcatgatggtgtgattgctttcggaggtggctcggctttggatgccggcaaagccatcgctttaatggttggccaggatcgacctttatgggatttcgaggacgtgggtgataactggactcgagtgaatatttcagccatggccccagttcttgccattccaacaacagcaggaactggttcagaggtcgggcgagcttctgtaattaccgatgctgaaaagcaggttaaaaaaatcatttttcatcctaaaatgttgcctgctatggttattctcgatccagagttaactgtcgggcttcccaaatcacttactgcagctacaggtatggatgctctttcccattgtcttgaagcttattgttccaattattatcatcctatggcagaaggtattgcgttggaaggaataagattaatcaaggggaatttaattcaagcttacaaggatggtagtgacctggaggcaagaacccatatgctggttgcttcagcaatgggggctaccgcctttcagcgtggtcttggagcgatgcacgccttggctcatccattaggtgcaatttatgatgtccatcacgggcggcttaatgcggttttgatgccttatgttttattggctaatcgtagtgaaattgaaaacaagatagagcgtctggcaaattgtttatcaatagcaaatggatttgatggttttttggagtggatagagcagatgagattagagttaggaatcgaaaatacattaagtcagttaggtattgatcattcgcagatagacagactggcaaaaatggccactgaggatgcggcagcagcttccaatcctgttctttttacattagagcaatacaaagaactattgagcaaagccattggtgagtga

SEQ ID NO: 39754 - protein, 386 aa, Legionella pneumophila str. Lens
MKNQSLIVNWNYPTRILVGAGRINELAKVCRDLGMNAPLLVTDPGLASSLMVSKVIQQAQASGLRTGLFCQIKTNPTGDNVMNGVYAFKAGQHDGVIAFGGGSALDAGKAIALMVGQDRPLWDFEDVGDNWTRVNISAMAPVLAIPTTAGTGSEVGRASVITDAEKQVKKIIFHPKMLPAMVILDPELTVGLPKSLTAATGMDALSHCLEAYCSNYYHPMAEGIALEGIRLIKGNLIQAYKDGSDLEARTHMLVASAMGATAFQRGLGAMHALAHPLGAIYDVHHGRLNAVLMPYVLLANRSEIENKIERLANCLSIANGFDGFLEWIEQMRLELGIENTLSQLGIDHSQIDRLAKMATEDAAAASNPVLFTLEQYKELLSKAIGE

SEQ ID NO: 39755 - DNA, 2706 bp, Photobacterium profundum SS9
  CDS (1)..(2706): transl_table=11
atgcctgttacaaatatggctgaactagatgcaatggttgcccgcgtaaaagctgctcaacaagagtttgcaactttctctcaagagcaagttgataaaatctttcgtgctgcttctctagctgcgaacaacgcacgtattcctctagctcaacaagctgtagctgagtctggtatgggtattgttgaagataaggttatcaaaaaccacttcgcttcagaatttatctacaacaaatacaaagacgaaaaaacgtgcggtattttggaagagaacgaagagttcggcaccatgactatcgcagaaccagtaggtatcatttgcggtatcgtacccactacgaacccaacatctactgcaatcttcaaatctcttatctctcttaaaacacgtaacgcaattatcttctcgccacatccacgtgctaaaaactcaacgaacgctgctgctaaattagtgcttgacgctgctgttgctgctggcgcaccaaaaaacatcattggttggattgaccaaccttcagttgagctttcaaatgcattgatgaagcataacgacattaaccttattcttgcgactggtggtccaggtatggttaaagcggcttactcttcaggtaaaccagctatcggtgttggtgcgggtaacgtacctgtagttattgatgaaacggctgatattaagcgtgctgtagcatctgtgcttatgtctaagacattcgataacggtgttgtatgtgcttctgagcaagcagttatcgttatggacgaagtctacgatgaagtgaaagcacgctttgcttctcacaacggttatgtactgtctaaagctgaagcagataaagtacgtaaaatcttgcttatcaacggtaacctaaacgcagatatcgtaggccagccagcaactaaaattgctgaaatggcaggtattactgttcctgctgatactaagattcttatcggtgaaggcgatgaagttaagtacgaagacgaattcgcacacgaaaaactatctccaacgttaggtatgttccgcgcatcttcttttgaaaatgcagtagagcaagcttgtactatggttgatatcggcggtatcggtcacacatctggtctatacactaaccaagatgtaaataaagatcgtatcaagtacttcggcgacaagatgaagactgcacgtattcttgtaaacattccgactactcacggtggtatcggtgacctttacaactttaacgttgcaccttctctaactcttggttgtggttcatggggtggtaactctatctctgagaacgtaggtcctaagcaccttatcaacaagaagactgtagcgaagcgagctgagaatatgttgtggcataaactaccaaaatcaatctacttccgtcgtggtagccttccaatcgcattgagcgatctagaaggcaagaaacgtgcattcctagttactgaccgtttcctattcaacaacggttatgctgatgatgtggttaaactacttaaagctcaaggtattgaagttcaaactttcttcgacgtagaagcggatccaacactgtctattgttgagaaaggtgcagaagcgatgaagagcttccagcctgacgtaatcatcgcgcttggtggtggttctccgatggatgctgcgaagatcatgtgggttatgtacgagcacccagaaactcactttgaagaactagcaatgcgctttatggatattcgtaagcgtatttacaagttccctaaaatgggtaaaaaagctgagctagtatgtatcacgactacatcaggtacgggttctgaagtaacacctttcgctgttgttacagacgataagacaggtgctaagtacccactcgctgattacgaattaacacctcatatggctatcgttgatgcaaacttagtaatgaacatgcctaggtcgctaacagcatttggtggttacgatgcagtaactcacgcactagaagcttacgtttctgttcttgctaacgaatactctgatggccaggctcttcaagcacttaagatgctgaaagaatacctaccttcaagctacgcaaatggtgcaaacgacccaatcgctcgtgagaaagtacacaatgcggcaactatcgctggtattgcgtttgcgaatgctttcctaggtgtgtgtcactcaatggctcacaaagtgggtgcagagttccacgtaccacacggcttagctaatgcattgttgatttctaacacaattcgttacaacgcgaacgataacccaacaaaacaaacagcgttctctcagtacgcaagcccacaagctcgccgtcgttatgctgaagttgctgatcacttgagtttatctcaagctggtgaccgtactgctcagaagattgaacgtctactaacatggttagaagagctgaaaattgcactggatatcccgctatcaattcaagctgcaggcattccagaagctgacttcctagcgaaactagaccaactatcaattgaagcgttcgatgatcagtgtactggtgctaacccacgttaccctcttatcagcgagctgaaagaagtactaacgtctgcttactacggtactccgtatatcgaaggtgaaactttcgaaggtacgactgtcattaagaagtctgagccagtagtagttgctgtaaaagtagaaaaagtgaaagcaaagaaagaagcagctaaagcttaa

SEQ ID NO: 39756 - protein, 901 aa, Photobacterium profundum SS9
MPVTNMAELDAMVARVKAAQQEFATFSQEQVDKIFRAASLAANNARIPLAQQAVAESGMGIVEDKVIKNHFASEFIYNKYKDEKTCGILEENEEFGTMTIAEPVGIICGIVPTTNPTSTAIFKSLISLKTRNAIIFSPHPRAKNSTNAAAKLVLDAAVAAGAPKNIIGWIDQPSVELSNALMKHNDINLILATGGPGMVKAAYSSGKPAIGVGAGNVPVVIDETADIKRAVASVLMSKTFDNGVVCASEQAVIVMDEVYDEVKARFASHNGYVLSKAEADKVRKILLINGNLNADIVGQPATKIAEMAGITVPADTKILIGEGDEVKYEDEFAHEKLSPTLGMFRASSFENAVEQACTMVDIGGIGHTSGLYTNQDVNKDRIKYFGDKMKTARILVNIPTTHGGIGDLYNFNVAPSLTLGCGSWGGNSISENVGPKHLINKKTVAKRAENMLWHKLPKSIYFRRGSLPIALSDLEGKKRAFLVTDRFLFNNGYADDVVKLLKAQGIEVQTFFDVEADPTLSIVEKGAEAMKSFQPDVIIALGGGSPMDAAKIMWVMYEHPETHFEELAMRFMDIRKRIYKFPKMGKKAELVCITTTSGTGSEVTPFAVVTDDKTGAKYPLADYELTPHMAIVDANLVMNMPRSLTAFGGYDAVTHALEAYVSVLANEYSDGQALQALKMLKEYLPSSYANGANDPIAREKVHNAATIAGIAFANAFLGVCHSMAHKVGAEFHVPHGLANALLISNTIRYNANDNPTKQTAFSQYASPQARRRYAEVADHLSLSQAGDRTAQKIERLLTWLEELKIALDIPLSIQAAGIPEADFLAKLDQLSIEAFDDQCTGANPRYPLISELKEVLTSAYYGTPYIEGETFEGTTVIKKSEPVVVAVKVEKVKAKKEAAKA

SEQ ID NO: 39757 - DNA, 1149 bp, Photobacterium profundum SS9
  CDS (1)..(1149): transl_table=11
atgagcagtgcattttttatcccttcggtaaacttaatgggcgctggttgtttaactgaggcggcagatgcggttaaagcacatggcttcaaaaaagcattaatcgtgacagataaagtattgaaccaaattggcgtggttaagcaagtggttgatctgctggctgaacgtaacgtagaagcggttgtttttgatggcacacaacctaacccaacaatgggcaatgttgaagcgggcttagcgctattaaaagccaatgagtgtgactttgttatttcattaggtggtggctcgccgcacgattgtgcgaaaggtgttgcgcttgttgcttcaaatggcggttcaatctctgattatgaaggggttgatgtgagtgctaaacctcagttaccacttgttgcgattaatacgacagctggtacagcatcagagatgacacgcttctgtattattacggatgaagctcgtcacattaagatggccattgttgataaaaatacaacgccattaatgtcagtaaatgatcctgaattgatgttagcaaagcctgcatcattaaccgcagcaaccggtatggatgcgctaacacacgctattgaagcatacgtttcaactgcagcaacaccgattacagatgctgtagcaattaaagctatggagcttattcaggcacacttacgtaccgctgtaaatgatggtcaaaaccttgaagcgcgtgagcaaatggcctacgcacaattcatggctggcatggcatttaacaatgcctctttaggttacgtacacgcaatggcgcaccagttaggtggtttttacgacctgccacatggtgtgtgtaatgcggttcttttacctcacgttcagcgctataacgctaaagtatgtcctgagcgtttacgtgatgtagcaaaagccatgggtgtgaatgttgaatctatgactgctgaacaaggtgcagatgctgcattagaagccattcaagttctatcgaaagatgtaggtattccagctggtcttaaagatcttggcgcaaagaatgaagatatctcaattcttgctgataatgcattgaaagatgcatgtggttttactaatccaaagcaagcaactcatgaagaaatttctgagatttttgctgctgcaatgtaa

SEQ ID NO: 39758 - protein, 382 aa, Photobacterium profundum SS9
MSSAFFIPSVNLMGAGCLTEAADAVKAHGFKKALIVTDKVLNQIGVVKQVVDLLAERNVEAVVFDGTQPNPTMGNVEAGLALLKANECDFVISLGGGSPHDCAKGVALVASNGGSISDYEGVDVSAKPQLPLVAINTTAGTASEMTRFCIITDEARHIKMAIVDKNTTPLMSVNDPELMLAKPASLTAATGMDALTHAIEAYVSTAATPITDAVAIKAMELIQAHLRTAVNDGQNLEAREQMAYAQFMAGMAFNNASLGYVHAMAHQLGGFYDLPHGVCNAVLLPHVQRYNAKVCPERLRDVAKAMGVNVESMTAEQGADAALEAIQVLSKDVGIPAGLKDLGAKNEDISILADNALKDACGFTNPKQATHEEISEIFAAAM

SEQ ID NO: 39759 - DNA, 1176 bp, Geobacillus kaustophilus HTA426
  CDS (1)..(1176): transl_table=11
atggtcggacattatatccaaaaggaagttgaatttgagttctctttccatcttcctacatcaatccagtttggatacggtaaagcatctcaactcggaaatcagctggtagacatggggataaaaagtgcttttttagttactgacagaggagtggaagcaactggcttactggcaggaatcattcaatctctagagtcgtctaatatacagtactgtgtttatgccgatgtagaacctgatccaagcttggagactattgatcaaggggcagctgcttttaaggaacagccttttgactgcattgtcgccataggtggtggaagtccgatcgatacggccaaaggaatacgtgtcgtcgcaacaaacgggggatccattggtgattacgctggtgttaatcgcatcaagaaaaagtctgaaatccctttaatagccttgcctacaacatctggtacaggtagtgaggttacaatctttggtgtctactctgattggaagaataatgttaaggttacggttacaagcccatatatggcgcctgagattgctttggtagaccctaagcttactatgagtttacccaaaaaaataacggctgcatcaggtattgatgcgctagcccatggaatcgaaactttcttctccttgcgttctcagcctatatcggatgttctagcgatcgaagcaatgacaacggtaaatcgctatctgcgtcgtgcagttgaagatggtactaataaagaggcaaggatcggtatgtcctacgggagcttattggcgggaatggcttttaataacggatttctaggtttagcccatgcgattggaagtgctttatcaggtcactgtcatgtatctcatggtgtcgcaatcgggttgctacttccaaaggttgtggaatttaactccgttgttcagcctgaaaaagcggccaagatagccgaattgttagggaggaaaggaaaccagaatacccttgtgcaacaagcggctttggcggtcgcttcgttagttaaagagattgggcttccgacacgtttgcgcgacgtcgacgttcccaaagaaaaactccccgatatcgcaaaagattcattcaaaagcggaatgatgcgatttaacccacgtcaaccgagtgaagcagaggttatgacactcttacaacagatttattga

SEQ ID NO: 39760 - protein, 391 aa, Geobacillus kaustophilus HTA426
MVGHYIQKEVEFEFSFHLPTSIQFGYGKASQLGNQLVDMGIKSAFLVTDRGVEATGLLAGIIQSLESSNIQYCVYADVEPDPSLETIDQGAAAFKEQPFDCIVAIGGGSPIDTAKGIRVVATNGGSIGDYAGVNRIKKKSEIPLIALPTTSGTGSEVTIFGVYSDWKNNVKVTVTSPYMAPEIALVDPKLTMSLPKKITAASGIDALAHGIETFFSLRSQPISDVLAIEAMTTVNRYLRRAVEDGTNKEARIGMSYGSLLAGMAFNNGFLGLAHAIGSALSGHCHVSHGVAIGLLLPKVVEFNSVVQPEKAAKIAELLGRKGNQNTLVQQAALAVASLVKEIGLPTRLRDVDVPKEKLPDIAKDSFKSGMMRFNPRQPSEAEVMTLLQQIY

SEQ ID NO: 39761 - DNA, 1149 bp, Geobacillus kaustophilus HTA426
  CDS (1)..(1149): transl_table=11
atgaacattcataagttcgtgatgcccgaagtgatttttggtaacggttccattcatcaagtaggggaaagttgtctaaggcttggtgcgacaaatgtgttgattgtcagcgatccaggtgttacggaagctggttggctcgatgttgtcattaagagttgcaggcaagtaggattaaaatacacgacattttgtgatgtaacaataaatccaaaggacgaagaagtaaaaaaaggctgtgaagcatatcttgagaatgaatgcgatgctatcattggaatcggtggaggcagttctattgatgccgcaaaggctgtcgccattcttgctacaaacgggggacaaattcatgaatatgagggagtggataaaattcaattgccccttcctcctcaagtgatggttccaacaacagcagggtcaggatcagaagtatcccaattttctgttattgttaatacaaaagagaaaaaaaagatgacgatcatttcccgatctcttattcctgatattgcaattattgatccagaaacattgtcgacaaaaagcgctcatttaactgcctcaacaggattagatgttttaacgcatggcattgaggcgtatgtaagtctagcagctacaccgcttacagacgttcaagctcaaaacgctatttctttagtaggaaaatatttgcgcccttctgtcgcctctaaaatcaaccaagaggcaaaaaccaatatggcaatggcgagtttgcaggcaggattggctttttctaacgcgattttaggcgctgttcatgcaatgtcccatgctgtcgggggaaggtatcctcttcttcatggggatataaactctatattgcttccgcatgtgatggagttcaatctgttggcgaatccgaaaaaatttgctgatattgcttgttttctcggaatggatactcgtggcatgtcttatatggaagcgggaagaaaaacaattgaatatgtaaaacaattggcagaggatattggggtgccacagcgattatctgatataggagtgaaacaagaagaaatacggaaaatgagtttggttgcctttcatgacgcatgtatgatcaccaaccctcgtgatatcactgtagaagaaattgaaggaatattcagaaaggcgtggtaa

SEQ ID NO: 39762 - protein, 382 aa, Geobacillus kaustophilus HTA426
MNIHKFVMPEVIFGNGSIHQVGESCLRLGATNVLIVSDPGVTEAGWLDVVIKSCRQVGLKYTTFCDVTINPKDEEVKKGCEAYLENECDAIIGIGGGSSIDAAKAVAILATNGGQIHEYEGVDKIQLPLPPQVMVPTTAGSGSEVSQFSVIVNTKEKKKMTIISRSLIPDIAIIDPETLSTKSAHLTASTGLDVLTHGIEAYVSLAATPLTDVQAQNAISLVGKYLRPSVASKINQEAKTNMAMASLQAGLAFSNAILGAVHAMSHAVGGRYPLLHGDINSILLPHVMEFNLLANPKKFADIACFLGMDTRGMSYMEAGRKTIEYVKQLAEDIGVPQRLSDIGVKQEEIRKMSLVAFHDACMITNPRDITVEEIEGIFRKAW

SEQ ID NO: 39763 - DNA, 1188 bp, Geobacillus kaustophilus HTA426
  CDS (1)..(1188): transl_table=11
atgaccgcatcccgcatcgtctttccgccgctcagctatgtcggctggggggcgcttggccagttagttccagaagtaaaaaggcttggggcaaaacacgtgttggtgatcaccgatccagcgcttgaaaaactcggtctcgtcgagcaagtggcatctccgctccggcaagcagggtgcagcgtgcatgtatatacggatgttgtgccggagccgccgcttgaaacaggggagaaggcggtggcgtttgtccgcgacggagagtttgatctcgtcatcggggtcggcggcggcagcgcgatggatttggcgaaactggccgctgttttggccgtgcatgaaggttcggtcgccgattatttaaacttgacgggaacgagaacacttgagaaaaaaggattgccgaaaatattgattccgacgacatcaggcaccgggtcggaggtgacgaacatctccgtgttgtccttagaaacgacgaaagacgtcgtgacgcatgattatttgttggcggatgtggcgatcgtcgatccgcagcttacggtttccgtcccgccgcgggtgacggcggcgacgggcattgatgcgcttacccatgcggttgaagcgtacgtgtcggtcaatgcgagcccgacatcggacggcttggcgcttcaggcgatgcgtctcatttcccgctcattgcgcaaggcggtggaacatggagcggacaaacaggcgcgcatcgatatggcgaacggcagctatttggccggtttggcgtttttcaacgccggggtggccggcgtgcatgcgctcgcgtatccgcttggcggacagtttcatatcgcccatggcgaatcaaatgccgtgctcttgccatatgtgatgggctacattcgccaaagctgcacgaaacgaatggctgatatcttaaacgccctcggcggcaactcgagctttttatcagaggaggaggcgtcgcaccgctgcgtcgaggagctcgagcgcctcgtcgccgatgtcggcatcccgaagacgctcggcggttttggcattccggaaagtgcgttagaaagcttgacaaaagacgccattcagcaaaaacggctgctcgcccgcagcccgatgccgctttcggaagacgacatccgcacgatttatcaagcggcgtttacagggacgatcgtcgaaccgaacaacgaatga

SEQ ID NO: 39764 - protein, 395 aa, Geobacillus kaustophilus HTA426
MTASRIVFPPLSYVGWGALGQLVPEVKRLGAKHVLVITDPALEKLGLVEQVASPLRQAGCSVHVYTDVVPEPPLETGEKAVAFVRDGEFDLVIGVGGGSAMDLAKLAAVLAVHEGSVADYLNLTGTRTLEKKGLPKILIPTTSGTGSEVTNISVLSLETTKDVVTHDYLLADVAIVDPQLTVSVPPRVTAATGIDALTHAVEAYVSVNASPTSDGLALQAMRLISRSLRKAVEHGADKQARIDMANGSYLAGLAFFNAGVAGVHALAYPLGGQFHIAHGESNAVLLPYVMGYIRQSCTKRMADILNALGGNSSFLSEEEASHRCVEELERLVADVGIPKTLGGFGIPESALESLTKDAIQQKRLLARSPMPLSEDDIRTIYQAAFTGTIVEPNNE

SEQ ID NO: 39765 - DNA, 1188 bp, Geobacillus kaustophilus HTA426
  CDS (1)..(1188): transl_table=11
atgtacgaattgttggtgcccagccgggttgtgtatgggcgcgatacgttcgccgaagtcggcccacaagcaaaagcgctcgggacgaaagcgctgatcgtcagcgacccggtgatggagaaaatcggccttgtcgcccgttgcgagcaatacttgcaacaggtggggatgacgtttgccaagtacacaggggttgacacggagccgacggatgtccatgtgaaggaagcgcttgacgtctgccggagcgagcagtgcgatgtcattatcgctcttggcggcggcagcagcatcgacgccgccaaagcggtgtccgtgatgatgacgaatgaaggaacgatcagcgactatgtcggcaatcaaaaaaggtttaccgaaaaaccgctgccgctcatcgccattccgacaacggccggaacgggttcggaagtgacgaaagtaacggtcattatcgatacgaagatggacgtcaaaatgatgatttcccaaccggcgctgcttccagccgtggcgattgtcgacccgttgctcacggtttcatgcccgccgtccgttacagcggcgaccggggttgatgcgctgtgccatgcgatcgaggcgtatatttcccgacgcgcccacccggtgaccgatgcgctggcgctctctgccattgaagcgatcgtcggtcatttgcgccgggcgtatgaaaacggccaagacatcgaagcgcgggagaagatggcgatcgcggccatgaaagccggcatggccttttccaacgcctcggtgacgctcgtgcacggcatgtcgcggccgatcggcgcgcttttccacgtgccgcacggcgtatcgaacgcgatgttgttgcctggggtgcttgagtttacaaaagacagcgccatcgaacgattggcggtgatcgtccgaatcatcaagccgccgctcaaagacgtttccgatacggaagcggctgaggcgctcgttgaggaagtgaaacagctttgccgcgatttgcacatcccgaatatgaaaacgtggggcattgacaaaacagcgtttgacaaggtggtggacaaaatggcggctgacgcgcttgcgagcggcagccccgccaacaacccgaaagtgccgacgcatgaggaaattgtggcattgtaccattattgttacgactatcagtacgacaccaaaaccgtaagttcgtaa

SEQ ID NO: 39766 - protein, 395 aa, Geobacillus kaustophilus HTA426
MYELLVPSRVVYGRDTFAEVGPQAKALGTKALIVSDPVMEKIGLVARCEQYLQQVGMTFAKYTGVDTEPTDVHVKEALDVCRSEQCDVIIALGGGSSIDAAKAVSVMMTNEGTISDYVGNQKRFTEKPLPLIAIPTTAGTGSEVTKVTVIIDTKMDVKMMISQPALLPAVAIVDPLLTVSCPPSVTAATGVDALCHAIEAYISRRAHPVTDALALSAIEAIVGHLRRAYENGQDIEAREKMAIAAMKAGMAFSNASVTLVHGMSRPIGALFHVPHGVSNAMLLPGVLEFTKDSAIERLAVIVRIIKPPLKDVSDTEAAEALVEEVKQLCRDLHIPNMKTWGIDKTAFDKVVDKMAADALASGSPANNPKVPTHEEIVALYHYCYDYQYDTKTVSS

SEQ ID NO: 39767 - DNA, 1188 bp, Salmonella enterica subsp. enterica serovar Paratyphi A str. ATCC
  CDS (1)..(1188): transl_table=11
atgcaagctgaactacagacggcgctgtttcaggcattcgacaccctgaatctgcaacgggtgaaaacgttcagcgtaccgccggtcacgctgtgcggacttggggcgctcggcgcctgcggccaggaagcgcaagcgcgaggcgtaagtcatctgtttgtgatggtcgacagcttcctgcatcaggcgggaatgaccgcgccgctggcacgcagcctggcgatgaaaggcgtggcgatgacagtctggccgtgtccgccaggcgagccgtgcatcaccgatgtttgcgcggcggtggcgcaactgcgtgaggcggcgtgcgacggcgtagtggcctttggcggcggttcggtgctggacgcggcgaaagcggtcgccctgctggtgactaaccctgaccagacgctgagcgccatgaccgagcgcagtacattacgcccgcgtctgccgctgattgcggtgccgaccaccgccggaaccggttctgaaaccaccaacgtgacggtgattatcgacgcggtcagcgggcgcaagcaggtgctggcacacgcgtcactaatgccggacgtggcgattcttgatgctgccgtgaccgaaggcgttccgccaaacgtgacggcgatgactggtatcgatgcgttgacgcatgcgattgaggcctacagcgcgctcaacgccacgccgtttaccgacagcctggcgattggcgcgatagcgatgattggcaaatcgctgccgaaagccgtgggttacggccacgatctggcggcgcgtgaaaatatgttgttggcctcctgtatggcgggaatggccttttccagcgccggtctggggctgtgtcatgcgatggcgcaccagccaggggcggcgctgcatattccgcacggccaggccaacgccatgctgctgccgacagtcatgggatttaaccggatggtatgccgcgaacgcttcagtcaaatcggtcgggcgttaaccaataagaagtcggacgatcgcgatgcgattgcggcggtgagcgagctgattgccgaagtggggcagagcaaacggctggctgacgctggcaccaaacccgaacactacagcgcgtgggcgcaagccgcgctggaggatatttgtctgcgcagtaacccacgcaccgccacacaggcacagattatcgacctgtacgcggctgccgggtaa

SEQ ID NO: 39768 - protein, 395 aa, Salmonella enterica subsp. enterica serovar Paratyphi A str. ATCC
MQAELQTALFQAFDTLNLQRVKTFSVPPVTLCGLGALGACGQEAQARGVSHLFVMVDSFLHQAGMTAPLARSLAMKGVAMTVWPCPPGEPCITDVCAAVAQLREAACDGVVAFGGGSVLDAAKAVALLVTNPDQTLSAMTERSTLRPRLPLIAVPTTAGTGSETTNVTVIIDAVSGRKQVLAHASLMPDVAILDAAVTEGVPPNVTAMTGIDALTHAIEAYSALNATPFTDSLAIGAIAMIGKSLPKAVGYGHDLAARENMLLASCMAGMAFSSAGLGLCHAMAHQPGAALHIPHGQANAMLLPTVMGFNRMVCRERFSQIGRALTNKKSDDRDAIAAVSELIAEVGQSKRLADAGTKPEHYSAWAQAALEDICLRSNPRTATQAQIIDLYAAAG

SEQ ID NO: 39769 - DNA, 2679 bp, Salmonella enterica subsp. enterica serovar Paratyphi A str. ATCC
  CDS (1)..(2679): transl_table=11
atggctgttactaatgtcgctgaacttaacgcactcgtagagcgtgtaaaaaaagcccagcgtgaatatgccagtttcactcaagaacaggtcgacaaaatcttccgcgccgccgctctggcagccgctgatgcccgcattccgctggccaaaatggccgtcgccgaatcaggtatgggtatcgtggaagacaaagtgattaaaaaccacttcgcttctgaatatatttacaatgcctataaagatgaaaaaacctgcggcgtgctgtcagaagacgacaccttcgggaccatcaccattgctgaacctatcggcattatttgcggtatcgttccaaccactaacccgacctctactgcgatcttcaaatcgctgattagcctgaagacccgtaacgccatcatcttttctccgcatccgcgcgctaaagaagcaactaacaaagcggcagacatcgttctgcaagcggctatcgctgccggcgcaccgaaagatctgattggctggatcgatcaaccttccgtagaactgtctaatgcgctgatgcaccacccggatattaacctgatcctcgccactggcggtccaggcatggttaaagctgcatacagctccggtaaaccggcaatcggcgtaggcgcaggtaacaccccggttgtcattgatgaaaccgctgatatcaaacgcgctgtggcgtctgttctgatgtctaaaaccttcgataacggcgtaatctgtgcttctgaacagtctgttgtcgttgttgattccgtctatgatgccgttcgcgaacgtttcgccagccacggcggctacatgctgcagggccaggagctgaaagcggttcaaaacgttattctgaaaaatggcgctctgaacgccgctatcgtcggtcagccagcctacaaaatcgctgaactggcaggcttctccgtaccagaaaccaccaagattctgatcggtgaagttacggtcgttgacgaaagcgaaccgttcgcacacgaaaaactgtctccgactctggcgatgtaccgtgcgaaagatttcgaagaagcggtagaaaaagcagaaaaactggtcgctatgggcggtatcggtcacacctcctgcctgtacactgaccaggataaccagccagaacgcgttgcttacttcggtcagatgatgaaaaccgcgcgtatcctgatcaacaccccggcctctcagggtggtatcggtgacctgtacaacttcaaactcgcaccttccctgacgttgggttgtggttcctggggtggtaactccatctctgaaaacgttggtccgaaacacctgatcaacaagaaaaccgttgctaagcgagctgaaaacatgttgtggcacaaacttccgaaatctatctacttccgccgtggctctctgcccatcgcgctggatgaagtgattactgatggccacaaacgtgcgctcatcgtgactgaccgcttcctgttcaacaacggctatgcagaccagatcacctctgtgctgaaagcggctggcgttgaaaccgaagtcttcttcgaagttgaagcagacccgacgctttccgttgttcgcaaaggcgctgagctggctaactccttcaaaccggacgtgatcatcgcgctgggcggcggttccccgatggacgccgcgaaaatcatgtgggtcatgtacgaacatccggaaactcacttcgaagaactggcgctgcgctttatggacatccgtaaacgtatctacaagttcccgaaaatgggcgtgaaagcgaaaatgatcgccgtcaccaccacttccggtaccggttctgaagtcacaccgtttgcggttgtgaccgacgatgcaaccggtcagaaatatccgctggctgactatgccctgaccccggatatggcgattgtcgatgccaacctggtgatggatatgccgaagtccctgtgtgcgttcggtggtctggatgcggtaactcacgccctggaagcttacgtttccgtactggcttctgagttctctgacggtcaggctctgcaggctctgaaactgctgaaagaaaacctgccggcgtcttaccacgaagggtctaaaaacccggttgcgcgtgaacgtgttcacagtgcagcgactatcgccggtatcgcgtttgccaacgccttcctcggtgtatgtcactccatggcgcacaaactgggctctcagttccacattccgcacggtctggcgaacgccctgctgatttgtaacgttatccgctacaacgcgaatgacaacccgaccaagcagaccgctttcagccagtacgatcgtccgcaggcacgccgtcgttacgctgaaattgctgaccacctgggcctgagcgcgccgggcgaccgtaccgccgctaagattgaaaaactgctggcatggctggaaagcattaaagctgagctgggcattcctaagtctatccgtgaagcaggcgtgcaggaagctgacttcctggcacacgttgacaaactgtctgaagatgccttcgatgaccagtgcaccggcgctaacccgcgttatccgctgatctccgaactgaaacagattctgctggatacctactacggtcgtgatttcaccgaaggtgaagttgcagcgaagaaagacgtcgttgccgcaccgaaagcagagaaaaaagcgaaaaaatccgcttaa

SEQ ID NO: 39770 - protein, 892 aa, Salmonella enterica subsp. enterica serovar Paratyphi A str. ATCC
MAVTNVAELNALVERVKKAQREYASFTQEQVDKIFRAAALAAADARIPLAKMAVAESGMGIVEDKVIKNHFASEYIYNAYKDEKTCGVLSEDDTFGTITIAEPIGIICGIVPTTNPTSTAIFKSLISLKTRNAIIFSPHPRAKEATNKAADIVLQAAIAAGAPKDLIGWIDQPSVELSNALMHHPDINLILATGGPGMVKAAYSSGKPAIGVGAGNTPVVIDETADIKRAVASVLMSKTFDNGVICASEQSVVVVDSVYDAVRERFASHGGYMLQGQELKAVQNVILKNGALNAAIVGQPAYKIAELAGFSVPETTKILIGEVTVVDESEPFAHEKLSPTLAMYRAKDFEEAVEKAEKLVAMGGIGHTSCLYTDQDNQPERVAYFGQMMKTARILINTPASQGGIGDLYNFKLAPSLTLGCGSWGGNSISENVGPKHLINKKTVAKRAENMLWHKLPKSIYFRRGSLPIALDEVITDGHKRALIVTDRFLFNNGYADQITSVLKAAGVETEVFFEVEADPTLSVVRKGAELANSFKPDVIIALGGGSPMDAAKIMWVMYEHPETHFEELALRFMDIRKRIYKFPKMGVKAKMIAVTTTSGTGSEVTPFAVVTDDATGQKYPLADYALTPDMAIVDANLVMDMPKSLCAFGGLDAVTHALEAYVSVLASEFSDGQALQALKLLKENLPASYHEGSKNPVARERVHSAATIAGIAFANAFLGVCHSMAHKLGSQFHIPHGLANALLICNVIRYNANDNPTKQTAFSQYDRPQARRRYAEIADHLGLSAPGDRTAAKIEKLLAWLESIKAELGIPKSIREAGVQEADFLAHVDKLSEDAFDDQCTGANPRYPLISELKQILLDTYYGRDFTEGEVAAKKDVVAAPKAEKKAKKSA

SEQ ID NO: 39771 - DNA, 1149 bp, Salmonella enterica subsp. enterica serovar Paratyphi A str. ATCC
  CDS (1)..(1149): transl_table=11
atggcgaacagaatgattctgaatgaaacggcatggtttggccggggagcggtggacgcattaaccgatgaggtaacgcgccgcggttatcataaggcgctgattgttaccgataaaacgctggtgcaatgcggtgtggtcgataaagtgacaagcagaatggatgctgcagggctggcgtgggagatctatgctggcgtgatccctaatcctacgatttccgttgtccaggaagggcttaaggtttttacccaaagcggcgcggactatctcatcgccattggcggcggttctccgcaggatacctgtaaagcgatcggtattatcagtaacaatccggaatttgccgatgtgcgcagtctggaagggctatcgccgacccgtaaacccagcgtgccgattatggcgatcccgacaacggcgggaaccgcggcggaagtcactatcaattatgtgattaccgatgaagagaaacggcgcaaattcgtttgtgtcgatccgcatgatattccgcaggcggcatttatcgatgctgatatgatggacggtatgccgcccgcgctgaaagcggcaacgggcgtggatgcgctaacccatgctattgaaggctatattacccgggccgcatgggcgctgacggatgccttacatatcaaagccattgagattattgcgggtgcgctgcgcggtgccgtggcaggagaaaaagaggctggtgaggcgatggcgctggggcaatacgttgccgggatggggttttccaatgtggggctggggctggtgcatgggatggcgcatccgctgggcgcgttttacaacacgccgcacggcgtcgcgaatgctattttgcttccgcatgtgatgcgtttcaatgccgggtctaccaacgagaaattccgtgatatcgcccgggcgatgggggtgaaggtagaaggattgagtcttgaagaggcacgtaatgccgcagtggaagccgtatttgcgctaaatcgcgatgtgggaattccgctgcatttgcgtgatgtcggcgttcgaaaagaggatatcccggcgctggcgcaggcggcgttcgatgatgtctgtacgggcggcaatccgcgtgaagcgagtctggcggacattgtcgaactgtatcatatcgcctggtaa

SEQ ID NO: 39772 - protein, 382 aa, Salmonella enterica subsp. enterica serovar Paratyphi A str. ATCC
MANRMILNETAWFGRGAVDALTDEVTRRGYHKALIVTDKTLVQCGVVDKVTSRMDAAGLAWEIYAGVIPNPTISVVQEGLKVFTQSGADYLIAIGGGSPQDTCKAIGIISNNPEFADVRSLEGLSPTRKPSVPIMAIPTTAGTAAEVTINYVITDEEKRRKFVCVDPHDIPQAAFIDADMMDGMPPALKAATGVDALTHAIEGYITRAAWALTDALHIKAIEIIAGALRGAVAGEKEAGEAMALGQYVAGMGFSNVGLGLVHGMAHPLGAFYNTPHGVANAILLPHVMRFNAGSTNEKFRDIARAMGVKVEGLSLEEARNAAVEAVFALNRDVGIPLHLRDVGVRKEDIPALAQAAFDDVCTGGNPREASLADIVELYHIAW

SEQ ID NO: 39773 - DNA, 1149 bp, Salmonella enterica subsp. enterica serovar Paratyphi A str. ATCC
  CDS (1)..(1149): transl_table=11
atgagctttatgttggcactgccaaaaattagcctgcatggcgctggagcgattgccgatatggtgaacctcgtggcgaataagcaatggggcaaagcgctgatcgttaccgatggtcaactggtaaagctgggcctgctggatagcctgtttagcgcactggatgaacatcaaatgtcttaccacctgtttgatgaggtgttcccaaacccgacagaagagctggtgcagaaaggttttgcggcgtatcagagcgcagaatgtgactacattatcgccttcggcggcggcagcccgatcgataccgcaaaagcggtgaaaattctgaccgccaacccaggtccttctaccgcctactccggcgtcggcaaagtgaaaaacgccggcgtaccgctggtagcgattaatactacggcaggtaccgcggcagagatgaccagcaacgcggtgattatcgactctgcccgtaaggtcaaagaggtgatcatcgacccgaatatcatcccggatattgccgtggatgacgccagcgtcatgctggaaatccccgcttctgtgaccgccgcaaccggcatggatgccctgacccatgcggtggaagcctatgtctccgttggcgcgcatccgcttaccgacgctaacgcgctggaagcgattcgcttaatcaatttgtggctaccgaaagcggttgacgatggccataacctcgaagcccgtgagcaaatggcattcggccagtacctggcgggtatggcgttcaacagcgccggtttggggctggttcacgcgctggcgcaccagccgggcgcaactcacaacctgccgcacggagtctgcaacgctatcctgctgccaattgtcgagaactttaaccgtccgaacgccgtcgcgcgttttgcccgtatcgcacaggcgatgggcgtagagacgcgcggtatgtctgacgaagccgcaagtcaggaagcgattaacgctatccgtacgctgagcaaacgcgtcggcattccagaaggtttcagcaagctgggcgtcacaaaagaagatatcgaaggctggctggataaagccctcgccgacccgtgcgcgccgtgtaacccgcgcaccgccagccgcgatgaagttcgcgggctgtacctggaggcgttatga

SEQ ID NO: 39774 - protein, 382 aa, Salmonella enterica subsp. enterica serovar Paratyphi A str. ATCC
MSFMLALPKISLHGAGAIADMVNLVANKQWGKALIVTDGQLVKLGLLDSLFSALDEHQMSYHLFDEVFPNPTEELVQKGFAAYQSAECDYIIAFGGGSPIDTAKAVKILTANPGPSTAYSGVGKVKNAGVPLVAINTTAGTAAEMTSNAVIIDSARKVKEVIIDPNIIPDIAVDDASVMLEIPASVTAATGMDALTHAVEAYVSVGAHPLTDANALEAIRLINLWLPKAVDDGHNLEAREQMAFGQYLAGMAFNSAGLGLVHALAHQPGATHNLPHGVCNAILLPIVENFNRPNAVARFARIAQAMGVETRGMSDEAASQEAINAIRTLSKRVGIPEGFSKLGVTKEDIEGWLDKALADPCAPCNPRTASRDEVRGLYLEAL

SEQ ID NO: 39775 - DNA, 1149 bp, Idiomarina loihiensis L2TR
  CDS (1)..(1149): transl_table=11
atgagcagtactttttatattccagcggtcaatattattggcgagaacgcccttaaagatgcggccacgcaaatggacaactatggctttaaacaagccttgatagtcaccgaccccggcatgaccaaactgggcgttactgccgaaatcgaagccctgctcaaagagcatggaatagacagcctaatttacgatggcgtacaacccaacccgacagtaacgaacgtgaaagccgggttagatgttctgcagaaacatcaatgcgattgtgttatttcactaggtggaggttcagctcacgactgcgccaaaggtatagccctggttgccactaatggcgggcatattagtgactatgaaggcgttgatgtctcgaaaaagccacaactgccactcattagtattaataccaccgcaggcacagcgtccgaaatgacccgcttttgcatcattaccgatccggaacgccatattaaaatggcaattgtcgaccaaaatgtgacaccaattctgtcggttaacgacccaaggttaatggtcggtatgcctgccagcttgactgcagcaacaggcatggatgcgctgacccatgccgttgaagcctatgtatctaccgacgctacgccgattaccgatgcctgtgccataaaagccatagagattatccgggacaatctgcacgaagcggttcataacggagcgaatatggaagctcgtgagcaaatggcttacgcacagtttctggcgggtatggcgtttaacaatgcgtccctgggttatgtacatgccatggcgcaccaactcggcggattctacgacttgccgcacggcgtctgcaacgcggttttattgcctcatgtgcaacgctacaacagtcaggttgtcgcaccgcgcctgaaagacattggtaaagcactgggcgcagaagtacagggattaacagaaaaagaaggggctgacgctgctattgccgccattgtaaaactatctcaaagcgtcaatattccggctggtttggaagaattaggggcaaaagaagaggactttaatacattggcagacaatgccatgaaagacgcttgtggcctgactaatccaattcaacccagtcacgaagacattgttactatttttaaagcggctttttaa

SEQ ID NO: 39776 - protein, 382 aa, Idiomarina loihiensis L2TR
MSSTFYIPAVNIIGENALKDAATQMDNYGFKQALIVTDPGMTKLGVTAEIEALLKEHGIDSLIYDGVQPNPTVTNVKAGLDVLQKHQCDCVISLGGGSAHDCAKGIALVATNGGHISDYEGVDVSKKPQLPLISINTTAGTASEMTRFCIITDPERHIKMAIVDQNVTPILSVNDPRLMVGMPASLTAATGMDALTHAVEAYVSTDATPITDACAIKAIEIIRDNLHEAVHNGANMEAREQMAYAQFLAGMAFNNASLGYVHAMAHQLGGFYDLPHGVCNAVLLPHVQRYNSQVVAPRLKDIGKALGAEVQGLTEKEGADAAIAAIVKLSQSVNIPAGLEELGAKEEDFNTLADNAMKDACGLTNPIQPSHEDIVTIFKAAF

SEQ ID NO: 39777 - DNA, 1047 bp, Idiomarina loihiensis L2TR
  CDS (1)..(1047): transl_table=11
gtgacggataaaggcgtacttgatgccgggctaatccaacctattgttgccgaacttaaaagtcagggcattacgggtattgttatttactctgagatatcagcggagccagaaacccatgtcgttgaatcgtgccgtgacgttttcattaatgaaagctgtgatgggattattggaattggtggcggcagtgcaatggataccgcaaaagccgttgcggtatatcaaagtgagaagagagctttgaacgaactgtttggcgagaacaattgtgcgcggcgaaccgtgcctttaatttgtttaccgaccaccgcaggaacaggctccgaagtcactaatatatccatcctgtcagacgtagaggcacaactgaaaaaggggattgtcagcgatgaactgctgccggatgtggcgattgttgcaccggaattgacgcagagttgcccgccatctgtaacggcagcaagtggcattgatgcattggtgcacgccgtagaaagttatatttctaattttgcttcagatatcacccgggcgttatcagtaggcgccataaaaatgatcgtcaacgccttgcccgatgcttatcgacgtcctgacgatctcgacgcaagagagcgtatggctaccggtagcttaatggctgggttggcattcggaaatgcaggagttggtgcagtacatgccttggcttatcccctgggcgggcgttatcacttgtcgcatggggttagtaatgcactgatgttcactcacgtcatgcgctggaatctatcatcctgcccaaatgattttctcaatatcgcgctggcgatgggggccgaggcaacgattagcgaagccgacgcaggagacttcgttattgagaaacttgaatccctctgccgggctgtcgaaattccgggcggattaagagagtttggtattgaacgcagtgatctgcgttcaatagctgaagcggcgagtggtgtgactcgtttattgagaaataatcctcgtgaacttagcgtcgatgatatcgaagcaatttatcaggccgcttactaa

SEQ ID NO: 39778 - protein, 348 aa, Idiomarina loihiensis L2TR
MTDKGVLDAGLIQPIVAELKSQGITGIVIYSEISAEPETHVVESCRDVFINESCDGIIGIGGGSAMDTAKAVAVYQSEKRALNELFGENNCARRTVPLICLPTTAGTGSEVTNISILSDVEAQLKKGIVSDELLPDVAIVAPELTQSCPPSVTAASGIDALVHAVESYISNFASDITRALSVGAIKMIVNALPDAYRRPDDLDARERMATGSLMAGLAFGNAGVGAVHALAYPLGGRYHLSHGVSNALMFTHVMRWNLSSCPNDFLNIALAMGAEATISEADAGDFVIEKLESLCRAVEIPGGLREFGIERSDLRSIAEAASGVTRLLRNNPRELSVDDIEAIYQAAY

SEQ ID NO: 39779 - DNA, 1152 bp, Azoarcus sp. EbN1
  CDS (1)..(1152): transl_table=11
atgagcacgacgactttcttcatccccccggtcaacctgatgggcgccggctgcctcgccgacgcgatggccgcgatccgcagttacggctttcgccacgcgctgatcgtcaccgacgccggcctcgcccgtgccggggtcgccgacaaggtcgcggccctcctcgccgagcaggacatccaggcgacggtgttcgacggcgcgaagccgaatccgaccgtcggcaacgtcgaggccggcctcgcgctgctgcgcgacaagcagtgcgactgcgtgatctcgctcggcggcggctcgccgcacgactgcgcgaaaggcatcgcgctcgtcgccaccaacggcgggcggatcggcgactacgaaggggtcgaccgctcggccaagccgcagctgccgctcgtcgcgatcaacacgaccgccggcaccgcgagcgagatgacgcgcttttgcatcatcaccgacgaagcgcgccacatcaaaatggcgatcgtcgaccgcaacgtcacgccgatcctgtcggtcaacgacccgacgctgatggtcgcgaagcccgccgcgctgactgccgcgaccggtatggacgcgctgacgcacgcggtcgaagcctacgtgtcgaccgcggcgacgccaatcaccgacgcgtgcgcactgaaggcggtaacgctgatcgcggcgaacctgcgccgcgcggtcgccgacggcaacgacctcgacgcgcgcgagcagatggcctatgcgcagttcctcgccggcatggcgttcaacaacgcatcgctcggctatgtgcacgcgatggcacatcagctcggcgggttctatgacctgccgcacggcgtgtgcaacgcggtgctgctgccgcacgtcgaggcgttcaacgcgagcttttcggccacgcgccttgcagacgtcgcgcgcgcgatgggcgccgacgtcgatgcgctcgacgacgccgcggcggcagaaggttgtcttgccgcgatccgccgactcgctgccgatgtcggcatcccggccgggctgacgcagctcggcgtcaaagcggaagacatcccgacgctcgccgcaaacgcgctgaatgatgcctgcggcctgacgaacccgcgcccggccacgcaggccgacatcgaggcgatcttccgcggcgcgctgtaa

SEQ ID NO: 39780 - protein, 383 aa, Azoarcus sp. EbN1
MSTTTFFIPPVNLMGAGCLADAMAAIRSYGFRHALIVTDAGLARAGVADKVAALLAEQDIQATVFDGAKPNPTVGNVEAGLALLRDKQCDCVISLGGGSPHDCAKGIALVATNGGRIGDYEGVDRSAKPQLPLVAINTTAGTASEMTRFCIITDEARHIKMAIVDRNVTPILSVNDPTLMVAKPAALTAATGMDALTHAVEAYVSTAATPITDACALKAVTLIAANLRRAVADGNDLDAREQMAYAQFLAGMAFNNASLGYVHAMAHQLGGFYDLPHGVCNAVLLPHVEAFNASFSATRLADVARAMGADVDALDDAAAAEGCLAAIRRLAADVGIPAGLTQLGVKAEDIPTLAANALNDACGLTNPRPATQADIEAIFRGAL

SEQ ID NO: 39781 - DNA, 1146 bp, Silicibacter pomeroyi DSS-3
  CDS (1)..(1146): transl_table=11
atgaaacttgttggcaactggtcctatcccaccgccatccgctttggcgcggggcggatcgccgaaatcgccgaggcctgcaaggccgccggtatctccaaaccgctgctggtcaccgacaaggggctggccgcgatggaaatcaccacccgcacgctcgacctgatggaggccgcgggcctgggccgggcgatgttttccgaggttgatcccaacccgaccgagcgcaatgtcgaggccgggttgaaggtctatcgcgagggcggctatgacggggtgatcgcctttggcggcggctcggggctcgatctgggcaagacgctggccttcatggcaggccagacccgcccgctctgggatttcgaggatatcggcgactggtggacccgcgccgacccggcaggcattcacccgatcgtcgccgtgcccaccaccgccgggaccggatcggaagtgggccgcgcgggcgtgatcaccaattccgacagccatgagaaaaagatcatcttccacccgctgatgctgcccaaggtggtgatctgcgacccggaactgaccgtgggcatgccgaaattcatcaccgccggtaccgggcttgatgcctttgcccattgcgtcgaggcctattgctcgccccattaccacccgatgagccagggcatcgcgctggaaggcatgcgactggtcaaggaatacctgccccgcgcctatgccgatgggtccgaccttgaggcgcgcgcgcatatgatgtcggccgccgccatgggcgccaccgcgttccagaaagggctgggcgccatccatgcgctgtcgcaccccatcggcgcacatcaccacacccaccacggcaccaccaacgcggtctgcatgcccgccgtgctgcaattcaaccgccccgctgtcgagggcgtgctggcacaggccgccgcctatctgggcatcgcgggcgggttcgacgggttcgcggcctatgtcgacgagttgaatacctcgctcggcatcccgaaaaccctgacagacctgggcgtcaaggatcccaacctcgacgtgctggtgcgcgacgcgctgaacgatccctcgaccggcggcaacccggtaacgatgacggcagagaacacccgcccgctgctggaatcgctgttctga

SEQ ID NO: 39782 - protein, 381 aa, Silicibacter pomeroyi DSS-3
MKLVGNWSYPTAIRFGAGRIAEIAEACKAAGISKPLLVTDKGLAAMEITTRTLDLMEAAGLGRAMFSEVDPNPTERNVEAGLKVYREGGYDGVIAFGGGSGLDLGKTLAFMAGQTRPLWDFEDIGDWWTRADPAGIHPIVAVPTTAGTGSEVGRAGVITNSDSHEKKIIFHPLMLPKVVICDPELTVGMPKFITAGTGLDAFAHCVEAYCSPHYHPMSQGIALEGMRLVKEYLPRAYADGSDLEARAHMMSAAAMGATAFQKGLGAIHALSHPIGAHHHTHHGTTNAVCMPAVLQFNRPAVEGVLAQAAAYLGIAGGFDGFAAYVDELNTSLGIPKTLTDLGVKDPNLDVLVRDALNDPSTGGNPVTMTAENTRPLLESLF

SEQ ID NO: 39783 - DNA, 1233 bp, Bacillus clausii KSM-K16
  CDS (1)..(1233): transl_table=11
ttgaaaaataacaagcaggaatttaagaacggcatctataaatttataagaatcaacttccataagaacttccataaggagattgggatgaatatcaataaattcgtaacaccagagattatttttgggagtgacgcgataaggcaagcgggggatgcttgcgtgcggcttggggcgagaaaagtattaattgttagtgataatggtgtagctaatgccggctggctagaaaaagtaatggatctttgcaaagagtctcatttgccctttgccacgtttatcgacgtgacgatagacccgaaagatcgcgaagttgagcaagggtgccgagtgtttgttcaacatgagtgtgacgcgattattgggattggtggaggaagtgtgttagatgtagcgaaagcgattgccatactcgcaacgaacggaggggcgattagtgattatgaagggattgataaaattaaaaaaccccttcccccgatgattatgattatgacaacggcaggatctggctctgaggtgtcgcagttttccatcattgtggattcgactcgaaaaaagaaaatgacgatcatatcgaaaacattggtgcctgatatcgccattattgacccttttacactcgtcacgaaagacagcagcctcactgctacaacggggatggatgtattgacgcatgcggttgaagcctatgtcagtgtggccgctactccgcttacagatgtccaagcgaaaaatgccctcaccttgtgtgctcaatatttgcgcccctctgttgcctcgaaaacaaataaagaagcgaaggaagcgatggcaatggctagtttacaggcagggcttgctttctcaaatgcaatcctaggggcagcacatgcgatctcacatgcaataggagggaagtttcctttgccgcatggagagatcaatgcgattcttttgccctatgtgatggattttaattttatcgcagcacctaaacgattttcagacatagcgacatgcttagggatcgatacaagaggattgaccgatcgtgaagcaggcaatgctgcgatccaatccgttaaagaactatcctctgatattgggattccaaccaagtttaaacaagtcggattaacagaaatgattgatcatataagccaagtggcgttagaagatgcgtgtatgattacgaatccccgtgacatggatattgagcaagtgaaacaagtattaaatcatgttttatag

SEQ ID NO: 39784 - protein, 410 aa, Bacillus clausii KSM-K16
MKNNKQEFKNGIYKFIRINFHKNFHKEIGMNINKFVTPEIIFGSDAIRQAGDACVRLGARKVLIVSDNGVANAGWLEKVMDLCKESHLPFATFIDVTIDPKDREVEQGCRVFVQHECDAIIGIGGGSVLDVAKAIAILATNGGAISDYEGIDKIKKPLPPMIMIMTTAGSGSEVSQFSIIVDSTRKKKMTIISKTLVPDIAIIDPFTLVTKDSSLTATTGMDVLTHAVEAYVSVAATPLTDVQAKNALTLCAQYLRPSVASKTNKEAKEAMAMASLQAGLAFSNAILGAAHAISHAIGGKFPLPHGEINAILLPYVMDFNFIAAPKRFSDIATCLGIDTRGLTDREAGNAAIQSVKELSSDIGIPTKFKQVGLTEMIDHISQVALEDACMITNPRDMDIEQVKQVLNHVL

SEQ ID NO: 39785 - DNA, 1170 bp, Bacillus clausii KSM-K16
  CDS (1)..(1170): transl_table=11
atgaatacacattaccaatttcaaacagcagataaactcattgctggtattggggtgtttaccgaattagtcagtcacttgcaaaaggcagtcccatctgtcgagcgagtccttattgtaacgcaaccttttgtaaagaagctggatttttatcaagtgatgacctcttcccttgaaaaggccggtctttcatacgaggttgttaccgacgtagaacctgaaccgacagaagccaatattgaaaacattaaagagcgtgttcgcgattcgtcatacgacgtgttgattggcttaggaggcggaagtgttcttgactcgaccaaattactgtctgtattgttgtcaaacacatgtacgatccaagacatcttgggaacggatcttgtaaaagagccaggcattccgactgtgctcatcccaaccacgtctggcactgggtcagaagtgacgccaaatgcgattgtgacctttccagacaaagagctgaagattggcatcgtcagtcgccatttgttgcctgtgctcgttgtacttgacccactattaacggtgtcccttcctaaaccaattacagccgccactgggatggacgcattcacccactcgttggagtcgtttatttccaataaagccaatcgatttagcgacatgtttgcgcttgaatcaatcaggctcatcgccgatgggattcagacagcctatcacgatggcagcaatgtggaagcacgtgaaaaaatgctgattggctcgacgtacggcggaatggcattgactgccgctggtacggcagctgtgcatgccatggcttatccccttggaggaaagtttaaggtgacacatggcgtcgccaattcaatgctgctcccacatgtcatggcgtacaacatggacgcgattgtcgaccgcctcgcccaagtagctgacccaatgggcattcaactgaatcagggagcgactagccaacaaaaagcaaaagcagttgttcaaaagataaaagaatggacagccgaattttcgatcccacaagatttaaccgaatttggcgtgagagaagatgatttggaggatctggccatagccgctgtacaggtgaaacgcctgatggacaataatccaaaagaaatgactgtcaacgatgcgattcaaatttacaaaaagctacttgcttaa

SEQ ID NO: 39786 - protein, 389 aa, Bacillus clausii KSM-K16
MNTHYQFQTADKLIAGIGVFTELVSHLQKAVPSVERVLIVTQPFVKKLDFYQVMTSSLEKAGLSYEVVTDVEPEPTEANIENIKERVRDSSYDVLIGLGGGSVLDSTKLLSVLLSNTCTIQDILGTDLVKEPGIPTVLIPTTSGTGSEVTPNAIVTFPDKELKIGIVSRHLLPVLVVLDPLLTVSLPKPITAATGMDAFTHSLESFISNKANRFSDMFALESIRLIADGIQTAYHDGSNVEAREKMLIGSTYGGMALTAAGTAAVHAMAYPLGGKFKVTHGVANSMLLPHVMAYNMDAIVDRLAQVADPMGIQLNQGATSQQKAKAVVQKIKEWTAEFSIPQDLTEFGVREDDLEDLAIAAVQVKRLMDNNPKEMTVNDAIQIYKKLLA

SEQ ID NO: 39787 - DNA, 1185 bp, Bacillus clausii KSM-K16
  CDS (1)..(1185): transl_table=11
atgcaagcaacaacctgtcatttgccagccacgattatttatggggaaaacagttttttgcaagttggagttgaagctgcgaagcttggaagcaaggcgctgatcattagcgatgcagtaatggaaaggctcggaaatgttgaacgggctcaagcattgcttaagaaaagcggaatcccatcgtattcctatttaggtgtagcaactgagccgacagatacgtacgtgtatgaagcgttggagttgtttcgtacaaaaggttgcaatgtcattgtttccattggaggaggaagctgtatagatacagctaaagctgtcgcggtgctagcagccaatggcggatcaatcgatgaatacatgaacgggcgtacgattgcgcgaaaaggggcggttcctttaattgctttgccgacaacagggggcactggttctgaagcaacagacgcgacagtgattacgaacacagacaccaatgtcaaaatgatgattaaacagcaagcctttatgccacggacggctattgttgatccagtgctgacaaaatcgacgcctaaacacattactgcggctactggaattgatgcgcttacccatgcgttggaggcttatattagcaaaaaagcacatccgtttaccgatggattggcgctatcggcaatggagcggattttccactatctattgaccgcctataaagacggcaacgatatgaaggcaaggcatgaaatgttgtatggctcgctgcttgcaggcatggctttctccaattcatccgtttgtcttgtccatgggatgtcaaggccaattggcgctctcttccatgtaccacacggtgtttccaacgctatgcttttaccggttgtgcttgaatatacaaaggaaagttgcaaggagcgccttgcttcaatcggccgtgtcctctttccaggaaaaagcggcgaagggactgaaacattagctaatgccgttgtcgaagaaatcgtagcgctgtgcgcgaaagtcgatattcctacattgccagactggggcgttcaagaagaggcatttatgccaatgctttctaaaatggctgacgatgcgcttgaaagcggaagtccgcaaaacaacccgcgtgtcccgtcaaaacgagagttgattgagctgtatgaggccctctttcaacaaaaaccggccgttttccattaa

SEQ ID NO: 39788 - protein, 394 aa, Bacillus clausii KSM-K16
MQATTCHLPATIIYGENSFLQVGVEAAKLGSKALIISDAVMERLGNVERAQALLKKSGIPSYSYLGVATEPTDTYVYEALELFRTKGCNVIVSIGGGSCIDTAKAVAVLAANGGSIDEYMNGRTIARKGAVPLIALPTTGGTGSEATDATVITNTDTNVKMMIKQQAFMPRTAIVDPVLTKSTPKHITAATGIDALTHALEAYISKKAHPFTDGLALSAMERIFHYLLTAYKDGNDMKARHEMLYGSLLAGMAFSNSSVCLVHGMSRPIGALFHVPHGVSNAMLLPVVLEYTKESCKERLASIGRVLFPGKSGEGTETLANAVVEEIVALCAKVDIPTLPDWGVQEEAFMPMLSKMADDALESGSPQNNPRVPSKRELIELYEALFQQKPAVFH

SEQ ID NO: 39789 - DNA, 1161 bp, Bacillus clausii KSM-K16
  CDS (1)..(1161): transl_table=11
atggtgcacatttttaaaagcgcttacaaaattatgacaggcgtaggagcgatttcccatttaggtagtgaaatagcaaggttaaaaatgaaccacccccttgtcgtaactgataaaatgattaagaaggccgggctgcttgaggaagtaacagtggcacttgctgggcgtagctatggcatatttttagaagtggagccagaaccagcattttcagttgtggaagcgtgcaaacaaacatttgtcgctgggggccatgatggcgtgattgccataggaggcggcagtgcccttgatacagcgaaagcgacggcggcttacgttcgttataacggtgcacttgctgatttgattggcactgatttagttcctacaaaaggggtcccactcattgccattccgaccacagcgggaacaggctccgaggtaacgaatattgcaattctgtccgacaatgacgctaagctaaaaaaagggatggttagtgaccatttgcttcctgatgtggcaatcgtttctccagaattatcgaggacaacccctcctgctgttacagctgcgagcggcatagacgcccttgtccatggaattgaagcgtacttatctgtaaatgcatcgccccttacagatgctttcgctcttcaggcaattgaaaaaattgcccggaatttaccggaagcatacgcaaagccaacaaacctcgcagcacgggaagaaatggccgttgccagcttaatggctggcatggcattcggcaacgccggagttggcgctgtccatgccctcgcttatcctcttgggggaaggtttaacatggcccatggtgtcagtaacgccgtgctgttgccctatgtaatgagggagaacaaagttgcctgcgtcgaccggcttgctgttatcgcagaagtgttaggcgtaaaggagatagggatgggagcgagtgaaggggctgaccaggcgataagcgccatggagcgtctttgtgatcaagtccatattccaagcaaccttagagagtttggcataagacgtgcagaccttacggctatggcagaagatgcaagcaaaatcgatcggctcttaaagaacaacccccgtccgcttgagcgtgataccattttgtcgatttatgaacgagcatgggcagggcggtcagtgtag

SEQ ID NO: 39790 - protein, 386 aa, Bacillus clausii KSM-K16
MVHIFKSAYKIMTGVGAISHLGSEIARLKMNHPLVVTDKMIKKAGLLEEVTVALAGRSYGIFLEVEPEPAFSVVEACKQTFVAGGHDGVIAIGGGSALDTAKATAAYVRYNGALADLIGTDLVPTKGVPLIAIPTTAGTGSEVTNIAILSDNDAKLKKGMVSDHLLPDVAIVSPELSRTTPPAVTAASGIDALVHGIEAYLSVNASPLTDAFALQAIEKIARNLPEAYAKPTNLAAREEMAVASLMAGMAFGNAGVGAVHALAYPLGGRFNMAHGVSNAVLLPYVMRENKVACVDRLAVIAEVLGVKEIGMGASEGADQAISAMERLCDQVHIPSNLREFGIRRADLTAMAEDASKIDRLLKNNPRPLERDTILSIYERAWAGRSV

SEQ ID NO: 39791 - DNA, 1209 bp, Bacillus clausii KSM-K16
  CDS (1)..(1209): transl_table=11
atgagcatgcatatgaaaattgaatcgatgttaaactaccatacttttgaagtgccgaccgctattaagcatggcattggcgctatctcccaccttggcgaagaagtccgcgcccttggttccaaaaaaatattgcttgtgacggaccctggcatttacaacgcaggcattacaagaccagtcgaacaaagcctcgagaaagcgggcattgacgtcgtccttttcaacgaagttgagcccaatccaccaacacgattaatcgccaaaggttccagcgtttatgcggaacatcgctgcgacggcttagtggctgtcggcggcggctcttctatggatacagctaaagcaattggcgtggaagtgacacacgaaggcacagtccttgattacgaagcagcagagggcaagaagccgcttaaacggcgaattccaccattggcaactgttccaaccactgccggaacaggttcggaagtgacgcaatgggcagtcattacggatgaacaacggaaatacaaattcaatacaggcggccctcttattgctgcacacgtaaccattattgatccacaattgcatacttcaatgcctcctcatgtcacagcgatgacaggcattgatgccatagcccatgccattgagtgctacacgatgaaatatgcacaaccggttacagatgctgtcgccttgttggcaattgaatatgcagccacctacatacgccgcgcttttgcagacggggatgacctagaagcacgctatgggatggcgcaagctgcaatgttggcggggctttcctatggaagcgaatcggctggggccgcccacgcaatgagccagtcccttggcggcatcgtccctgtagctcatggacaatgtgtggcagcgatgatgggaccggtcatggaattcaactggaaaggagcgcctgaacgttttgcccgcattgcccaagcattcggcctaaacacaacggctatgacaaccaatgaggcggccaaggcagcagtccgctatatgtatgagttagttgaagagctggaaatcccatcgcttgaagaccaaggtgttgacaaaacacaaattagccgttgggccgaagaagcgttgaaagatccacaaaccatcggaaatcctcgtgacttgacgcttgctgattatgaatggatttacaaacgctgctttaacctcgtaccaagcaccctttaa

SEQ ID NO: 39792 - protein, 402 aa, Bacillus clausii KSM-K16
MSMHMKIESMLNYHTFEVPTAIKHGIGAISHLGEEVRALGSKKILLVTDPGIYNAGITRPVEQSLEKAGIDVVLFNEVEPNPPTRLIAKGSSVYAEHRCDGLVAVGGGSSMDTAKAIGVEVTHEGTVLDYEAAEGKKPLKRRIPPLATVPTTAGTGSEVTQWAVITDEQRKYKFNTGGPLIAAHVTIIDPQLHTSMPPHVTAMTGIDAIAHAIECYTMKYAQPVTDAVALLAIEYAATYIRRAFADGDDLEARYGMAQAAMLAGLSYGSESAGAAHAMSQSLGGIVPVAHGQCVAAMMGPVMEFNWKGAPERFARIAQAFGLNTTAMTTNEAAKAAVRYMYELVEELEIPSLEDQGVDKTQISRWAEEALKDPQTIGNPRDLTLADYEWIYKRCFNLVPSTL

SEQ ID NO: 39793 - DNA, 1137 bp, Thermococcus kodakarensis KOD1
  CDS (1)..(1137): transl_table=11
gtgttctggctcaagacgaggataagtgagggggaggactcactagagagcctcaaggacgaggccaaggatcacgaacgggttctcatactggcatctggttctatgaagaggcacggctttctaagcgaggccgaggactacgttagggaagccggagcagaggttatgagtatatcaggacttccggcggagccgagcgttgaggtcattgaggagttcctgccgaaggttagggagtttgggcccgatctcctcatagccatgggcggcggcagcgttatcgacacgaccaaagccctcaaggtcttctacgatgcccccgagctcgtctttgaggagatagccttcatcaaccgtttctcaaggccgaagcccgttccaaaactaaaaactcccctcatcgcgattccctcaacgagcggagctggaagcgaggtttccgcggccagtgtcctgaagaagaacgggataaagtacaacatcgtaacgccggagatagcacctgaggtagctattctcgacccgaggctcccgaggactatgccaagggaagttgcgaggaattctggcctggatgtcctcgtccacggtatagaggcttacacaactaaggtcgctgggcccttcagcgatgcgatggcgataagggcgataaagaccgtcttcgagtggcttccgaagtcggttgaaggtgaccccgaggcgagggcaagaatgcactacgcggcaacgatggcagggatagcctttctcaatgccaggcttggtttggcccacgcgatgagccacaaggcggcatgggtaggtccccatggcttactcaacgcgatattcataccctacgtgatggagttcaacgccgagaggagtgagtatgcgaggaagcgctatgctgagatagcgcgcgaacttgggttgaagagtgctgaagagctgataaaagccgtcagagagctcaacgagcgccttggagttccaaagctaagcgagcttgttgatgaagagacttttgttgaaagggttgaggagatggctgaaaaggcctaccgcgacgggctgatagcgttcaaccccgttgaaccaaagccagaggagataagagagctttatctgaaggctttgaacgcgttatag

SEQ ID NO: 39794 - protein, 378 aa, Thermococcus kodakarensis KOD1
MFWLKTRISEGEDSLESLKDEAKDHERVLILASGSMKRHGFLSEAEDYVREAGAEVMSISGLPAEPSVEVIEEFLPKVREFGPDLLIAMGGGSVIDTTKALKVFYDAPELVFEEIAFINRFSRPKPVPKLKTPLIAIPSTSGAGSEVSAASVLKKNGIKYNIVTPEIAPEVAILDPRLPRTMPREVARNSGLDVLVHGIEAYTTKVAGPFSDAMAIRAIKTVFEWLPKSVEGDPEARARMHYAATMAGIAFLNARLGLAHAMSHKAAWVGPHGLLNAIFIPYVMEFNAERSEYARKRYAEIARELGLKSAEELIKAVRELNERLGVPKLSELVDEETFVERVEEMAEKAYRDGLIAFNPVEPKPEEIRELYLKALNAL

SEQ ID NO: 39795 - DNA, 2610 bp, Staphylococcus aureus subsp. aureus COL
  CDS (1)..(2610): transl_table=11
atgttaactatacctgaaaaagaaaatcgtggatcgaaagaacaagaagtggcaattatgattgatgctctagctgacaaagggaaaaaagcattagaagcattatctaaaaagtcacaagaagaaattgatcatattgttcatcaaatgagcttagcagctgttgatcaacatatggtgctagcaaaattagcacatgaagaaactggaagaggtatatacgaagataaagcgattaaaaatttatacgcttctgaatatatatggaattcaataaaagacaataagacagtagggattattggtgaagataaagaaaaaggattaacgtatgtagcggaaccaattggtgttatttgtggtgttacgccaacaacaaatcctacgtcgacaactatttttaaagcgatgattgcaattaagacaggaaatccaatcatttttgcattccatccaagtgcacaagaatcgtcgaagcgtgcagcagaagttgtattagaagcggcaatgaaggcaggtgcacctaaagatattattcagtggattgaagtgccttctatcgaagcaacaaaacaattaatgaatcacaaaggtattgcattagttctagcaacaggtggttcgggcatggttaagtctgcatattcaactggcaaaccggcattaggtgtgggaccaggtaacgtgccgtcttacattgaaaaaacagcacacattaaacgtgcagtaaatgatatcattggttcaaaaacatttgataatggtatgatttgtgcttctgaacaagttgtagtcattgataaagaaatttataaagatgttactaatgaatttaaagcacatcaagcatactttgttaaaaaagatgaattacaacgcttagaaaatgcaattatgaatgaacaaaaaacaggtattaagcctgatattgtcggtaaatctgcagttgaaatagctgaattagcaggtatacctgtccccgaaaatacaaaacttatcatagccgaaattagcggtgtaggttcagactatccgttatctcgtgaaaaattatctccagtattagccttagtaaaagcccaatctacaaaacaagcatttcaaatttgtgaagacacactacattttggtggattaggacacacagccgttatccatacagaagatgaaacattacaaaaagattttggactaagaatgaaagcttgtcgtgtacttgtaaatacaccatcagcggttggaggtattggtgatatgtataacgaattgattccgtctttaacattaggttgtggttcctacggtagaaactcaatttcacataatgttagtgcgacagatttattaaacattaaaacgattgctaaacgacgtaataatactcaaattttcaaggtgcctgctcaaatttattttgaagaaaatgcaatcatgagtctaacaacaatggacaagattgaaaaagtgatgattgtctgtgaccctggtatggtagaattcggttatacaaaaacagttgagaatgtattaagacaaaaaacggaacagcctcaaattaaaatatttagcgaagtcgaaccgaacccatcaactaatacagtatataaaggtctggaaatgatggttgatttccaaccggatacaatcattgcacttggtggtggttcagcgatggatgctgcaaaagcaatgtggatgttctttgaacaccctgagacatcattcttcggtgctaaacaaaagttcctagacatcggtaaacgtacttataaaataggcatgcctgaaaatgcgacgttcatttgtatccctacgacatcaggtacaggttcagaagtaacaccatttgcagttatcacagatagtgaaacaaatgtaaaatatccgttggctgattttgctttaacacctgacgttgcaattattgaccctcaatttgtgatgagtgtgccaaaaagcgttacagcagatacaggaatggatgtactaacgcatgcaatggaatcatatgtatctgtaatggcttcagactacacaagaggtttgagtctacaagcgattaaattgacgttcgaatatttaaaatcatctgttgaaaagggtgataaagtttcaagagagaaaatgcataacgcatcaactttggctggtatggcatttgcaaatgcattcttaggcattgcacactcaattgcgcataaaattggtggcgaatatggtattccgcatggtagagcgaatgcgatattactaccgcatattatccgttataatgccaaagacccgcaaaaacatgcattattccctaaatatgagttcttcagagcagatacagattatgcagatattgccaaattcttaggattaaaaggtaatacgacagaagcactcgtagaatcattagctaaagctgtctacgaattaggtcaatcagtcggaattgaaatgaatttgaaatcacaaggtgtgtctgaagaagaattaaatgagtcaattgatagaatggcagagctcgcatttgaagatcaatgtacaactgctaatcctaaagaagcactaatcagtgaaatcaaagatatcattcaaacatcatatgattataagcaataa

SEQ ID NO: 39796 - protein, 869 aa, Staphylococcus aureus subsp. aureus COL
MLTIPEKENRGSKEQEVAIMIDALADKGKKALEALSKKSQEEIDHIVHQMSLAAVDQHMVLAKLAHEETGRGIYEDKAIKNLYASEYIWNSIKDNKTVGIIGEDKEKGLTYVAEPIGVICGVTPTTNPTSTTIFKAMIAIKTGNPIIFAFHPSAQESSKRAAEVVLEAAMKAGAPKDIIQWIEVPSIEATKQLMNHKGIALVLATGGSGMVKSAYSTGKPALGVGPGNVPSYIEKTAHIKRAVNDIIGSKTFDNGMICASEQVVVIDKEIYKDVTNEFKAHQAYFVKKDELQRLENAIMNEQKTGIKPDIVGKSAVEIAELAGIPVPENTKLIIAEISGVGSDYPLSREKLSPVLALVKAQSTKQAFQICEDTLHFGGLGHTAVIHTEDETLQKDFGLRMKACRVLVNTPSAVGGIGDMYNELIPSLTLGCGSYGRNSISHNVSATDLLNIKTIAKRRNNTQIFKVPAQIYFEENAIMSLTTMDKIEKVMIVCDPGMVEFGYTKTVENVLRQKTEQPQIKIFSEVEPNPSTNTVYKGLEMMVDFQPDTIIALGGGSAMDAAKAMWMFFEHPETSFFGAKQKFLDIGKRTYKIGMPENATFICIPTTSGTGSEVTPFAVITDSETNVKYPLADFALTPDVAIIDPQFVMSVPKSVTADTGMDVLTHAMESYVSVMASDYTRGLSLQAIKLTFEYLKSSVEKGDKVSREKMHNASTLAGMAFANAFLGIAHSIAHKIGGEYGIPHGRANAILLPHIIRYNAKDPQKHALFPKYEFFRADTDYADIAKFLGLKGNTTEALVESLAKAVYELGQSVGIEMNLKSQGVSEEELNESIDRMAELAFEDQCTTANPKEALISEIKDIIQTSYDYKQ

SEQ ID NO: 39797 - DNA, 2610 bp, Staphylococcus epidermidis RP62A
  CDS (1)..(2610): transl_table=11
atgttatctgtaactaaaaaaaatacatatgaatcaaacaaagatgaagtcacacaaatgattgattcattagcagaaaaaggacaagaagctctaaaagaactatctaaaaaatcacaacatgagattaatgacattgtacatcagatgagcatggctgctgttgatcagcatatgcatttagctaaactagcttacgacgaaacaggtagaggtatttatgaagacaaagctatcaaaaatttatatgcctcagagtacatatggaattcaatcaaagacaataaaacagtaggtatcataggtgaagataaacaaaaaggattaacgtatgtagctgaacctataggcgtgatttgtggagtgacaccaacgaccaaccctacatctacaactattttcaaagcaatgattgctattaaaacaggtaatccaattattttcgcatttcatccaagtgcacaacaatcatcaaaatatgctgctaaagtcattttagaagctgcaacaaaagcaggtgctcctaaagattgtattcaatggatagaagtgccatcaattgaggcaactaaacaattaatgaatcataaagatattgctttagttctagcgactggaggctctggaatggtaaagtccgcatattcgacaggtaaacctgcattaggagtcggtccaggtaatgttcctacttatattgaaaaaactgctcatatcaaacgtgctgttaatgatatcattggttctaaaacttttgataatggtatgatttgtgcttctgaacaagtcatggttgttgataaagaagtatacactgacgtcgttaaagaattcaaattacaccaaacatattttgttaataaaaatgaactacaacaattagaagatgccatcatgaatgaagataaaactgcagttaaacctgatatagttggtaaatctgctgtagatatagcgaaattgtcaggaattagtgttccagaaaaaacaaaattattagtcgcagaaattgatggaattggaaaagattatcctttatcacgtgaaaaattatcacctgtactcgcaatggtaactgcaaaatcaacaggacatgcactacaaatttgtgaagacatattaaaatttggtggtttaggtcacactgctgtaattcacaccgaggatagtcaattacaacaaaaattcggtctaaaaatgaaagcttgccgtgtattggtaaatacaccttctgctgtcggaggaattggaaatatgtataatgaactcattccttcactcacgttaggttgtggttcatatggtagaaattctatttctcataatgtaagcgcagtagacttattaaatattaaaacaatagcaaaacgtcgtaataatatgcaatggtttaaactcccacctaaagtttattttgaagaaaattcagttatgtatttgacagagatggataatgttgaacgtgtaatgatagtttgtgatccaggaatggttaatattggttatactgatatagttgaacaagtgctgagacgccgagaaaaccaaccacaaatcaaagtgtttaacgaagttgaacctaatccatcaactcatacagtctataaggggttagaaatgtttataaatttccaacctaatactattattgcactcggtggcggttcggcaatggatgcagccaaagcaatatggatgttctttgagcatccagaaacttcattttttggggcaaaacaaaagttcttagatattcgtaaacgtacttataaaattaccaaacctaaaaacgcaaaatttatatgtataccaacgacatcaggaactggttctgaagtgacaccttttgcagtaattactgatagcgagacacacgttaagtatccactagcagattatgcgttaactcccgatattgctatcgtcgatccacaattcgtattaagtgtacctaaagatgttgccgcagatacaggaatggatgttttgacacatgccattgaatcttacgtctctgtcatggcttcagattatacaagaggcttaagcttacaagcaataaagttaacttttgattatctaaaatcatcagttcaagaaaatgacaaacactcacgagaaaaaatgcataatgcttcaacaatggccggtatggcatttgccaatgcttttttaggaatttctcattctatcgcacataaaattggtggtgaatatggtattccccacggcagaacaaatgctattttattaccacatgtcattcgctataatgccaaagatccacaaaaacatgcactgtttcctaaatatgatttctttagagcagatactgactatgctgacattgcaaaatttttaggactcaaaggtaatacaactgaagaattagtggatgctctagctaatgcggtgtatgatttaggatgttcagttggtattgatatgaatttaaaatcacaaggcgtaactgaagagcttcttcactctactatagacagaatggctgaattagcatttgaagatcaatgtacaactgctaatccaaaagaaccgctaattagtgaacttaaaggcattatcgaaacagcatatgattatgaaagataa

SEQ ID NO: 39798 - protein, 869 aa, Staphylococcus epidermidis RP62A
MLSVTKKNTYESNKDEVTQMIDSLAEKGQEALKELSKKSQHEINDIVHQMSMAAVDQHMHLAKLAYDETGRGIYEDKAIKNLYASEYIWNSIKDNKTVGIIGEDKQKGLTYVAEPIGVICGVTPTTNPTSTTIFKAMIAIKTGNPIIFAFHPSAQQSSKYAAKVILEAATKAGAPKDCIQWIEVPSIEATKQLMNHKDIALVLATGGSGMVKSAYSTGKPALGVGPGNVPTYIEKTAHIKRAVNDIIGSKTFDNGMICASEQVMVVDKEVYTDVVKEFKLHQTYFVNKNELQQLEDAIMNEDKTAVKPDIVGKSAVDIAKLSGISVPEKTKLLVAEIDGIGKDYPLSREKLSPVLAMVTAKSTGHALQICEDILKFGGLGHTAVIHTEDSQLQQKFGLKMKACRVLVNTPSAVGGIGNMYNELIPSLTLGCGSYGRNSISHNVSAVDLLNIKTIAKRRNNMQWFKLPPKVYFEENSVMYLTEMDNVERVMIVCDPGMVNIGYTDIVEQVLRRRENQPQIKVFNEVEPNPSTHTVYKGLEMFINFQPNTIIALGGGSAMDAAKAIWMFFEHPETSFFGAKQKFLDIRKRTYKITKPKNAKFICIPTTSGTGSEVTPFAVITDSETHVKYPLADYALTPDIAIVDPQFVLSVPKDVAADTGMDVLTHAIESYVSVMASDYTRGLSLQAIKLTFDYLKSSVQENDKHSREKMHNASTMAGMAFANAFLGISHSIAHKIGGEYGIPHGRTNAILLPHVIRYNAKDPQKHALFPKYDFFRADTDYADIAKFLGLKGNTTEELVDALANAVYDLGCSVGIDMNLKSQGVTEELLHSTIDRMAELAFEDQCTTANPKEPLISELKGIIETAYDYER

SEQ ID NO: 39799 - DNA, 2631 bp, Lactobacillus acidophilus NCFM
  CDS (1)..(2631): transl_table=11
atggctaaggcacaacaaaaagaaactcctactgaggaagaaaagaaaaagcaaatctacgacatggtagataatttagtaaaaagatcacatgttgcattagatgaaatggctaacttcacacaagaacaagttgataagatctgtgaagcagttgctactgcaggtgaacaaaacgcttacccactagctaaaatggctgttgaagaaactaagcgtggtgtagtagaagataagactactaaaaacatgtacgctagtgaaaatatttggaacagtttacgccacgaaaaaactgttggtgtaattgaagaagataaggaactaggattaactaagattgctgaacctaagggtgttattgccggtgttactccagtaactaacccaacttcaactgttattttcaaagcaatgcttgctctaaagacgagaaatactattatttttggtttccacccacaagctcaaaaatgttgtgtagaaactggtaaaattatccaagcggctgctgttgctgcaggtgcacctaaagatgcaattttatggattgaagagccaagtttggatgcaaccactgatttaatgaataatccaggtgttcaaactattttggccactggtggtccaggtatggttaaggctgcatattcatcaggtaaaccagctatcggtgttggtcctggtaatggtccttcatacattgaaaaatcagctaatatcggtcgtgctgtttatgatattgttttatcaaagaacttcgataacggtatggtttgtgcttctgaaaactcagtcgttgtagatgacgcaatttatgacaaggctgtagaagaatttaagaagtggggttgttacttcttaaataaagaagaaattaagaaatttgaagaacactttattgatccaagacgtggtactgttgcaggtcctgtagctggtaaatcagcttatgaaattgctaaactttgtggtgttgatgtaccaaagactactaaagtaattgttgctgaatacaaaggtgttggtagaaagttcccactttcagctgaaaaactttctcctgtctttactttatatcgcgctaagaatcatgacgatgcatttaagatttgttctgaacttcttgattatggtggtcgtggtcataccgcgggaattcactcaagcgatcaaaatataattgatgaatttgcaatgaagatggatgcttgtcgtattctagttaattcaccagctgcacttggtggtattggtgatctttacaacaatatgttgccttcacttacattaggtacaggttcatacggtgctaacacattttcacacaatattggtgccagagatttacttaatattaaaacggttgcgaaacgtcgcgacaatatgcaatgggtaaaagttccatcaaagacttactttgaacataatgctgctaattatttgcgtcacatgccaaatgttaaccgtttcttcattgttactgatgaaggcgtagctgaccaaggctttgctgacgaaatcactgatattatttctaagcgtcgtggtcaaaaagaatatgaagtatttaaggctgtaacgcttgatcctgatactgatgtaattaaagacggtgttcacagaatgaacatctttaagcctgacgtaattattgctattggtggtggctcagtaatggatgctgctaaagtaatgcgcttattctacgaaaatccagaaatgagctttgaagaagcttaccaaaagtttttggatatcagaaaaagagtagtccgcttccctaagattaatggtgttcaacttgtatgtattccaacaacttctggtactggttcagaagtttccccaattgcagttattagcgatactaaaacaggtatgaaacacactctttgtgattatgctttaactccagatgtttcaattgttgatgatcaatttgttcaaaatatgcctaaacgcttaattgcttggtcaggttttgaagcattaggtcatgctattgaaagctatgtttcaactatggccactgatttcactcgtggttggtcacttgaagctattaaagcgatctttgcaaacttgaagaagtcatacgatggtgatcttgatgcaagaaagcaaatgcatgatgctgcaactattgcaggtatggcatattcaaatgcattccttggtcttgaacactcaattgctcatactgttggctcaacctttgatattccaagcggagtaagtgatgcgattgctttaccgcaagttattcgctttaatgccaaacgtcctgaaaagctcgctatgtggcctcactactcagtatatcgtgctgaaagtgactatgctgatattgcaagagctatcggtttgactggttcaagtgatgctgaattagttgaaaaactggttcaaaagattattgaattggctcattctgttggtattaagatggcttataaggattatggcgttgacaagactgaatttgataagaaagttgatcaaatggcagttgaagcttatggtgatcaaaatactgtaactaatccatcagcaccacttattacacaaattgttgtcttaatgaaagattgctacgaaggcaaaggtatttcagacaatgataaataa

SEQ ID NO: 39800 - protein, 876 aa, Lactobacillus acidophilus NCFM
MAKAQQKETPTEEEKKKQIYDMVDNLVKRSHVALDEMANFTQEQVDKICEAVATAGEQNAYPLAKMAVEETKRGVVEDKTTKNMYASENIWNSLRHEKTVGVIEEDKELGLTKIAEPKGVIAGVTPVTNPTSTVIFKAMLALKTRNTIIFGFHPQAQKCCVETGKIIQAAAVAAGAPKDAILWIEEPSLDATTDLMNNPGVQTILATGGPGMVKAAYSSGKPAIGVGPGNGPSYIEKSANIGRAVYDIVLSKNFDNGMVCASENSVVVDDAIYDKAVEEFKKWGCYFLNKEEIKKFEEHFIDPRRGTVAGPVAGKSAYEIAKLCGVDVPKTTKVIVAEYKGVGRKFPLSAEKLSPVFTLYRAKNHDDAFKICSELLDYGGRGHTAGIHSSDQNIIDEFAMKMDACRILVNSPAALGGIGDLYNNMLPSLTLGTGSYGANTFSHNIGARDLLNIKTVAKRRDNMQWVKVPSKTYFEHNAANYLRHMPNVNRFFIVTDEGVADQGFADEITDIISKRRGQKEYEVFKAVTLDPDTDVIKDGVHRMNIFKPDVIIAIGGGSVMDAAKVMRLFYENPEMSFEEAYQKFLDIRKRVVRFPKINGVQLVCIPTTSGTGSEVSPIAVISDTKTGMKHTLCDYALTPDVSIVDDQFVQNMPKRLIAWSGFEALGHAIESYVSTMATDFTRGWSLEAIKAIFANLKKSYDGDLDARKQMHDAATIAGMAYSNAFLGLEHSIAHTVGSTFDIPSGVSDAIALPQVIRFNAKRPEKLAMWPHYSVYRAESDYADIARAIGLTGSSDAELVEKLVQKIIELAHSVGIKMAYKDYGVDKTEFDKKVDQMAVEAYGDQNTVTNPSAPLITQIVVLMKDCYEGKGISDNDK

SEQ ID NO: 39801 - DNA, 2502 bp, Vibrio fischeri ES114
  CDS (1)..(2502): transl_table=11
atgggtatcgttgaagataaggttatcaaaaaccacttcgcatcagagttcatctacaacaaatataaagatgaaaaaacatgtggcattcttgaagaagacgataacctaggaacaatgactatcgcagaacctgtaggtattatctgtggtatcgttccaacaactaacccaacatctactgcaatcttcaaatctctaatctctctaaaaactcgtaacggtatcattttctcgccacacccacgtgcgaaaaactctactaatgatgcagcgaaacttgttttagacgcagcagttgcagctggtgctccaaaagacatcatcggttggattgatcaaccatctgtagaactttctaatgcactaatgaagcacgacggtatcgctcttatccttgctactggtggtccaggcatggttaaagcagcatactcttcaggtaaacctgcaatcggtgttggtgctggtaacgttcctgttgttatcgatgacacagctgatgttaaacgtgcagtcgcttctgttcttatgtctaaaacattcgataacggcgtagtttgtgcttctgagcaagctgtaatcgtaatggatgaagtatacgacgaagttaaagagcgttttgcttctcacaaaggttacgtactatctaaagctgaagcagataaagttcgtaaagttctacttatcgacggtaacctaaacgcaaacatcgtaggtcaacctgcaacagctatcgctgaaatggctggcgttaaagttccagctgatactaagatccttgttggtgaaggtatcggtgaagtatcttacgatgacgaattcgctcatgagaaactatctccaacactaggtatgttccgtgcgtcttctttcgagaacgcggtagaccaagctgttaaaatggtagaaattggcggtatcggccacacatctggtctgtacactaaccaagatgttaacgctgaccgtatccgttactttggtgacaaactaaaaacagcacgtattcttgtaaacatcccaactactcacggtggtatcggtgacctttacaactttaacgttgcaccttctctaactcttggttgtggttcatggggtggtaactctatctctgagaacgtgggtcctaagcaccttatcaacaagaaaactgtagcgaagcgagctgaaaatatgttatggcacaaactacctaagtctatctacttccgtcgtggcagccttccaatcgcaatgagcgacctagaaggtaagaaacgtgcattccttgtaactgaccgtttcctattcaacaacggttacgctgatgacgtagttcaactacttaaagctcaaggtatcgaagttcaaacattctttgatgtagaagcggatccaacactatctgttgttgagaaaggcgctgaagcaatgaagagcttccaacctgacgtaatccttgctctaggtggtggttcaccaatggatgctgctaagattatgtgggtaatgtacgagcacccagaaactcatttcgcagaactagcaatgcgctttatggatatccgtaaacgtatctacaagttccctaaaatgggtaaaaaagctgagcttgtatgtatcactacaacttcaggtactggttcagaagttactccattcgctgttgttacagacgacaagactggtgctaaatacccactagctgattacgaaattacgccaaacatggcaatcgttgatgctaacctagtaatgaacatgcctaagtctctaaccgcatttggtggttacgatgcagtaactcacgcattagaagcttacgtatctgttcttgctaatgaatactctgacggtcaagcgcttcaagctcttaagatgcttaaagaatacttaccatcaagctacaaaaatggtgcgaacgacccaatcgctcgtgagaaagtacacaatgctgcaactatcgctggtatcgcgtttgctaacgcattcctaggtgtgtgtcactcaatggctcacaaaatcggtgctgagttccacttaccacacggtttagctaacgcattacttatctctaacgttgtacgttacaatgcgaacgataacccaactaaacaaacagcattctctcagtacgaccgtccacaagcacgtcgtcgttacgcagaagttgctgaccacctaggcctaagccaagctggtgaccgtactgctcagaagattgagcgtctactaacttggttagaagagcttaagaaagatttagatattccactatctatcaaagatgcaggtgttaacgaagcagacttcatcgctaaactagatgaactatctgttgaagcgttcgatgaccaatgtactggtgcgaacccacgttaccctctaatcacagagctaaaagaagtactaacaacttcttactacggtaaaccttttgttgaaggtgaaacgtttgaaggcacaacagtaattaaaaaaactgaagagccaaaagcgaaaaaagcaaagaaataa

SEQ ID NO: 39802 - protein, 833 aa, Vibrio fischeri ES114
MGIVEDKVIKNHFASEFIYNKYKDEKTCGILEEDDNLGTMTIAEPVGIICGIVPTTNPTSTAIFKSLISLKTRNGIIFSPHPRAKNSTNDAAKLVLDAAVAAGAPKDIIGWIDQPSVELSNALMKHDGIALILATGGPGMVKAAYSSGKPAIGVGAGNVPVVIDDTADVKRAVASVLMSKTFDNGVVCASEQAVIVMDEVYDEVKERFASHKGYVLSKAEADKVRKVLLIDGNLNANIVGQPATAIAEMAGVKVPADTKILVGEGIGEVSYDDEFAHEKLSPTLGMFRASSFENAVDQAVKMVEIGGIGHTSGLYTNQDVNADRIRYFGDKLKTARILVNIPTTHGGIGDLYNFNVAPSLTLGCGSWGGNSISENVGPKHLINKKTVAKRAENMLWHKLPKSIYFRRGSLPIAMSDLEGKKRAFLVTDRFLFNNGYADDVVQLLKAQGIEVQTFFDVEADPTLSVVEKGAEAMKSFQPDVILALGGGSPMDAAKIMWVMYEHPETHFAELAMRFMDIRKRIYKFPKMGKKAELVCITTTSGTGSEVTPFAVVTDDKTGAKYPLADYEITPNMAIVDANLVMNMPKSLTAFGGYDAVTHALEAYVSVLANEYSDGQALQALKMLKEYLPSSYKNGANDPIAREKVHNAATIAGIAFANAFLGVCHSMAHKIGAEFHLPHGLANALLISNVVRYNANDNPTKQTAFSQYDRPQARRRYAEVADHLGLSQAGDRTAQKIERLLTWLEELKKDLDIPLSIKDAGVNEADFIAKLDELSVEAFDDQCTGANPRYPLITELKEVLTTSYYGKPFVEGETFEGTTVIKKTEEPKAKKAKK

SEQ ID NO: 39803 - DNA, 1146 bp, Vibrio fischeri ES114
  CDS (1)..(1146): transl_table=11
atgagtgcattttttatccctacagtaaacttaatgggtgcaggttgtcttacagaagcgatggacagcattaaatcacaaggttacaaaaagggtcttatcgttactgataacgtactagttgcaattggtatggttaaacaagtatcagatttattagcagagcgcggtgttgaagttgctgtgtttgatggtacgcaaccaaacccaacaatcggtaacgtaaatgcaggtttaaaaattcttaaagataatgagtgtgacttcgttatctctttaggtggtggttctcctcacgattgtgctaaaggtattgctttagttgctgcaaatggtggtgagattgctgattatgaaggtgttgatcagtcagctaagccacaattgcctctaattgcaattaatacaacggctggtacggcatctgaaatgacgcgtttctgtatcattactgatgaagctcgtcacattaagatggcgattgtagataagcacacgacaccattgatgtctgtaaatgatcctgaattaatgcttgctaaacctgcatcattaacagcagcaacaggtatggatgcgttaacgcacgctattgaagcatacgtatcaattgcagcaacaccagtaactgatgctgtagcaattaaagcaatggaacttatccaagcgcatttacgtacagcggttaacgacggtcaaaacctagaagctcgtgagcaaatggcttatgcacaattcatggcgggcatggcatttaacaatgcgtctttaggttatgttcacgcaatggcacaccaactaggtggtttctacgaccttccacacggcgtatgtaatgcgattcttcttcctcacgtacaaagctacaatgctaaagtatgtccagaacgtctaaaagacgttgcaaaagcaatgggcgtaaacgttgaaggcatgacaaatgaagaaggcgctcaagctgcattagaagcgattaaacaattatcacaagatgttggtattccttctggtctaacagagcttaacgctaaagaagaagattttgatacgcttgctgaaaatgcattaaaagatgcatgtggttttactaaccctaaacaagcgacgcacgaagaaatcgtaagtatcttcaaagcagcaatgtaa

SEQ ID NO: 39804 - protein, 381 aa, Vibrio fischeri ES114
MSAFFIPTVNLMGAGCLTEAMDSIKSQGYKKGLIVTDNVLVAIGMVKQVSDLLAERGVEVAVFDGTQPNPTIGNVNAGLKILKDNECDFVISLGGGSPHDCAKGIALVAANGGEIADYEGVDQSAKPQLPLIAINTTAGTASEMTRFCIITDEARHIKMAIVDKHTTPLMSVNDPELMLAKPASLTAATGMDALTHAIEAYVSIAATPVTDAVAIKAMELIQAHLRTAVNDGQNLEAREQMAYAQFMAGMAFNNASLGYVHAMAHQLGGFYDLPHGVCNAILLPHVQSYNAKVCPERLKDVAKAMGVNVEGMTNEEGAQAALEAIKQLSQDVGIPSGLTELNAKEEDFDTLAENALKDACGFTNPKQATHEEIVSIFKAAM

SEQ ID NO: 39805 - DNA, 2679 bp, Salmonella enterica subsp. enterica serovar Choleraesuis str
  CDS (1)..(2679): transl_table=11
atggctgttactaatgtcgctgaacttaacgcactcgtagagcgtgtaaaaaaagcccagcgtgaatatgccagtttcactcaagaacaggtcgacaaaatcttccgcgccgccgctctggcagccgctgacgcccgcattccgctggccaaaatggccgtcgccgaatctggtatgggtatcgtggaagacaaagtgattaaaaaccacttcgcttctgaatatatttacaatgcctataaagatgaaaaaacctgcggcgtgctgtctgaagacgacaccttcgggaccatcaccattgctgaacctatcggcattatttgcggtatcgttccaactactaacccgacctctaccgcgatcttcaaatcgctgattagcctgaagacccgtaacgccatcatcttttctccgcatccgcgcgctaaagaagcaaccaacaaagcggcagacatcgttctgcaagcggctatcgctgccggcgcgccgaaagatctgattggctggatcgatcaaccttccgtagaactgtctaatgcgctgatgcgccacccggatattaacctgatcctcgccactggcggtccaggcatggttaaagctgcatacagctccggtaaaccggctatcggcgtaggcgcaggcaacaccccggttgtcattgatgaaaccgctgatatcaaacgcgctgtggcgtctgttctgatgtctaaaaccttcgataacggcgtaatctgtgcttctgaacagtctgttgtcgttgttgattccgtctatgatgccgttcgcgaacgtttcgccagccacggcggctacatgctgcagggccaggagctgaaagcggttcaaaacgttatcctgaaaaatggcgctctgaacgccgctatcgtcggccagccagcctacaaaatcgctgaactggcaggcttctccgtaccagaaaccaccaagattctgatcggtgaagttacggtcgttgacgaaagcgaaccgttcgcacacgaaaaactgtctccgactctggcgatgtatcgtgcgaaagatttcgaagaagcggtagaaaaagcagaaaaactggtcgctatgggcggtatcggtcacacctcctgcctgtacactgaccaggataatcagccagaacgcgttgcttacttcggtcagatgatgaaaaccgcgcgtatcctgatcaacaccccggcctctcagggtggtatcggtgacctgtacaacttcaaactcgcaccttccctgacgttgggttgtggttcctggggtggtaactccatctctgaaaacgttggtccgaaacacctgatcaacaagaaaaccgttgctaagcgagctgaaaacatgttgtggcacaaacttccgaaatctatctacttccgccgtggctctttgcccatcgcgctggatgaagtgattactgatggccacaaacgtgcgctcatcgtgactgaccgcttcctgttcaacaacggctatgcagaccagatcacctctgtgctgaaagcggctggcgttgaaaccgaagtcttcttcgaagttgaagccgacccgacgctttccgttgttcgcaaaggcgctgagctggcgaactccttcaaaccggacgtgatcatcgcgctgggcggcggttccccgatggacgccgcgaaaatcatgtgggtcatgtacgaacatccggaaactcacttcgaagaactggcgctgcgctttatggacatccgtaaacgtatctacaagttcccgaaaatgggcgtgaaagcgaaaatgatcgccgtcaccaccacttccggtaccggttctgaagtcacaccgtttgcggttgtgaccgacgatgcaaccggtcagaaatatccgctggctgactacgccctgaccccggatatggcgattgtcgacgccaacctggtgatggatatgccgaagtccctgtgtgcgttcggtggtctggatgcggtaactcacgctctggaagcttatgtttccgtactggcttctgagttctctgacggtcaggctctgcaggctctgaaactgctgaaagaaaacctgccggcgtcttaccacgaagggtctaaaaatccagttgcgcgtgaacgtgttcacagtgcagcgactatcgccggtatcgcgtttgccaacgccttcctcggtgtatgtcactccatggcgcacaaactgggctctcagttccacattccgcacggtctggcgaacgccctgctgatttgtaacgttatccgctacaacgcgaatgacaacccgaccaagcagaccgctttcagccagtacgatcgtccgcaggcacgccgtcgttacgctgaaattgctgaccacctgggcctgagcgcgccgggcgaccgtaccgccgctaagattgaaaaactgctggcatggctggaaagcattaaagctgagctgggtattcctaagtctatccgtgaagcaggcgtacaggaagctgacttcctggcacacgttgacaaactgtctgaagatgccttcgatgaccagtgcaccggcgctaacccgcgttatccgctgatctccgaactgaaacagattctgctggatacctactacggtcgtgatttcaccgaaggtgaagttgcagcgaagaaagacgtcgttgccgcaccgaaagcagagaaaaaaacgaaaaaatccgcttaa

SEQ ID NO: 39806 - protein, 892 aa, Salmonella enterica subsp. enterica serovar Choleraesuis str
MAVTNVAELNALVERVKKAQREYASFTQEQVDKIFRAAALAAADARIPLAKMAVAESGMGIVEDKVIKNHFASEYIYNAYKDEKTCGVLSEDDTFGTITIAEPIGIICGIVPTTNPTSTAIFKSLISLKTRNAIIFSPHPRAKEATNKAADIVLQAAIAAGAPKDLIGWIDQPSVELSNALMRHPDINLILATGGPGMVKAAYSSGKPAIGVGAGNTPVVIDETADIKRAVASVLMSKTFDNGVICASEQSVVVVDSVYDAVRERFASHGGYMLQGQELKAVQNVILKNGALNAAIVGQPAYKIAELAGFSVPETTKILIGEVTVVDESEPFAHEKLSPTLAMYRAKDFEEAVEKAEKLVAMGGIGHTSCLYTDQDNQPERVAYFGQMMKTARILINTPASQGGIGDLYNFKLAPSLTLGCGSWGGNSISENVGPKHLINKKTVAKRAENMLWHKLPKSIYFRRGSLPIALDEVITDGHKRALIVTDRFLFNNGYADQITSVLKAAGVETEVFFEVEADPTLSVVRKGAELANSFKPDVIIALGGGSPMDAAKIMWVMYEHPETHFEELALRFMDIRKRIYKFPKMGVKAKMIAVTTTSGTGSEVTPFAVVTDDATGQKYPLADYALTPDMAIVDANLVMDMPKSLCAFGGLDAVTHALEAYVSVLASEFSDGQALQALKLLKENLPASYHEGSKNPVARERVHSAATIAGIAFANAFLGVCHSMAHKLGSQFHIPHGLANALLICNVIRYNANDNPTKQTAFSQYDRPQARRRYAEIADHLGLSAPGDRTAAKIEKLLAWLESIKAELGIPKSIREAGVQEADFLAHVDKLSEDAFDDQCTGANPRYPLISELKQILLDTYYGRDFTEGEVAAKKDVVAAPKAEKKTKKSA

SEQ ID NO: 39807 - DNA, 1113 bp, Salmonella enterica subsp. enterica serovar Choleraesuis str
  CDS (1)..(1113): transl_table=11
atgaataccttctcactacaaacgcggttgtacagcggtcagggcagcctggcggtgctcaagcgctttaccaataagcacatctggataatctgcgatggttttctggcgcgctctccgctgctggataccctgcgtaacgcgctgcccgcagataaccgcatcagcgtatttagcgagataacgccggaccccaccatccacacagtggttcagggcattgcgcaaatgcaggctctgcaaccgcaggtggtgatcggttttggcggcggctcggcaatggacgcggcgaaagcgattgtctggtttagccagcaaagcggcatcaatatcgaaacctgcgtggcgatcccgaccaccagcggcaccggttcggaagtcaccagcgcctgcgtaattagcgacccggataaaggcattaagtatccgctgttcaacaatgcgctgtatccggatatggcgatccttgacccggagctggtggtcagcgttccgccgcagattaccgccaacaccggtatggacgtgctgacccacgccctggaggcttgggtgtcaccgcacgccagcgactttaccgacgcgctggcggaaaaagccgccaaactggtgctccagtatctgcccacggcggtggaaaaaggcgactgcgtggcgacgcgcgggaaaatgcataacgcctcaacgctcgccgggatggccttcagccaagcggggctggggcttaaccacgcgatagcccaccagctcggcggacagttccatctgccgcacgggctggccaatgcgctgctgctcacgacggtgatccgctttaacgcgggtgacccgcgcgccgccaaacgctacgcgcggatggccaaagcctgcggtttttgcccggcagaagccaatgacgttgcggcgatcaatgcgctgattcagcaaatcgaactgcttaagcaacgctgtgcccttccctcactggccgttgcgcttaaagaaggaagatccgacttttccgcacgtattccggcgatggtgcaggccgcgctggcggatatcacgctgcgcaccaacccgcgcccggccagcgccgaggaaattcgcgagctgctggaggaactgctatga

SEQ ID NO: 39808 - protein, 370 aa, Salmonella enterica subsp. enterica serovar Choleraesuis str
MNTFSLQTRLYSGQGSLAVLKRFTNKHIWIICDGFLARSPLLDTLRNALPADNRISVFSEITPDPTIHTVVQGIAQMQALQPQVVIGFGGGSAMDAAKAIVWFSQQSGINIETCVAIPTTSGTGSEVTSACVISDPDKGIKYPLFNNALYPDMAILDPELVVSVPPQITANTGMDVLTHALEAWVSPHASDFTDALAEKAAKLVLQYLPTAVEKGDCVATRGKMHNASTLAGMAFSQAGLGLNHAIAHQLGGQFHLPHGLANALLLTTVIRFNAGDPRAAKRYARMAKACGFCPAEANDVAAINALIQQIELLKQRCALPSLAVALKEGRSDFSARIPAMVQAALADITLRTNPRPASAEEIRELLEELL

SEQ ID NO: 39809 - DNA, 1188 bp, Salmonella enterica subsp. enterica serovar Choleraesuis str
  CDS (1)..(1188): transl_table=11
atgcaagctgaactacagacggcgctgtttcaggcattcgacaccctgaatctgcaacgggtgaaaacgttcagcgtaccgccggtcacgctgtgcggacttggggcgctcggcgcctgcggccaggaagcgcaagcgcgaggcgtaagccatctgtttgtgatggtcgacagcttcctgcatcaggcgggaatgaccgcgccgctggcacgcagcctggcgatgaaaggcgtggcgatgacagtctggccgtgtccgccaggcgagccgtgcatcaccgatgtttgcgcggcggtggcgcaactgcgtgaggcggcgtgcgacggcgtagtggcctttggcggcggttcggtgctggacgcggcgaaagcggtcgccctgctggtgactaaccctgaccagacgctgagcgccatgaccgagcgcagtacattacgcccgcgtctgccgctgattgcggtgccgaccaccgccggaaccggttctgaaaccaccaacgtgacggtgattatcgacgcggtcagcgggcgcaagcaggtgctggcacacgcgtcactaatgccggacgtggcgattcttgatgctgccgtgaccgaaggcgttccgccaaacgtgacggcgatgaccggtatcgatgcgttgacgcatgcgattgaggcctacagcgcgctcaacgccacgccgtttaccgacagcctggcgattggcgcgatagcgatgattggcaaatcgctgccgaaagccgtggggtacggccacgatctggcggcgcgtgaaaatatgttgttggcctcctgtatggcgggaatggccttttccagcgccggtctggggctgtgtcacgcgatggcgcaccagccaggggcggcgctgcatattccgcacggccaggccaacgccatgctgctaccgacggtcatgggctttaaccggatggtttgccgcgaacgcttcagtcaaatcggtcgggcgttaaccaataagaaatcggacgatcgcgatgcgattgcggcggtgagcgagctgattgccgaagtgggccagagcaaacggctggctgacgctggcgccaaacccgaacactacagcgcgtgggcgcaagccgcgctggaggatatttgtctgcgcagtaacccacgcaccgccacacaggcacagattatcgacctgtacgcggctgccgggtaa

SEQ ID NO: 39810 - protein, 395 aa, Salmonella enterica subsp. enterica serovar Choleraesuis str
MQAELQTALFQAFDTLNLQRVKTFSVPPVTLCGLGALGACGQEAQARGVSHLFVMVDSFLHQAGMTAPLARSLAMKGVAMTVWPCPPGEPCITDVCAAVAQLREAACDGVVAFGGGSVLDAAKAVALLVTNPDQTLSAMTERSTLRPRLPLIAVPTTAGTGSETTNVTVIIDAVSGRKQVLAHASLMPDVAILDAAVTEGVPPNVTAMTGIDALTHAIEAYSALNATPFTDSLAIGAIAMIGKSLPKAVGYGHDLAARENMLLASCMAGMAFSSAGLGLCHAMAHQPGAALHIPHGQANAMLLPTVMGFNRMVCRERFSQIGRALTNKKSDDRDAIAAVSELIAEVGQSKRLADAGAKPEHYSAWAQAALEDICLRSNPRTATQAQIIDLYAAAG

SEQ ID NO: 39811 - DNA, 1143 bp, Salmonella enterica subsp. enterica serovar Choleraesuis str
  CDS (1)..(1143): transl_table=11
atggcgaacagaatgattctgaatgaaacggcatggtttggccggggagcggtggacgcattaaccgatgaggtgacgcgccgcggttatcataacgcgctgattgttaccgataaaacgctggtgcaatgcggtgtggtcgataaagtgacaagcagaatggatgccgcagggctggcgtgggagatttatgctggcgtgatccctaatcctacgatttccgttgtccaggaagggcttaaggtctttacccaaagtggcgtggactatctcatcgccattggcggcggttctccgcaggatacctgcaaagcgatcggtattatcagtaacaatccggaatttgccgatgtgcgcagtctggaagggctatcgccgacccgtaaacccagcgtgccgattatggcgatcccgacaacggcgggaaccgcggcggaagtcactatcaattatgtgattaccgatgaagagaaacggcgcaaattcgtttgtgtcgatccgcatgatattccgcaggcggcatttatcgatgccgatatgatggacggtatgccacccgcgctgaaagcggcaacgggcgtggatgcgctaacccatgctattgaaggctatattacccgggccgcatgggcgctgacggatgcattacatatcaaagccattgagattattgcgggtgcgctgcgcggcgccgtggccggagaaaaagaggccggtgaggcaatggcgctggggcaatatgttgccgggatggggttttccaatgtggggctggtgcatgggatggcgcatccgctgggcgcgttttacaacacgccgcacggcgtcgcgaatgctattttgcttccgcatgtgatgcgttttaatgccgggtataccaacgagaaattccgtgatatcgcccgggcgatgggggtgaaggtagaaggattgagtcttgaagaggcgcgtaatgccgcagtggaagccgtatttacgctaaatcgcgatgtgggaattccgctgcatttgcgtgatgtcggcgttcgaaaagaggatatcccggcgctggcgcaggcggcgttcgatgatgtctgtacgggcggcaatccgcgtgaagcgagtctggcggacattgtcgaactgtatcataccgcttggtaa

SEQ ID NO: 39812 - protein, 380 aa, Salmonella enterica subsp. enterica serovar Choleraesuis str
MANRMILNETAWFGRGAVDALTDEVTRRGYHNALIVTDKTLVQCGVVDKVTSRMDAAGLAWEIYAGVIPNPTISVVQEGLKVFTQSGVDYLIAIGGGSPQDTCKAIGIISNNPEFADVRSLEGLSPTRKPSVPIMAIPTTAGTAAEVTINYVITDEEKRRKFVCVDPHDIPQAAFIDADMMDGMPPALKAATGVDALTHAIEGYITRAAWALTDALHIKAIEIIAGALRGAVAGEKEAGEAMALGQYVAGMGFSNVGLVHGMAHPLGAFYNTPHGVANAILLPHVMRFNAGYTNEKFRDIARAMGVKVEGLSLEEARNAAVEAVFTLNRDVGIPLHLRDVGVRKEDIPALAQAAFDDVCTGGNPREASLADIVELYHTAW

SEQ ID NO: 39813 - DNA, 1149 bp, Salmonella enterica subsp. enterica serovar Choleraesuis str
  CDS (1)..(1149): transl_table=11
atgagctttatgttggcactgccaaaaattagcctgcatggcgctggagcgattgccgatatggtgaacctcgtggcgaataagcaatggggcaaagcgctgatcgttaccgatggtcaactggtaaagctgggcctgctggatagcctgtttagcgcactggataaacatcaaatgtcttaccacctgtttgatgaggtgttcccaaacccgacagaagagctggtgcagaaaggttttgcggcatatcagagcgcagaatgtgactacattatcgccttcggcggcggcagcccgatcgataccgcaaaagcggtgaaaattctgaccgccaacccaggtccatctaccgcctactccggcgtcggcaaagtgaaaaacgccggcgtaccgctggtagcgattaacactacggcaggtaccgcggcagagatgaccagcaacgcggtgattatcgactctgcccgtaaggtcaaagaggtgattatcgacccgaacatcatcccggatattgccgtggatgacgccagcgttatgctggaaatccccgcttctgtgaccgccgcaaccggcatggatgccctgacccatgcggtggaagcctatgtctccgttggcgcgcatccgctcaccgacgctaacgcgctggaagcgattcgcttaatcaatgtgtggctaccgaaagcggttgacgatggccataacctcgaagcccgtgagcaaatggcattcggccagtacctggcgggtatggcgttcaacagcgccggtttggggctggttcacgcgctggcgcaccagccgggcgcaacccacaacctgccgcacggcgtctgcaacgctatcctgctgccaattgtcgagaactttaaccgtccgaatgccgtcgagcgttttgcccgcatcgcacaggcgatgggcgtggagacgcgcggtatgtctgacgaagccgcaagtcaggaagcgattaacgctatccgtacgctgagcaaacgcgtcggcattccagaaggtttcagcaagctgggcgtcacaaaagaagatatcgaaggctggctggataaagccctcgccgacccgtgcgcgccgtgtaacgcgcgcaccgccagccgcgatgaagttcgcgggctgtacctggaggcgttatga

SEQ ID NO: 39814 - protein, 382 aa, Salmonella enterica subsp. enterica serovar Choleraesuis str
MSFMLALPKISLHGAGAIADMVNLVANKQWGKALIVTDGQLVKLGLLDSLFSALDKHQMSYHLFDEVFPNPTEELVQKGFAAYQSAECDYIIAFGGGSPIDTAKAVKILTANPGPSTAYSGVGKVKNAGVPLVAINTTAGTAAEMTSNAVIIDSARKVKEVIIDPNIIPDIAVDDASVMLEIPASVTAATGMDALTHAVEAYVSVGAHPLTDANALEAIRLINVWLPKAVDDGHNLEAREQMAFGQYLAGMAFNSAGLGLVHALAHQPGATHNLPHGVCNAILLPIVENFNRPNAVERFARIAQAMGVETRGMSDEAASQEAINAIRTLSKRVGIPEGFSKLGVTKEDIEGWLDKALADPCAPCNARTASRDEVRGLYLEAL

SEQ ID NO: 39815 - DNA, 1170 bp, Brucella abortus biovar 1 str. 9-941
  CDS (1)..(1170): transl_table=11
atgaccacattgaccgcgaaatggaactttccgaccactgtgcttttcgggccggggcacatcaaggagcttccagccgtcctgaaagccgcaggcatcgagcacccgcttttcgtcaccgatccgggcctcgccaaactgcctgtggtcgcctcgacattggccgttctggatgcggcgggcgtgcaatatggcgtgttttccgatgtgaaacccaatccggtcgagagcaatcttcatgccggcgtaaaggttttccgggaaggcaggcatgacggcgtcatcgcctttggcggcggttccgcgctcgatctcggcaagctcatcgcctttcaggccggacagacccggcccgtctgggattttgaagatatcggcgactggtggacccgcgccgacagcaacgccatagctcccgtcattgccgtgccgaccaccgcaggcaccggctcggaagtggggcgcgcgggcgttctcaccaatgaatccacccacacgaagaaggtcatcttccaccccaaaatgctgcccgtaacggtgatcgccgatcccgaactttccactggcatgccgcccttcatcacggcgggtacgggcatggatgcactggcgcactgccttgaagcctattgcgcaccgggcttccatcccatggccgatggcattgccgtggagggcatccgccttgtctttgagaacctgcccaaagcctatgccaatggcggggatatcgaagcgcgtgccaatatgatggcagccgctgccatgggcgccacggccttccagaagggcctcggtgcgatccattcgctctcgcaccccatcggcgcgctctatgacacacatcacggcatgaccaatgccgtcttcatgccctatgtgctgcaccacaaccgggatgccatcgaaaagcgcattgcccggctggccgattatctcggcatcgaaggcgggttcgacggctttgccgatgcgatcatgaagctgcgcaccgaacttggcgtgccgcgcaccctgcccgatctcatcaagaaccttcagatggacaatgcccgcaaggagctgatcgccgaaatggcagtggcagatcccaccgcaggcggaaacccggttgaacttacaaaaaacgacgcgctaaagttgctcaatgcagcattggaaggtagataa

SEQ ID NO: 39816 - protein, 389 aa, Brucella abortus biovar 1 str. 9-941
MTTLTAKWNFPTTVLFGPGHIKELPAVLKAAGIEHPLFVTDPGLAKLPVVASTLAVLDAAGVQYGVFSDVKPNPVESNLHAGVKVFREGRHDGVIAFGGGSALDLGKLIAFQAGQTRPVWDFEDIGDWWTRADSNAIAPVIAVPTTAGTGSEVGRAGVLTNESTHTKKVIFHPKMLPVTVIADPELSTGMPPFITAGTGMDALAHCLEAYCAPGFHPMADGIAVEGIRLVFENLPKAYANGGDIEARANMMAAAAMGATAFQKGLGAIHSLSHPIGALYDTHHGMTNAVFMPYVLHHNRDAIEKRIARLADYLGIEGGFDGFADAIMKLRTELGVPRTLPDLIKNLQMDNARKELIAEMAVADPTAGGNPVELTKNDALKLLNAALEGR

SEQ ID NO: 39817 - DNA, 1155 bp, Pseudomonas syringae pv. syringae B728a
  CDS (1)..(1155): transl_table=11
atgcaccgcaacgactggcactacccgacttccatccgcgcaggcgcaggacgcgtcaacgaactggccgacgcctgcagggtgaccggcatacaacgtccgctgctgatcaccgacagctttctcggcagcaccgatatgatcaccagcgccgtggaggactgccgcaatcaattgggccactgcggcctgtttgaccgggtcaagggcaacccgaccggcaccaacgtcgccgaggggctgcacgcttacagaaccggaggctacgacggtgtgattgcgtttggcggcggctcggcgctggacgctgccaaggcagtcgcgctgatgtcgggccagacccgcccgttatgggatttcgaagacgtcaacgacaaccacctgcgcgccgatccggatggcattgcgccggtgattgcgctgccgacaacggccgggaccggctctgaagtagggcgtgcgtcggtgattaccgatgagcaggcgcaggtcaaacgcaccattctgcaccttcgcatgatgccgcgcatcgcgattctggatgccacgctgacgctcgacctgcccaggcacctgaccgccgccaccggcgccgatgccttgacccactgcatggagtcctggtgttcgccggcctggcacccgatggccgaagcggtttcggtcaagggcatgcagatgatcaaggcgtttttaccgcgtgtcgtcgccgacgggcaggacctggaggcgcggcagcagatgctggtggcctccagcctcggcgcggccgcgtttcagcgcggtctgggcggcgtacacgcaatcgcgcagagccttggggcgctctacgaccagcatcatggcttgctgaacgcaatcctgctgccctacgtgctggaggccaatcgctcggtgctgcagacgcaaatggacgatctggcggtttacctgcggttgccgtcgcccggtttctccggggtgatggactggctgctgacactgcgcgagcagatcggcattccacatacgctgggcgagatcggtatcgacgatcgcgacgccgagcgggtcgggcggatggctttcgccgatggctgctcgcacaccaacccgattcgccattcggcgcaggcctacgcgcagatcttcagccgtgcagtgaggggcgagtga

SEQ ID NO: 39818 - protein, 384 aa, Pseudomonas syringae pv. syringae B728a
MHRNDWHYPTSIRAGAGRVNELADACRVTGIQRPLLITDSFLGSTDMITSAVEDCRNQLGHCGLFDRVKGNPTGTNVAEGLHAYRTGGYDGVIAFGGGSALDAAKAVALMSGQTRPLWDFEDVNDNHLRADPDGIAPVIALPTTAGTGSEVGRASVITDEQAQVKRTILHLRMMPRIAILDATLTLDLPRHLTAATGADALTHCMESWCSPAWHPMAEAVSVKGMQMIKAFLPRVVADGQDLEARQQMLVASSLGAAAFQRGLGGVHAIAQSLGALYDQHHGLLNAILLPYVLEANRSVLQTQMDDLAVYLRLPSPGFSGVMDWLLTLREQIGIPHTLGEIGIDDRDAERVGRMAFADGCSHTNPIRHSAQAYAQIFSRAVRGE

SEQ ID NO: 39819 - DNA, 1149 bp, Pseudomonas syringae pv. syringae B728a
  CDS (1)..(1149): transl_table=11
atgatcagcacttttttcatccccgctgtgaacatcatcggcactggctgcattgacgaagccatgctcgccatacgcaaatacggatttcgcaaggccctgatcgtcacggatgctggccttgccagggccggagtagccagtcaggtcgccgggctgttggtggagcagggcattgactcggttgtgtacgacggtgcccggcccaacccgaccatcgccaacgtcgagaacggcctggccctgttgcaggagcgccagtgcgatttcgtcatatcgctgggcggtggctcgcctcacgactgtgcaaaaggtattgccctgtgcgccagcaacggggggcatatcagcgattatgagggcgtcgaccgttcggcaaaaccgcagttgccattgattgccatcaataccaccgccggaaccgcgagtgaaatgacccgcttctgcatcattaccgacgaagcccggcacgtaaaaatggcgatcatcgaccgcaacgtcacgccgctgctgtccgtgaatgatcccgacatgatggtcgccatgcccaggtcgctgactgccgccactggcatggatgccttgactcacgcaatcgaagcctatgtctccacggctgccaacccgatcactgacgcctgtgcgttacaggctatggcgctgatcgccaacaatttgcgcgacgcattcaacaacggggccaatatcactgcccgcgagaacatggcgtatgcccagtttctggctggcatggcgttcaataacgcgtcactgggctacgtgcacgccatggcgcaccagttgggcggcttttatgatttgccccacggtgtgtgcaacgccgtattgctgccccatgtgcagcgcttcaacgccagcgtcagcgctgcacgcctgaccgacgttgcacacgccatgggcagcaatatccgtgggctctctccggaagaaggcgctcaggcagccatcgacgcgattcgtgcattgtcggctgccgtggaaatcccggcaggtcttgctacgctgggcgtcaaggaggaagacttcccgatgctggccagcaatgccctgaaagatgcctgcggcctgaccaacccgcgtcctgccgatcttgagcagattcaggatatatttcgccaggcgctttaa

SEQ ID NO: 39820 - protein, 382 aa, Pseudomonas syringae pv. syringae B728a
MISTFFIPAVNIIGTGCIDEAMLAIRKYGFRKALIVTDAGLARAGVASQVAGLLVEQGIDSVVYDGARPNPTIANVENGLALLQERQCDFVISLGGGSPHDCAKGIALCASNGGHISDYEGVDRSAKPQLPLIAINTTAGTASEMTRFCIITDEARHVKMAIIDRNVTPLLSVNDPDMMVAMPRSLTAATGMDALTHAIEAYVSTAANPITDACALQAMALIANNLRDAFNNGANITARENMAYAQFLAGMAFNNASLGYVHAMAHQLGGFYDLPHGVCNAVLLPHVQRFNASVSAARLTDVAHAMGSNIRGLSPEEGAQAAIDAIRALSAAVEIPAGLATLGVKEEDFPMLASNALKDACGLTNPRPADLEQIQDIFRQAL

SEQ ID NO: 39821 - DNA, 1149 bp, Pseudomonas fluorescens Pf-5
  CDS (1)..(1149): transl_table=11
atgagcagcacctttttcattccagccgtgaacatcatgggcatcggctgtctcgacgaggccatgagcgccatccgcaactatggatttcgcaaggcgctgatcgtcactgacacgggcctggccaaggctggcgtggccagcatggtggccgagaagctggccatgcaggacatcgattcggtgatcttcgacggtgccaagcccaaccccagcattgccaacgtcgagcagggcctggcgcaattgcagcaggcacagtgcgatttcgtcatctccctgggcggcggatcgccccatgactgcgccaagggcattgccctgtgtgccaccaatggcgggcagatccgcgattacgaaggcgtcgaccagtcggccaagccgcaactgcccttgatcgccatcaacaccaccgccggcactgccagcgaaatgacccgtttctgcatcatcaccgacgaatcgcgccatgtgaaaatggccatcgtcgaccgcaacgtcacgccgttgctgtcggtgaacgatccggcactgatggtggcgatgcccaagggcctgaccgccgccaccggcatggatgccctgacccacgcggtggaagcctatgtgtccaccgccgccaaccccatcaccgatgcctgcgccctgaaggccgtggaaatgatcagcgccaacctgcgccaggcggtgcacgacggcaacgatctgctggcacgggagaacatggcctatgcgcagttcctcgccggcatggcattcaacaatgcgtccctgggtttcgtgcacgccatggcccaccagctgggcggcttctacgacctgccccatggcgtgtgcaacgcggtgctgttgccccatgtgcagagcttcaacgccacggtatgcgcccagcgcctgaccgatgtggcccacgcgctgggagcggacattcgcggtttcagcccggaagagggcgcccaggcggccatcgcggcgatccgcaccctggcccgtgatgtggagattcccgccggtttgcgcgagttgggcgccaagttgcaggacattccgctattggcggccaatgctctcaaggatgcctgcggcctgaccaacccgcgtccggcggatcagcggcagatcgaggagattttccgcaacgcgttctga

SEQ ID NO: 39822 - protein, 382 aa, Pseudomonas fluorescens Pf-5
MSSTFFIPAVNIMGIGCLDEAMSAIRNYGFRKALIVTDTGLAKAGVASMVAEKLAMQDIDSVIFDGAKPNPSIANVEQGLAQLQQAQCDFVISLGGGSPHDCAKGIALCATNGGQIRDYEGVDQSAKPQLPLIAINTTAGTASEMTRFCIITDESRHVKMAIVDRNVTPLLSVNDPALMVAMPKGLTAATGMDALTHAVEAYVSTAANPITDACALKAVEMISANLRQAVHDGNDLLARENMAYAQFLAGMAFNNASLGFVHAMAHQLGGFYDLPHGVCNAVLLPHVQSFNATVCAQRLTDVAHALGADIRGFSPEEGAQAAIAAIRTLARDVEIPAGLRELGAKLQDIPLLAANALKDACGLTNPRPADQRQIEEIFRNAF

SEQ ID NO: 39823 - DNA, 1164 bp, Pseudomonas fluorescens Pf-5
  CDS (1)..(1164): transl_table=11
atgggccagaatctcagtctgctgcgcaagttcgtctctccggaaatcatctttggcgccggttgccggcacaacgtcggcaactatgcgaagaccttcggtgcgcgcaaggtgctggtggtcaccgaccccggggtgatcgccgccggctgggtcgccgatgtcgaggccagcctgctggcccagggcgtcgagtactgcctgtacagcgcagtgtcgcccaacccgcgggtggaggaggtgatgcacggcgcgcagatctaccgggaaaacgcctgcgatgtgatcgtcgcggtcggtggcggcagccccatggattgcggcaagggcatcggcatcgtcgccgcccacgggcgcagcatcctcgagttcgagggggtggacaccatccgcatgcccagccccccgctgatcatgatcccgaccaccgcgggcacctcggcggatgtctcgcagttcgtgatcatctccaaccagcaggagcggatgaagttctccatcgtcagcaaggcggtggtccctgatgtgtcgctgatcgacccggaaaccacccagggcatggaccccttcctgtccgcctgcaccggcatcgacgccctggtgcatgccatcgaggctttcgtttccaccggccacgggccgctgaccgatccccacgccctggaagccatgcgcctgatcaacggcaacctggtgcagatgatcgccaacccctcggacatcgccctgcgcgagaagatcatgctcggcagcatgcaggccgggctggcgttctccaacgcgatcctcggcgcggtgcatgccatgtcccacagcctggggggctttctcgacctgcctcacgggctgtgcaacgcggtgctggtggagcatgtggtggccttcaactacagcgcggcgccggagcgattcaaggtgattgccgagactttcggcatcgactgccgcgggctcaaccagcggcagatctgcgggcgcctggtggagcacctgatcgccctcaagcgcgccatcggcttccacgagaccctgggcctgcatggggtcagcagcagcgatattccgttcctctcgcagcacgcaatgggcgacccatgcatcctcaccaaccctcgtgaatccagccagcgtgatgtcgaggtggtctatggcgaggccctctga

SEQ ID NO: 39824 - protein, 387 aa, Pseudomonas fluorescens Pf-5
MGQNLSLLRKFVSPEIIFGAGCRHNVGNYAKTFGARKVLVVTDPGVIAAGWVADVEASLLAQGVEYCLYSAVSPNPRVEEVMHGAQIYRENACDVIVAVGGGSPMDCGKGIGIVAAHGRSILEFEGVDTIRMPSPPLIMIPTTAGTSADVSQFVIISNQQERMKFSIVSKAVVPDVSLIDPETTQGMDPFLSACTGIDALVHAIEAFVSTGHGPLTDPHALEAMRLINGNLVQMIANPSDIALREKIMLGSMQAGLAFSNAILGAVHAMSHSLGGFLDLPHGLCNAVLVEHVVAFNYSAAPERFKVIAETFGIDCRGLNQRQICGRLVEHLIALKRAIGFHETLGLHGVSSSDIPFLSQHAMGDPCILTNPRESSQRDVEVVYGEAL

SEQ ID NO: 39825 - DNA, 1197 bp, Pseudomonas fluorescens Pf-5
  CDS (1)..(1197): transl_table=11
atgcccccgtccatccactactggaactaccccaccgagatcttctgcggcgccgaggccctgcacggcctggcccagcgctgcgccctgctgggcatggccaggcccttgctggtcaccgacccgggcatgctcgaactggaaccctttggcctgttgaccgcgcacctggagcagagccgccagggctttgcggtatttgccgaactggccagcaacccgagcctggacgatgtgcagcgcggcgtccaagccttcagggccggcggccacgactcgctgatcgccctgggcggcggcagcgccatggacgccgccaagggcatcgccctggccgccgtggacccgcaagggctgcagcgtttcgagtggtcccaggtgatcgagcattacccgagcctcagtgactttccgcgcctgggcctgccgcccctgatcgccctgcccaccactgccggcaccggctccgaactgggccgcgaagcggtactgaccgacagccagcagcaggtcaagcgggtcatcagccaccccgaactgctgcccgcctgcgtgatcctcgacccgctgctgacccgcggcctgccgcccgcgctgaccgccgccaccggcatggatgccctgacccaccatatcgaggcgttctgctcgcccctgtaccacccgatgtccagcgcgattgccgtggaaggcatgcgcctggtgcagcagcacctgcgccgggcagtgagccacggccaggacctggacgcccgggaaggcatgctggtggcctcggcgatggctgcggtggccttccagaagggcctggggggcgtccacgccctggcccacccgctgggcgcccgctatcaccgtcaccatggcctgctcaatgccgtcctcctgccctatgtgctggtggccaaccagccggtgattgccgaggagatcgggcgcctggcccgttacctggacttgccccggggggatttccaggggttcctggactggatcctggccctgcgcgccgagctgggcatcccccactgcctggcggatatcggcctggacagccatgaagccgagtgggtcggggcccaggccctggcggatatttcgtcctccgacaccaatgcccgaccgctgagcgccgccgactacagccagatcttccgcaacgccgtgcacggcgtcctgccaggagcccgcccatga

SEQ ID NO: 39826 - protein, 398 aa, Pseudomonas fluorescens Pf-5
MPPSIHYWNYPTEIFCGAEALHGLAQRCALLGMARPLLVTDPGMLELEPFGLLTAHLEQSRQGFAVFAELASNPSLDDVQRGVQAFRAGGHDSLIALGGGSAMDAAKGIALAAVDPQGLQRFEWSQVIEHYPSLSDFPRLGLPPLIALPTTAGTGSELGREAVLTDSQQQVKRVISHPELLPACVILDPLLTRGLPPALTAATGMDALTHHIEAFCSPLYHPMSSAIAVEGMRLVQQHLRRAVSHGQDLDAREGMLVASAMAAVAFQKGLGGVHALAHPLGARYHRHHGLLNAVLLPYVLVANQPVIAEEIGRLARYLDLPRGDFQGFLDWILALRAELGIPHCLADIGLDSHEAEWVGAQALADISSSDTNARPLSAADYSQIFRNAVHGVLPGARP

SEQ ID NO: 39827 - DNA, 1149 bp, Pseudomonas fluorescens Pf-5
  CDS (1)..(1149): transl_table=11
atgagtatttcctctttcaagatcgcccataaattgctgaccggcagcaccgccatcgagcaactggctgccgagctgacccgcctggatgtcgataacccgctgatcgtcaccgatactgccctgctcaggtccggcacggtggagctggcgctggcccacctgggggagcgcagttacgaagtcttcgaccgggtgcagcctgatccggaaatcgccatcgtcgaggactgcatgcaggtgtaccgcgagggcgggcatgacgggctgatcggcctgggcggcggcagcgccatcgatatcgccaagagtgtcggggcctatgccggctatcacggcgccctggaggatctgttcggcatcgaccaggtgccgcgcaaggggccgccgctgatcgccattcccaccaccgcaggcactggttcggaagtgaccaatgtggcgatcctctcggaccgggtcgcgcaattgaagaaaggcatcatcagcgactacctgctgccggacgtggccctggtcagcccgcagatgaccctgacctgtccaccgcgtgtcaccgcggccagcggcgtcgatgccctggcgcatgccattgaggcttacctgtccctcaatgcttccgcgatcaccgactccctggccatcggcgccatcaagctgatcgtcaaggctttgcccaaggcctttgccaacccggcccacctgcaggcccgggaggacatggccaccgccagcctgatggccggcatggccttcggcaatgccggggtcggtgcggtgcatgcgatggcctatcccctgggcggccgctttcatatgtcccacggggtcagcaatgccttgctgctgccctatgtcatgacctggaacaagatggcctgcgtcgagcgtatgcaggatatcgccgaggccatgggggtacagaccgcgcacctgagtgccagcgaggcggccgaccgggcagtggaggccatggcagcgttgtgtgcggcggtggaaattcccagcggcttgcgcagcttcggcgtgcccgaggatgcgatcccggccatggccgtcgaggccgcgggtatcgagcgcttgatgcgcaacaacccgcgccggctgagccccgccgatatcgagaagatctatcgcgcggcctactga

SEQ ID NO: 39828 - protein, 382 aa, Pseudomonas fluorescens Pf-5
MSISSFKIAHKLLTGSTAIEQLAAELTRLDVDNPLIVTDTALLRSGTVELALAHLGERSYEVFDRVQPDPEIAIVEDCMQVYREGGHDGLIGLGGGSAIDIAKSVGAYAGYHGALEDLFGIDQVPRKGPPLIAIPTTAGTGSEVTNVAILSDRVAQLKKGIISDYLLPDVALVSPQMTLTCPPRVTAASGVDALAHAIEAYLSLNASAITDSLAIGAIKLIVKALPKAFANPAHLQAREDMATASLMAGMAFGNAGVGAVHAMAYPLGGRFHMSHGVSNALLLPYVMTWNKMACVERMQDIAEAMGVQTAHLSASEAADRAVEAMAALCAAVEIPSGLRSFGVPEDAIPAMAVEAAGIERLMRNNPRRLSPADIEKIYRAAY

SEQ ID NO: 39829 - DNA, 1149 bp, Pseudomonas fluorescens Pf-5
  CDS (1)..(1149): transl_table=11
atgagtatttctgcgttcaagattgccaacaaactgattaccggccagggcgccatcgaacagctggacgccgaactggcgcgcctgcagatcagcaacccgctgatcgtcaccgatgcgatcctggtcaagtccggcaccgtcgatctggccttggcccacctgggcgggcgcgcttaccggatcttcgacgaggtccagccggagccggaaatcgccatagtccaggcctgcacccaggcttaccgggccggtggccacgatggcctgatcggcctgggcggcggcagcgccattgatatcgccaaggcggtggccgcgttcgccggccatgaaggcgcgctggaagagctgttcggggtggatcaggtgcagcgcaaggggccgccgctgattgccattcctaccactgcgggcaccggttcggaggtgaccaacgtggcgatcctctcggacaaggtggcccagttgaaaaagggcatcgtcagcgattacctgctgccggacgtagcgctggtgagcccggtgatgaccctgacctgcccgcgcagcgtcaccgccgccagtggcgtcgacgcgctggtgcatgcggtggagtcctacctgtcgctcaacggttcgccgatcaccgactccctggccctgggcgcgatccgcctgatcgtcagggcgctgcccaaggcctacgccaacccggccaacctgcaggcccgggaagacatggccaccgccagcctgatggccggcatggccttcggcaatgccggagtcggtgcagtgcatgccctggcctatcccctgggcgggcgcttcaatatcgcccacggggtgagcaacgcgctgctactgccctacgtcatggcctggaacaagatggcctgtgtcgagcgctttcgcgatatcgcccaggccatggacctgccgatcgccgggctcagtgatggccaggccgcagagcaggcggtccaggccatggctgcgctgtgcgctgcggtggacatccccacgggcatgcgcagcttcggtgtgcccgaggacgcgatcccggccatggccgtggaagcggcgggtatccagcggctgatgcgcaacaacccgcgccaactgagccccggcgatatcgagcagatctaccgggctgcctattga

SEQ ID NO: 39830 - protein, 382 aa, Pseudomonas fluorescens Pf-5
MSISAFKIANKLITGQGAIEQLDAELARLQISNPLIVTDAILVKSGTVDLALAHLGGRAYRIFDEVQPEPEIAIVQACTQAYRAGGHDGLIGLGGGSAIDIAKAVAAFAGHEGALEELFGVDQVQRKGPPLIAIPTTAGTGSEVTNVAILSDKVAQLKKGIVSDYLLPDVALVSPVMTLTCPRSVTAASGVDALVHAVESYLSLNGSPITDSLALGAIRLIVRALPKAYANPANLQAREDMATASLMAGMAFGNAGVGAVHALAYPLGGRFNIAHGVSNALLLPYVMAWNKMACVERFRDIAQAMDLPIAGLSDGQAAEQAVQAMAALCAAVDIPTGMRSFGVPEDAIPAMAVEAAGIQRLMRNNPRQLSPGDIEQIYRAAY

SEQ ID NO: 39831 - DNA, 1164 bp, Psychrobacter arcticum 273-4
  CDS (1)..(1164): transl_table=11
atgataggaatagagttttatactaacggacacatcgttagcgaagctgacagcatgcgccaaaagctaggggatttagcaaagcaatactatgcaacatctgccattattattacagacgctggcatctctgagctgggctacgttgatatcgcacggaagtctttagagaaggccggtgctaatgtcgttgttttcgatagtgtcgttgctgatccacctattgaagtcgtcgaagaagctatcgaacttgccagagcgaaccagtgtgatttggtcatcggcttaggaggtggcagctctattgatactgcgaaaattgtcgcgctataccccaatgaatttgagtcggtcaatgagcttttagaggcagatattagtggttttaaaaaaatgccgctgtttgcgattcccaccactgcaggtactggcgcagaagctacctttgtatctgtaatcacagcaaaagatggcagcaaaaaagccatatacacgcctaaaatcttacctgatgtcgcgattttagatgcaacgcttacccttaagcttcctcgccatatcactgctgccactgctctagatgctatggttcattgcattgaagcttacacgagccgcactaagaagaaccccatttcagatgcactggctgttaaaggcttgcaaatgctgtggagcaattttgacaaagtgctcaatcacggcgatgacattgatgctcgcactgagatgttattaggttcaactctagctggcattgcttttgtcaacgcttccgtagcagctgtacatggactctcctacccacttagcatcaactttcatgtacctcatgggcatgctaacgcgctcgtcatgtgcggtgtatttaatttcaacttaccggtagcagcacccctttatgcagaattagctcgtgcggtgatgcctatcgaaacttctggcatgaatgatctagaggctgccaatcaatttatcaatcaactaagagacttcttaaaaacaagtggtctaaagtatcgcttaaatgagttagatataacagaacaagatatccctgcgttagctgatatagtcattaatacttatgctcgtctcattgaaaccaatccaatgaacatgtctttagaagaggtaaaaatgatatacaaagagatactctaa

SEQ ID NO: 39832 - protein, 387 aa, Psychrobacter arcticum 273-4
MIGIEFYTNGHIVSEADSMRQKLGDLAKQYYATSAIIITDAGISELGYVDIARKSLEKAGANVVVFDSVVADPPIEVVEEAIELARANQCDLVIGLGGGSSIDTAKIVALYPNEFESVNELLEADISGFKKMPLFAIPTTAGTGAEATFVSVITAKDGSKKAIYTPKILPDVAILDATLTLKLPRHITAATALDAMVHCIEAYTSRTKKNPISDALAVKGLQMLWSNFDKVLNHGDDIDARTEMLLGSTLAGIAFVNASVAAVHGLSYPLSINFHVPHGHANALVMCGVFNFNLPVAAPLYAELARAVMPIETSGMNDLEAANQFINQLRDFLKTSGLKYRLNELDITEQDIPALADIVINTYARLIETNPMNMSLEEVKMIYKEIL

SEQ ID NO: 39833 - DNA, 1326 bp, Psychrobacter arcticum 273-4
  CDS (1)..(1326): transl_table=11
atgaaaaaacaaaacagtattgctaaattagtaagtagcaaattagtcagtagcaatggattacagtatactggctatttagctgttgccaagacacgcgccaaagtactaaaagccttcgcttatattattccgattagaagaccgatgttattcgtcggcgagagctcttgtgatgagctatgcgatatgctcattaatgaaggtagcaccaatgtctttatcgtgactgatggagtgctaaataagctcggcataccagccaaagtcactgattatctagatagtaaaaatatcagctataaagtctatgacggtattacaccagaccctacttttaaagtggttgaagaaggactacgcatatccgttgatgctaaatgcgattcaattattgcaatcggcggtgggtcggtcattgatgcagctaaaatgatagccatgtcacaaggcaacaattgcaagccgcagcagcttatcggcattcttaaagcaagaaagccttctgtaccgttgtactgtgtgcctacaactgctggtactggttcggaagcgacacttggtgcggttgtatcagacgataaaactcatcaaaaagccctatctatcgatccaagaatggtgccattagcagcggctattgacccagttatcatgaaaggtatgccggctcatatcacagcggatacgggtatcgatgtgttgacacatgccctagaagcttggatgagtgccaatgctagcgtagagactgattattatgctgcctctgcggttaagtcagttatgcagaatctgccaatagtatacgaagacggcggcaatctcaaagccagagaagcaatgggtattgcggctcactacggcgggattgcctttaataaagcaggccttggttatgtccatgccatcgctcatcagctaggggcgtattatagtattcctcatggtcgcgccaatgccatcgtgttaccttatgtacttgatgtcaatcgtcaagcgagcaaaaagagattggctgagctggctagaaaaacgggcatggtaaaatctggtcaagctagcagcagtgatagcgatatcgccgattatctcatcgcccaagtacgtgaattgattgcaaccttaaacatcgatccaacagttaaaggtatgaaagccagtgattttgatagtattgctaaagcagcggctaaagaagtcagtgatacttatgcggtaccgacttatctgtcagcgtctgaaataaaagatatcttattgaagattaagcaggcaagtgaagatgctgctggtactgacgctaaaaatgataaagttgcatag

SEQ ID NO: 39834 - protein, 441 aa, Psychrobacter arcticum 273-4
MKKQNSIAKLVSSKLVSSNGLQYTGYLAVAKTRAKVLKAFAYIIPIRRPMLFVGESSCDELCDMLINEGSTNVFIVTDGVLNKLGIPAKVTDYLDSKNISYKVYDGITPDPTFKVVEEGLRISVDAKCDSIIAIGGGSVIDAAKMIAMSQGNNCKPQQLIGILKARKPSVPLYCVPTTAGTGSEATLGAVVSDDKTHQKALSIDPRMVPLAAAIDPVIMKGMPAHITADTGIDVLTHALEAWMSANASVETDYYAASAVKSVMQNLPIVYEDGGNLKAREAMGIAAHYGGIAFNKAGLGYVHAIAHQLGAYYSIPHGRANAIVLPYVLDVNRQASKKRLAELARKTGMVKSGQASSSDSDIADYLIAQVRELIATLNIDPTVKGMKASDFDSIAKAAAKEVSDTYAVPTYLSASEIKDILLKIKQASEDAAGTDAKNDKVA

SEQ ID NO: 39835 - DNA, 1167 bp, Candidatus Pelagibacter ubique HTCC1062
  CDS (1)..(1167): transl_table=11
atgcaaaaatacaactggaattatcctactacaatgtgggtaggtgaaaatagaattaatgatgttgcttcagcatgtaaaaatttaaacattaaaaagccactgcttgttactgataatggattagctcaatcagttattgttaaaaacactttatcgattttaaaagagggtggaattattgcagcattatattcaaatgttgttggtaacccaactggcacgaatgttaatgaaggtgctgattattataaaaaaaacaattgtgatggtgttattgcgtttggaggtggtagtggtttagatgttggtaaagcagttgcttttatgtcaggtcaaaatctacctatttgggatttcgaagatgttggagataattggactaaagcaaactctgataagattgctcccattattgcagtacctactactgcgggcactggttctgaaactggcagagcatcagtaatattaaatgaagaaacaggcgtgaaaaatattatttttcatccaaaatttttaccatcaatagttattttagatccaattttaacagttggattaccagcaaaaatgactgcagcaactggaatggatgcactagcacataatttagaagcctattgtgcaccaggctatcatccgatggcagatggaattgctttagaaggaatgagattaattgataagtggctattagaagctgttagcaatggatctaatattgaagcaagaatgaatatgttaacagcagctagtatgggctcaactgcatttcaaaaaggactaggagcaattcattctctaagtcaccctgtcaatgcattaaataatattcatcacggtttatctaatgcaatatttatgccttacgtgttaactttcaacaaagatgtaattgaaaataagataattaaaatttgtgactatttagaacttaaagacagatcttttgatggttttgttaactgggttttagatttaagaaaaaaacttgatatgcctcataaattatcagaagtgattgatgaaaaagattttgatattgatagattatcaaaaatggctttagcagacccatctactggaggaaatccaaaaaaattaactgaggatgatatgaggataatgtaccagaacagtatgacaggtgaattgtttaaatga

SEQ ID NO: 39836 - protein, 388 aa, Candidatus Pelagibacter ubique HTCC1062
MQKYNWNYPTTMWVGENRINDVASACKNLNIKKPLLVTDNGLAQSVIVKNTLSILKEGGIIAALYSNVVGNPTGTNVNEGADYYKKNNCDGVIAFGGGSGLDVGKAVAFMSGQNLPIWDFEDVGDNWTKANSDKIAPIIAVPTTAGTGSETGRASVILNEETGVKNIIFHPKFLPSIVILDPILTVGLPAKMTAATGMDALAHNLEAYCAPGYHPMADGIALEGMRLIDKWLLEAVSNGSNIEARMNMLTAASMGSTAFQKGLGAIHSLSHPVNALNNIHHGLSNAIFMPYVLTFNKDVIENKIIKICDYLELKDRSFDGFVNWVLDLRKKLDMPHKLSEVIDEKDFDIDRLSKMALADPSTGGNPKKLTEDDMRIMYQNSMTGELFK

SEQ ID NO: 39837 - DNA, 1161 bp, Colwellia psychrerythraea 34H
  CDS (1)..(1161): transl_table=11
atgtctactcaagttattctgccacgtattatgcaggtgggtgaaaacgcaagtcaggaaatagccaacgtattagttagtattggctgtacccgaccattgattattactgacaagatgatggtgggattgggctacgctcgtcgaattcaagtcagtttaggcgcacatcatattcccgcccatatcttcgacgataccgtgccagagcctacagttgaatctattcaagcgggtgttgataaggcacgagagggtaattacgattgtattatcgcccttggtggtggaagtccaatcgatagtgctaaagccattgctatcttggccaaacatggtggtgtgatgcaagattaccgttttcctcgtatggttatagagcaaggcttacctgtcattgccgtacctactacggcggggactggatctgaagtcactaaatttaccatcattaccgatgaaaaaaacgacgaaaagatgctgtgtgtcggcattggcttcatgcccgttgcagcattggtggattataaattaaccattagtttgcctcctaggaccactgccgatactggaatcgatgccttgacccatgcaattgaagcgtatgtgagtaaaaaagcaaacccatatagtgatagtcaggcaattgctgcgattaaattgattggacctaatttgagaaaggtctatcacagcggcgaagatcaagatgctcgtgaagctatgatgctgggttcgaccttagctggtattgcattctctaacgcatcggtggcattagtgcatggtatgagtcgacctattggtgccttttttcatgtacctcatggtctctcaaatgcgatgttattgcccagtgttaccgctttttctattcctgcggcaccagcgcgttatgcggattgtgctcgggcgatgggtattgcagctgagcaagatagcaatgaagttgccaatcagaaattattaatcgagcttcgttcactaaatgaagaattagcagtaccaacgccacaggaatttggtattaagcgcgatgagttttttgaggtgtgtcaaacaatggctgaacaagcattagcttcaggctcaccgagtaataaccctattgagccatctatcaacgaaattatcagtatttaccaggggctatgggattaa

SEQ ID NO: 39838 - protein, 386 aa, Colwellia psychrerythraea 34H
MSTQVILPRIMQVGENASQEIANVLVSIGCTRPLIITDKMMVGLGYARRIQVSLGAHHIPAHIFDDTVPEPTVESIQAGVDKAREGNYDCIIALGGGSPIDSAKAIAILAKHGGVMQDYRFPRMVIEQGLPVIAVPTTAGTGSEVTKFTIITDEKNDEKMLCVGIGFMPVAALVDYKLTISLPPRTTADTGIDALTHAIEAYVSKKANPYSDSQAIAAIKLIGPNLRKVYHSGEDQDAREAMMLGSTLAGIAFSNASVALVHGMSRPIGAFFHVPHGLSNAMLLPSVTAFSIPAAPARYADCARAMGIAAEQDSNEVANQKLLIELRSLNEELAVPTPQEFGIKRDEFFEVCQTMAEQALASGSPSNNPIEPSINEIISIYQGLWD

SEQ ID NO: 39839 - DNA, 1155 bp, Pseudomonas syringae pv. phaseolicola 1448A
  CDS (1)..(1155): transl_table=11
atgcacagcaacgactggcactacccgacttcaatccgtgcaggcgctggacgcgtcaatgaactggtcgacgcctgccggaagaccggcataaaacggccgttactgattaccgacagctttctcggcagcaccgatatgatcgccagcgccgtggaggattgccgcagccaattaggccattgcggcctgtttgaccgagtcaagggtaacccgaccggcaccaacgtcgccgagggcctgcacgcctacagaaccggtggctacgacggcgtcatcgcgtttggcggcggctcggcgctggacgctgccaaagcggtggcgctgatgtcaggccagacccgcccgttgtgggatttcgaagacatcggccagaaccacctgcgcgccgatccagacggtattgcgccagtagttgcgctgccgacgacggctggcaccggctctgaagtggggcgtgcgtcggtgattaccgatgaacaggcacaggtcaagcgcaccatcctgcacattcgcatgatgccgcgcattgcgattctggatgccacgctgaccctgaacctgccaacgcacctgactgccgcgacgggtgcggacgccttgactcactgcatggaatcctggtgttcaccggcctggcacccgatggccgaagcggtgtcggtcaagggcatgcagatgatcaaggaatatttgcctcgggttgttgctgacggccaggacctggaggcgcggcagcagatgctggtggcctccagcctgggtgccgccgcgtttcagcgcggtctgggtggcgtacacgcgattgctcagagcctgggggcgctctacgaccagcatcatggtttactgaatgcgattctgctgccctacgtgctggaggccaatcgctcggtgctgctgaagcaaatggatgatctggcggtttacctgcggttgcccacgcccggttttaccggggtaatggactggttactggcgctacgcgagcagatcggcattgcgcatacgctgggcgaaataggtatcgacgatcgcgacgccgagcgggtcggacgcatggcatttgccgacggctgctcgcacaccaatccgattcgtcattcggccgaggcgtatgcgcagatcttcagccgtgcagtgaagggcctgtga

SEQ ID NO: 39840 - protein, 384 aa, Pseudomonas syringae pv. phaseolicola 1448A
MHSNDWHYPTSIRAGAGRVNELVDACRKTGIKRPLLITDSFLGSTDMIASAVEDCRSQLGHCGLFDRVKGNPTGTNVAEGLHAYRTGGYDGVIAFGGGSALDAAKAVALMSGQTRPLWDFEDIGQNHLRADPDGIAPVVALPTTAGTGSEVGRASVITDEQAQVKRTILHIRMMPRIAILDATLTLNLPTHLTAATGADALTHCMESWCSPAWHPMAEAVSVKGMQMIKEYLPRVVADGQDLEARQQMLVASSLGAAAFQRGLGGVHAIAQSLGALYDQHHGLLNAILLPYVLEANRSVLLKQMDDLAVYLRLPTPGFTGVMDWLLALREQIGIAHTLGEIGIDDRDAERVGRMAFADGCSHTNPIRHSAEAYAQIFSRAVKGL

SEQ ID NO: 39841 - DNA, 1149 bp, Pseudomonas syringae pv. phaseolicola 1448A
  CDS (1)..(1149): transl_table=11
atgatcagcacctttttcatccccgcagtgaacatcatcggcactggctgcattgatgaagccatgctcgccattcgcaaatacggatttctcaaggcgctgatcgtgaccgacgcagggctggccaaggccggtgtggccagtcaggtcgcggggctgttggtggagcagggcatcgactcggtggtgtatgacggtgccaaacccaacccgaccatcgccaacgtcgagaacggtctggccttgctgcgggaacgccagtgtgatttcgtgatttctctgggcggcggttcacctcacgactgcgccaagggcattgccctgtgcgccagtaacggtgggcatatcagcgactatgaaggcgtcgaccgttcggcaaaaccgcagttgccgctgatcgcgatcaacaccaccgccggaaccgccagcgaaatgacccgcttctgcatcattaccgacgaagcgcgccacgtaaaaatggccatcattgaccgtaacgtgacgccactgttatccgtaaacgacccgaacatgatgattgccatgcccaagtcactgaccgctgccaccggtatggatgccttgactcacgcgatagaggcctatgtctcgacggctgccaatccgatcacggatgcctgcgcgttgcaggccatggcactgattgccaacaatctgcgcgacgccttcaccaatggagcgaacattactgcacgcgagaacatggcctacgcacagtttctggccggcatggcgttcaacaacgcatcattgggctatgtacacgccatggcgcatcaactgggcggcttctatgatttgccgcacggtgtgtgcaacgccgtattgctgcctcatgttcagcgtttcaacgccagcgtcagcgctgcgcgcctgactgatgttgcgcatgcgatgggctgcaatattcgtggtctttctccgcaagaaggtgctcaggcggcaatcgaggccattcgcgcactgtcggctgccgtggaaatcccggcggggctggcggtgcttggcgtcaaggaagaggatttcccgatcctggccaccaatgccctgaaagatgcgtgcggtctgaccaatccgcgtcgtgccgatcttgagcagattcaggagatatttcgtcaggcaatgtga

SEQ ID NO: 39842 - protein, 382 aa, Pseudomonas syringae pv. phaseolicola 1448A
MISTFFIPAVNIIGTGCIDEAMLAIRKYGFLKALIVTDAGLAKAGVASQVAGLLVEQGIDSVVYDGAKPNPTIANVENGLALLRERQCDFVISLGGGSPHDCAKGIALCASNGGHISDYEGVDRSAKPQLPLIAINTTAGTASEMTRFCIITDEARHVKMAIIDRNVTPLLSVNDPNMMIAMPKSLTAATGMDALTHAIEAYVSTAANPITDACALQAMALIANNLRDAFTNGANITARENMAYAQFLAGMAFNNASLGYVHAMAHQLGGFYDLPHGVCNAVLLPHVQRFNASVSAARLTDVAHAMGCNIRGLSPQEGAQAAIEAIRALSAAVEIPAGLAVLGVKEEDFPILATNALKDACGLTNPRRADLEQIQEIFRQAM

SEQ ID NO: 39843 - DNA, 2643 bp, Streptococcus pyogenes MGAS6180
  CDS (1)..(2643): transl_table=11
atgactgaaggacataatactgttgaaacaacctctgtttctgtgacaattaatgctcttgttcaaaaaggtttagctgctcttgaagagatgcgtaagcttgaccaagaacaagttgattatatcgtagccaaagcttctgttgctgccttggatgctcacggtgaacttgctaaacatgcttatgaagaaacaggtcgcggtgtctttgaagataaagcaacaaaaaatctatttgcttgtgagcatgtggttaataacatgcgccatcaaaaaacagtaggaattattgaagaagatgatgtgacaggtttgacattaattgctgagccggtgggtgttatctgtgggattacacccacaactaacccaacttcaacagctatctttaaatctttgatctcgttaaaaacacgtaatccaattatttttgcctttcacccatcagcacaagaatcatcagcacatgccgctcgtattgttcgtgatgctgctattgccgctggtgctcctgaaaattgtgtgcagtgggttgaaacaccatcacttgaagcaacaaatgctttgatgaatcatgacggcattgccactatccttgcgacaggtggaaatgcgatggttaaagcggcatactcatgtgggaaacctgcccttggggtaggtgctggtaacgttccagcttatgttgaaaaatcagctaatatccgtcaagccgctcatgatattgtgatgtctaaatcatttgataatggtatggtctgtgcctctgaacaagctgttatcatcgataaagaaatctacgacgattttgtagcagaattcaaatcttaccatacttattttgtaaataaaaaagaaaaagcccttcttgaagaattctgttttggtgccaaagcaaatagcaaaaactgtgctggtgcaaaattaaatccaaatattgtaggaaaaccagctacttggattgcagaacaagctggatttactgttccagaaggaaccaatattcttgctgcagaatgtaaagaagtttcagaaaatgagcctttaacacgtgaaaaattatctccagtcattgctgttttgaaatctgaatcacgtgaagacggtgttgaaaaagctcgtcaaatggttgaatttaatggactcggtcactcagctgccattcatacagcagatgcagagttggcaaaagaatttggaactagaatccgtgctatccgcgtcatctggaattcaccttctacatttggtggtatcggggatgtttacaatgctttcttgccatcattgactcttggttgtggttcgtatggacgtaacgcagttggtgataatgttagtgctataaatctcttgaacatcaaaaaagtaggaagacgtagaaataatatgcaatggtttaaagttccttcaaaaacatacttcgaacgtgattcaattcaatatttgcaaaaatgtcgtgacgttgaacgtgtcatgattgttacagatcacgctatggttgagcttggtttcttggatcgtatcattgaacaacttgatcttcgtcgcaataaagttgtttatcagatctttgctgaagtagaaccagatccagacattacaactgttatgaaaggtactgaattaatgcgtaccttcaaaccagacaccattattgcccttggcgggggatctcctatggatgcagccaaagttatgtggctcttctacgagcaaccagaagttgatttccatgacctcgttcaaaaattcatggatatccgcaaacgtgcgttcaaattcccagaacttggtaagaaaacaaaatttgttgctatcccaacaacttctggaacaggttcagaggtgacaccatttgccgttatctctgacaaagcaaataatcgtaaatatccaatcgctgattactcattaacaccaactgtagccattgttgacccagctttggtattgactgttccaggctttattgctgctgatactggtatggacgttttgacacacgcaaccgaagcttacgtgtcacaaatggccaatgactttacggatggtttagctcttcaagccattaaaattgtttttgataatcttgaaaaatcagttaaaatagccgattttgaagcacgtgaaaagatgcacaatgcgtcaactatggcaggtatggctttcgccaatgcattcttaggtatttctcactcaatggcgcataaaattggcgcacaattccataccgtacacggacgtacaaatgcaattcttttgccgtatgttatccgctataatggaactcgtccagctaaaacggcgacatggcctaagtataattactaccgtgcggatgaaaaataccaagacattgcgaaattgttagggcttccagcttctacaccagaagaagcagtggaatcttatgcgaaagctgtttatgatctgggttgccgagttggtattcaaatgaacttcaaagctcaaggtatcgacgaaaatgaatggaaagaacattctcgtgaattggcttaccttgcttatgaagaccaatgttcacctgctaacccacgtcttccaatggttgatcacatgcaagaaattattgaagatgcttactatggttatgctgaacgtccaggacgacgtaagtga

SEQ ID NO: 39844 - protein, 880 aa, Streptococcus pyogenes MGAS6180
MTEGHNTVETTSVSVTINALVQKGLAALEEMRKLDQEQVDYIVAKASVAALDAHGELAKHAYEETGRGVFEDKATKNLFACEHVVNNMRHQKTVGIIEEDDVTGLTLIAEPVGVICGITPTTNPTSTAIFKSLISLKTRNPIIFAFHPSAQESSAHAARIVRDAAIAAGAPENCVQWVETPSLEATNALMNHDGIATILATGGNAMVKAAYSCGKPALGVGAGNVPAYVEKSANIRQAAHDIVMSKSFDNGMVCASEQAVIIDKEIYDDFVAEFKSYHTYFVNKKEKALLEEFCFGAKANSKNCAGAKLNPNIVGKPATWIAEQAGFTVPEGTNILAAECKEVSENEPLTREKLSPVIAVLKSESREDGVEKARQMVEFNGLGHSAAIHTADAELAKEFGTRIRAIRVIWNSPSTFGGIGDVYNAFLPSLTLGCGSYGRNAVGDNVSAINLLNIKKVGRRRNNMQWFKVPSKTYFERDSIQYLQKCRDVERVMIVTDHAMVELGFLDRIIEQLDLRRNKVVYQIFAEVEPDPDITTVMKGTELMRTFKPDTIIALGGGSPMDAAKVMWLFYEQPEVDFHDLVQKFMDIRKRAFKFPELGKKTKFVAIPTTSGTGSEVTPFAVISDKANNRKYPIADYSLTPTVAIVDPALVLTVPGFIAADTGMDVLTHATEAYVSQMANDFTDGLALQAIKIVFDNLEKSVKIADFEAREKMHNASTMAGMAFANAFLGISHSMAHKIGAQFHTVHGRTNAILLPYVIRYNGTRPAKTATWPKYNYYRADEKYQDIAKLLGLPASTPEEAVESYAKAVYDLGCRVGIQMNFKAQGIDENEWKEHSRELAYLAYEDQCSPANPRLPMVDHMQEIIEDAYYGYAERPGRRK

SEQ ID NO: 39845 - DNA, 2643 bp, Streptococcus pyogenes MGAS5005
  CDS (1)..(2643): transl_table=11
atgactgaaggacataatactgttgaaacaacctctgtttctgtgacaattgatgctcttgttcaaaaaggtttagctgctcttgaagagatgcgtaagcttgaccaagaacaagttgattatatcgtagccaaagcttctgttgctgctttggatgctcacggtgaacttgctaaacatgcttatgaagaaacaggtcgcggtgtctttgaagataaagcaacaaaaaatctatttgcttgtgagcatgtggttaataacatgcgccatcaaaaaacagtaggaattattgaagaagatgatgtgacaggtttgacattaattgctgagccggtgggtgttatctgtgggattacaccaacaactaacccaacttcaacagctatctttaaatctttgatttcgttaaaaacacgtaatccaattatttttgcctttcacccatcagcacaagaatcatcagcacatgccgctcgtattgttcgtgatgctgctattgccgctggtgctcctgaaaattgtgtgcagtgggttgaaacaccatcacttgaagcaacaaatgctttgatgaatcatgacggcattgccactatccttgcgacaggtggaaatgcgatggttaaagcggcatactcatgtgggaaacctgcccttggggtaggtgctggtaacgttccagcttatgttgaaaaatcagctaatatccgtcaagccgctcatgatattgtgatgtctaaatcatttgataatggtatggtctgtgcctctgaacaagctgttatcatcgataaagaaatctatgacgattttgtagcagaattcaaatcttaccatacttattttgtaaataaaaaagaaaaagcccttcttgaagaattctgttttggtgccaaagcaaatagcaaaaactgtgctggtgcaaaattaaatccaaatattgtaggaaaaccagctacttggattgcagaacaagctggatttactgttccagaaggaaccaatattcttgctgcagaatgtaaagaagtttcagaaaatgagcctttaacacgtgaaaaattatctccagtcattgctgttttaaaatctgaatcacgtgaagacggtgttgaaaaagctcgtcaaatggttgaatttaatggactcggtcactcagctgccattcatacagcagatgcagaattggcaaaagaatttggaactagaatccgtgctatccgcgtcatctggaattcaccttctacatttggtggtatcggggatgtttacaatgctttcttaccatcattgactcttggttgtggttcgtatggacgtaacgcagttggtgataacgttagtgctataaatctcttgaacatcaaaaaagtaggaagacgtagaaataatatgcaatggtttaaagttccttcaaaaacatacttcgaacgtgattcaattcaatatttgcaaaaatgtcgtgacgttgaacgtgtcatgattgttacagatcacgctatggttgagcttggtttcttggatcgtatcattgaacaacttgatcttcgtcgcaataaagttgtttatcagatctttgctgaagtagaaccagatccagacattacaactgttatgaaaggtactgaattaatgcgtaccttcaaaccagacaccattattgcccttggcgggggatcccctatggatgcagccaaagttatgtggctcttctacgagcaaccagaagttgatttccatgacctcgttcaaaaattcatggatatccgcaaacgtgcgttcaaattcccagaacttggtaagaaaacaaaatttgttgctatcccaacaacttctggaacaggttcagaggtgacaccatttgccgttatctctgacaaagcaaataatcgtaaatatccaatcgctgattactcattaacaccaactgtagccattgttgacccagctttggtattgactgttccaggctttattgctgctgatactggtatggacgttttgacacacgcaaccgaagcttacgtgtcacaaatggccaatgactttacggatggtttagctcttcaagccattaaaattgtttttgataatcttgaaaaatcagttaaaacagccgattttgaagcacgtgaaaagatgcataatgcgtcaactatggcaggtatggctttcgccaatgcattcttaggtatttctcactcaatggcgcataaaattggcgcacaattccataccgtacacggacgtacaaatgcaattcttttgccgtatgttatccgctataatgggactcgtccagctaaaacggcgacatggcctaagtataattactaccgtgcggatgaaaaataccaagacattgcgaaattgttagggcttccagcttctacaccagaagaagcagtggaatcttatgcgaaagctgtttatgatctgggttgccgagttggtattcaaatgaacttcaaagctcaaggtatcgacgaaaacgaatggaaagaacattctcgtgaattggcttaccttgcttatgaagaccaatgttcacctgctaacccacgtcttccaatggttgatcacatgcaagaaattattgaagatgcttactatggttatgctgaacgtccaggacgacgtaagtga

SEQ ID NO: 39846 - protein, 880 aa, Streptococcus pyogenes MGAS5005
MTEGHNTVETTSVSVTIDALVQKGLAALEEMRKLDQEQVDYIVAKASVAALDAHGELAKHAYEETGRGVFEDKATKNLFACEHVVNNMRHQKTVGIIEEDDVTGLTLIAEPVGVICGITPTTNPTSTAIFKSLISLKTRNPIIFAFHPSAQESSAHAARIVRDAAIAAGAPENCVQWVETPSLEATNALMNHDGIATILATGGNAMVKAAYSCGKPALGVGAGNVPAYVEKSANIRQAAHDIVMSKSFDNGMVCASEQAVIIDKEIYDDFVAEFKSYHTYFVNKKEKALLEEFCFGAKANSKNCAGAKLNPNIVGKPATWIAEQAGFTVPEGTNILAAECKEVSENEPLTREKLSPVIAVLKSESREDGVEKARQMVEFNGLGHSAAIHTADAELAKEFGTRIRAIRVIWNSPSTFGGIGDVYNAFLPSLTLGCGSYGRNAVGDNVSAINLLNIKKVGRRRNNMQWFKVPSKTYFERDSIQYLQKCRDVERVMIVTDHAMVELGFLDRIIEQLDLRRNKVVYQIFAEVEPDPDITTVMKGTELMRTFKPDTIIALGGGSPMDAAKVMWLFYEQPEVDFHDLVQKFMDIRKRAFKFPELGKKTKFVAIPTTSGTGSEVTPFAVISDKANNRKYPIADYSLTPTVAIVDPALVLTVPGFIAADTGMDVLTHATEAYVSQMANDFTDGLALQAIKIVFDNLEKSVKTADFEAREKMHNASTMAGMAFANAFLGISHSMAHKIGAQFHTVHGRTNAILLPYVIRYNGTRPAKTATWPKYNYYRADEKYQDIAKLLGLPASTPEEAVESYAKAVYDLGCRVGIQMNFKAQGIDENEWKEHSRELAYLAYEDQCSPANPRLPMVDHMQEIIEDAYYGYAERPGRRK

SEQ ID NO: 39847 - DNA, 1131 bp, Ralstonia eutropha JMP134
  CDS (1)..(1131): transl_table=11
atggctgtcatcaactacctgactaccgttcacatcgacttcggcgccatccggatgctgggggccgagctgcagcgcctgggcatccagcgaccgctgatcgtcaccgaccggggcatccgcgccgccggtatcgccgacaaggtgctcgacgccctgggcccagattgcacgcccactgtcttcgaggacaccccatccaacccgacggaagccgccgtgtccgccgcgaccggcctttacctcggcaatggctgcgacggcatcgtggccgtgggcggcgggtcgcccatcgacctgggcaaggccaccgcgctgctggcgacccacccggcaccgctgcagacctacgcggcggtggagggcggcgcgagccggatcaccagccgggtcgccccgctggtggccatcccgacgactgcgggtaccggtagcgaagtgggccggggcgctgtcatcgtcatggagtccggccgcaagctcggcctgcttagtccgttcctgctgccgaagctcgccatctgcgaccccgaactcacgctgggattgcctccggccctgaccgccgcgaccggcatggacgccatcgcccactgcatcgagaccttcctggcgccggccatcaacccgcccgccgaggcgatcgccctggacggcctgtgccgcggcgtggccaatatcggcaaggccaccgccgacggctgcgaccgcgacgcgcgctggaacatgatgatggccgccatggaaggcgcgctggccttccagaaggggctgggcgcggtgcatgccctgtcgcacccgctgggcgcggtgcccggcgtctcgttgcaccacggcacgctgaacgccgtgctgctgccggccgtgctgcgcttcaacaagccggcgaccgaagccaagcaggccgcactggtgcaggccatgggcctgcccgccggcgcggacccggctctggccatcagcgaactcaacgcccgtcttggcttgccggctggtctcggcgccatgggtgtgccgcgtgacgtgctggagaacatcgcggtcgccgccacgaaggaccactgccacgccaccaatccccgcactgccacggtcgatgactacctggcgatgctgcaagaatcgtattga

SEQ ID NO: 39848 - protein, 376 aa, Ralstonia eutropha JMP134
MAVINYLTTVHIDFGAIRMLGAELQRLGIQRPLIVTDRGIRAAGIADKVLDALGPDCTPTVFEDTPSNPTEAAVSAATGLYLGNGCDGIVAVGGGSPIDLGKATALLATHPAPLQTYAAVEGGASRITSRVAPLVAIPTTAGTGSEVGRGAVIVMESGRKLGLLSPFLLPKLAICDPELTLGLPPALTAATGMDAIAHCIETFLAPAINPPAEAIALDGLCRGVANIGKATADGCDRDARWNMMMAAMEGALAFQKGLGAVHALSHPLGAVPGVSLHHGTLNAVLLPAVLRFNKPATEAKQAALVQAMGLPAGADPALAISELNARLGLPAGLGAMGVPRDVLENIAVAATKDHCHATNPRTATVDDYLAMLQESY

SEQ ID NO: 39849 - DNA, 1149 bp, Ralstonia eutropha JMP134
  CDS (1)..(1149): transl_table=11
atggcctttatctactatctgacgcacattcatctcgactttggcgccgtgagcctgctaaaggccgaatgtgaacgcatcggcatccgccgcccgctgctagtgacggacaagggcgtggtcgcagccggcgtggcacagcgagcgatcgacgcgatgcagggcctgccggtggcggtgtttgacgagacgccgtcgaatccgaccgaagccatggtgcgcaaggccgccgagcagtaccgtgacgcaggctgcgacgggctggtggcggtcggcggcggttcgtcgatcgatctcgccaagggcatcgcgatcatcgccacgcacccgggcgaactgacgacctacgccaccatcgaaggcggcagcacgaagatcaccgagcgcgccgcgccgctgatcgccgtgccgaccacatcgggcaccggcagcgaagtggcgcgcggcgcgatcatcatcctcgaagacgggcgcaagctcggcttccattcgtggcacctgctgccgaaatcggccatctgcgacccggaactcacgctggggctgcctgcgggcctgaccgccgcgaccggcatggacgccattgcccattgcgtcgagaccttcctggcacctgccttcaacccgcccgccgacggcattgcgctggatggcctggagcgaggctgggcccacatcgaacgcgccacgcgcgacggcaaggaccgcgacgcgcggctcaacatgatgagcgcgtcgatgcagggcgccatggcgttccagaagggccttggctgcgtgcattcgctgtcgcacccgctcggcggactgaagatcgacggcaagaccggcctgcaccacggcaccctcaacgcggtggtcatgcccgcggtgctgcgcttcaacgccgacgcgcccaccgtggtgcgcgacgaccgctacgcgcgcctgcgccgcgccatgcacctgcccgaaggcgccgacgtcgcccaggccgtgcacgacatgacggcccggctggggctgccgaccgggctgcgccagatgggcgtcaccgaagacatgttcgacaaggtgattgcgggcgccctgctcgaccactgccacaagaccaatccaaaagaggccagcgcggcggattatcggcgtatgcttggagcgtccatgtag

SEQ ID NO: 39850 - protein, 382 aa, Ralstonia eutropha JMP134
MAFIYYLTHIHLDFGAVSLLKAECERIGIRRPLLVTDKGVVAAGVAQRAIDAMQGLPVAVFDETPSNPTEAMVRKAAEQYRDAGCDGLVAVGGGSSIDLAKGIAIIATHPGELTTYATIEGGSTKITERAAPLIAVPTTSGTGSEVARGAIIILEDGRKLGFHSWHLLPKSAICDPELTLGLPAGLTAATGMDAIAHCVETFLAPAFNPPADGIALDGLERGWAHIERATRDGKDRDARLNMMSASMQGAMAFQKGLGCVHSLSHPLGGLKIDGKTGLHHGTLNAVVMPAVLRFNADAPTVVRDDRYARLRRAMHLPEGADVAQAVHDMTARLGLPTGLRQMGVTEDMFDKVIAGALLDHCHKTNPKEASAADYRRMLGASM

SEQ ID NO: 39851 - DNA, 2676 bp, Shigella sonnei Ss046
  CDS (1)..(2676): transl_table=11
atggctgttactaatgtcgctgaacttaacgcactcgtagagcgtgtaaaaaaagcccagcgtgaatatgccagtttcactcaagagcaagtagacaaaatcttccgcgccgccgctctggctgctgcagatgctcgaatcccactcgcgaaaatggccgttgccgaatccggcatgggtatcgtcgaagataaagtgatcaaaaaccactttgcttctgaatatatctacaacgcctataaagatgaaaaaacctgtggtgttctgtctgaagacgacacttttggtaccatcactatcgctgaaccaatcggtattatttgcggtatcgttccgaccactaacccgacttcaactgctatcttcaaatcgctgatcagtctgaagacccgtaacgccattatcttctccccgcacccgcgtgcaaaagatgccaccaacaaagcggctgatatcgttctgcaggctgctatcgctgccggtgctccgaaagatctgatcggctggatcgatcaaccttctgttgaactgtctaacgcactgatgcaccacccagacatcaacctgatcctcgcgactggtggtccgggcatggttaaagccgcatacagctccggtaaaccagctatcggtgtaggcgcgggcaacactccagttgttatcgatgaaactgctgatatcaaacgtgcagttgcatctgtactgatgtccaaaaccttcgacaacggcgtaatctgtgcttctgaacagtctgttgttgttgttgactctgtttatgacgctgtacgtgaacgttttgcaacccacggcggctatctgttgcagggtaaagagctgaaagctgttcaggatgttatcctgaaaaacggtgcgctgaacgcggctatcgttggtcagccagcctataaaattgctgaactggcaggcttctctgtaccagaaaacaccaagattctgatcggtgaagtgaccgttgttgatgaaagcgaaccgttcgcacatgaaaaactgtccccgactctggcaatgtaccgcgctaaagatttcgaagacgcggtagaaaaagcagagaaactggttgctatgggcggtatcggtcatacctcttgcctgtacactgaccaggataaccaaccggctcgcgtttcttacttcggtcagaaaatgaaaacggctcgtatcctgattaacaccccagcgtctcagggtggtatcggtgacctgtataacttcaaactcgcaccttccctgactctgggttgtggttcctgggggggtaactccatctctgaaaacgttggtccgaaacacctgatcaacaagaaaaccgttgctaagcgagctgaaaacatgttgtggcacaaacttccgaaatctatctacttccgccgtggctccctgccaatcgcgctggatgaagtgattactgatggccacaaacgtgcgctcatcgtgactgaccgcttcctgttcaacaatggttatgctgatcagatcacttccgtactgaaagcagcaggcgttgaaactgaagtcttcttcgaagtagaagcggacccgaccctgagcatcgttcgtaaaggtgcagaactggcaaactccttcaaaccagacgtgattatcgcgctgggtggtggttccccgatggacgccgcgaagattatgtgggttatgtacgaacatccggaaactcacttcgaagagctggcgctgcgctttatggatatccgtaaacgtatctacaagttcccgaaaatgggcgtgaaagcgaaaatgatcgctgtcaccaccacttctggtacaggttctgaagtcactccgtttgcggttgtaactgacgacgctactggtcagaaatatccgctggcagactatgcgctgactccggatatggcgattgtcgacgccaacctggttatggacatgccgaagtccctgtgtgctttcggtggtctggacgcagtaactcacgccatggaagcttatgtttctgtactggcatctgagttctctgatggtcaggctctgcaggcactgaaactgctgaaagaatatctgccagcgtcctaccacgaagggtctaaaaatccggtagcgcgtgaacgtgttcacagtgcagcaactatcgcgggtatcgcatttgcgaacgccttcctgggtgtatgtcactcaatggcgcacaaactgggttcccagttccatattccgcacggtctggcaaacgccctgctgatttgtaacgttattcgctacaatgcgaacgacaacccgaccaagcagactgcattcagccagtatgaccgtccgcaggctcgccgtcgttatgctgaaattgccgaccacttgggtctgagcgcaccgggcgaccgtactgctgctaagatcgagaaactgctggcatggctggaaacgctgaaagctgaactgggtattccgaaatctatccgtgaagctggcgttcaggaagcagacttcctggcgaacgtggataaactgtctgaagatgcattcgatgaccagtgcaccggcgctaacccgcgttacccgctgatctccgagctgaaacagatcctgctggatacctactacggtcgtgattatgtagaaggtgaaactgcagcgaaaaaagaagccgctccggctaaagctgagaaaaaagcgaaaaaatccgcttaa

SEQ ID NO: 39852 - protein, 891 aa, Shigella sonnei Ss046
MAVTNVAELNALVERVKKAQREYASFTQEQVDKIFRAAALAAADARIPLAKMAVAESGMGIVEDKVIKNHFASEYIYNAYKDEKTCGVLSEDDTFGTITIAEPIGIICGIVPTTNPTSTAIFKSLISLKTRNAIIFSPHPRAKDATNKAADIVLQAAIAAGAPKDLIGWIDQPSVELSNALMHHPDINLILATGGPGMVKAAYSSGKPAIGVGAGNTPVVIDETADIKRAVASVLMSKTFDNGVICASEQSVVVVDSVYDAVRERFATHGGYLLQGKELKAVQDVILKNGALNAAIVGQPAYKIAELAGFSVPENTKILIGEVTVVDESEPFAHEKLSPTLAMYRAKDFEDAVEKAEKLVAMGGIGHTSCLYTDQDNQPARVSYFGQKMKTARILINTPASQGGIGDLYNFKLAPSLTLGCGSWGGNSISENVGPKHLINKKTVAKRAENMLWHKLPKSIYFRRGSLPIALDEVITDGHKRALIVTDRFLFNNGYADQITSVLKAAGVETEVFFEVEADPTLSIVRKGAELANSFKPDVIIALGGGSPMDAAKIMWVMYEHPETHFEELALRFMDIRKRIYKFPKMGVKAKMIAVTTTSGTGSEVTPFAVVTDDATGQKYPLADYALTPDMAIVDANLVMDMPKSLCAFGGLDAVTHAMEAYVSVLASEFSDGQALQALKLLKEYLPASYHEGSKNPVARERVHSAATIAGIAFANAFLGVCHSMAHKLGSQFHIPHGLANALLICNVIRYNANDNPTKQTAFSQYDRPQARRRYAEIADHLGLSAPGDRTAAKIEKLLAWLETLKAELGIPKSIREAGVQEADFLANVDKLSEDAFDDQCTGANPRYPLISELKQILLDTYYGRDYVEGETAAKKEAAPAKAEKKAKKSA

SEQ ID NO: 39853 - DNA, 1215 bp, Shigella sonnei Ss046
  CDS (1)..(1215): transl_table=11
gtgggcgagagaaagcggaggggctatatgcaaaatgaattgcagaccgcgctctttcaggcgttcgataccctgaatctgcaacgggtaaaaacatttagcgttccaccggtgacgctttgcggtccgggctcggtgagcagttgcggacagcaagcgcaaacgcgtgggctgaaacatctgttcgtgatggcagacagctttttgcatcaggcagggatgaccgccgggctgacgcgcagcctggctgttaaaggcatcgccatgacgctctggccatgtccggtgggcgaaccgtgcatcaccgacgtgtgtgcagccgtggcgcagttgcgtgagtcaggctgtgatggggtgatcgcatttggcggcggctcggtgctggatgcggcgaaagccgtggcgttgctggtgacgaacccggatagcacgctggcagagatgtcagaaaccagcgttctgcaaccgcgcttgccgctgattgccattccaacgaccgccggaaccggctctgaaaccaccaatgtaacggtgattatcgacgcggtgagcgggcgcaagcaggtgttagcccatgcctcgctgatgccggatgtggcgattctcgacgccgcgttgaccgaaggtgtgccgtcgcatgtcacggcgatgaccggcattgatgcgttaacccatgccattgaagcatacagcgccctgaacgctacaccgtttaccgacagtctggcgattggtgccattgcgatgattggcaaatcgctgccgaaagcggtgggctacggtcacgaccttgccgcgcgcgagagcatgttgctggcttcatgtatggcgggaatggcgttttccagtgcgggtcttgggttgtgccacgcgatggcgcatcagccgggcgcggcgctgcatattccacacggtctggcgaacgccatgttgctgccaacggtgatggaatttaaccggatggtttgtcgtgaacgctttagtcagattggtcgggcactgcgaactaaaaaatccgacgatcgtgacgctattaacgcggtaagtgagctgattgcggaagttgggattggtaaacgactgggcgatgttggtgcgacatctgcgcattacggcgcatgggcgcaggccgcgctggaagatatttgtctgcgcagtaacccgcgtaccgccagcctggaacagattgtcggactgtacgcggcggcgcaataa

SEQ ID NO: 39854 - protein, 404 aa, Shigella sonnei Ss046
MGERKRRGYMQNELQTALFQAFDTLNLQRVKTFSVPPVTLCGPGSVSSCGQQAQTRGLKHLFVMADSFLHQAGMTAGLTRSLAVKGIAMTLWPCPVGEPCITDVCAAVAQLRESGCDGVIAFGGGSVLDAAKAVALLVTNPDSTLAEMSETSVLQPRLPLIAIPTTAGTGSETTNVTVIIDAVSGRKQVLAHASLMPDVAILDAALTEGVPSHVTAMTGIDALTHAIEAYSALNATPFTDSLAIGAIAMIGKSLPKAVGYGHDLAARESMLLASCMAGMAFSSAGLGLCHAMAHQPGAALHIPHGLANAMLLPTVMEFNRMVCRERFSQIGRALRTKKSDDRDAINAVSELIAEVGIGKRLGDVGATSAHYGAWAQAALEDICLRSNPRTASLEQIVGLYAAAQ

SEQ ID NO: 39855 - DNA, 1152 bp, Bifidobacterium longum DJO10A
  CDS (1)..(1152)
atggtgtaccgcatgattttcaaccagactgcatacttcggacgtggcgcgatcaaggaaatcccggccgtcgccaagcagcacggcttcaccaaggcatttatcgtcactgatccggtactgctggagaccggcaccgccgagaaggtcaccaaggttctggatgaggccggcctgccgtacgaggtgttctccaacgtcaagccgaacccgccggtcgagtgcatcaaggacggcgtcgccaagttcgccgactccggtgcggacttcctgatcggcctgggcggcggctccccgcaagacacctgcaagggcatcggcatcatcaccgccaacccggagttcgccgacgtgctctccctggaaggcgtcgcggataccaagaacccgtccgtcccgatcttcggcgtgccgaccaccgccggtaccgcttccgagacgaccatcaactacgtggtcaccgataccgccaacaagcgcaagttcgtggccgtcgacccgcacgacatcccgatcgtcgccttcgtggacccggatctgaccgactccatgccgcgcggcctgaaggtcgccaccggacttgacgccctgacccacgccatcgagggttacattaccccgggtgcctggagcctgtccgactgcctgtccatgcagaccatccgcatgattgccaagaacctggccaagtccgccgacggcgacattccggccggcgagcagatggcctacgcctcctacatcaccggtatggcctactccaacgtgggcctcggtctggtgcacggcatggctcacccgctgggcggccgtctgggcgtggcccacggtgtggccaacggtattctgctggccccggtcatggaatacaacaaggacttcaccggtgagaagtaccgcgacatcgccgatgcgttcggtgttgaggacgcctacaccggcgacctggagaaggtgcgcgaagaggccgtgcaggccgtccacaagctgaccgtggatctgaagaacccgaccacgatttccgaagtgggcgccaccgaggccgaccttgagccgctggctcacgacgccttcaacgacgtgtgcacccccggcaacccgcgtcaggcaaccgaagaggacatcctcgcgatttacaagtcgctgatgtga

SEQ ID NO: 39856 - protein, 383 aa, Bifidobacterium longum DJO10A
MVYRMIFNQTAYFGRGAIKEIPAVAKQHGFTKAFIVTDPVLLETGTAEKVTKVLDEAGLPYEVFSNVKPNPPVECIKDGVAKFADSGADFLIGLGGGSPQDTCKGIGIITANPEFADVLSLEGVADTKNPSVPIFGVPTTAGTASETTINYVVTDTANKRKFVAVDPHDIPIVAFVDPDLTDSMPRGLKVATGLDALTHAIEGYITPGAWSLSDCLSMQTIRMIAKNLAKSADGDIPAGEQMAYASYITGMAYSNVGLGLVHGMAHPLGGRLGVAHGVANGILLAPVMEYNKDFTGEKYRDIADAFGVEDAYTGDLEKVREEAVQAVHKLTVDLKNPTTISEVGATEADLEPLAHDAFNDVCTPGNPRQATEEDILAIYKSLM

SEQ ID NO: 39857 - DNA, 1152 bp, Actinobacillus pleuropneumoniae serovar 1 str. 4074
  CDS (1)..(1152)
atgtcaaatcgtttgattctgaatgaaaccagttaccacggtaaaggcgcgattcagcatattgtgtatgaagtcaaaagtcgcagttttaagaaagcgttagtggttaccgataaagatttaattaagtataacgtcgcttctaaagtaaccgatttattggatacggcaggtttaccgtatgaaatttttgatgaagttaaagcgaatccgtcggtcgatgtgatcaaagccggtgtagaaaaatttaaagcatccggtgcggattatctgattgccatcggtggcggatccccgattgatagtgcgaaagcaatcgggattatcatcaataaccctgaatttagcgatgtattatcgttagaaggtgtggcaccgacgcatcaaaaatgtattccgatcattgcagtaccaaccaccgctggtacggcagcagaggttacaattaattacgtgattaccgatgaagagaaaaaacgtaagttcgtttgtgtggatgtgcacgacgtaccggcggttgcggtggttgatccggatatgatgtcctctatgccgaaaggcttaaccgcggcaaccggtatggatgctttaacccatgcgattgaaggttatatcactaaagcggcgtgggaattaaccgatgcgttacacttaaaagcgatcgaaattattgctcgtagcttacgcagtgcggtggaaaatgatccgcaagggcgtgagggaatggctctcggtcaatatgttgccggtatgggtttctcaaatgtcggtttgggtgtagtacacggaatggcacatcctctttctgcttattacgatacgccgcacggtatcgccaacgcggtgttattaccttatgtgatggaatttaataaaaattacacgggtgagaaatatcgtgaaatcgcacgcgcgatgggcgtgaaaggcgtggatgaaatggctcaagcggaataccgagatgcagcagtagcagcggtaaaacagcttgcgatagatgtcggtattccggaaaaactttcgcaaatcggagtaaaagaagaagatttggttgcgctttctattgatgcgtttaacgacgtatgtacgccgggaaatccgagagagtgtacggcggaagaaattttggaagtatataaattagcttattaa

SEQ ID NO: 39858 - protein, 383 aa, Actinobacillus pleuropneumoniae serovar 1 str. 4074
MSNRLILNETSYHGKGAIQHIVYEVKSRSFKKALVVTDKDLIKYNVASKVTDLLDTAGLPYEIFDEVKANPSVDVIKAGVEKFKASGADYLIAIGGGSPIDSAKAIGIIINNPEFSDVLSLEGVAPTHQKCIPIIAVPTTAGTAAEVTINYVITDEEKKRKFVCVDVHDVPAVAVVDPDMMSSMPKGLTAATGMDALTHAIEGYITKAAWELTDALHLKAIEIIARSLRSAVENDPQGREGMALGQYVAGMGFSNVGLGVVHGMAHPLSAYYDTPHGIANAVLLPYVMEFNKNYTGEKYREIARAMGVKGVDEMAQAEYRDAAVAAVKQLAIDVGIPEKLSQIGVKEEDLVALSIDAFNDVCTPGNPRECTAEEILEVYKLAY

SEQ ID NO: 39859 - DNA, 1170 bp, Pediococcus pentosaceus ATCC 25745
  CDS (1)..(1170)
atgaaagaaaattttgatttccttatgcctagtgtcaacttctttggctctggagttattgcaaagattggtgaccgcgctaagatggtcaatatgtctaaagtattgatcgttactgataaatttttggaaaaaatggaaaatggacccgttgaacaaacccttcgttcacttgatcaagcgggtgtcgattacgttatttacaacggagtagagcctaatcctaaagttagaaatatccaagaagcaaaacaagtttatttggataatgactgtgatggaattatcactattggtggtggttcagctcatgatgctggaaaaggtactggtattattttgacgaatggcgacgatatcaccaaacttgctggaatcgaaacgctcgaaaatgcacttccaccattgatcgcggttaatactactgcaggaactgcttcagaattaactcgtcactgcgttattaccaacgaagaaacgcatcttaagttcgtagtggtttcgtggcgtaatgttcccctcgtatcatttaatgatccaaaattaatgctcggggttccacctgctctaactgctgcaactgggatggacacatttgtccaagccattgaaccttacgtttctactaaccgcaacgatattactgatggtcaatgtctccaagctatcaagttagtggaagaaagccttcgtgaagctgtatctaacggtgaaaacctagaagctagaactaagatggtagaagctgaaatgttgggagggatggctttcaataatgccgatcttggttacgtacatgctatggcccatcaattaggtggacaatacgacgctcctcatggcgtttgctgtgctatcctattaccaattgtagaacgcttcaacttagttgcttgccctgatcgtttcgcagacttagctgtcgccatgggtgaaaatatcgacggcctttccattagagctgccgctgataaagctattgatgccatgcaacaacttaacgacgatgttggtattccaagaagtatcaaagatttgggtgctgatcctaaagatttcgaactaatggctgaaaatgctttgaaggatggcaatgccttctccaacccacgcaaagctactaagcaacaaattgtggaacttttccaacaagcttacgacgcaaaataa

SEQ ID NO: 39860 - protein, 389 aa, Pediococcus pentosaceus ATCC 25745
MKENFDFLMPSVNFFGSGVIAKIGDRAKMVNMSKVLIVTDKFLEKMENGPVEQTLRSLDQAGVDYVIYNGVEPNPKVRNIQEAKQVYLDNDCDGIITIGGGSAHDAGKGTGIILTNGDDITKLAGIETLENALPPLIAVNTTAGTASELTRHCVITNEETHLKFVVVSWRNVPLVSFNDPKLMLGVPPALTAATGMDTFVQAIEPYVSTNRNDITDGQCLQAIKLVEESLREAVSNGENLEARTKMVEAEMLGGMAFNNADLGYVHAMAHQLGGQYDAPHGVCCAILLPIVERFNLVACPDRFADLAVAMGENIDGLSIRAAADKAIDAMQQLNDDVGIPRSIKDLGADPKDFELMAENALKDGNAFSNPRKATKQQIVELFQQAYDAK

SEQ ID NO: 39861 - DNA, 1149 bp, Shewanella baltica OS155
  CDS (1)..(1149): transl_table=11
atggctgctaaattttttattccttctgtcaacgtgttaggccaaggcgcagtggatgacgctatcggtgacatcaaaaccttaggctttaaacacgcactcatagtgacagacaaacccttagtcaaaattggcttagtcggtgaagtggccgaaaaacttggtcaaaatggcattacctccaccatctatgatggcgtacaacctaacccaaccgtaacgaacgtcgaagcaggtttagccctgttaaaagccaacaagtgtgactttgtgatttcactcggtggcggctcaccccatgattgcgccaaaggtatcgcccttgttgccaccaatggcggcagcattaaggattacgaagggttagatcaatccgcaaaaccacagttgccattagtggctattaatacgacggcaggtactgccagtgaaatgacgcgcttctgtatcattaccgacgaagcccgccacattaaaatggcgattgtcgataagcacaccacgcctttgctgtcggtcaatgaccctgaactcatgctgaaaaagcctgcgagcctcacggccgcaaccggtatggatgcactgactcacgcggttgaagcctatgtgtctattgctgccaacccgatcaccgacgcctgcgcgatcaaggctatggaattgattcaggctaacttagtcaacgcggttgaaaacggtcaagacatcaatgcccgtgaacaaatggcctacgcacagttcttagcgggtatggcctttaacaatgccagcttaggttatgtgcatgcgatggcgcaccagttaggcggtttctacgatctgccccacggtgtgtgtaacgccctgctgctgccccatgtacaggaatacaacgcccaggtcgtccctgctcgcttgaaagacattgccaaggctatgggtgtggatgtgtccagcatgaccgatgagcaaggtgccagtgcggcgatagcggcaatcaaaaagctgtcttttgcggttaagatcccagaaaacctgaccttgttaggcgtaaaagcggaagatattccaacacttgcggataacgcgttaaaagatgcctgtggattcaccaatccaaaacaagcgacccaagcggagatctgtcagatcttcactaatgcgctgtag

SEQ ID NO: 39862 - protein, 382 aa, Shewanella baltica OS155
MAAKFFIPSVNVLGQGAVDDAIGDIKTLGFKHALIVTDKPLVKIGLVGEVAEKLGQNGITSTIYDGVQPNPTVTNVEAGLALLKANKCDFVISLGGGSPHDCAKGIALVATNGGSIKDYEGLDQSAKPQLPLVAINTTAGTASEMTRFCIITDEARHIKMAIVDKHTTPLLSVNDPELMLKKPASLTAATGMDALTHAVEAYVSIAANPITDACAIKAMELIQANLVNAVENGQDINAREQMAYAQFLAGMAFNNASLGYVHAMAHQLGGFYDLPHGVCNALLLPHVQEYNAQVVPARLKDIAKAMGVDVSSMTDEQGASAAIAAIKKLSFAVKIPENLTLLGVKAEDIPTLADNALKDACGFTNPKQATQAEICQIFTNAL

SEQ ID NO: 39863 - DNA, 1149 bp, Shewanella amazonensis SB2B
  CDS (1)..(1149): transl_table=11
atggctgcgaaattttttatcccttctgttaacgtgctcggccagggcgccgtagacgaggccatcggtgacatagtcaccctgggttttaaacaggccctgatagtcacagataaacctttggtacagataggtattgccggtgaactggtggaaaaactcggtgagcgcggtattaccgccgtcgtgttcgatggtgtacaacccaaccccacaacagccaacgtggaggcgggccttgcactgctcaacgcccatggctgtgactttgtgatttccctcggcggcggctcgccccacgactgcgccaagggcatcgccctggtcgccaccaatggcggcagcatcaaagactacgaaggcgtcgataagtccgccaagccacagttgcccctggttgccatcaatactaccgccggcaccgccagtgaaatgacccgcttttgcatcatcaccgacgaggctcgccatattaaaatggccatcgtcgacaagcacaccacccccattctgtcggtgaacgatcctgagttgatggtgaaaaagccagctgccttgaccgcggccaccgggatggatgccctgacccacgccgttgaggcttatgtgtctgttgccgccaatcccatcacagatgcctgcgccatcaaggccatcgagcttattcagcaataccttgagcgggcggtgaaacaggggcaggacctacaggcccgcgagcaaatggcctatgcccagttcctcgccggtatggcctttaacaacgccagcctgggttatgtgcacgctatggcccaccagctcggtggcttctacgacctgccccacggtgtctgtaacgccctgttgctgccatacgtgcaggaatacaacgcggcggtggcggcggcacgtttgaaagatgtcgccaaagccatgggtgttgccgtagacgggcttgatgaccaagaaggtgccaaggccgccattagtgccatcaaggcgctgtccaaggcggtaaacatcccggagaatctgactgtgcttggcgtaaaagaagaggatattccgttactggccgacaacgccctcaaagatgcctgcggatttaccaaccccaaacaggccacccatgaggaaatctgtcagattttctgtaacgcactttaa

SEQ ID NO: 39864 - protein, 382 aa, Shewanella amazonensis SB2B
MAAKFFIPSVNVLGQGAVDEAIGDIVTLGFKQALIVTDKPLVQIGIAGELVEKLGERGITAVVFDGVQPNPTTANVEAGLALLNAHGCDFVISLGGGSPHDCAKGIALVATNGGSIKDYEGVDKSAKPQLPLVAINTTAGTASEMTRFCIITDEARHIKMAIVDKHTTPILSVNDPELMVKKPAALTAATGMDALTHAVEAYVSVAANPITDACAIKAIELIQQYLERAVKQGQDLQAREQMAYAQFLAGMAFNNASLGYVHAMAHQLGGFYDLPHGVCNALLLPYVQEYNAAVAAARLKDVAKAMGVAVDGLDDQEGAKAAISAIKALSKAVNIPENLTVLGVKEEDIPLLADNALKDACGFTNPKQATHEEICQIFCNAL

SEQ ID NO: 39865 - DNA, 1152 bp, Enterococcus faecium DO
  CDS (1)..(1152): transl_table=11
atgagtaatcgaatgattttaaatgaaacatcgtattttggaaaaggagcgattgagtcgatcgtccctgaatttcagcagcgaggattcggcaaagcagctgtcattactgacaaaggattgatcgagcacggtatagcaacaaaagtaacagaacttctagataaagcagcaatcgcttatgctttatacgacgggatcgtacctaatccaacgatccaaaatgtaaaagatggagtggcttttgttaaagaggcagaggcagactgtttgatcgcaatcggtggaggttcgccaatcgatacggcaaaagccattgggattattttgacgaatccagagttttcagacgtcattagtttagaaggtgttgctgatacgaaaaatccatgtttacctatattagctataccaacgacttctggaacagcagcagaagtaacgatcaactacgtcatcacagatgaagtaaatcaccgaaaatttgtttgtgttgatcctcatgatatcccaatcgtcgcgttcatcgacagcgatatgatgatgggaatgccgaaaaaattggctgcatcaacaggtatggatgctatgacgcatgctattgaagggtttatcacaaaaggcgcttgggaaatgactgatatgctgcatttaaaagcaatcgaaatcatcggccattctttggaagtttctgtagatggcgatcaaaatgggcgagaaaaaatggcattaggacagtatattgcgggaatgggcttctcaaatgtcggtttaggactggtacacgggatggctcacccgttaagtgcatggtacaacattcctcatggcgtagcgtgtgcagcacttttgccaactgtcatgaaatataacaaagaatatactggagaaaagtaccgtgagatcgctcttgttctagggattaaaggagcagctgaaatgtctttagaagatgtaagagaagcggcttgtggtgagatcgatcggttgagcaaagcggttggaatcccagaaaccatttctgaattaggtgtaaaagaagcagatattccagcaattgcagaagatgctttgcgagatgtatgcacaccaggaaatccaagagaaacgacagtagaagaaatcattgctttatatcaaagtttgatgtaa

SEQ ID NO: 39866 - protein, 383 aa, Enterococcus faecium DO
MSNRMILNETSYFGKGAIESIVPEFQQRGFGKAAVITDKGLIEHGIATKVTELLDKAAIAYALYDGIVPNPTIQNVKDGVAFVKEAEADCLIAIGGGSPIDTAKAIGIILTNPEFSDVISLEGVADTKNPCLPILAIPTTSGTAAEVTINYVITDEVNHRKFVCVDPHDIPIVAFIDSDMMMGMPKKLAASTGMDAMTHAIEGFITKGAWEMTDMLHLKAIEIIGHSLEVSVDGDQNGREKMALGQYIAGMGFSNVGLGLVHGMAHPLSAWYNIPHGVACAALLPTVMKYNKEYTGEKYREIALVLGIKGAAEMSLEDVREAACGEIDRLSKAVGIPETISELGVKEADIPAIAEDALRDVCTPGNPRETTVEEIIALYQSLM

SEQ ID NO: 39867 - DNA, 1158 bp, Clostridium pasteurianum
  CDS (1)..(1158): transl_table=11
atgagaatgtatgattttttagcaccaaatgtaaactttatgggagcaggtgcaataaaattagtgggagaaagatgtaaaatattaggcggaaagaaagctttaatagttacagataaattcttgagaaatatggaagatggagctgtagctcaaacggttaaatatattaaagaagcaggaatagatgttgctttttatgatgatgtagagcctaatcctaaggatactaatgttagagatggattaaaagtatatagaaaagaaaactgtgatttaatagttactgtaggaggaggaagttctcatgactgtggaaagggaataggtattgcagctacacacgagggagatctttatgactatgctggtatagaaacccttactaatccattgcctccgatagtagctgtaaatacaacagctggaacaggcagcgaggttactcgtcattgtgttatcacaaacacaaaaacaaagattaaatttgttattgtaagctggagaaatctgccgttagtatccattaatgatccaatacttatgattaaaaagcctgcaggattaacagcagctacaggaatggatgccttaactcatgccatagagtcctatgtttctaaagatgcaaacccagtaacagatgccttagctatacaagcaataaaattaatagctaacaatctgcgtcaggcagtagcccttggagaaaatctggaagctagagaaaatatggcctacgcatcacttctggcaggaatggcatttaataatgcaaatttaggatatgtacatgctatggcacatcaattaggaggcctgtatgatatggcacatggtgttgccaatgccatgttattaccacatgtagaacgctataatcttatatcaaatcctaagaaatttgcagatatagcagaattcatgggagagaatattgaaggactttcagtaatggaagcagcagaaaaagctatagatgctatgtttagactttcaaaggatgttgggataccagcaagtcttaaagaaatgggagttaatgaaggagattttgaatatatggcaaaaatggcattgaaagatggaaatgcattcagtaatccaagaaaaggtaatgaaaaagatatagttaaaatatttagagaagcattttaa

SEQ ID NO: 39868 - protein, 385 aa, Clostridium pasteurianum
MRMYDFLAPNVNFMGAGAIKLVGERCKILGGKKALIVTDKFLRNMEDGAVAQTVKYIKEAGIDVAFYDDVEPNPKDTNVRDGLKVYRKENCDLIVTVGGGSSHDCGKGIGIAATHEGDLYDYAGIETLTNPLPPIVAVNTTAGTGSEVTRHCVITNTKTKIKFVIVSWRNLPLVSINDPILMIKKPAGLTAATGMDALTHAIESYVSKDANPVTDALAIQAIKLIANNLRQAVALGENLEARENMAYASLLAGMAFNNANLGYVHAMAHQLGGLYDMAHGVANAMLLPHVERYNLISNPKKFADIAEFMGENIEGLSVMEAAEKAIDAMFRLSKDVGIPASLKEMGVNEGDFEYMAKMALKDGNAFSNPRKGNEKDIVKIFREAF

SEQ ID NO: 39869 - DNA, 1152 bp, Zymomonas mobilis
  CDS (1)..(1152): transl_table=11
atggcttcttcaactttttatattcctttcgtcaacgaaatgggcgaaggttcgcttgaaaaagcaatcaaggatcttaacggcagcggctttaaaaatgcgctgatcgtttctgatgctttcatgaacaaatccggtgttgtgaagcaggttgctgacctgttgaaagcacagggtattaattctgctgtttatgatggcgttatgccgaacccgactgttaccgcagttctggaaggccttaagatcctgaaggataacaattcagacttcgtcatctccctcggtggtggttctccccatgactgcgccaaagccatcgctctggtcgcaaccaatggtggtgaagtcaaagactacgaaggtatcgacaaatctaagaaacctgccctgcctttgatgtcaatcaacacgacggctggtacggcttctgaaatgacgcgtttctgcatcatcactgatgaagtccgtcacgttaagatggccattgttgaccgtcacgttaccccgatggtttccgtcaacgatcctctgttgatggttggtatgccaaaaggcctgaccgccgccaccggtatggatgctctgacccacgcatttgaagcttattcttcaacggcagctactccgatcaccgatgcttgcgctttgaaagcagcttccatgatcgctaagaatctgaagaccgcttgcgacaacggtaaggatatgccggctcgtgaagctatggcttatgcccaattcctcgctggtatggccttcaacaacgcttcgcttggttatgtccatgctatggctcaccagttgggcggttactacaacctgccgcatggtgtctgcaacgctgttctgcttccgcatgttctggcttataacgcctctgtcgttgctggtcgtctgaaagacgttggtgttgctatgggtctcgatatcgccaatctcggtgataaagaaggcgcagaagccaccattcaggctgttcgcgatctggctgctcccattggtattccagcaaacctgaccgagctgggtgctaagaaagaagatgtgccgcttcttgctgaccacgctctgaaagatgcttgtgctctgaccaacccgcgtcagggtgatcagaaagaagttgaagaactcttcctgagcgctttctaa

SEQ ID NO: 39870 - protein, 383 aa, Zymomonas mobilis
MASSTFYIPFVNEMGEGSLEKAIKDLNGSGFKNALIVSDAFMNKSGVVKQVADLLKAQGINSAVYDGVMPNPTVTAVLEGLKILKDNNSDFVISLGGGSPHDCAKAIALVATNGGEVKDYEGIDKSKKPALPLMSINTTAGTASEMTRFCIITDEVRHVKMAIVDRHVTPMVSVNDPLLMVGMPKGLTAATGMDALTHAFEAYSSTAATPITDACALKAASMIAKNLKTACDNGKDMPAREAMAYAQFLAGMAFNNASLGYVHAMAHQLGGYYNLPHGVCNAVLLPHVLAYNASVVAGRLKDVGVAMGLDIANLGDKEGAEATIQAVRDLAAPIGIPANLTELGAKKEDVPLLADHALKDACALTNPRQGDQKEVEELFLSAF

SEQ ID NO: 39871 - DNA, 1149 bp, Pseudomonas putida
  CDS (1)..(1149): transl_table=11
atgagtgtttctgcctttcaaatcgccaataagctcctgaccggggccagcgcggtagaacagcttgatgctgagttgacccggttgaaggtgagtaatccattgatcgtgaccgatgcgatcctgctcaagtcgggcacagtcgacctcgccttggcccacttgggtggccgcagttatggcctttacgaccaggctcaaccggagcctgaaatcagtttggtcgaagactgtacccgcgcctttcgcgaggggggccatgatgggctgattgggttgggaggaggaagcgctatcgacatcgcgaaaggtgtcgcggccttcgccggacacgacggcgctctggccgacctgttcggcgtcgatcaggtcagccgcaaggggccgcccctgatcgcgattcctaccactgcaggcacgggttcggaggtactaacgtggcgatcttttccgacaagaaagcgcagctcaagaaaggcattggtgagtgactacctgctgcctgacgttgctctcgtaagtcccggtcttgacgcgcacctgcccacgaacgtaagccgtgccagcggtgtcgatgcacttgtgcatgcgatcgaagcgtacctttcgatcaatcgctcgccgatcaccgacgccattgcccttggagccattaaactgatcgctcgcgctttgcctaaagcgtatgccaaccccgatgatcttgctgcccgggaagacatggctacagcgagtctgatgggcggcatggcttttggaaacgcaggcgtaggggcagtacatgcgctggcctatccgctgggcgggcgcttcaacatagcccacggcgtcagcaatgctttgctgctgccccatgtcatgcgctggaacaagcttgcctgtacggagcgccttcgcgacgtcgcccaggcaatgggcgtgaatatcgccgggttgagcgatagccaggccgcagacgccagtgtcgatgcgatggctgagctgtgtgctgctgtagacattcctaccggtcttcgcgcgttcaacgttccgcaggacgctttggcacccatggccgaggaggccagcaagattgaccggttgatgcgcaataacccgcgcaaattcacggctggggatatcgaggcgatttaccgggctgcctggtaa

SEQ ID NO: 39872 - protein, 382 aa, Pseudomonas putida
MSVSAFQIANKLLTGASAVEQLDAELTRLKVSNPLIVTDAILLKSGTVDLALAHLGGRSYGLYDQAQPEPEISLVEDCTRAFREGGHDGLIGLGGGSAIDIAKGVAAFAGHDGALADLFGVDQVSRKGPPLIAIPTTAGTGSEVLTWRSFPTRKRSSRKALVSDYLLPDVALVSPGLDAHLPTNVSRASGVDALVHAIEAYLSINRSPITDAIALGAIKLIARALPKAYANPDDLAAREDMATASLMGGMAFGNAGVGAVHALAYPLGGRFNIAHGVSNALLLPHVMRWNKLACTERLRDVAQAMGVNIAGLSDSQAADASVDAMAELCAAVDIPTGLRAFNVPQDALAPMAEEASKIDRLMRNNPRKFTAGDIEAIYRAAW

SEQ ID NO: 39873 - DNA, 1110 bp, Actinobacillus pleuropneumoniae
  CDS (1)..(1110): transl_table=11
atggatctcggttttgtcgatagaattaccgaccaattacgccaacgtcgtaataaagtgatgattcagttatttaccgatgttgaaccgaatccaagtttacaaaccgtacaacgcgggacggaacttatgcgtagcttccaaccggataccattattgccttaggtggcggctcgcctatggatgcggcaaaagtaatgtggttattctatgaacaaccggaagtggatttccgtgatttagttcagaaatttatggatattcgtaaacgtgcgttcaaattcccgcaattaggtcgtaaagcgaaatttgtcggtatcccgaccacatccggtaccgtaccgaagtcagccgtttgcgtcattactgacggcgatattaaatatccgttggccgactactctctcacgccgacaattgcgattgtagatcctgcattagtgatgtcagtgccggctcatgttgcagcggataccggtttagacgtattaactcacgcaactgaggcttatacttcaatacttgccaacgactacaccgacggtttagcgttacaggcaattaaactggtatttgaaaatttagaaaaatccgtgaaagaatttgatgaagtcgctcgcgagaaaatgcacaatgcttcaactatggcaggtatagcgtttgcaaacgcattcttaggtatttgtcactcaatggcgcataaaatcggcggtaaattccatacgattcacggtcgtaccaatgcgattttattaccgcacgtaattcgttataacggtactcgcccgactaaagtggcaacttggccgaaatacacaaactatgttgcggataaacgcttccaagacatcgcacgtattttaggtttaccggcgacaacgcctgaagaagcggtggaatcttacgctaaagcggtacatgatttagcagtacgttgtggtgttaaaatgtctttacgtgaacaaggtattgacgaacaagagttcttagacgcacgtcgtgaacttgcattaaatgcctttgaagaccaatgtactccggcaaatccacgtcttgcaatggtagaagatatggaagagataatgacaaaagcttactatggcaaataa

SEQ ID NO: 39874 - protein, 369 aa, Actinobacillus pleuropneumoniae
MDLGFVDRITDQLRQRRNKVMIQLFTDVEPNPSLQTVQRGTELMRSFQPDTIIALGGGSPMDAAKVMWLFYEQPEVDFRDLVQKFMDIRKRAFKFPQLGRKAKFVGIPTTSGTVPKSAVCVITDGDIKYPLADYSLTPTIAIVDPALVMSVPAHVAADTGLDVLTHATEAYTSILANDYTDGLALQAIKLVFENLEKSVKEFDEVAREKMHNASTMAGIAFANAFLGICHSMAHKIGGKFHTIHGRTNAILLPHVIRYNGTRPTKVATWPKYTNYVADKRFQDIARILGLPATTPEEAVESYAKAVHDLAVRCGVKMSLREQGIDEQEFLDARRELALNAFEDQCTPANPRLAMVEDMEEIMTKAYYGK

SEQ ID NO: 39875 - DNA, 1131 bp, Propionibacterium freudenreichii shermanii
  CDS (1)..(1131): transl_table=11
atgaagcaattccaactggccacttctctcgcctgcgggcctgacgcactcaccgcgctggacaggctcggcggacgccgcgtcttggtcatcacggacgccttcatggcctcctcggcactgatggacaccgtgcgcggccacctcggcagcgccgagatcacggtcttcgaccaggtgcagcccaatcccgacgtccaggccgtcgcgcgcggcctgcgggccttccttgactgcgcccccgaggccctgctggccctgggcgggggatcgccgatcgacaccgccaaggcggtgcgcaagattgccctcgagcagggccagccactgtcggcgggcttctatgtggtgcccaccacctcgggaaccgggtcggaggtcagctcgttcgcggtggtcaccgatcccgagcacgacgccaagctccccatgacctcacccgacatggtggcagatgtggccatcctcgaccctgacgcggtgcgcacctgcccgcccacgctcaccgccgactccgggatggacgcgctcagccacgcggtggaggcctatgttgcgctggaccacaacgacatcacggacgcactggccgagaaggcgctgcgactgatcagcgcgaacctggtggccagcttccgcgacgggaacgaccttgcggccagggaacaccagcagaatgcggcgacgatggccggcatcgccttcgagaactccggactgggcatcgtgcacgggttgtcccatgccatcggcggcagcttccatgtggcgcacggcaggctcaacggcatcctgatgccgcatgtgatcggcttcaacgccggcgagctgggcttcggggctgccacgttgtcgcccatcgccgagcgctatgcacagctcgcggcggccatcggcatcgacgcggccacccgacgcggactggtgacggggctcgtcgacttcatcaccgccatacgtcgtgaccttgacatgccggcctcgctcaccgacgccggcgtcgaccgcgccgccttccgggctgccattccacagctgtcccagaccgcattgcgcgacttctgcacatcgggaaacccccggccggtgaccgctcatgagctcgccgggctgttggcccacgccctctag

SEQ ID NO: 39876 - protein, 376 aa, Propionibacterium freudenreichii shermanii
MKQFQLATSLACGPDALTALDRLGGRRVLVITDAFMASSALMDTVRGHLGSAEITVFDQVQPNPDVQAVARGLRAFLDCAPEALLALGGGSPIDTAKAVRKIALEQGQPLSAGFYVVPTTSGTGSEVSSFAVVTDPEHDAKLPMTSPDMVADVAILDPDAVRTCPPTLTADSGMDALSHAVEAYVALDHNDITDALAEKALRLISANLVASFRDGNDLAAREHQQNAATMAGIAFENSGLGIVHGLSHAIGGSFHVAHGRLNGILMPHVIGFNAGELGFGAATLSPIAERYAQLAAAIGIDAATRRGLVTGLVDFITAIRRDLDMPASLTDAGVDRAAFRAAIPQLSQTALRDFCTSGNPRPVTAHELAGLLAHAL

SEQ ID NO: 39877 - DNA, 1164 bp, Escherichia blattae
  CDS (1)..(1164): transl_table=11
atgagcgaccgcatgtatgacttcctggttccaaatgtgaacttctttggcccgggcgccgtttctgttgttggccagcgctgccagctgctggggggtaaaaaagccctgctggtgaccgataagggcctgcgcgccattaaagacggtgctgtcgatcagaccgtgaagcacctgaaagccgccggtattgaggtggtcattttcgacggggtcgagccgaacccgaaagacaccaacgtactcgacggcctggccatgttccgtaaagagcagtgcgatatgataatcaccgtcggcggcggcagcccgcacgactgcggtaaaggcattggtattgcggccacccacccgggtgatctgtacagctatgccggtatcgaaacactcaccaacccgctgccgcccattattgcggtcaacaccaccgccgggaccgccagcgaagtcacccgccactgcgtgctgactaacaccaaaaccaaagtaaaatttgtgattgtcagctggcgcaacctgccttccgtctccattaacgatccgctgctgatgatcggcaagcccgccgggctgaccgccgccaccggtatggatgccctgacccacgcggtagaggcctatatctccaaagacgccaacccggttaccgatgcctctgctattcaggccatcaaactgattgccaccaacctgcgtcaggccgtcgccctggggaccaacctcaaagcccgtgaaaacatggcctgcgcctctctgctggccgggatggcctttaacaacgccaacctgggctatgttcacgccatggctcaccagctgggcggcctgtacgacatggcccacggggtggcgaacgcggtcctgctgccccatgtctgccgctataacctgattgccaacccggaaaaatttgccgatatcgccacctttatgggggaaaacaccaccggtctttccaccatggacgcagcggagctggccatcagcgccattgcccgtctgtctaaagatgtcgggatcccgcagcacctgcgtgaactgggggtaaaagaggccgacttcccgtacatggcagaaatggccctgaaagacggcaacgccttctctaacccgcgtaaagggaacgaaaaagagattgccgacatcttccgccaggcattctga

SEQ ID NO: 39878 - protein, 387 aa, Escherichia blattae
MSDRMYDFLVPNVNFFGPGAVSVVGQRCQLLGGKKALLVTDKGLRAIKDGAVDQTVKHLKAAGIEVVIFDGVEPNPKDTNVLDGLAMFRKEQCDMIITVGGGSPHDCGKGIGIAATHPGDLYSYAGIETLTNPLPPIIAVNTTAGTASEVTRHCVLTNTKTKVKFVIVSWRNLPSVSINDPLLMIGKPAGLTAATGMDALTHAVEAYISKDANPVTDASAIQAIKLIATNLRQAVALGTNLKARENMACASLLAGMAFNNANLGYVHAMAHQLGGLYDMAHGVANAVLLPHVCRYNLIANPEKFADIATFMGENTTGLSTMDAAELAISAIARLSKDVGIPQHLRELGVKEADFPYMAEMALKDGNAFSNPRKGNEKEIADIFRQAF

SEQ ID NO: 39879 - DNA, 1149 bp, Alcaligenes eutrophus
  CDS (1)..(1149): transl_table=11
atggcgtttatctactatctgacccacatccacctggatttcggcgcggtaagcctgctcaagtccgaatgcgagcgcatcggcatccgccgcccgttgctggtgaccgacaagggcgtggtcgccgcgggagtggcgcagcgtgccatcgatgcaatgcagggcctgcaggttgcggtattcgatgaaaccccgtcgaacccgaccgaggccatggtgcgcaaggccgccgcacaataccgcgaggccggctgcgacgggctggtggcagtgggcggcggctcgtcgatcgacctcgccaagggcatcgccatcctggccacgcatgagggcgagctgaccacctatgccaccatcgaaggcggcagcgccaggatcaccgacaaggcggcgccgctgatcgcggtgcccaccacctcgggcaccggcagcgaggtggcgcgcggcgccatcatcatcctggacgacggccgcaagctgggcttccattcctggcatttgctgcccaagtccgccgtctgcgacccggaactgacgctggggctgccggccgggctgaccgcggccaccggcatggatgcgatcgcgcactgcatcgagaccttcctggcccccgccttcaacccgcccgcggacggcattgcgctggacgggctggagcgcggctggggccatatcgaacgcgccacccgcgacggtcaggaccgcgacgcacgcctgaacatgatgagcgcgtcgatgcagggcgcaatggcgttccagaaggggctgggctgcgtgcattcgctgtcgcacccgctgggcgggctgaagatcgacggccgcaccggcctgcaccacggcacgctcaacgcggtggtgatgccggcggtgctgcgcttcaacgccgatgcgcccacggtggtgcgcgacgaccgctacgcacgcctgcgccgcgccatgcacctgcccgacggcgccgatatcgcgcaggccgtgcacgacatgaccgtgcgcctgggcctgcccaccgggctgcgtcagatgggtgtcaccgaggacatgttcgacaaggtgattgccggtgcgctggtcgaccattgccacaagaccaacccgaaagaagccagcgccgcggattatcggcgtatgcttgagcagtccatgtag

SEQ ID NO: 39880 - protein, 382 aa, Alcaligenes eutrophus
MAFIYYLTHIHLDFGAVSLLKSECERIGIRRPLLVTDKGVVAAGVAQRAIDAMQGLQVAVFDETPSNPTEAMVRKAAAQYREAGCDGLVAVGGGSSIDLAKGIAILATHEGELTTYATIEGGSARITDKAAPLIAVPTTSGTGSEVARGAIIILDDGRKLGFHSWHLLPKSAVCDPELTLGLPAGLTAATGMDAIAHCIETFLAPAFNPPADGIALDGLERGWGHIERATRDGQDRDARLNMMSASMQGAMAFQKGLGCVHSLSHPLGGLKIDGRTGLHHGTLNAVVMPAVLRFNADAPTVVRDDRYARLRRAMHLPDGADIAQAVHDMTVRLGLPTGLRQMGVTEDMFDKVIAGALVDHCHKTNPKEASAADYRRMLEQSM

SEQ ID NO: 39881 - DNA, 5163 bp, uncultured bacterium
  CDS (546)..(3245)
ggatccaaagggcggttacttcatttcattcaacgctcttaacggctgtgctaagcgcatagttcagctttgcagtgaagcaggcgttacacttacaggcgcaggtgctacattcccttacggcgttgatcccgatgacaagaacatccgtcttgcacctacatatcctccgatagaggatcttcagaaggctatggagctcttcgttatctgcgtaaagctcgtaagcgctgagaaactccttgcagagaagtaattaaataaaaccgatacaggctgtgcagctaaattgcacagccttttttatttgatattgaaatgcacacagttagactaagataacatatattgacaaaaaattatcaatgtggtattattgtattgacaaaaaaatgtcaaggcgggtgatccgatagtgttttgctccaaccattaaccgacaatgttcagataacggagcaattatgcatgacaggcttagtgacggctataatagaatgaacagcctttcagcagtcatcgtcagaaatcacgcttcgtaaagaatgatacgaagcgatctcggggagctgttcagttctctgataacagaccaaacggaggaatatatggttaaaaagaattatgaaataacagacagtaccgaaaaactcgaaaaaacgatcgagcgggttaaaaacgcccagaaacagtttgcttctttcactcaggaacaggtggacaagattttccttgcagccgctacagctgcaaataaaaacaggatcccgcttgcaaagcttgctgtcgaagaaacaggtatgggcatcgttgaggataaggtaataaagaaccacttcgcttcagaatacatctataacgcttacagaaatgtaaagacctgcggtatcatcgaggaagataaatcagcaggaatcacaaggatagctgaaccgatcggcgttatagcagcagttatacctaccacaaacccgacttcaactgcaattttcaagtcccttcttgccctcaaaacaagaaacggaataataataagtcctcatccgagagctaaaaagtccaccatagaggcagctaagatcgtacttgaagcaacggttgcagcaggcgctcccgaagacataatctcatggatagatgtaccgagtcttgaaatgactaaccttgttatggctgaggctgatatcatccttgctacaggcggtcccggaatggtcaaggctgcttattcaagcggaaagcctgccgtaggtgtaggcgcaggaaacactcccgctataatcgatgaatccgctgatatcattcttgccgtaaattcaataatccactcaaagatctttgataacggtatgatttgtgcttccgagcagtcaactatcgttcataagagcatctacaacaaggtgaaggctgaatttgcagcaagaggctgctatttcctctcaaaggacgaaaaggagaaggtcggcaagactatcctcatcaacggcgctcttaatgcaaagatagttggtcagagcgcatacaggatcgctgaacttgcaggtgttactgttcccgagggtacaaagatacttatcggcgagacagacagcactgagctttcagaggaattcgctcacgagaagctctcccctgttctggcaatgtataaggcgaacgatataaacgatgcattcaacaaagccgaaaaacttatcgccgacggcggttacggtcacacctcttcaatatatctcgacgttcttactcagcaggataaactggaagaattcagaaaaaggatgaagacctgccgtatccttgttaacactccttcatctcacggtggtataggtgatatatacaatttcagcctgactccgtcgctgacacttggctgcggttcatggggaggaaattccgtaagcgaaaatgttggcgtaaagcatctgctcaatataaagacagttgctgaaaggagagaaaatatgctttggttcagagcacctgaaaagatatatatgaagcgcggttgtctgcctacagctcttgacgaactcaaaacaataatgaacaagaaacgtgctttcatagttacagataaattcctttatgaaaacggtttcacaaagcctatcactgacaaactcgacgagctcggcatacagcatgccgcattcttcgacgttgctcccgatcctacacttgcatgcgctaaagaaggtgcagctcagatatccgtattcaatcccgatgtgataatagctgtcggcggcggttcagctatggatgctgcaaagataatgtgggtgctttatgaacatcccgaggttgattttgctgacatggcaatgcgcttcatggatataaggaagagagtgtacaccttcccgaaaatgggagaaaaggcttatttcgtagctatcccgacttccgcaggtacaggctctgaggtaacaccatttgcggttatcactgatgaaagctcaggagtaaaataccctcttgccgattacgagctcctgccgaatatggctataatcgatacagaccttcacatgagcgctcctaagggactcacatccgcttcaggtatagacgcagtaactcacgctcttgaagcctatgcttccgtaatggcaacagatttcacagacggacttgcacttaaggcacttaagatcattttcgagttccttccccgtgcatacgacaacggcccgaacgatcccgaagcaagagaaaaaatggctaatgccgctacaatggcaggtatggcttttgcaaacgctttcctcggagtaagccactctctcgcacacaagctcggtgcttaccaccatatcccacacggtatcgcaaatgcactggtcattgaagacgtacttcgtttcaatgctgcggaaactcctgcaaaaatgggtactttcccacagtacgatcatccgcacacacttgaacgctatgcagaggtcgctgactatctcggactcggcggaaagactccgaaggataagcttgaaaagctcatttccgctataagagagctccgtcataaaataggcatcaaggatacgatcgccgattacggtgtttcagaagaggacttcatggcaactcttgatgagatgacagaaaatgcatttgacgatcagtgtacaggtgcaaatccccgttatcctctcttcagtgagataaagcagatatacctcaatgcatactacggcagaacatttaccgaaaaagagtatccaaaggcttaagaaggaggaaatgctatgaaacttgataattgtatctcagaaagaacaaacaagaagatcttccgtgacggaaacaagtgcataaaactgtttgatgaggtctactccaagtcagacgtactcaacgaagctctcaatcacgcaagagttgaggaaacaggtctgaatgtccccgagctctatgaggtaacacgaatagacggaaaatgggcgatcgtatcgcaatacatcgaaggtgagagcctctcggaccttatagttgcaaacccgaaaaaatacgcagaatacctggaactcttcgtggatatacagcttgatatccagtcaagaagctgcccgctccttagcagactcaaggacaagatgaaccgtaagatagaacttacagaactggatgatacaacaaagtacgatcagcggaccgaccaaaatcgctcccccgaaggttgaaaccgtcatttttgtgcgcaccgcgcaggaaatgcaccgggccgtcatggacgcctgttccaaagcatcgatcatcatcaaagccgcagcggtggccgattaccggccacggataacggctgccgagaaaatcaagaaagaccggggactggccgccgtcgagcttgtgcgcaaccccgatatcattgccgcgatcggcgcgaaaaagaagaaaggccttctggtgggatttgccatggaaacccaggacctgctgaccaacgctcgcgggaaaatgattcgcaaaaaaatggacatgatcgtcgccaacaatctgcgcgacgagggcgccggttttgagacggacaccaacatcatcacgatccttgaccggcagggccatagcatcgctttggaaaagatgaccaaacaggaagcggcgcaccggatcctggatcatatccgctcgctcaaaacgaagaaaggacccgccggaaaaaaatgacgaagtcctttccttcactttcatccgacgcgatccggaatgatttgctgtccctggtgaaatccgtcagggggcaggtgctggacgccgaccgtctgtatgtcgccgtggactgcaaaagaccccccagtccggcgcggaaaaacaagccggacggcagggatcgcggcgaggcgtttcacgccctttctctggaagccgcgaactgctgtcagtgtcctctggcgcagacaagaaagaatgtcgtattcggtgccgggagcttatcggcgcaggtggtttttgtgggcgaagcgccgggtgcggacgaagacgaacagggcctgccctttgtcggcaaggcggggcagcttctgaccaacatcattactgcgatggggctgacgcgaaaggaagtgtatatctgcaatattctcaaatgccgcccgccgggcaaccgcaccccgttgccggaggaaatccgtctgtgcgagcctttcctgaagcggcagctcagcctgattgctccgcagatccttcgccggacggctgtcctgaaggatgccagtgtacgtaccggcatcctccggatgaagatatccgatgtctcaacttccgtgtcaacacccctcgccctccagtagagtctctcattgaaagaagaaccggagaaatccgggaatgggacggtccttcccgagaagttcacaacgtctccttccctggcggcacggtatggtctcaccctgatgagataccgcccgctccggccttccaccacgagcgcgcgcctgtacccccacggccgctccaggaccacttctccttcatcgctgacaggagaaccgtccgcagggggaaaagaatccatccggagggctgcggccagcgaaatgcagaaggccaacagggcgagccccgccatgaaagggaaaaaacgggcgggtcgattttgggatgaaacaaggaggagtcccgcacatacaagggaggcaactgctgcag

SEQ ID NO: 39882 - protein, 899 aa, uncultured bacterium
MIRSDLGELFSSLITDQTEEYMVKKNYEITDSTEKLEKTIERVKNAQKQFASFTQEQVDKIFLAAATAANKNRIPLAKLAVEETGMGIVEDKVIKNHFASEYIYNAYRNVKTCGIIEEDKSAGITRIAEPIGVIAAVIPTTNPTSTAIFKSLLALKTRNGIIISPHPRAKKSTIEAAKIVLEATVAAGAPEDIISWIDVPSLEMTNLVMAEADIILATGGPGMVKAAYSSGKPAVGVGAGNTPAIIDESADIILAVNSIIHSKIFDNGMICASEQSTIVHKSIYNKVKAEFAARGCYFLSKDEKEKVGKTILINGALNAKIVGQSAYRIAELAGVTVPEGTKILIGETDSTELSEEFAHEKLSPVLAMYKANDINDAFNKAEKLIADGGYGHTSSIYLDVLTQQDKLEEFRKRMKTCRILVNTPSSHGGIGDIYNFSLTPSLTLGCGSWGGNSVSENVGVKHLLNIKTVAERRENMLWFRAPEKIYMKRGCLPTALDELKTIMNKKRAFIVTDKFLYENGFTKPITDKLDELGIQHAAFFDVAPDPTLACAKEGAAQISVFNPDVIIAVGGGSAMDAAKIMWVLYEHPEVDFADMAMRFMDIRKRVYTFPKMGEKAYFVAIPTSAGTGSEVTPFAVITDESSGVKYPLADYELLPNMAIIDTDLHMSAPKGLTSASGIDAVTHALEAYASVMATDFTDGLALKALKIIFEFLPRAYDNGPNDPEAREKMANAATMAGMAFANAFLGVSHSLAHKLGAYHHIPHGIANALVIEDVLRFNAAETPAKMGTFPQYDHPHTLERYAEVADYLGLGGKTPKDKLEKLISAIRELRHKIGIKDTIADYGVSEEDFMATLDEMTENAFDDQCTGANPRYPLFSEIKQIYLNAYYGRTFTEKEYPKA

SEQ ID NO: 39883 - DNA, 1167 bp, Clostridium beijerinckii
  CDS (1)..(1167): transl_table=11
atggcacgttttactttaccaagagacatttatcatggagaaggagcacttgaggcacttaaaactttaaaaggtaagaaagctttcttagtagttggtggcggatcaatgaaaagatttggatttcttaaacaagttgaagattatttaaaagaagcaggaatggaagtagaattatttgaaggtgttgaaccagatccatcagtggaaacagtaatgaaaggcgcagaagctatgagaaactttgagcctgattggatagttgcaatgggtggaggatcaccaattgatgctgcaaaggctatgtggatattctacgaatacccagattttacttttgaacaagcagttgttccatttggattaccagaccttagacaaaaagctaagtttgtagctattccatcaacaagcggtacagctacagaagttacagcattctcagttatcacaaattattcagaaaaaattaaatatcctttagctgattttaacataactccagatatagcaatagttgatccagcacttgctcaaactatgccaaaaactttaacagctcatactggaatggatgcattaactcacgctatagaagcatacactgcatcacttcaatcaaatttctcagatccattagcaattaaagctgtagaaatggttcaagaaaatttaatcaaatcatttgaaggagataaagaagctagaaatctaatgcatgaagctcaatgtttagctggaatggcattttctaatgcattacttggaatagttcactcaatggctcataaggttggtgctgtattccatattcctcatggatgtgcaaatgctatatttttaccatatgtaattgagtataacagaacaaaatgcgaaaatagatatggagatattgcgagagccttaaaattaaaaggaaacaatgatgccgagttaactgattcattaattgaattaattaatggattaaatgataagttagagattcctcactcaatgaaagagtatggagttactgaagaagattttaaagctaatctttcatttatcgctcataacgcagtattagatgcatgcacaggatcaaatcctagagaaatagatgatgctacaatggaaaaattatttgaatgcacatactatggaactaaagttaatttgtaa

SEQ ID NO: 39884 - protein, 388 aa, Clostridium beijerinckii
MARFTLPRDIYHGEGALEALKTLKGKKAFLVVGGGSMKRFGFLKQVEDYLKEAGMEVELFEGVEPDPSVETVMKGAEAMRNFEPDWIVAMGGGSPIDAAKAMWIFYEYPDFTFEQAVVPFGLPDLRQKAKFVAIPSTSGTATEVTAFSVITNYSEKIKYPLADFNITPDIAIVDPALAQTMPKTLTAHTGMDALTHAIEAYTASLQSNFSDPLAIKAVEMVQENLIKSFEGDKEARNLMHEAQCLAGMAFSNALLGIVHSMAHKVGAVFHIPHGCANAIFLPYVIEYNRTKCENRYGDIARALKLKGNNDAELTDSLIELINGLNDKLEIPHSMKEYGVTEEDFKANLSFIAHNAVLDACTGSNPREIDDATMEKLFECTYYGTKVNL

SEQ ID NO: 39885 - DNA, 2601 bp, Listeria welshimeri
  CDS (1)..(2601): transl_table=11
atggcaattaaagaaaatgcggcccaagaagtattagaagttcaaaaagtgattaacagattagcagacaatggacaacaagcattgaaagcatttgagaattacgaccaagaacaagtagataatatcgtacatgcaatggcgcttgccggactcgaccaacatatgccccttgcaaaattagcagtagaagaaacaggacgaggattatacgaagataaatgtattaaaaatatctttgcaacagaatatatttggaacaacattaaaaacaacaagacagtcggcgttattcacgaagacgttcaaactggtgttatcgaaattgcagaaccagttggtgttgttgccggggttacaccagtaactaacccaacatctactacacttttcaaagcaattatcgcaattaaaacacgaaacccaatcatcttcgctttccatccaagtgcacaacgttgttcagcagcagcagcaaaagttgtttatgatgcggcagttgcagctggagcgccagaacattgtattcaatgggtagaaaaaccttccctagaagcaaccaaacaattaatgaatcacgataaagtagcacttgtacttgcaactggtggtgctggaatggttaaatcagcatactctactggtaaaccggcactaggtgttggcccgggtaacgtaccagcttacattgacaaaacagctaaaatcaaacgttctgttaatgacatcattctttctaaatcttttggccaaggaatgatttgtgcttctgaacaagcagttatcgtggacaaagaagtcgctaaagaagtaaaagcagaaatggaagccaataaatgctacttcgttaaaggcgctgaatttaaaaaattagaaagctatgtaatcaaccctgaaaaaggaacacttaacccagatgtagttggtaaatcccctgcatggattgcaaaccaagctggcttcaaagttcctgaagacacaaaaattcttgtggctgaaattaaaggtgttggcgataaatacccactatctcatgaaaaattaagcccagttcttgcattcatcgaagcagctaaccaagcagaagcattcgatcgttgtgaagaaatgctcgtatacggaggacttggacactctgcagttattcactctacagataaagaagttcaaaaagcattcggtatccgtatgaaagcttgccgtatcattgtaaatgcaccaagcgctcaaagtggtattggtgacatctataacggcttcatcccttccctaacacttggttgtggatcttatggtaaaaactctgtatcacaaaatgtaagtgcgactaacttgctgaacgttaaacgtatcgcggatcggagaaataatatgcaatggttcaaacttccaccaaaaattttctttgaaaaatattccactcaataccttcaaaaaatggaaggcgttgaacgcgtatttatcgtaactgacccaggtatggttcaattcaaatacgttgatgtagtaatcgaacacctgaaaaaacgcggtaacgacgtagcttaccaagtattcgctgatgttgaaccagatccatctgacgttacagtttataaaggtgcagaattaatgaaagactttaaaccagatacaatcatcgctcttggtggtggttctgcaatggatgctgctaaaggtatgtggttattctatgaacacccagaagcttcattctttggcttgaaacaaaaattcttagatatccgcaaacgtactttcaaatatcctaaacttggtggaaaagcgaaattcgttgcaattccaacaacaagtggtactggttctgaagtaactccatttgcggttattacagacaaagaaaataacattaaataccctcttgctgactacgaattaactccagacgttgcgattgtcgatgcacaatatgtaactactgttccagcacacattactgctgatactggtatggacgttctaactcatgcaattgaatcttatgtatccgtaatggcaagcgattatactcgtggattatccatccgtgcaatcgaacttgtttttgaaaacttacgtgaatccgttcttactggtgatccagatgcacgtgaaaaaatgcataatgcttctgccctagctggtatggcatttgcgaatgcgttcctaggaattaaccatagcttggcacacaaaattggacctgaattccacattcctcacggtcgtgcgaatgcaatccttatgccacatgttatccgctataacgcacttaaacctaaaaaacatgcgttattcccaagatatgaaagcttccgtgccgatgaagattatgctcgtatttctcgtattatcggtttaccagctgcaactacagaagaaggcgttaaatctcttgtagatgcaattatcaaacttggtaaagatgttggtatcgacatgagtcttaaaggacaaaatgttgctaaaaaagacttggatgctgtagtagatacgcttgctgatcgcgcattcatggaccaatgtactactgccaaccctaaacaaccacttgtaagcgaattgaaagaaatctatcttgaagcttacaaaggggtttga

SEQ ID NO: 39886 - protein, 866 aa, Listeria welshimeri
MAIKENAAQEVLEVQKVINRLADNGQQALKAFENYDQEQVDNIVHAMALAGLDQHMPLAKLAVEETGRGLYEDKCIKNIFATEYIWNNIKNNKTVGVIHEDVQTGVIEIAEPVGVVAGVTPVTNPTSTTLFKAIIAIKTRNPIIFAFHPSAQRCSAAAAKVVYDAAVAAGAPEHCIQWVEKPSLEATKQLMNHDKVALVLATGGAGMVKSAYSTGKPALGVGPGNVPAYIDKTAKIKRSVNDIILSKSFGQGMICASEQAVIVDKEVAKEVKAEMEANKCYFVKGAEFKKLESYVINPEKGTLNPDVVGKSPAWIANQAGFKVPEDTKILVAEIKGVGDKYPLSHEKLSPVLAFIEAANQAEAFDRCEEMLVYGGLGHSAVIHSTDKEVQKAFGIRMKACRIIVNAPSAQSGIGDIYNGFIPSLTLGCGSYGKNSVSQNVSATNLLNVKRIADRRNNMQWFKLPPKIFFEKYSTQYLQKMEGVERVFIVTDPGMVQFKYVDVVIEHLKKRGNDVAYQVFADVEPDPSDVTVYKGAELMKDFKPDTIIALGGGSAMDAAKGMWLFYEHPEASFFGLKQKFLDIRKRTFKYPKLGGKAKFVAIPTTSGTGSEVTPFAVITDKENNIKYPLADYELTPDVAIVDAQYVTTVPAHITADTGMDVLTHAIESYVSVMASDYTRGLSIRAIELVFENLRESVLTGDPDAREKMHNASALAGMAFANAFLGINHSLAHKIGPEFHIPHGRANAILMPHVIRYNALKPKKHALFPRYESFRADEDYARISRIIGLPAATTEEGVKSLVDAIIKLGKDVGIDMSLKGQNVAKKDLDAVVDTLADRAFMDQCTTANPKQPLVSELKEIYLEAYKGV

SEQ ID NO: 39887 - DNA, 2601 bp, Listeria seeligeri
  misc_feature (1522)..(1522): n is a, c, g, or t
  misc_feature (1917)..(1917): n is a, c, g, or t
  CDS (1)..(2601): transl_table=11
atggcaattaaagaaaatgcggcccaagaagtattagaagttcaaaaagtgattgacagattagcagacaatggacaaaaagcattgaaagcatttgaaaattacgatcaagaacaagtggacaatatcgtacatgcgatggcgctcgccggacttgaccaacatatgccccttgcaaaattagcagtagaagaaactggacgtggattatacgaagataaatgtattaaaaacatcttcgcaacagaatatatttggaacaacattaaaaacaacaaaacagttggtgttattaatgaagacgtgcaaacaggcgttatcgaaattgctgaaccagttggtgtggttgccggagttacacctgtaacaaaccctacctccactactcttttcaaagcaattatcgctattaaaactcgtaacccaatcatctttgctttccatccaagcgcacaaggttgttcatctgcagcagcaaaagttgtctacgatgcagcaatcgcagctggagcaccagaacattgtattcaatgggtagaaaaaccttccctagaagcaacaaaacaattaatgaaccatgaaaaagttgccttagttcttgcaactggtggtgctggaatggttaaatcagcctactcaactggtaaaccggcactaggtgttggaccaggtaacgtaccagcttacattgacaaaacagctaaaatcaaacgttctgtaaatgacattattctttctaaatcttttgaccaaggtatgatttgtgcttctgaacaagcagttatcgtggacaaagaagtagccaaagaagtaaaagcagaaatggaagctaacaattgttacttcgttaaaggcgctgaattcaagaaattagaaagctacgtaatcaatcctgaaaaaggaacacttaacccagatgtagttggtaaatcccctgcctggattgctaaccaagccggttttaaagttccagaagatacaaaaattcttgttgctgaaattaaaggtgttggcgacaaatatccactatctcatgaaaaacttagcccagttcttgcatttatcgaagcagctaaccaagcagaagcattcgatcgttgtgaagaaatgctagtatacggaggacttggacactctgcagttatccattccactgataaagaagttcaaaaagcatttggtattcgtatgaaagcttgccgtatcattgtaaacgcaccaagcgctcaaggcggtatcggtgacatttataacggcttcatcccttccctaactcttggttgtggatcttatggtaaaaactctgtatcacaaaatgtaagtgcgactaacttgctgaacgttaaacgtatcgcggatcggagaaataatatgcaatggttcaaacttccaccaaaaatcttctttgaaaaatattccactcaataccttcaaaaaatggaaggcgttgaacgtgtatttatcgtaactgacccaggaatggttcaattcaaatatgttgatgttgtaatcgaacatttgnaaaaacgtggcaacgacgtatcttaccaagtatttgctgacgttgaaccagatccatctgatgtaactgtttataaaggtgccgaattaatgaaagacttcaaacctgatacaattatcgctcttggtggtggttcagcaatggatgctgctaaaggtatgtggttattctatgaacacccagaagcttctttcttcggactaaaacaaaaattcttagatatccgtaaacgtacttttaaatatcctaaacttggtggaaaagcgaaatttgttgctattccaacaacaagtggtactggatctgaggtaactcctttcgcggttattactgataaagaaaataacattaaataccctcttgctgactatgaactaactccagacgttgcgatngtcgatgcacaatacgtaacaactgttccagcacacatcactgctgatactggtatggacgttttaactcacgcaattgaatcttatgtttctgtaatggcaggtgattatactcgtggtttatctatccgagcaatcgaacttgtatttgaaaacctacgtgattccgttcttaagggtgatcctgatgcacgcgaaaaaatgcataacgcttctgccctagctggtatggcgtttgccaatgcgttccttggaattaaccatagcttggcacacaaaattggacctgaattccacattcctcatggtcgtgcgaatgccatccttatgccacacgttattcgttataacgcacttaaacctaaaaaacatgcgctattcccaagatatgaaagcttccgtgcagatgaagattatgctcgtatctctcgtattatcggcttccctgctgcaactacagaagaaggcgttaaatcacttgtggatgaaatcatcaaacttggtaaagatgttggtatcgacatgagtcttaaaggacaaaatgttgataaaaaagacttggatgctgttgtagatacacttgcagatcgcgcattcatggaccaatgtactactgccaaccctaaacaaccacttgtaagcgaactaaaagaaatctacctagaagcttacaaaggtgtatga

SEQ ID NO: 39888 - protein, 866 aa, Listeria seeligeri
  misc_feature (508)..(508): Xaa can be any naturally occuring amino acid
  misc_feature (639)..(639): Xaa can be any naturally occuring amino acid
MAIKENAAQEVLEVQKVIDRLADNGQKALKAFENYDQEQVDNIVHAMALAGLDQHMPLAKLAVEETGRGLYEDKCIKNIFATEYIWNNIKNNKTVGVINEDVQTGVIEIAEPVGVVAGVTPVTNPTSTTLFKAIIAIKTRNPIIFAFHPSAQGCSSAAAKVVYDAAIAAGAPEHCIQWVEKPSLEATKQLMNHEKVALVLATGGAGMVKSAYSTGKPALGVGPGNVPAYIDKTAKIKRSVNDIILSKSFDQGMICASEQAVIVDKEVAKEVKAEMEANNCYFVKGAEFKKLESYVINPEKGTLNPDVVGKSPAWIANQAGFKVPEDTKILVAEIKGVGDKYPLSHEKLSPVLAFIEAANQAEAFDRCEEMLVYGGLGHSAVIHSTDKEVQKAFGIRMKACRIIVNAPSAQGGIGDIYNGFIPSLTLGCGSYGKNSVSQNVSATNLLNVKRIADRRNNMQWFKLPPKIFFEKYSTQYLQKMEGVERVFIVTDPGMVQFKYVDVVIEHLXKRGNDVSYQVFADVEPDPSDVTVYKGAELMKDFKPDTIIALGGGSAMDAAKGMWLFYEHPEASFFGLKQKFLDIRKRTFKYPKLGGKAKFVAIPTTSGTGSEVTPFAVITDKENNIKYPLADYELTPDVAXVDAQYVTTVPAHITADTGMDVLTHAIESYVSVMAGDYTRGLSIRAIELVFENLRDSVLKGDPDAREKMHNASALAGMAFANAFLGINHSLAHKIGPEFHIPHGRANAILMPHVIRYNALKPKKHALFPRYESFRADEDYARISRIIGFPAATTEEGVKSLVDEIIKLGKDVGIDMSLKGQNVDKKDLDAVVDTLADRAFMDQCTTANPKQPLVSELKEIYLEAYKGV

SEQ ID NO: 39889 - DNA, 2601 bp, Listeria innocua
  CDS (1)..(2601): transl_table=11
atggcaattaaagaaaatgcggcccaagaagtattagaagttcaaaaagtgattgacagattagcagacaatggacaaaaagcattgaaagcatttgaaagttacaaccaagaacaagtagataatatcgtacacgcaatggcgcttgccggacttgaccaacatatgccccttgcaaaattagcagtagaagaaacaggacgtggattatacgaagataaatgtattaaaaacatcttcgcaacagaatatatttggaacaacattaaaaacaacaaaacagtcggagttattaacgaagatactcaaactggtgttatcgaaattgctgaaccagtcggagtagttgccggggttacaccagtaactaacccaacttcaacaacacttttcaaagcaattatcgcgattaaaacgcgtaacccaatcatcttcgctttccatccaagtgcgcaacgttgttcatctgaagcagcaaaagttgtttatgatgcagcagttgcagctggagcaccagaacattgtattcaatgggtagaaaaaccttccctagaagcaacaaaacaattaatgaaccacgataaagtagcacttgtacttgcaactggtggtgctggaatggttaaatcagcatactctactggtaaacctgcactaggtgttggaccaggtaacgtaccagcttacattgacaaaacagctaaaatcaaacgttctgttaatgacatcattctttctaaatcttttgaccaaggtatgatttgtgcttctgaacaagcagttatcgtggacaaagaagttgctaaagaagtaaaagcagaaatggaagcaaacaaatgctacttcgttaaaggcgctgaatttaaaaaattagaaagctatgtaatcaaccctgaaaaaggaacacttaacccagatgtagttggtaaatcccctgcatggattgcaaaccaagctggtttcaaagttccagaagatacaaaaattcttgtagctgaaattaaaggtgttggcgacaaatacccactatctcacgaaaaattaagcccagttcttgcatttatcgaagctgctacccaagcagaagcattcgatcgttgtgaagaaatgttagtatacggcggacttggacactcagcagttattcactctactgataaagaagttcaaaaagcatttggtatccgtatgaaagcttgccgtatcatcgtaaatgcaccaagcgctcaaggcggtatcggtgacatttataacggcttcatcccttccctaacactaggttgtggatcttatggtaaaaactctgtatcacaaaatgtaagtgcgactaacttgctgaacgttaaacgtatcgcggatcggagaaataatatgcaatggttcaaacttccaccaaaaattttctttgaaaaatattctactcaataccttcaaaaaatggaaggcgttgaacgcgtatttatcgtaactgacccaggtatggttcaattcaaatacgttgatgtagtaatcgaacacctgaaaaaacgtggtaacgacgtagcttatcaagtattcgctgatgttgaaccagatccatctgacgtaacagtttacaaaggtgcagaattaatgaaagacttcaaaccagatacaattatcgctcttggtggtggttccgcaatggatgctgccaaaggtatgtggttattctatgaacacccagaagcttcattcttcggcttgaaacaaaaattcttagatatccgtaaacgtactttcaaatatcctaaacttggtggaaaagcgaaattcgttgcgattccaacaacaagtggtacaggttctgaagtaactccatttgcggttattacagacaaagaaaacaacattaaataccctcttgctgactacgaattaactccagacgttgcgattgtcgatgcacaatatgtaacaactgttccagcacacattactgctgatactggtatggacgttctaactcacgcaattgaatcttatgtatccgtaatggcaagcgattatacacgtggattatctatccgtgcaatcgaacttgtttttgaaaacttacgtgaatccgttcttactggtgatcctgatgcgcgtgaaaaaatgcataatgcttctgccctagctggtatggcgtttgcgaatgcgttcctaggaattaaccatagtttggcacacaaaattggacctgaattccacattcctcacggtcgtgcgaatgcaatccttatgccacacgttatccgttataacgcacttaaacctaaaaaacatgcgttattcccaagatatgaaagcttccgtgctgatgaagattatgctcgtatctctcgtattatcggcttccctgctgcaactacagaagaaggcgttaaatcacttgtagatgaaatcatcaaacttggtaaagatgttggtatcgacatgagtcttaaaggacaaaatgttgctaaaaaagacttggatgcagttgtagatacacttgcagatcgcgcattcatggaccaatgtactactgccaaccctaaacaaccacttgtaagcgaactaaaagaaatttaccttgaagcttacaaaggtgtttaa

SEQ ID NO: 39890 - protein, 866 aa, Listeria innocua
MAIKENAAQEVLEVQKVIDRLADNGQKALKAFESYNQEQVDNIVHAMALAGLDQHMPLAKLAVEETGRGLYEDKCIKNIFATEYIWNNIKNNKTVGVINEDTQTGVIEIAEPVGVVAGVTPVTNPTSTTLFKAIIAIKTRNPIIFAFHPSAQRCSSEAAKVVYDAAVAAGAPEHCIQWVEKPSLEATKQLMNHDKVALVLATGGAGMVKSAYSTGKPALGVGPGNVPAYIDKTAKIKRSVNDIILSKSFDQGMICASEQAVIVDKEVAKEVKAEMEANKCYFVKGAEFKKLESYVINPEKGTLNPDVVGKSPAWIANQAGFKVPEDTKILVAEIKGVGDKYPLSHEKLSPVLAFIEAATQAEAFDRCEEMLVYGGLGHSAVIHSTDKEVQKAFGIRMKACRIIVNAPSAQGGIGDIYNGFIPSLTLGCGSYGKNSVSQNVSATNLLNVKRIADRRNNMQWFKLPPKIFFEKYSTQYLQKMEGVERVFIVTDPGMVQFKYVDVVIEHLKKRGNDVAYQVFADVEPDPSDVTVYKGAELMKDFKPDTIIALGGGSAMDAAKGMWLFYEHPEASFFGLKQKFLDIRKRTFKYPKLGGKAKFVAIPTTSGTGSEVTPFAVITDKENNIKYPLADYELTPDVAIVDAQYVTTVPAHITADTGMDVLTHAIESYVSVMASDYTRGLSIRAIELVFENLRESVLTGDPDAREKMHNASALAGMAFANAFLGINHSLAHKIGPEFHIPHGRANAILMPHVIRYNALKPKKHALFPRYESFRADEDYARISRIIGFPAATTEEGVKSLVDEIIKLGKDVGIDMSLKGQNVAKKDLDAVVDTLADRAFMDQCTTANPKQPLVSELKEIYLEAYKGV

SEQ ID NO: 39891 - DNA, 2601 bp, Listeria monocytogenes
  CDS (1)..(2601): transl_table=11
atggcaattaaagaaaatgcggcccaagaagtattagaagttcaaaaagtgattgacagattagcagacaatggacaaaaagcattgaaagcatttgaaagttacaatcaagaacaagtagacaatatcgttcacgcaatggcacttgccggacttgaccaacatatgccccttgcaaaattagcagtagaagaaactggacgtggattatacgaagataaatgtattaaaaacatcttcgcgacagaatatatttggaacaacattaaaaacaacaaaacagtaggcgttattaatgaagatgtacaaactggtgtgattgaaattgctgaaccagttggagttgttgccggggttacacctgtaactaacccaacatccactactcttttcaaagcaattatcgctatcaaaacacgtaacccaatcatctttgctttccatccaagtgcacagcgttgttcatctgcagcagcgaaagttgtatacgatgcagcaattgcagctggagcaccagaacattgtattcaatgggtagaaaaaccttccctagaagcaacgaaacaattaatgaatcacgataaagtagcacttgtacttgcaactggtggtgctggaatggttaaatcagcatactctactggtaaacctgcactaggtgttggaccaggtaacgtaccagcttacattgacaaaacagccaaaattaaacgttctgttaatgacattattctttctaaatcttttgaccaaggtatgatttgtgcttctgaacaagcagtcatcgtggacaaagaagtagctaaagaagtaaaagcagaaatggaagcaaacaaatgctacttcgttaaaggcgctgaattcaaaaaattagaaagctacgtaatcaatcctgaaaaaggaacacttaacccagatgtagttggtaaatcccctgcatggattgcaaatcaagctggcttcaaagttccagaagatacaaaaatccttgtagctgaaattaaaggtgttggcgacaaatacccactatctcacgaaaaattaagcccagttcttgcattcatcgaagctgctaaccaagcagaagcattcgatcgttgtgaagaaatgttagtatacggaggacttggacactccgcagttattcactctacggataaagaagttcaaaaagcatttggtattcgtatgaaagcttgccgtatcatcgtaaatgcaccaagcgcacaaggcggtatcggtgacatttataacggcttcatcccttccctaacactaggttgtggatcttacggtaaaaactctgtatcacaaaatgtaagtgcgactaacttgctgaacgttaaacgtatcgcggatcggagaaataatatgcaatggttcaaacttccaccaaaaattttctttgaaaaatattccactcaataccttcaaaaaatggaaggcgttgaacgcgtatttatcgtaactgacccaggaatgggttcattcaaatacgtggatgtcgtaatcgaacacctgaaaaaacgtggcaacgatgtagcttaccaagtatttgctgacgttgaaccagatccatctgacgtaacagtttacaaaggtgcagaactaatgaaagacttcaaacctgatacaattatcgctcttggtggtggttctgcaatggatgctgccaaaggtatgtggttattctatgaacacccagaagcttcattcttcggcttgaaacaaaaattcttagatatccgtaaacgtacattcaaatatcctaaacttggtggaaaagcgaaattcgttgcaattccaacaacaagtggtacaggttctgaagtaactccatttgcggttattacagacaaagaaaacaacattaaataccctcttgcagactacgaattaactccagatgttgcgattgtcgatgcacaatatgtaactactgttccagcacacattactgctgacactggtatggacgttctaactcacgcaattgaatcttatgtatccgtaatggcaagcgattatactcgtggattatctatccgcgcaatcgaacttgtatttgaaaacttacgtgaatctgttcttactggtgatccagatgcgcgtgaaaaaatgcataatgcttctgccctagctggtatggcgtttgcaaatgcgttcctaggaattaaccacagcttggcacacaaaattggacctgaattccacattcctcacggtcgtgcgaatgcaatccttatgccacatgttattcgttataacgcacttaaacctaaaaaacatgcgttattccctagatatgaaagcttccgtgctgatgaagattatgctcgtatctctcgtattatcggcttccctgcagcaactacagaagaaggcgttaaatcacttgtagatgaaatcatcaaacttggtaaagacgttggtatcgacatgagtcttaaaggacaaaatgttgctaaaaaagatttggatgcagttgtagatacacttgcagatcgcgcattcatggaccaatgtactactgccaaccctaaacaaccacttgtaagtgaactaaaagaaatctacctagaagcttacaaaggtgtttga

SEQ ID NO: 39892 - protein, 866 aa, Listeria monocytogenes
MAIKENAAQEVLEVQKVIDRLADNGQKALKAFESYNQEQVDNIVHAMALAGLDQHMPLAKLAVEETGRGLYEDKCIKNIFATEYIWNNIKNNKTVGVINEDVQTGVIEIAEPVGVVAGVTPVTNPTSTTLFKAIIAIKTRNPIIFAFHPSAQRCSSAAAKVVYDAAIAAGAPEHCIQWVEKPSLEATKQLMNHDKVALVLATGGAGMVKSAYSTGKPALGVGPGNVPAYIDKTAKIKRSVNDIILSKSFDQGMICASEQAVIVDKEVAKEVKAEMEANKCYFVKGAEFKKLESYVINPEKGTLNPDVVGKSPAWIANQAGFKVPEDTKILVAEIKGVGDKYPLSHEKLSPVLAFIEAANQAEAFDRCEEMLVYGGLGHSAVIHSTDKEVQKAFGIRMKACRIIVNAPSAQGGIGDIYNGFIPSLTLGCGSYGKNSVSQNVSATNLLNVKRIADRRNNMQWFKLPPKIFFEKYSTQYLQKMEGVERVFIVTDPGMGSFKYVDVVIEHLKKRGNDVAYQVFADVEPDPSDVTVYKGAELMKDFKPDTIIALGGGSAMDAAKGMWLFYEHPEASFFGLKQKFLDIRKRTFKYPKLGGKAKFVAIPTTSGTGSEVTPFAVITDKENNIKYPLADYELTPDVAIVDAQYVTTVPAHITADTGMDVLTHAIESYVSVMASDYTRGLSIRAIELVFENLRESVLTGDPDAREKMHNASALAGMAFANAFLGINHSLAHKIGPEFHIPHGRANAILMPHVIRYNALKPKKHALFPRYESFRADEDYARISRIIGFPAATTEEGVKSLVDEIIKLGKDVGIDMSLKGQNVAKKDLDAVVDTLADRAFMDQCTTANPKQPLVSELKEIYLEAYKGV

SEQ ID NO: 39893 - DNA, 1164 bp, Clostridium pasteurianum
  CDS (1)..(1164): transl_table=11
atgagctatcgtatgtttgattatctggtgccaaatgtgaacttttttggcccgaatgctatttccgttgtcggcgaacgctgcaaactgttgggcggtaaaaaagcgctgctggtgactgataaaggtctgcgagccattaaggacggcgcggttgataaaaccctcgaacatctgcgtgaagccggtattgacgtggtggtgtttgacggcgtcgagccaaaccctaaagacaccaacgtgcgcgacggcctggacgtttttcgtaaagagcaatgcgatatcatcgttaccgtcggcggtggtagcccgcatgactgcggtaaaggcatcggtatcgcggcgacgcacgaaggcgatctctatagctatgccgggattgaaaccctgaccaatccgctgccgccgatcgtcgcggtgaataccaccgccggtaccgccagcgaagtcacccgtcactgcgtgctgaccaataccaaaaccaaagtgaagtttgtgattgtcagttggcgcaacctgccgtcggtttccattaatgaccctctgctgatgctcggcaaacctgcgccactgactgcggcaacaggaatggacgccctgacccacgccgttgaggcctatatttcaaaagatgccaacccggttaccgacgccgccgctatccaggcaattcgtctgatcgcccgcaacttacgccaggccgtagcactgggcagcaacctgaaagctcgcgagaatatggcctatgcctctttgctggcgggtatggccttcaacaacgccaaccttggctacgttcacgcgatggcgcatcagcttggcggtctgtacgacatgccgcacggcgtggcaaatgccgtcctgctgccgcacgtggcgcgctataacctgatcgctaatccggagaaatttgccgacatcgcggagtttatgggtgagaacactgacggtctgtccaccatggatgctgccgagctggcgattcgcgccatcgctcgcctgtcagccgatatcggtattccgcagcatctgcgcgagctgggcgtcaaagaagccgatttcccgtatatggcggaaatggcgctgaaagacggcaatgccttctccaacccgcgcaaagggaacgagaaagaaattgccgagattttccgccaggcattctga

SEQ ID NO: 39894 - protein, 387 aa, Clostridium pasteurianum
MSYRMFDYLVPNVNFFGPNAISVVGERCKLLGGKKALLVTDKGLRAIKDGAVDKTLEHLREAGIDVVVFDGVEPNPKDTNVRDGLDVFRKEQCDIIVTVGGGSPHDCGKGIGIAATHEGDLYSYAGIETLTNPLPPIVAVNTTAGTASEVTRHCVLTNTKTKVKFVIVSWRNLPSVSINDPLLMLGKPAPLTAATGMDALTHAVEAYISKDANPVTDAAAIQAIRLIARNLRQAVALGSNLKARENMAYASLLAGMAFNNANLGYVHAMAHQLGGLYDMPHGVANAVLLPHVARYNLIANPEKFADIAEFMGENTDGLSTMDAAELAIRAIARLSADIGIPQHLRELGVKEADFPYMAEMALKDGNAFSNPRKGNEKEIAEIFRQAF

SEQ ID NO: 39895 - DNA, 1152 bp, Actinobacillus pleuropneumoniae serovar 7
  CDS (1)..(1152): transl_table=11
atgtcaaatcgtttgattttgaatgaaaccagttaccacggtaaaggcgcgattcagcatattgtgtatgaagtcaaaagtcgcagttttaagaaagcgttagtggttaccgataaagatttaattaagtataacgtcgcttctaaagtaaccgatttattggatacggcaggtttaccgtatgaaatttttgatgaagttaaagcgaatccgtcggtcgatgtgatcaaagccggtgtagaaaaatttaaagcatccggtccgaattatctaattgccatcggtggcggatccccgatggatagtgcgaaagcaatcggtattatcatcaataaccctgaatttaaccatggaggatcgttacaaggtgtggcaccgacgcatcaaaaatgtattccgatcattgcagcaccaaccaccgttggtacggcagcagaggttacgattaattacgtgattaccgatgaagaaaaaaaacgtaagttcgtttgtgtggatgtgcacgacgtaccggcggttgcggtggttgatccgaatatgatgtcctctatgccgaaaggcttaaccgcggcaaccggtatggatgctttaacccatgcgattgaaggttatatcactaaagcggcgtgggaattaaccgatgcgttacacttaaaagcgatcgaaattattgctcgtagcttacgcagtgcggtggaaaatgatccgcaagggcgtgagggaatggctctcggtcaatatgttgccggtatgggtttctcaaatgtcggtttgggtgtagtacacggaatggcacatcctctttccgcttattacgatacgccgcacggtatcgccaacgcggtgttattaccttatgtgatggaatttaataaaaatcacacgggtgagaaatatcgtgaaatcgcacgcgcgatgggcgtgaaaggcgtgaatgaaatgatgcaagccgaataccgagatgcagcagtagcagcggtaaaacagcttgcgatagatgtcggtattccggaaaaactttcgcaaatcggagtaaaagaagaagatatgcctgcgctttctattgatgcgtttaacaaagtatgtacgccgggaaatccgagagagtgtacgtcacaaaatattttgggggtattttatgaagcttattaa

SEQ ID NO: 39896 - protein, 383 aa, Actinobacillus pleuropneumoniae serovar 7
MSNRLILNETSYHGKGAIQHIVYEVKSRSFKKALVVTDKDLIKYNVASKVTDLLDTAGLPYEIFDEVKANPSVDVIKAGVEKFKASGPNYLIAIGGGSPMDSAKAIGIIINNPEFNHGGSLQGVAPTHQKCIPIIAAPTTVGTAAEVTINYVITDEEKKRKFVCVDVHDVPAVAVVDPNMMSSMPKGLTAATGMDALTHAIEGYITKAAWELTDALHLKAIEIIARSLRSAVENDPQGREGMALGQYVAGMGFSNVGLGVVHGMAHPLSAYYDTPHGIANAVLLPYVMEFNKNHTGEKYREIARAMGVKGVNEMMQAEYRDAAVAAVKQLAIDVGIPEKLSQIGVKEEDMPALSIDAFNKVCTPGNPRECTSQNILGVFYEAY

SEQ ID NO: 39897 - DNA, 2658 bp, Piromyces sp
  CDS (1)..(2658)
atgtccggattacaaatgttccaaaacctttctctttacggtagtctcgccgaaatcgatactagcgaaaagcttaacgaagctatggacaaattaactgctgcccaagaacaattcagagaatacaaccaagaacaagttgacaaaatcttcaaggctgttgctttagctgcttctcaaaaccgtgttgctttcgctaagtacgcacacgaagaaacccaaaagggtgttttcgaagataaggttatcaagaacgaattcgctgctgattacatttaccacaagtactgcaatgacaagaccgccggtatcattgaatatgatgaagccaatggtcttatggaaattgctgaaccagttggtccagttgttggtattgctccagttactaacccaacttctactatcatctacaagtctttaattgccttaaagacccgtaactgtattatcttctcaccacatccaggagctcacaaggcctctgttttcgttgttaaggtcttacaccaagctgctgttaaggctggtgccccagaaaactgtattcaaatcatcttcccaaagatggatttaactactgaattattacaccaccaaaagactcgtttcatttgggctactggtggtccaggtttagttcacgcctcttacacttctggtaagccagctcttggtggtggtccaggtaatgctccagctcttattgatgaaacttgtgatatgaacgaagctgttggttctatcgttgtttctaagactttcgattgtggtatgatctgtgccactgaaaacgctgttgtcgttgtcgaatctgtctacgaaaacttcgttgctaccatgaagaagcgtggtgcctacttcatgactccagaagaaaccaagaaggcttctaaccttcttttcggagaaggtatgagattaaatgctaaggctgttggtcaaactgccaagactttagctgaaatggccggtttcgaagtcccagaaaacaccgttgttctctgtggtgaagcttctgaagttaaattcgaagaaccaatggctcacgaaaagttaactactatcctcggtatctacaaggctaaggactttgacgatggtgtcagattatgtaaggaattagttactttcggtggtaagggtcacactgctgttctctacaccaaccaaaacaacaaggaccgtattgaaaagtaccaaaacgaagttccagccttccacatcttagttgacatgccatcttccctcggttgtattggtgatatgtacaacttccgtcttgctccagctcttaccattacttgtggtactatgggtggtggttcctcctctgataacattggtccaaagcacttacttaacatcaagcgtgttggtatgagacgcgaaaacatgctttggttcaagattccaaagtctgtctacttcaagcgtgctatcctttctgaagctttatctgacttacgtgacacccacaagcgtgctatcattattaccgatagaactatgactatgttaggtcaaactgacaagatcattaaggcttgtgaaggtcatggtatggtctgcactgtctacgataaggttgtcccagatccaactatcaagtgtattatggaaggtgttaatgaaatgaacgtcttcaagccagatttagctattgctcttggtggtggttctgctatggatgccgctaagatgatgcgtttattctacgaatacccagaccaagacttacaagatattgctactcgtttcgtcgatatccgtaagcgtgttgttggttgtccaaagcttggtagacttattaagactcttgtctgtatcccaactacctctggtactggtgccgaagttactccattcgctgtcgttacctctgaagaaggtcgtaagtacccattagtcgactacgaacttactccagatatggctattgttgatccagaattcgctgttggtatgccaaagcgtttaacttcttggactggtattgatgctcttacccacgccattgaatcttacgtttctattatggctactgacttcactagaccatactctctccgtgctgttggtcttatcttcgaatccctttcccttgcttacaacaacggtaaggatattgaagctcgtgaaaagatgcacaatgcttctgctattgctggtatggcctttgccaacgctttccttggttgttgtcactctgttgctcaccaacttggttccgtctaccacattccacacggtcttgccaacgctttaatgctttctcacatcattaagtacaacgctactgactctccagttaagatgggtaccttcccacaatacaagtacccacaagctatgcgtcactacgctgaaattgctgaactcttattaccaccaactcaagttgttaagatgactgatgttgataaggttcaatacttaattgaccgtgttgaacaattaaaggctgacgttggtattccaaagtctattaaggaaactggaatggttactgaagaagacttcttcaacaaggttgaccaagttgctatcatggccttcgatgaccaatgtactggtgctaacccacgttacccattagtttctgaattaaaacaattaatgattgatgcctggaacggtgttgtcccaaagctctaa

SEQ ID NO: 39898 - protein, 885 aa, Piromyces sp
MSGLQMFQNLSLYGSLAEIDTSEKLNEAMDKLTAAQEQFREYNQEQVDKIFKAVALAASQNRVAFAKYAHEETQKGVFEDKVIKNEFAADYIYHKYCNDKTAGIIEYDEANGLMEIAEPVGPVVGIAPVTNPTSTIIYKSLIALKTRNCIIFSPHPGAHKASVFVVKVLHQAAVKAGAPENCIQIIFPKMDLTTELLHHQKTRFIWATGGPGLVHASYTSGKPALGGGPGNAPALIDETCDMNEAVGSIVVSKTFDCGMICATENAVVVVESVYENFVATMKKRGAYFMTPEETKKASNLLFGEGMRLNAKAVGQTAKTLAEMAGFEVPENTVVLCGEASEVKFEEPMAHEKLTTILGIYKAKDFDDGVRLCKELVTFGGKGHTAVLYTNQNNKDRIEKYQNEVPAFHILVDMPSSLGCIGDMYNFRLAPALTITCGTMGGGSSSDNIGPKHLLNIKRVGMRRENMLWFKIPKSVYFKRAILSEALSDLRDTHKRAIIITDRTMTMLGQTDKIIKACEGHGMVCTVYDKVVPDPTIKCIMEGVNEMNVFKPDLAIALGGGSAMDAAKMMRLFYEYPDQDLQDIATRFVDIRKRVVGCPKLGRLIKTLVCIPTTSGTGAEVTPFAVVTSEEGRKYPLVDYELTPDMAIVDPEFAVGMPKRLTSWTGIDALTHAIESYVSIMATDFTRPYSLRAVGLIFESLSLAYNNGKDIEAREKMHNASAIAGMAFANAFLGCCHSVAHQLGSVYHIPHGLANALMLSHIIKYNATDSPVKMGTFPQYKYPQAMRHYAEIAELLLPPTQVVKMTDVDKVQYLIDRVEQLKADVGIPKSIKETGMVTEEDFFNKVDQVAIMAFDDQCTGANPRYPLVSELKQLMIDAWNGVVPKL

SEQ ID NO: 39899 - DNA, 2682 bp, Streptococcus bovis
  CDS (1)..(2682): transl_table=11
atggctaaagcaacaaatgcagatgtaaagaataacgagttgagcgcagaagaattggctcaacagtacacaggagctcttgtcgaaaaagctcttgaagctgaacgtgtttatgcaacttattcacaagaacaagttgataacattgtcgcagctatggctcttgcaggttcagaagcttcacttgaattggcaaaagaagctcatgcagaaacaggtcgtggtgtcgttgaggataaggatattaaaaaccactttgctactgagtacgtttacgaacgtattaaaaacgaaaaaacagtaggcattattggggaagataaagtttcaggaagtatccaaattgcagcaccacttggtgtcttggctggtattgttccaacaactaacccaacttcaacaacaatgttcaagattttggttgcgttgaagacacgtaatgcaattgtttttgcattccacccacaagcccaaaaatgttcagcacacgcagcacaaattctttacgacgctgctgttaaagctggtgcaccagaaaacattgttcaatggattgaaacaccatctcttgcaaacacatcagcacttattcaaaatccgaaaattgcttctatcttggcaactggtggacctggtatggtaaatgccgctcttaaatcaggtaacccatcaatgggtgttggtgctggtaacggtgctatctacgttgatgcaacagctcacgttgaccgtgcagtagaagatttgttgttatcaaaacgtttcgataatggtatgatttgtgccacagaaaactctgcagtcgttgaagctcctatttacgatgaatggcttcaaaaaatgcaagacaaaggtgcctaccttgtacctaagaaggactataaaaaacttgaagactttgtctttaatgacagacacggtgttaacggtccagttgctggtatgccagctcgctggatttgtgaacaagccggtgtgaaattgccagaaggtaaagatgttctcttgtttgaacttgataagaaaaatatcggtgaaaaactatcttctgaaaaactttctccactcctttcagtttacaaagctaaagatcgtgctgaaggtgttgaaattgttgaagcacttcttgactaccaaggtgcaggacacaatgctggtattcaaattggttctcaagcagacccatttgttgctgaatatggcgatgctgtgaaagcatcacgtgtcttggttaaccaaccagattcagtcggaggtattggtgatgtctacacagacgcacttaaagctagcttaacacttggaacaggatcatgggggaaaaattcattgtcacacaatctttcaactggcgatctcttaaatgttaagacagttgccaaacgtcgcaaccgtcctcaatggattcgcctaccagaaaaaacttactacgaaaaaaatgctatttcttacttgcaagatgaatacgaaccaatgcaacgcgctttgattgttgccgacccaggtatggttcaatttggttttgttgatactgttcttgctcaattggcattgcgtgatgaaaaagttgcgacatcaatttacggtacaatcaaaccagatccaacacttggtcaaacgattgaaattgctaaacaaatgcgtgatttcaaaccagacacagttatcgcagtcggtggtggttctgctcttgatgcagctaaaattgcacgttacatctacgaatactcacttgatcaagaagctgatttccttgacagctacgaaaatgtcagcgaactcttcttacgtttgcaacaaaaattcatcgatatccgtaaacgtatcgtgaaattcaaacaccaaacagcaacacgtctcttctgtatcccaacaacatctggtacaggttcagaagttacaccatacgctgttatcactgatgaccacactcacgttaaatatcctttgactgactatgaattgactccacaagttgctatcgtagacccagaatttgttatgacagtgccaaaacgcacagtagctctttctggtcttgatactttgtcacatgcccttgaagcttatgtttcagttatggcatctgatttgactcgtccatggtcacttgaagctatcaagttggttatcgaaaacttggaagattcatataactatgatcctaaacacccaacacttcgtggtgaacaagcacgtgaaaacatgcactacgcagcaactcttgctggtatggccttctcaaatgccttcctaggtattaatcactcaatcgcacacaaaactggtggtgaatttggccttcctcacggtttagctatctcaattgctatgcaacacgttatccgctacaacggtgtggctggaaatgtaaaacgttcagtcttcccacgctatgaagaataccgtgcacaacgtgattacgctgatattgctcgtagccttggtcttaaaggtaaagatgatgcagcattggtagaagcactttgcgaacgtattgatgctttgatgaaagccgttgatgttgatccacgtctttctgcaaatggtgttacaaaagaagcctttgatgcagcagttgataaattagcatcacttgcatacgatgatcaatgtacacctgctaacccacgtcaaccttacattgctgagttgaaacaattattgattgacatgttctaa

SEQ ID NO: 39900 - protein, 893 aa, Streptococcus bovis
MAKATNADVKNNELSAEELAQQYTGALVEKALEAERVYATYSQEQVDNIVAAMALAGSEASLELAKEAHAETGRGVVEDKDIKNHFATEYVYERIKNEKTVGIIGEDKVSGSIQIAAPLGVLAGIVPTTNPTSTTMFKILVALKTRNAIVFAFHPQAQKCSAHAAQILYDAAVKAGAPENIVQWIETPSLANTSALIQNPKIASILATGGPGMVNAALKSGNPSMGVGAGNGAIYVDATAHVDRAVEDLLLSKRFDNGMICATENSAVVEAPIYDEWLQKMQDKGAYLVPKKDYKKLEDFVFNDRHGVNGPVAGMPARWICEQAGVKLPEGKDVLLFELDKKNIGEKLSSEKLSPLLSVYKAKDRAEGVEIVEALLDYQGAGHNAGIQIGSQADPFVAEYGDAVKASRVLVNQPDSVGGIGDVYTDALKASLTLGTGSWGKNSLSHNLSTGDLLNVKTVAKRRNRPQWIRLPEKTYYEKNAISYLQDEYEPMQRALIVADPGMVQFGFVDTVLAQLALRDEKVATSIYGTIKPDPTLGQTIEIAKQMRDFKPDTVIAVGGGSALDAAKIARYIYEYSLDQEADFLDSYENVSELFLRLQQKFIDIRKRIVKFKHQTATRLFCIPTTSGTGSEVTPYAVITDDHTHVKYPLTDYELTPQVAIVDPEFVMTVPKRTVALSGLDTLSHALEAYVSVMASDLTRPWSLEAIKLVIENLEDSYNYDPKHPTLRGEQARENMHYAATLAGMAFSNAFLGINHSIAHKTGGEFGLPHGLAISIAMQHVIRYNGVAGNVKRSVFPRYEEYRAQRDYADIARSLGLKGKDDAALVEALCERIDALMKAVDVDPRLSANGVTKEAFDAAVDKLASLAYDDQCTPANPRQPYIAELKQLLIDMF

SEQ ID NO: 39901 - DNA, 1164 bp, Klebsiella pneumoniae
  CDS (1)..(1164): transl_table=11
atgagctatcgtatgtttgattatctggtgccaaacgttaacttttttggccccaacgccatttccgtagtcggcgaacgctgccagctgctgggggggaaaaaagccctgctggtcaccgacaaaggcctgcgggcaattaaagatggcgcggtggacaaaaccctgcattatctgcgggaggccgggatcgaggtggcgatctttgacggcgtcgagccgaacccgaaagacaccaacgtgcgcgacggcctcgccgtgtttcgccgcgaacagtgcgacatcatcgtcaccgtgggcggcggcagcccgcacgattgcggcaaaggcatcggcatcgccgccacccatgagggcgatctgtaccagtatgccggaatcgagaccctgaccaacccgctgccgcctatcgtcgcggtcaataccaccgccggcaccgccagcgaggtcacccgccactgcgtcctgaccaacaccgaaaccaaagtgaagtttgtgatcgtcagctggcgcaacctgccgtcggtctctatcaacgatccgctgctgatgatcggtaaaccggccgccctgaccgcggcgaccgggatggatgccctgacccacgccgtagaggcctatatctccaaagacgctaacccggtgacggacgccgccgccatgcaggcgatccgcctcatcgcccgcaacctgcgccaggccgtggccctcggcagcaatctgcaggcgcgggaatacatggcctatgcctctctgctggccgggatggctttcaataacgccaacctcggctacgtgcacgccatggcgcaccagctgggcggcctgtacgacatgccgcacggcgtggccaacgctgtcctgctgccgcatgtggcgcgctacaacctgatcgccaacccggagaaattcgccgatatcgctgaactgatgggcgaaaatatcaccggactgtccactctcgacgcggcggaaaaagccatcgccgctatcacgcgtctgtcgatggatatcggtattccgcagcatctgcgcgatctgggggtaaaagagaccgacttcccctacatggcggagatggctctgaaagacggcaatgcgttctcgaacccgcgtaaaggcaacgagcaggagattgccgcgattttccgccaggcattctga

SEQ ID NO: 39902 - protein, 387 aa, Klebsiella pneumoniae
MSYRMFDYLVPNVNFFGPNAISVVGERCQLLGGKKALLVTDKGLRAIKDGAVDKTLHYLREAGIEVAIFDGVEPNPKDTNVRDGLAVFRREQCDIIVTVGGGSPHDCGKGIGIAATHEGDLYQYAGIETLTNPLPPIVAVNTTAGTASEVTRHCVLTNTETKVKFVIVSWRNLPSVSINDPLLMIGKPAALTAATGMDALTHAVEAYISKDANPVTDAAAMQAIRLIARNLRQAVALGSNLQAREYMAYASLLAGMAFNNANLGYVHAMAHQLGGLYDMPHGVANAVLLPHVARYNLIANPEKFADIAELMGENITGLSTLDAAEKAIAAITRLSMDIGIPQHLRDLGVKETDFPYMAEMALKDGNAFSNPRKGNEQEIAAIFRQAF

SEQ ID NO: 39903 - DNA, 2646 bp, Spironucleus barkhanus
  CDS (1)..(2646): transl_table=6
atgcgagcttaaatgaaggtcgctacttccgaagatcttaacaaacttatggacatggctttagagtcccactttgaattccttaaacttaactaggaataagtcaacaagatcttttatgctgcatcttttgctgcaaattctgctcgtatccctcttgcttaataggctgttattgatactggtatgggtgttgttgaagacaaggttatcaagaataactatgcttctgaatacatctttaatagatataaaaatgagaagactgttggtttgatttctgaagataaaatcaacggtaaggccacttatgctgaaccattaggtatcttggctggtattatccccaccaccaatcctacttctactgttatcttcaagtgcttgatcgctcttaagacacgtaattgtatagttatttcacctcatcctcgtgctgctaaatgttctattgaggctgctcgtattgtacgtgatgctgctatagctaatggtgctcctaaaaactgtattagctggattactgatccatctgtcgctctttctggagaacttatgaagcataaacttacctcatgtattcttgctactggtggtccagctatggtaactgctgcttactcttctggaaatcctgccttaggtgttggcccaggtaacaactgcgctatcattgatgagctatgcaatattaaggatgcagtttcttctataattttatcaaagacttttgataatggtatgatctgtgcttctgagtaatcttgcgtggttgttgattctgtctatgaataaatcaaggaggaattcaagtatcgtggttgcttcttccttaataaggaggaaactgcaaaaataggtgacttctgtcttcctattaaccctaagactggcatcagaggtttgaatccagcagctgttggctaacctgctcgtaagattgctgaaatggctggtgtttccgttcccgccgaacatccttgtaaagttctcattggtgaggatacgaatgatcacattggtcatacacatgccatgagtcttgaaaagcttgctccagttttaggtatgttcaaggccaaaaatttcgacgaagcattagaggtagcttccaagtgtatccatatggcaggtaaaggtcatactggttccatccatactgcttttgaggcttaagaccgtatcaataaatttgcccaggttgtttaagccggtcgtttaattgtcaattaaccttctgcccatggtggtattggcgatttatataacttcacccttgatcctaccttgactattggttgcggttcccacggtggtaactccgtatctcagaacgttggctgccagcatttactcaattataaaaatgtagttgttaaacgtgaaaattgcctctggttcaaatccccacctaagatctacttcaaatatggttgccttaccgaagccatcaaagatctttatcacttcaagagatgttttattataactgataaaatcttattcgatcttggatatactgacaacattatcaaacctctcgaagccaaaggtattaaaacaacaatattctctgaagtagcccctgacccagatcttgcctgttgtagctcttgtttgaagttggttaaggctttcaaacctgactgctttatcgcccttggtggtggttctgctatggatctcatgaagatggtacgtttgcaatacgaacatggtgatgctgatttcatcggactcgcctaacgtttcgcagatatcaggaagcgtatttatgagttccctgaattacttgaccttaagaaggttaagacttattccgtatgtatccctacttcttctggtactggggctgaggttactcctttcgcagttattactgataacaccattggtgttaagtaccctcttgctgattacatgctcgttcctcaaatggcaatcgttgactcatctcttgctatgaccatgccaagattccttgctgcatggactggcgttgacgctcttactcacgctatcgaatcctatgtgtcccttttggccactgaattcacttaaccattgtcattataggccatgaagcttatcttccagtatctccctgaatcttgcaacaaggttactaaggaatctcgtgaagctattcatcatgctgctacaattgctggtatggcttttggtaatgctttcttaggtatctgtcattctatggctcacaagctaggttaaaaattccacgttccacacggtcttgctaacgctatatgcctctgccctactatcaagtttaactctactgatgtgcctaccaagatgggtgctttccctcagtacaagtatccttaagccatataacgttatggcgaaatcgttgactatctcggtttcaagcctaaagttaacacaccaatgggtaaagttgaatgtctcatcgaaaatattttggaactttataagtaattagatgtttctccttatattaaagactttagaaatgctcctaccaaggaataatatgttgaagctttagattacctcagttatcacgcctttgatgatcagtgcactggtgctaaccctcgttaccccttaattgctgaattgaaggaagttctggctactttgtatgaaccttccaagtga

SEQ ID NO: 39904 - protein, 881 aa, Spironucleus barkhanus
MRAQMKVATSEDLNKLMDMALESHFEFLKLNQEQVNKIFYAASFAANSARIPLAQQAVIDTGMGVVEDKVIKNNYASEYIFNRYKNEKTVGLISEDKINGKATYAEPLGILAGIIPTTNPTSTVIFKCLIALKTRNCIVISPHPRAAKCSIEAARIVRDAAIANGAPKNCISWITDPSVALSGELMKHKLTSCILATGGPAMVTAAYSSGNPALGVGPGNNCAIIDELCNIKDAVSSIILSKTFDNGMICASEQSCVVVDSVYEQIKEEFKYRGCFFLNKEETAKIGDFCLPINPKTGIRGLNPAAVGQPARKIAEMAGVSVPAEHPCKVLIGEDTNDHIGHTHAMSLEKLAPVLGMFKAKNFDEALEVASKCIHMAGKGHTGSIHTAFEAQDRINKFAQVVQAGRLIVNQPSAHGGIGDLYNFTLDPTLTIGCGSHGGNSVSQNVGCQHLLNYKNVVVKRENCLWFKSPPKIYFKYGCLTEAIKDLYHFKRCFIITDKILFDLGYTDNIIKPLEAKGIKTTIFSEVAPDPDLACCSSCLKLVKAFKPDCFIALGGGSAMDLMKMVRLQYEHGDADFIGLAQRFADIRKRIYEFPELLDLKKVKTYSVCIPTSSGTGAEVTPFAVITDNTIGVKYPLADYMLVPQMAIVDSSLAMTMPRFLAAWTGVDALTHAIESYVSLLATEFTQPLSLQAMKLIFQYLPESCNKVTKESREAIHHAATIAGMAFGNAFLGICHSMAHKLGQKFHVPHGLANAICLCPTIKFNSTDVPTKMGAFPQYKYPQAIQRYGEIVDYLGFKPKVNTPMGKVECLIENILELYKQLDVSPYIKDFRNAPTKEQYVEALDYLSYHAFDDQCTGANPRYPLIAELKEVLATLYEPSK

SEQ ID NO: 39905 - DNA, 1191 bp, Trichomonas vaginalis
  CDS (1)..(1191)
atgggccgtttcacactcccacgcgttctctatcatggcaagggcgctctcgagaatctcaagacactcaagggcaagagagccttcgtcgtcacaggttcccacgctatgcgcaaattcggattccttgacaaggttgttaactacctcaaggaagccaagttcgaggttcatgtcttcgatggtgtcgagcaagacccatctgtcgaaacagtcttcaagggcgctaaggccatggaagaattcaagccagactggattgttgctctcggtggtggctctccaatcgatgctgccaaggccatgtgggctgtttacgaatacccagagatgaccttcgaaaagctcatcgtcccattctcattcccagaactccgccaaaaggcccacttctgcgccatcacatcaacatctggcacagctacagaagtcacagccttctctgtcatcacagactaccagaagggcatcaagtacccacttgctgatttcaacatcacaccagatgttgccattgtcgatccagatcttgctgagacaatgccaaagaagctcgtcgctttcacaggcatggatgccctcacacacgctttcgaagcctacgtttctacacttcactgcgattacactgatggcttggccctccactccatcaagctcatcttcgaaacactcgaagcttccttcaacggctgcatgaaggcccgcgctacaatgcacaacgctcagtgccttgctggtatggccttctccaacgccctcctcggcattgtccactcaatggcccacaagacaggcgctgcttacacaagtggccacatcgtccacggctgcgctaacgccatgtaccttccaaaggttatcaagtacaactccaagaacgaagaggccctccaccgctatggtgacatcgctcgcttccttggaatgcaaggcaaggatgatgtcgaactcgtcgatgctatctgccagagaatccgtgacctctgcgtcaagatcgaagtcccactctgcatcaaggactacgagaacggaatgatcaacgaacaggagtaccttgccaagctcaaggatgttgctacaaacgctatcggcgatgcttgcacaggctctaacccacgccagccaacccaggaggaaatggagaagctcctcctcgctgtcttctttgacaagccaatcgatttctaa

SEQ ID NO: 39906 - protein, 396 aa, Trichomonas vaginalis
MGRFTLPRVLYHGKGALENLKTLKGKRAFVVTGSHAMRKFGFLDKVVNYLKEAKFEVHVFDGVEQDPSVETVFKGAKAMEEFKPDWIVALGGGSPIDAAKAMWAVYEYPEMTFEKLIVPFSFPELRQKAHFCAITSTSGTATEVTAFSVITDYQKGIKYPLADFNITPDVAIVDPDLAETMPKKLVAFTGMDALTHAFEAYVSTLHCDYTDGLALHSIKLIFETLEASFNGCMKARATMHNAQCLAGMAFSNALLGIVHSMAHKTGAAYTSGHIVHGCANAMYLPKVIKYNSKNEEALHRYGDIARFLGMQGKDDVELVDAICQRIRDLCVKIEVPLCIKDYENGMINEQEYLAKLKDVATNAIGDACTGSNPRQPTQEEMEKLLLAVFFDKPIDF

SEQ ID NO: 39907 - DNA, 1155 bp, Escherichia coli
  CDS (1)..(1155): transl_table=11
atgagtgagtttttgctgaaaccccggatctgcttcggtcaagacgcgctgtcagtcctggacgagctaaccgcctgtcatgttttgctggttaccgatcaggcgatggtcaaattcggtcttgctgaacgtgtcacgcagcgtctctgtgcgcgcggcattgactggcaggtgtgggatgacgttgtcgccgatccggatatcgctaccgtggtccgagggatgaagttgatggacagctgctacccggatctggttatcgcactcggcggtggttcggtcattgacgcagccaaagcggttattttcgccctggcgcaaacccgtccggaagcaggacgtgaacgcccctgctttgtggctattccaaccaccagcggtacgggctcagaagtgaccagtttctcggtggtgaaagcccatgccgaaaaactggtgctggttgactcgtcgctgctaccggatatcgccattcttgatccgtcactggtggcatccgtgccacctgctatcaccgctgacaccggaatggatgtgttgtgccacgctctggaggcttatgtctcccttgccgccagcgacttttccgatgcacttgctgaaaaagtggtgcaacaggtgttcagctacctgccgggctgctggcgtaacggccaggatttgcaggctcgggagaaaatgcacaacgcctcatgtatggcaggaatggcgtttaccaatgcctctcttggcatcacccatagcctagctcatgcccttggtggtgttttccgtgtccctcatgggcgcgcaaatgccctgctaatggcacacgttgtggcatggaatgctgactaccacggtcaatgcgacacccttgctgcgcggaaatatgcacgtctggcacatctgttggatctgcctgccagcacgcctcgtgaaggagtaacaagcctgctggtcgcaatccaaacgctgaaagatgaaatgaatatgcccagggggattaacgacaccggcgtgaatgccgctgatttcgatcagcgcctggcggagatggttgcccaggcactgcgtgacagttgcaccccaaccaacccgcgcgaaccggatgcccgcgccctgactgaactttatcgccaggcctggagcggcaatatcgctcaatgccactga

SEQ ID NO: 39908 - protein, 384 aa, Escherichia coli
MSEFLLKPRICFGQDALSVLDELTACHVLLVTDQAMVKFGLAERVTQRLCARGIDWQVWDDVVADPDIATVVRGMKLMDSCYPDLVIALGGGSVIDAAKAVIFALAQTRPEAGRERPCFVAIPTTSGTGSEVTSFSVVKAHAEKLVLVDSSLLPDIAILDPSLVASVPPAITADTGMDVLCHALEAYVSLAASDFSDALAEKVVQQVFSYLPGCWRNGQDLQAREKMHNASCMAGMAFTNASLGITHSLAHALGGVFRVPHGRANALLMAHVVAWNADYHGQCDTLAARKYARLAHLLDLPASTPREGVTSLLVAIQTLKDEMNMPRGINDTGVNAADFDQRLAEMVAQALRDSCTPTNPREPDARALTELYRQAWSGNIAQCH

SEQ ID NO: 39909 - DNA, 1155 bp, Comamonas sp
  CDS (1)..(1155): transl_table=11
atgaatcctttccacttcgaaaccacgccgcgcatcatctgtcacaacggtgccagtaccaagctgggggaagcggcgcgcaatctgggcatacgccatgccttcttcgtgaccgataaaggcgtgcaccaggcaggtttgacaagcgctgccatggactcgctcaaggcggcggatattgccgtgacgatattcagcgaggtgcaggccgatccgcccgagtccgtcatcgtgcaagctgccgctgcagcacgcgaggccggtgcgaacggaatcatcggattcggcggtggcagttccatggatacagccaagctggttgcactgctggtcaaatctccgcaggagctgtccgcgatctacggcgcaggattggctcgaggtcctcgcctgccgctgattcagattccaacgacggcgggcaccggctccgaggtcacgcccatttccgtcgtcaccacgccgactgacgagaaaaagcccgtggtctcctccctgctgttgcccgacatcgcattgctggatgcgcagctgacgattgcactgccgcccgcagtcaccggtgcaaccggagtcgatgccctggtgcatgccatcgaagccttgtccacacgcctcaaacgcaatccattgtctgatttgctggctatcaaggcagtgcagatgatttacgaccacctgccactggcggtcaaggagggcagcaaccttgaagtgcgcgagcagatgctgctggcatcgctgttcgccggcatggcgttctccaatgcctcggtgggggcggtccacgcattcgcctacccgcttggcgtgcgctttcacgtcccgcacggtctatcgaattcattgatgctgccgcatatcctgcgatttaaccagcaggctgcagagtccacctacgccttgctgggacgcagcattcggcccgagctggagagtgcatccgacgccgccgcctcagcggcattcgtcgatgcaatgtcggagttggtggcccagatgccatacgcccagagcttgcgtgagctcggcgtcgagcgtgacgacctggcgatgctggccaaggatgtcatgggaattcagcggctgttggatcacaacccctgtcccatcacacacgaggatgcgatgaagctatacgcccgtgccttctga

SEQ ID NO: 39910 - protein, 384 aa, Comamonas sp
MNPFHFETTPRIICHNGASTKLGEAARNLGIRHAFFVTDKGVHQAGLTSAAMDSLKAADIAVTIFSEVQADPPESVIVQAAAAAREAGANGIIGFGGGSSMDTAKLVALLVKSPQELSAIYGAGLARGPRLPLIQIPTTAGTGSEVTPISVVTTPTDEKKPVVSSLLLPDIALLDAQLTIALPPAVTGATGVDALVHAIEALSTRLKRNPLSDLLAIKAVQMIYDHLPLAVKEGSNLEVREQMLLASLFAGMAFSNASVGAVHAFAYPLGVRFHVPHGLSNSLMLPHILRFNQQAAESTYALLGRSIRPELESASDAAASAAFVDAMSELVAQMPYAQSLRELGVERDDLAMLAKDVMGIQRLLDHNPCPITHEDAMKLYARAF

SEQ ID NO: 39911 - DNA, 1158 bp, Clostridium butyricum
  CDS (1)..(1158): transl_table=11
atgagaatgtatgattatttagtaccaagtgtaaactttatgggagcaaattcagtatcagtagtaggtgaaagatgcaaaatattaggtggaaaaaaagcattgatagttacagataagtttctaaaagatatggaaggtggagctgttgaattaacagttaaatatttaaaagaagctggattagatgttgtatattatgacggagttgaaccaaatccaaaagatgttaatgttatagaaggattaaaaatatttaaagaagaaaattgtgacatgatagtaactgtaggtggaggaagttcgcatgattgcggtaagggaataggaattgctgcaacacatgaaggagatctttatgattatgcaggaatagaaacacttgtcaatccattgccaccaatagtagctgtaaatactactgcaggaactgctagtgaattaactcgtcattgtgtattgactaatacaaaaaagaaaataaaatttgttatagttagctggagaaatttgcctctagtatctataaatgatccaatgcttatggtcaaaaaacctgcaggattaacagcagctacaggaatggatgctttaacacatgcaatagaagcatatgtatcaaaagatgcaaatccagtaacagatgcttcagcaatacaagctattaaattaatttcacaaaatttaagacaagctgtagctttaggagaaaatcttgaagcaagagaaaatatggcttatgcatcattactagcgggaatggcatttaataatgctaatttaggatatgtacatgcaatggctcatcaattagggggactgtatgatatgcctcatggagttgctaatgctatgctattaccacatgttgaacgttataatatgctatcaaatcctaagaagtttgcagatatagcagaatttatgggagaaaatatatctggactttctgtaatggaagcagcagagaaagccataaatgcaatgttcaggctttcagaggatgttggaattccgaaaagtctaaaggagatgggagtgaaacaagaagattttgagcatatggcagaactagctcttttagatggaaatgcctttagcaatccaagaaaaggaaatgcaaaagatattataaatatttttaaggctgcttattaa

SEQ ID NO: 39912 - protein, 385 aa, Clostridium butyricum
MRMYDYLVPSVNFMGANSVSVVGERCKILGGKKALIVTDKFLKDMEGGAVELTVKYLKEAGLDVVYYDGVEPNPKDVNVIEGLKIFKEENCDMIVTVGGGSSHDCGKGIGIAATHEGDLYDYAGIETLVNPLPPIVAVNTTAGTASELTRHCVLTNTKKKIKFVIVSWRNLPLVSINDPMLMVKKPAGLTAATGMDALTHAIEAYVSKDANPVTDASAIQAIKLISQNLRQAVALGENLEARENMAYASLLAGMAFNNANLGYVHAMAHQLGGLYDMPHGVANAMLLPHVERYNMLSNPKKFADIAEFMGENISGLSVMEAAEKAINAMFRLSEDVGIPKSLKEMGVKQEDFEHMAELALLDGNAFSNPRKGNAKDIINIFKAAY

SEQ ID NO: 39913 - DNA, 2649 bp, Mastigamoeba balamuthi
  CDS (1)..(2649)
atggacatcatcctcgagaaggtcgtcgccgcgcagcagatctacgccacctacacccaggagcaggtcgacaagatcttcgaggccgtcgccatggctgcctgcatgcagaggatccccctcgcgcagatggctgtcgaggacaccggcatgggtgtgatggaggacaaggtcatcaagaaccagttcgcctcggagttcatctacaacaagtacaggttcgagaagacctgcggcctcgtcaggtcggaccccgcgaacggcttcagccagtacgccgagcctctgggcgtcatcgccggcatcatcccgacgaccaaccccacgtcgacgacgatcttcaaggcgctgatcgccctcaagacccgcaacgccatcgtcttctcgccccacccccgcgccaagcgctgcaccatcgccgcggccaagatctgcctcgacgccgccatcaaggccggcgcccccgccaacatcatctcgtggatcgagaacccctcgatcgcgctgagcgccgcgctgatgggccaccgcctggtcaacctgatcctcgcgactggcggccccggcatggtcaaggccgcgtacaagagcggcaaccccgccatcggtgtcggcgccggcaactgccccgcgctcatcgacgagacggccgacatcaagatggccgtggcgtcgatcatcatgtccaagacgttcgacaacggcatgatctgcgcctcggagcagacggtcgtcgtgcacgagaaggtctacgacgaggtcaagcgcgagttccaggcccgcggctgccactttgtgacgccgtcggagaaggccgagctcgacaagatcatcctcgtcaacggcctccccaacgccaagatcgtcggccagaaggcggccacgatcatcgacatcgcggggctcaaggacaagatcccctcggacacccccgtgctgctggccgagattactgaggtcggcaagcaggagccgtggtcgctcgagaagctgtgcccgaccctgggcatgttcaaggtcccctcgttcgaggccggcgtcgacctggcgttccgcgccgtgcagttcggccgtggccacacgagcagcctgttcacgcacccccagaacaccgaccgcatccactacctcagcgcgcgcatgccctgcagccgcatcgtctgcaactgcccgtcggcccacggtggcatcggcgacatctacaacttcgtcatggcgcccgccctgaccctcggctgcggcagctggggcagcaactcggtctcggagaacatcggccccaagcacctgctcaacttcaagagcgtcgccgagcgccgcgagaacatgctgtggatgcagctgccccctcgcgtctacttcaagttcggctgcatgcacacggcgctgaccagcgagctgcgcaacaagaagcgcgcgctcgtcgtcactgacgtcccgctgttcaacctcggcttcgccaagaagatcaccgactcgctcaacactgtcggcgtgctctgcgagaccttctacgacgtcgagcccgacccgagcttcgacacggtccgcaagggcctcgagcgcatcaggctgttcaagcccgacgtgatcatcgcgatcggcggcggctcgcccatggacgcggccaagatgatgtggctcttctacgagttccccgagtacgagaacaagatcgaccagctctgcgcgcgcttcatggacatccgcaagcgcatctgctcgctgcccaagcccacggccaagaagtgccagctggtctgcatcccgacgacctcgggcactggctcggaggtgaccccgttctcggtcatcaccaacaagcaggagggcatcaagtacccgatcaccgactacgtcctcgtccccgacatcgccatcgccgaccccgagctgactctgtcggtcccccgcggcctggtcgcgtcgtgcggtctggacgtcctcacccacgcgctcgaggcgttcacgagcaccttctcgactccgttcacggccggctactgcctgcaggccgccgacatgatcttcaagtacctcgagcgcagctacgtcaacggcggcaaggaccaggaggcccgcgagggtgtccactacgccgcgacgctcgccggcatcgccttcgccaactcgttcctcggcctcgcccacagctgcgcgcacaagctcggcagcacgttccacatcccccacggcactgccaacgccctcgtcctgccgtacgtcatctactacaacagctcggacgcccccagcaagttcgtgccgttcccccagtaccagtacccgcaggccaaggagcgctacgcccaggtcgcgcacatgctgcacctcggcgccaacctcgacgacaacggcaaggtcatggccctcatcgacgcgatcgaggacctcaagatgaagacgaacctgcctctgtcgatccaggactacgggatccccgagtccgagttcctcgccaaggtcgacgaggttgccctgctggccttcgacgaccagtgcaccggcaccaacccccgctacccgctcgtctcggagatcaagaacctgctcctcgactcgtactacggcaccctgtcgcccaagaaccccaagcgcatgcagggcatccacatcaacagggagctctcgaagctcgcctcgcactga

SEQ ID NO: 39914 - protein, 882 aa, Mastigamoeba balamuthi
MDIILEKVVAAQQIYATYTQEQVDKIFEAVAMAACMQRIPLAQMAVEDTGMGVMEDKVIKNQFASEFIYNKYRFEKTCGLVRSDPANGFSQYAEPLGVIAGIIPTTNPTSTTIFKALIALKTRNAIVFSPHPRAKRCTIAAAKICLDAAIKAGAPANIISWIENPSIALSAALMGHRLVNLILATGGPGMVKAAYKSGNPAIGVGAGNCPALIDETADIKMAVASIIMSKTFDNGMICASEQTVVVHEKVYDEVKREFQARGCHFVTPSEKAELDKIILVNGLPNAKIVGQKAATIIDIAGLKDKIPSDTPVLLAEITEVGKQEPWSLEKLCPTLGMFKVPSFEAGVDLAFRAVQFGRGHTSSLFTHPQNTDRIHYLSARMPCSRIVCNCPSAHGGIGDIYNFVMAPALTLGCGSWGSNSVSENIGPKHLLNFKSVAERRENMLWMQLPPRVYFKFGCMHTALTSELRNKKRALVVTDVPLFNLGFAKKITDSLNTVGVLCETFYDVEPDPSFDTVRKGLERIRLFKPDVIIAIGGGSPMDAAKMMWLFYEFPEYENKIDQLCARFMDIRKRICSLPKPTAKKCQLVCIPTTSGTGSEVTPFSVITNKQEGIKYPITDYVLVPDIAIADPELTLSVPRGLVASCGLDVLTHALEAFTSTFSTPFTAGYCLQAADMIFKYLERSYVNGGKDQEAREGVHYAATLAGIAFANSFLGLAHSCAHKLGSTFHIPHGTANALVLPYVIYYNSSDAPSKFVPFPQYQYPQAKERYAQVAHMLHLGANLDDNGKVMALIDAIEDLKMKTNLPLSIQDYGIPESEFLAKVDEVALLAFDDQCTGTNPRYPLVSEIKNLLLDSYYGTLSPKNPKRMQGIHINRELSKLASH

SEQ ID NO: 39915 - DNA, 1167 bp, Clostridium beijerinckii
  CDS (1)..(1167): transl_table=11
atggcacgttttactttacctagggacttgtatcatggagaaggggcacttgaagtacttaaaactttaaaaggcaaaaaagcttttgtagttgttggtggaggatcaatgaaaagatttggttttcttaaacaagttgaagattatttaacagaagcaggaatggaagtagaactatttgaaggagtagaaccagatccatcagtagaaacagtaatgaagggtgccgaagcaatgagaaacttcgagcctgattggatagttgctatgggtggaggatcaccaatagatgctgcaaaagctatgtggatattctatgaatacccagattttacttttgaacaagctgttgttccatttggtttaccagagcttagacaaaaagctaaatttgtagctattccatcaacaagtggtacagctacagaagttacagctttttcagttataacaaattacacagaaaagattaaatatcctttagctgattttaacataactccagatatagcaatagttgatccagtattagctcaaactatgccaaaaacattaacagctcatactggaatggatgcactaactcatgctatagaagcatatactgcatcgcttagatcaaatttttctgatcctttagcaattaaggcattgcaaatggtacaagaaaatttaatcaagtcttttgaaggagacaaggaagctagaaatctaatgcatgaagctcaatgtttagcaggaatggcattttctaatgcattacttggaatagttcattcaatggctcacaaggttggtgctgtattccatattcctcatggatgtgcgaatgctatattcttaccatatgtaattcaatataatagaacaaaatgcgaagatagatatggagatattgcgagagccttaaaattaaaaggaaacaatgatgccgagttaactgattcattaatcgaattaattaatggattaaatgataagttagaaattcctcactcaatgaaagcgtatggagttactgaagaagattttaaagctaatctttcatttatcgctcataacgcagtattagatgcatgtacaggatcaaatcctagagaaatagatgatgctacaatggaaaaattatttgaatgcacatactatggaactaaagttaatttgtaa

SEQ ID NO: 39916 - protein, 388 aa, Clostridium beijerinckii
MARFTLPRDLYHGEGALEVLKTLKGKKAFVVVGGGSMKRFGFLKQVEDYLTEAGMEVELFEGVEPDPSVETVMKGAEAMRNFEPDWIVAMGGGSPIDAAKAMWIFYEYPDFTFEQAVVPFGLPELRQKAKFVAIPSTSGTATEVTAFSVITNYTEKIKYPLADFNITPDIAIVDPVLAQTMPKTLTAHTGMDALTHAIEAYTASLRSNFSDPLAIKALQMVQENLIKSFEGDKEARNLMHEAQCLAGMAFSNALLGIVHSMAHKVGAVFHIPHGCANAIFLPYVIQYNRTKCEDRYGDIARALKLKGNNDAELTDSLIELINGLNDKLEIPHSMKAYGVTEEDFKANLSFIAHNAVLDACTGSNPREIDDATMEKLFECTYYGTKVNL

SEQ ID NO: 39917 - DNA, 1167 bp, Clostridium beijerinckii
  CDS (1)..(1167): transl_table=11
atggcacgttttactttaccaagagacatttatcatggagaaggagcacttgaggcacttaaaactttaaaaggtaagaaagctttcttagtagttggtggcggatcaatgaaaagatttggatttcttaaacaagttgaagattatttaaaagaagcaggaatggaagtagaattatttgaaggtgttgaaccagatccatcagtggaaacagtaatgaaaggcgcagaagctatgagaaactttgagcctgattggatagttgcaatgggtggaggatcaccaattgatgctgcaaaggctatgtggatattctacgaatacccagattttacttttgaacaagcagttgttccatttggattaccagaccttagacaaaaagctaagtttgtagctattccatcaacaagcggtacagctacagaagttacagcattctcagttatcacaaattattcagaaaaaattaaatatcctttagctgattttaacataactccagatatagcaatagttgatccagcacttgctcaaactatgccaaaaactttaacagctcatactggaatggatgcattaactcacgctatagaagcatacactgcatcacttcaatcaaatttctcagatccattagcaattaaagctgtagaaatggttcaagaaaatttaatcaaatcatttgaaggggataaagaagctagaaatctaatgcatgaagctcaatgtttagctggaatggcattttctaatgcattacttggaatagttcactcaatggctcataaggttggtgctgtattccatattcctcatggatgtgcaaatgctatatttttaccatatgtaattgagtataacagaacaaaatgcgaaaatagatatggagatattgcgagagccttaaaattaaaaggaaacaatgatgccgagttaactgattcattaatcgaattaattaatggattaaatgataagttagaaattcctcactcaatgaaagcgtatggagttactgaagaagattttaaagctaatctttcatttatcgctcataacgcagtattagatgcatgtacaggatcaaatcctagagaaatagatgatgctacaatggaaaaattatttgaatgcacatactatggaactaaagttaatttgtaa

SEQ ID NO: 39918 - protein, 388 aa, Clostridium beijerinckii
MARFTLPRDIYHGEGALEALKTLKGKKAFLVVGGGSMKRFGFLKQVEDYLKEAGMEVELFEGVEPDPSVETVMKGAEAMRNFEPDWIVAMGGGSPIDAAKAMWIFYEYPDFTFEQAVVPFGLPDLRQKAKFVAIPSTSGTATEVTAFSVITNYSEKIKYPLADFNITPDIAIVDPALAQTMPKTLTAHTGMDALTHAIEAYTASLQSNFSDPLAIKAVEMVQENLIKSFEGDKEARNLMHEAQCLAGMAFSNALLGIVHSMAHKVGAVFHIPHGCANAIFLPYVIEYNRTKCENRYGDIARALKLKGNNDAELTDSLIELINGLNDKLEIPHSMKAYGVTEEDFKANLSFIAHNAVLDACTGSNPREIDDATMEKLFECTYYGTKVNL

SEQ ID NO: 39919 - DNA, 1248 bp, Pseudomonas aeruginosa
  CDS (1)..(1248): transl_table=11
atgcatcacacgccggagccgttggttcgccctgcgcgtgaattcctccactgccgttcaacaacgacaaaaatcgagcaagaggtacgtatggaattcaagttcttactccccgccaaagtcgtgatgggacccgacctgcgtgagcgcaccggcgaatacctgcgggaactcggcgtggcgcatgtgctgatcgtgacggacgccggggtaaaggccgcaggcctgttgaatggcgtgtatgccagcctgaatgagtgggagatcgcgttcgacgagatatcggacgtcaaggcaaaccctcgcagcgaagacatcaaccaggcggcgcagctgtatcgcggcaaaggtatccacggcctgctggccatcggcggcggcagcgcgatggacgcggccaaggcgatcagcctgctgctgacccacgagggtcggatcgaagactacgagggctctttcaccctcaggcacgccatcccgcctatcgtcgccatcccgaccaccgccggaaccggcagcgaagtgacctgcttctcggtgatcaccgataccgcccggcatttcaagatgagcgtccaggattaccgggtgggccccgttctggcattgctcgactcccgcattctcgacacgctgcctgcatcgattgccgccgcaaccggcatggatgccctcacccacgccatcgaagcctacacctgccgtgtgtcgaatccgatcagcgacgggctggcgctgcatgccatccgcctgatcagccaatacctcaggcccgccgtactggagccgggcaacctgcatgcacgcgagcaaatgctggtggccagcctgatcgccggcatggccttcggtaacgcggacgtcggcagcgtgcactgcatttccgaagccatcggtggcatgtacgacacgccacacggcgtgggcaacgcgatcttcctgcccttcgtgttcggccataaccgcgacgccgacatcacccgccacgcgcaggtcgcctatgcactgggtatcgaccccaacctctcgccggccgaggccgccgaggccgctgtcggctacctgttccagatgagcaaggacctgggcatcccccgcttcgccgaggtgaaaggcgtgcgcgaggaagacttcctgagcatcgccgaaaagtcgaagaagaatttctccgacggcagcaatgccaagcaaatgacggtggaaacctaccgtgaaatcgtcgccgccgcttaccactacgtagcgtga

SEQ ID NO: 39920 - protein, 415 aa, Pseudomonas aeruginosa
MHHTPEPLVRPAREFLHCRSTTTKIEQEVRMEFKFLLPAKVVMGPDLRERTGEYLRELGVAHVLIVTDAGVKAAGLLNGVYASLNEWEIAFDEISDVKANPRSEDINQAAQLYRGKGIHGLLAIGGGSAMDAAKAISLLLTHEGRIEDYEGSFTLRHAIPPIVAIPTTAGTGSEVTCFSVITDTARHFKMSVQDYRVGPVLALLDSRILDTLPASIAAATGMDALTHAIEAYTCRVSNPISDGLALHAIRLISQYLRPAVLEPGNLHAREQMLVASLIAGMAFGNADVGSVHCISEAIGGMYDTPHGVGNAIFLPFVFGHNRDADITRHAQVAYALGIDPNLSPAEAAEAAVGYLFQMSKDLGIPRFAEVKGVREEDFLSIAEKSKKNFSDGSNAKQMTVETYREIVAAAYHYVA

SEQ ID NO: 39921 - DNA, 1290 bp, Amycolatopsis methanolica
  CDS (1)..(1290): transl_table=11
atgcaggtcgacgaattgctgaagccgttccccatcaaggagttccacccgttcccgcgggcgctcctcggccccggggcccacgagatgatcggcccggaggcgctgaagctgggcttcaagaagacgctggtgatgacgagcgggctgcgcgggtccgacatcgtccacaagatcaccgagtcgatgaagtaccacgggctggaggtcgtgctctacgacaaggtcgagtccaaccccaaggactacaacgtcatggacgcggtcaagctgtaccaggagaacaagtgtgacagcttcgtctccatcggcggcgggtcctcgcacgacgcctgcaagggcgcccgcatctcggtcgcgcacgacggccgcaacgtcaacgacttcgagggcttcaacaagtccgagaacccgcgcaacccaccgcacatcgcggtgtccaccacggcgggcaccggctcggagacatcctgggcctacgtcatcaccgacaccaccaccgacccggacaacccgcacaagtacgtggcgttcgacgacgcctcggtggccacactggctatcgacgacccggtgctgtactacagctgcccgatcgactacaccgcgcagtgcggtttcgacgtgctcgcgcacgcgtccgagccgtacgtgtcgcggctgaacttcgagccgtcgctgggcaacgcgctgcgggccatcaagctcacggcggagaacctgcggcaggccacctggaacccgtccgagctgtccggccgtgagggcatgatgtacgcgcagtacatcgccgcgcaggcgttcaactccggcgggctcgggatcatccactccatctcgcacgcggtcagcgcgttctacgacacccaccacggcctgaacaacgcgatcgccctgccgcgcgtgtgggcgttcaacatgccggtggcgtacaagcggttcgccgacatggccgaggcgatgggcgtggacacgcacggcatgaccgacgtgcaggccgcggacgcgctggcggccgcgatccggctgctgcgcgacgtgggcatcccggagaagttcaccgacgtcacccaggacagctactcgaagaaccggctcggccagggcccgacgaagttctacgagcaggcgagcgtcatcaagggcgacgacgaggacgtggaccgcatcacgaaccacgtcctcggcgacgcctgcacgccgggcaatgccaaggaatgcaccttcgagaccgtgcgtccggtggtcgaccactgcatgaacggcgacctggacgacctgctcagctga

SEQ ID NO: 39922 - protein, 429 aa, Amycolatopsis methanolica
MQVDELLKPFPIKEFHPFPRALLGPGAHEMIGPEALKLGFKKTLVMTSGLRGSDIVHKITESMKYHGLEVVLYDKVESNPKDYNVMDAVKLYQENKCDSFVSIGGGSSHDACKGARISVAHDGRNVNDFEGFNKSENPRNPPHIAVSTTAGTGSETSWAYVITDTTTDPDNPHKYVAFDDASVATLAIDDPVLYYSCPIDYTAQCGFDVLAHASEPYVSRLNFEPSLGNALRAIKLTAENLRQATWNPSELSGREGMMYAQYIAAQAFNSGGLGIIHSISHAVSAFYDTHHGLNNAIALPRVWAFNMPVAYKRFADMAEAMGVDTHGMTDVQAADALAAAIRLLRDVGIPEKFTDVTQDSYSKNRLGQGPTKFYEQASVIKGDDEDVDRITNHVLGDACTPGNAKECTFETVRPVVDHCMNGDLDDLLS

SEQ ID NO: 39923 - DNA, 1152 bp, Rhodospirillum rubrum
  CDS (1)..(1152): transl_table=11
atgactcagaccgcttttttcatcccctcgatcaacctcatgggggcgggctgcttggccaccgccgtcaacaccatcaatgagcgcggcttcaagcgcgccctgatcgtcaccgacgcggtgcttgaaaagctgggcgtcgccggcaaggtgaccgagctgcttgatgaccatggcgtggaaagcatcgttttcggcggcgcccagcccaatccgacggtgtcgaatgtcgaggcgggtctggcgatcttgcgcgaggccgaatgcgattgcgtgatctcgctgggcggcggctcgccccatgactgcgccaagggcatcgcgctgtgcgccaccaacggcggggtcatcggtgattacgagggcgtcgataaatcggcccatccgcaattgccgctgatcgccatcaacaccacggccggcaccgccagcgaaatgacgcggttttgtatcatcaccgacgaaagccgtctggtgaagatggcgatcgtcgaccgccacgtcacgccgatcatgtcggtcaatgaccccgaactgatgatcggcaagcccgccgccctgaccgccgccaccggcatggacgccctgacccacgccatcgaagcctatgtctcgatcgccgccacgccgatcaccgacgcctgcgccctgaaggcggtgtcgatcatcgcccgcaccctgcgccgggcggtggccgatggcgccgatatcaaggcccgcgaggccatgtcctatgcccagttcctggccggcatggccttcaacaacgcctccctcggcttcgttcacgccatggcccaccagttgggcggcttttatgacctgccccatggcgtgtgcaacgccgtgctgttgccccatgtcgccgccttcaacgccagcgttgccggggcccgcctcaaggatgtcgccgaggcgatgggcgtcgacatcgccaatctgtccgacgatcagggggcggaggcctgcatcgccgccatccgcaccctagccgccgatatcggcatccccgccggccttacggaacttggcgtcaaggacggcgacgtgccgaccctggcgatcaacgccctgaaagacgcctgcggcctgaccaacccgcgcccggcgacccaggccgaaatcgaggcgatcttccgcgccgccgcctga

SEQ ID NO: 39924 - protein, 383 aa, Rhodospirillum rubrum
MTQTAFFIPSINLMGAGCLATAVNTINERGFKRALIVTDAVLEKLGVAGKVTELLDDHGVESIVFGGAQPNPTVSNVEAGLAILREAECDCVISLGGGSPHDCAKGIALCATNGGVIGDYEGVDKSAHPQLPLIAINTTAGTASEMTRFCIITDESRLVKMAIVDRHVTPIMSVNDPELMIGKPAALTAATGMDALTHAIEAYVSIAATPITDACALKAVSIIARTLRRAVADGADIKAREAMSYAQFLAGMAFNNASLGFVHAMAHQLGGFYDLPHGVCNAVLLPHVAAFNASVAGARLKDVAEAMGVDIANLSDDQGAEACIAAIRTLAADIGIPAGLTELGVKDGDVPTLAINALKDACGLTNPRPATQAEIEAIFRAAA

SEQ ID NO: 39925 - DNA, 1167 bp, Clostridium saccharobutylicum
  CDS (1)..(1167): transl_table=11
atgatgagatttacattaccaagagatatttattatggaaaaggatcactagaacaactaaaaaatcttaaaggtaaaaaggcaatgctagtacttggtggcggttcgatgaaaagatttggatttgtcgataaggtgttaggatacttaaaggaagctggaatagaagtaaaattaatagaaggagttgaaccagacccatcagttgaaacagtgttcaagggcgctgagttaatgagacaatttgaaccagattggattatagctatgggtggtggatcaccaattgatgctgcaaaagcaatgtggattttttatgaacacccagaaaaaacttttgatgacattaaagatccgtttacagtaccagaattaagaaataaggctaagttcctagcgattccatcaacaagtggtacagcaacagaagtaacagcattttctgtaattacagattataagactgaaataaaatatcctttagctgattttaatataactccagatgtagctgtagtagattcagaattagctgaaacaatgccacctaagttaactgcccatacaggaatggatgcattaactcatgcaattgaagcttatgtagcaacattacattcaccatttactgatccactagctatgcaagcgattgaaatgattaatgaacatttatttaaatcatatgaaggcgataaagaagctagagaacaaatgcattatgctcaatgtttagctggaatggctttctctaatgcactattaggaatatgtcatagtatggcgcataaaacaggggctgtattccatatccctcatggatgtgcgaatgcaatctatttaccatatgtaattaagtttaattcaaaaacttcattagaaagatatgctaaaatagcaaaacaaatttcattagcaggaaatacaaatgaggaattagttgattcattaataaacttagttaaagaattaaataagaagatgcaaataccaacaacattaaaagaatatggtattcatgaacaagaatttaagaataaggttgatttgatttcagaaagagctattggagatgcttgtactggatcaaatccaagacaattaaataaagatgaaatgaaaaagatttttgaatgcgtatattatggtacagaagttgatttttaa

SEQ ID NO: 39926 - protein, 388 aa, Clostridium saccharobutylicum
MMRFTLPRDIYYGKGSLEQLKNLKGKKAMLVLGGGSMKRFGFVDKVLGYLKEAGIEVKLIEGVEPDPSVETVFKGAELMRQFEPDWIIAMGGGSPIDAAKAMWIFYEHPEKTFDDIKDPFTVPELRNKAKFLAIPSTSGTATEVTAFSVITDYKTEIKYPLADFNITPDVAVVDSELAETMPPKLTAHTGMDALTHAIEAYVATLHSPFTDPLAMQAIEMINEHLFKSYEGDKEAREQMHYAQCLAGMAFSNALLGICHSMAHKTGAVFHIPHGCANAIYLPYVIKFNSKTSLERYAKIAKQISLAGNTNEELVDSLINLVKELNKKMQIPTTLKEYGIHEQEFKNKVDLISERAIGDACTGSNPRQLNKDEMKKIFECVYYGTEVDF

SEQ ID NO: 39927 - DNA, 1152 bp, Escherichia coli
  CDS (1)..(1152): transl_table=11
atggcagcttcaacgttctttattccttctgtgaatgtcatcggcgctgattcattgactgatgcaatgaatatgatggcagattatggatttacccgtaccttaattgtcactgacaatatgttaacgaaattaggtatggcgggcgatgtgcaaaaagcactggaagaacgcaatatttttagcgttatttatgatggcacccaacctaaccccaccacggaaaacgtcgccgcaggtttgaaattacttaaagagaataattgcgatagcgtgatctccttaggcggtggttctccacacgactgcgcaaaaggtattgcgctggtggcagccaatggcggcgatattcgcgattacgaaggcgttgaccgctctgcaaaaccgcagctgccgatgatcgccatcaataccacggcgggtacggcctctgaaatgacccgtttctgcatcatcactgacgaagcgcgtcatatcaaaatggcgattgttgataaacatgtcactccgctgctttctgtcaatgactcctctctgatgattggtatgccgaagtcactgaccgccgcaacgggtatggatgccttaacgcacgctatcgaagcatatgtttctattgccgccacgccgatcactgacgcttgtgcactgaaagccgtgaccatgattgccgaaaacctgccgttagccgttgaagatggcagtaatgcgaaagcgcgtgaagcaatggcttatgcccagttcctcgccggtatggcgttcaataatgcttctctgggttatgttcatgcgatggcgcaccagctgggcggtttctacaacctgccacacggtgtatgtaacgccgttttgctgccgcacgttcaggtattcaacagcaaagtcgccgctgcacgtctgcgtgactgtgccgctgcaatgggcgtgaacgtgacaggtaaaaacgacgcggaaggtgctgaagcctgcattaacgccatccgtgaactggcgaagaaagtggatatcccggcaggcctacgcgacctgaacgtgaaagaagaagatttcgcggtattggcgactaatgccctgaaagatgcctgtggctttactaacccgatccaggcaactcacgaagaaattgtggcgatttatcgcgcagcgatgtaa

SEQ ID NO: 39928 - protein, 383 aa, Escherichia coli
MAASTFFIPSVNVIGADSLTDAMNMMADYGFTRTLIVTDNMLTKLGMAGDVQKALEERNIFSVIYDGTQPNPTTENVAAGLKLLKENNCDSVISLGGGSPHDCAKGIALVAANGGDIRDYEGVDRSAKPQLPMIAINTTAGTASEMTRFCIITDEARHIKMAIVDKHVTPLLSVNDSSLMIGMPKSLTAATGMDALTHAIEAYVSIAATPITDACALKAVTMIAENLPLAVEDGSNAKAREAMAYAQFLAGMAFNNASLGYVHAMAHQLGGFYNLPHGVCNAVLLPHVQVFNSKVAAARLRDCAAAMGVNVTGKNDAEGAEACINAIRELAKKVDIPAGLRDLNVKEEDFAVLATNALKDACGFTNPIQATHEEIVAIYRAAM

SEQ ID NO: 39929 - DNA, 2613 bp, Entamoeba histolytica
  CDS (1)..(2613)
atgtcaacacaacaaactatgactgtagatgaacatattaatcaacttgttcgtaaagcacaagttgcacttaaagaatatcttaaaccagaatatacacaagaaaaaatagattatattgtaaagaaagcatcagttgcagcacttgatcaacattgtgcacttgcagcagctgcagttgaagaaacaggaagaggtatttttgaagataaagctactaaaaatatatttgcatgtgaacatgttacacatgaaatgagacatgctaaaacagttggtattattaatgtagatccactttatggaattacagaaattgcagaaccagttggagttgtttgtggagttacaccagttactaatccaacatcaacagctattttcaagtcacttatttcaattaaaacaagaaatccaattgtattttcattccatccatcagcacttaaatgttctattatggcagctaaaattgttagagatgcagctattgcagcaggagcaccagaaaattgtattcaatggattgaatttggaggaattgaagcatcaaataaattaatgaatcatccaggagttgctactattcttgctacaggaggaaatgctatggttaaagcagcatattcatcaggaaaaccagcacttggagtaggagcaggaaatgtaccaacatatattgaaaaaacatgtaatattaaacaagcagcaaatgatgtagttatgtcaaaatcatttgataatggtatgatttgtgcatcagaacaagcagcaattattgataaagaaatttatgatcaagtagttgaagaaatgaaaacacttggagcatatttcattaatgaagaagaaaaagctaaattagaaaagtttatgtttggagttaatgcatattcagcagatgttaataatgcaagacttaatccaaaatgtccaggtatgtcaccacaatggtttgctgaacaagttggaattaaagttccagaagattgtaatattatttgtgcagtttgtaaagaagttggaccaaatgaaccattaacaagagaaaaattatcaccagttcttgctattcttaaagcagaaaatacacaagatggtattgataaagctgaagctatggttgaatttaatggtagaggacattcagcagctattcattcgaatgataaagcagtagttgaaaagtatgcacttacaatgaaagcatgcagaattttacataatacaccatcatcacaaggaggaattggatcaatttataactatatttggccatcatttacacttggatgtggatcatatggaggaaattctgtatcagctaatgttacatatcataatttattaaatattaaaagacttgcagatagaagaaacaaccttcaatggttcagagttccaccaaagattttctttgaaccacattctattagatatcttgctgaacttaaggaacttagtaaaatattcattgtttcagatagaatgatgtataaattaggatatgtagatagagttatggatgtattgaaaagaagaagtaatgaagtagaaattgaaattttcattgatgtagaaccagatccatctattcaaaccgttcaaaaaggacttgctgttatgaatacatttggaccagataatattattgctattggaggaggatcagctatggatgcagctaagattatgtggttactttatgaacatccagaagccgatttctttgcaatgaaacaaaaattcattgatcttagaaagagagcatttaaattcccaacaatgggtaagaaagctagattaatttgtattccaacaacatcaggaactggatcagaagttacaccatttgcagttatttcagatcatgaaacaggtaagaaatatccacttgctgattattcacttacaccatcagttgctattgttgatccaatgtttactatgtcacttccaaagagagctattgctgatactggacttgatgtattggttcatgcaacagaagcatatgtttcagttatggctaatgaatatactgatggacttgctagagaagcagttaaattagtctttgaaaatcttcttaaatcatataatggagatttagaagcaagagaaaagatgcacaatgctgcaacaattgcaggtatggcatttgcatcagcattccttggtatggaccattccatggcacataaagttggagcagcattccatcttccacatggtagatgtgtagcagtattattaccacatgtcattagatataatggacaaaaaccaagaaagcttgcaatgtggccaaaatataatttctataaggcagaccaaagatatatggaacttgcacaaatggttggacttaaatgtaatacaccagctgaaggagttgaagcatttgctaaagcatgtgaagaattaatgaaagccacagagactattactggattcaagaaagcaaatattgatgaagcagcatggatgagtaaagtaccagaaatggcacttcttgcatttgaagatcaatgttcaccagctaatccaagagtcccaatggttaaggatatggaaaagattctcaaagctgcatattatccaattgcttaa

SEQ ID NO: 39930 - protein, 870 aa, Entamoeba histolytica
MSTQQTMTVDEHINQLVRKAQVALKEYLKPEYTQEKIDYIVKKASVAALDQHCALAAAAVEETGRGIFEDKATKNIFACEHVTHEMRHAKTVGIINVDPLYGITEIAEPVGVVCGVTPVTNPTSTAIFKSLISIKTRNPIVFSFHPSALKCSIMAAKIVRDAAIAAGAPENCIQWIEFGGIEASNKLMNHPGVATILATGGNAMVKAAYSSGKPALGVGAGNVPTYIEKTCNIKQAANDVVMSKSFDNGMICASEQAAIIDKEIYDQVVEEMKTLGAYFINEEEKAKLEKFMFGVNAYSADVNNARLNPKCPGMSPQWFAEQVGIKVPEDCNIICAVCKEVGPNEPLTREKLSPVLAILKAENTQDGIDKAEAMVEFNGRGHSAAIHSNDKAVVEKYALTMKACRILHNTPSSQGGIGSIYNYIWPSFTLGCGSYGGNSVSANVTYHNLLNIKRLADRRNNLQWFRVPPKIFFEPHSIRYLAELKELSKIFIVSDRMMYKLGYVDRVMDVLKRRSNEVEIEIFIDVEPDPSIQTVQKGLAVMNTFGPDNIIAIGGGSAMDAAKIMWLLYEHPEADFFAMKQKFIDLRKRAFKFPTMGKKARLICIPTTSGTGSEVTPFAVISDHETGKKYPLADYSLTPSVAIVDPMFTMSLPKRAIADTGLDVLVHATEAYVSVMANEYTDGLAREAVKLVFENLLKSYNGDLEAREKMHNAATIAGMAFASAFLGMDHSMAHKVGAAFHLPHGRCVAVLLPHVIRYNGQKPRKLAMWPKYNFYKADQRYMELAQMVGLKCNTPAEGVEAFAKACEELMKATETITGFKKANIDEAAWMSKVPEMALLAFEDQCSPANPRVPMVKDMEKILKAAYYPIA

SEQ ID NO: 39931 - DNA, 1269 bp, Schizosaccharomyces pombe
  CDS (1)..(1269)
atgtccattcttcgttctccatttcgtttaattcgatcgcctgctcgattctttccgtcactctttcattcctcttgtaatcaatcttttactaatggcttaaagcatcaatcaacctcttcgaaagccatgcctgttagcgcattctacataccttctttcaaccttttcggtaaaggttgtcttgctgaagccgccaagcaaattaagatgagcggcttcaaaaacaccttaattgttaccgatcctggtattattaaggtcggtttgtatgacaaagttaaggctctgttggaagaacaaagcatcactgttcacctttacgatggtgttcaacctaatcccaccgttggaaatgtcaaccaaggtctcgaaatcgttaagaaggaaaactgtgattctatggtatcaattggtggtggttctgctcacgattgtgccaaaggtattgctttgttagctactaatggcggtaaaattgcggattatgaaggtgttgataaatcctccaaacctcaacttcccttgattgcaatcaatacgactgcaggaactgcttctgaaatgactcgtttcgcaattatcaccgaagagacccgtcatattaaaatggctattatcgataagcatactatgcctatcctttccgttaacgatcctgaaacaatgtatggattacctccttccttgaccgctgctactggtatggacgctttgactcatgctgttgaagcttacgtctctactgctgctaatcccatcaccgatgcttgtgctgtcaaatgcatcgaactcgttaataagtatttgaagcgtgctgtcgacaacggcaaggacgaagaggctagagacaatatggcttatgccgaattccttggtggtatggcatttaacaacgcatctttgggttatgttcatgctatggctcatcaacttggtggtttctacggtattccacatggcgtctgtaacgctgttcttcttgcccatgtacagaaatttaattctagggatccaagagcaaatgctcgccttggtgatattgcttttcacttgggttgtgaagagcatactgccgaagcagctcttgaccgcatcagtcaacttgttcttgaagttaaaattcgtcctcatctagttgatctaggtgtcaaggaaaaagattttgatgtcttggttgaccacgctatgaaggatgcttgtggtgctactaaccctattcagcctacacatgacgaggtaaaggctattttcaaatcggctatgtaa

SEQ ID NO: 39932 - protein, 422 aa, Schizosaccharomyces pombe
MSILRSPFRLIRSPARFFPSLFHSSCNQSFTNGLKHQSTSSKAMPVSAFYIPSFNLFGKGCLAEAAKQIKMSGFKNTLIVTDPGIIKVGLYDKVKALLEEQSITVHLYDGVQPNPTVGNVNQGLEIVKKENCDSMVSIGGGSAHDCAKGIALLATNGGKIADYEGVDKSSKPQLPLIAINTTAGTASEMTRFAIITEETRHIKMAIIDKHTMPILSVNDPETMYGLPPSLTAATGMDALTHAVEAYVSTAANPITDACAVKCIELVNKYLKRAVDNGKDEEARDNMAYAEFLGGMAFNNASLGYVHAMAHQLGGFYGIPHGVCNAVLLAHVQKFNSRDPRANARLGDIAFHLGCEEHTAEAALDRISQLVLEVKIRPHLVDLGVKEKDFDVLVDHAMKDACGATNPIQPTHDEVKAIFKSAM

SEQ ID NO: 39933 - DNA, 1398 bp, Saccharomyces cerevisiae
  CDS (1)..(1398)
atgcttgggatcacgtatgccgttaactctacaaagcaattgatattttgctgcctcaaatatctcacactactaggatatattcttttatcaaacaggaaaaaagggcagcgtaccaacatgtataaaagggttattagcatttctggtttattaaagactggagtcaaacgtttttcttctgtctattgcaaaacaaccatcaacaacaagtttacatttgcaacaactaatagtcaaataagaaaaatgtcttccgttactgggttttacattccaccaatctctttctttggtgaaggtgctttagaagaaaccgctgattacatcaaaaacaaggattacaaaaaggctttgatcgttactgatcctggtattgcagctattggtctctccggtagagtccaaaagatgttggaagaacgtgacttaaacgttgctatctatgacaaaactcaaccaaacccaaatattgccaatgtcacagctggtttgaaggttttgaaggaacaaaactctgaaattgttgtttccattggtggtggttctgctcacgacaatgctaaggccattgctttattggctactaacggtggggaaatcggagactatgaaggtgtcaatcaatctaagaaggctgctttaccactatttgccatcaacactactgctggtactgcttccgaaatgaccagattcactattatctctaatgaagaaaagaaaatcaagatggctatcattgacaacaacgtcactccagctgttgctgtcaacgatccatctaccatgtttggtttgccacctgctttgactgctgctactggtctagatgctttgactcactgtatcgaagcttatgtttccaccgcctctaacccaatcaccgatgcctgtgctttgaagggtattgatttgatcaatgaaagcttagtcgctgcatacaaagacggtaaagacaagaaggccagaactgacatgtgttacgctgaatacttggcaggtatggctttcaacaatgcttctctaggttatgttcatgcccttgctcatcaacttggtggtttctaccacttgcctcatggtgtttgtaacgctgtcttgttgcctcatgttcaagaggccaacatgcaatgtccaaaggccaagaagagattaggtgaaattgctttgcatttcggtgcttctcaagaagatccagaagaaaccatcaaggctttgcacgttttaaacagaaccatgaacattccaagaaacttgaaagaattaggtgttaaaaccgaagattttgaaattttggctgaacacgccatgcatgatgcctgccatttgactaacccagttcaattcaccaaagaacaagtggttgccattatcaagaaagcctatgaatattaa

SEQ ID NO: 39934 - protein, 465 aa, Saccharomyces cerevisiae
MLGITYAVNSTKQLIFCCLKYLTLLGYILLSNRKKGQRTNMYKRVISISGLLKTGVKRFSSVYCKTTINNKFTFATTNSQIRKMSSVTGFYIPPISFFGEGALEETADYIKNKDYKKALIVTDPGIAAIGLSGRVQKMLEERDLNVAIYDKTQPNPNIANVTAGLKVLKEQNSEIVVSIGGGSAHDNAKAIALLATNGGEIGDYEGVNQSKKAALPLFAINTTAGTASEMTRFTIISNEEKKIKMAIIDNNVTPAVAVNDPSTMFGLPPALTAATGLDALTHCIEAYVSTASNPITDACALKGIDLINESLVAAYKDGKDKKARTDMCYAEYLAGMAFNNASLGYVHALAHQLGGFYHLPHGVCNAVLLPHVQEANMQCPKAKKRLGEIALHFGASQEDPEETIKALHVLNRTMNIPRNLKELGVKTEDFEILAEHAMHDACHLTNPVQFTKEQVVAIIKKAYEY

SEQ ID NO: 39935 - DNA, 1164 bp, Citrobacter freundii
  CDS (1)..(1164): transl_table=11
atgagctatcgtatgtttgattacctggtgccaaatgtgaacttctttggccccaatgctatttccgtggtcggcgaacgctgcaaactgttgggcggtaaaaaagcgctgctggtcactgataaaggtctgcgggcgattaaagacggcgcggtagataaaaccctcacacatctgcgtgaagccggtattgacgtcgtggtttttgacggcgttgagccaaaccccaaagacaccaacgtgcgcgacggcctggaggtctttcggaaagagcattgcgacatcatcgttaccgttggcggcggtagcccgcatgactgcggtaaaggcatcggtatcgccgcgactcacgaaggggatctctacagctatgccgggattgaaaccctgaccaacccgctgccgccgatcgttgcggtgaataccaccgccggtaccgccagcgaagtcacccgccactgcgtgctgaccaataccaaaaccaaagtgaagtttgtgattgtcagctggcgcaacctgccgtcggtctccattaacgatccgctgctaatgctcggcaagccagccccactgactgcggctaccgggatggacgccctgacccacgccgtggaagcctacatttccaaagatgccaacccggtcaccgacgctgccgctatccaggcgatccgcctgatcgcccgtaacttgcgccaggccgtggcgctgggcagcaacctgaaagctcgcgagaacatggcctacgcctccctgctggcgggtatggccttcaacaacgccaacctcggctacgttcacgcgatggcgcatcagcttggcggtctttacgacatgccgcacggcgtggcgaatgccgtactgctgccgcacgtagcgcgctataacctgatcgctaacccggaaaaatttgccgacatcgcagagtttatgggcgagaacacggacggactctccaccatggatgccgccgagctggccattcatgctattgcccgcctctccgccgacatcggtattccgcagcatctgcgcgatctgggcgtcaaagaagccgatttcccgtatatggctgaaatggcactgaaggacggcaacgccttctccaacccacgcaaagggaacgagaaagaaattgccgagatcttccgtcaggcattctga

SEQ ID NO: 39936 - protein, 387 aa, Citrobacter freundii
MSYRMFDYLVPNVNFFGPNAISVVGERCKLLGGKKALLVTDKGLRAIKDGAVDKTLTHLREAGIDVVVFDGVEPNPKDTNVRDGLEVFRKEHCDIIVTVGGGSPHDCGKGIGIAATHEGDLYSYAGIETLTNPLPPIVAVNTTAGTASEVTRHCVLTNTKTKVKFVIVSWRNLPSVSINDPLLMLGKPAPLTAATGMDALTHAVEAYISKDANPVTDAAAIQAIRLIARNLRQAVALGSNLKARENMAYASLLAGMAFNNANLGYVHAMAHQLGGLYDMPHGVANAVLLPHVARYNLIANPEKFADIAEFMGENTDGLSTMDAAELAIHAIARLSADIGIPQHLRDLGVKEADFPYMAEMALKDGNAFSNPRKGNEKEIAEIFRQAF

SEQ ID NO: 39937 - DNA, 1164 bp, Klebsiella pneumoniae
  CDS (1)..(1164): transl_table=11
atgagctatcgtatgtttgattatctggtgccaaacgttaacttttttggccccaacgccatttccgtagtcggcgaacgctgccagctgctgggggggaaaaaagccctgctggtcaccgacaaaggcctgcgggcaattaaagatggcgcggtggacaaaaccctgcattatctgcgggaggccgggatcgaggtggcgatctttgacggcgtcgagccgaacccgaaagacaccaacgtgcgcgacggcctcgccgtgtttcgccgcgaacagtgcgacatcatcgtcaccgtgggcggcggcagcccgcacgattgcggcaaaggcatcggcatcgccgccacccatgagggcgatctgtaccagtatgccggaatcgagaccctgaccaacccgctgccgcctatcgtcgcggtcaataccaccgccggcaccgccagcgaggtcacccgccactgcgtcctgaccaacaccgaaaccaaagtgaagtttgtgatcgtcagctggcgcaacctgccgtcggtctctatcaacgatccactgctgatgatcggtaaaccggccgccctgaccgcggcgaccgggatggatgccctgacccacgccgtagaggcctatatctccaaagacgctaacccggtgacggacgccgccgccatgcaggcgatccgcctcatcgcccgcaacctgcgccaggccgtggccctcggcagcaatctgcaggcgcgggaaaacatggcctatgcttctctgctggccgggatggctttcaataacgccaacctcggctacgtgcacgccatggcgcaccagctgggcggcctgtacgacatgccgcacggcgtggccaacgctgtcctgctgccgcatgtggcgcgctacaacctgatcgccaacccggagaaattcgccgatatcgctgaactgatgggcgaaaatatcaccggactgtccactctcgacgcggcggaaaaagccatcgccgctatcacgcgtctgtcgatggatatcggtattccgcagcatctgcgcgatctgggggtaaaagaggccgacttcccctacatggcggagatggctctaaaagacggcaatgcgttctcgaacccgcgtaaaggcaacgagcaggagattgccgcgattttccgccaggcattctga

SEQ ID NO: 39938 - protein, 387 aa, Klebsiella pneumoniae
MSYRMFDYLVPNVNFFGPNAISVVGERCQLLGGKKALLVTDKGLRAIKDGAVDKTLHYLREAGIEVAIFDGVEPNPKDTNVRDGLAVFRREQCDIIVTVGGGSPHDCGKGIGIAATHEGDLYQYAGIETLTNPLPPIVAVNTTAGTASEVTRHCVLTNTETKVKFVIVSWRNLPSVSINDPLLMIGKPAALTAATGMDALTHAVEAYISKDANPVTDAAAMQAIRLIARNLRQAVALGSNLQARENMAYASLLAGMAFNNANLGYVHAMAHQLGGLYDMPHGVANAVLLPHVARYNLIANPEKFADIAELMGENITGLSTLDAAEKAIAAITRLSMDIGIPQHLRDLGVKEADFPYMAEMALKDGNAFSNPRKGNEQEIAAIFRQAF

SEQ ID NO: 39939 - DNA, 1188 bp, Salmonella typhimurium
  CDS (1)..(1188): transl_table=11
atgcaagctgaactacagacggcgctgtttcaggcattcgacaccctgaatctgcaacgggtgaaaacgttcagcgtaccgccggtcacgctgtgcggacttggggcgctcggcgcctgtggacaggaagcgcaagcgcgaggcgtaagccatctgtttgtgatggtcgacagcttcctgcatcaggcgggaatgaccgcgccgctggcacgcagcctggcgatgaagggcgtggcgatgacggtctggccgtgtccgcctggcgagccgtgcatcaccgatgtctgcgcggcggtggcgcaactgcgtgaggcggcgtgcgacggcgtagtggcctttggcggcggttcggtgctggacgcggcgaaagcggtcgccctgctggtgactaaccctgaccagacgctgagcgccatgaccgagcacagtacattacgcccgcgtctgccgctgattgcggtgccgaccaccgccggaaccggttctgaaaccaccaacgtaacggtgattatcgacgcggtcagcgggcgcaagcaggtgctggcgcacgcgtcactaatgccggacgtggcgattcttgatgctgccgtgaccgaaggcgttccgccaaacgtgacggcgatgaccggtatcgatgcgttgacgcatgcgattgaggcctacagcgcgctcaacgccacgccgtttaccgacagcctggcgattggcgcgatagcgatgattggcaaatcgctgccgaaagccgtgggttacggccacgatctggcggcgcgtgaaaatatgttgctggcctcctgtatggcgggaatggccttttccagcgccggtctggggctgtgtcatgcgatggcgcaccagcctggggcggcgctgcatattccgcacggccaggccaacgccatgctgctgccaacagtcatgggctttaaccggatggtttgccgcgagcgcttcagtcaaataggtcgggcgttaaccaataagaaatcggacgatcgcgatgcgattgcggcggtgtgcgagctgattgccgaagtgggacagagcaaacggctggctgacgctggcgccaaacccgaacactacagcgcgtgggcgcaagccgcgctggaggatatttgtctgcgcagtaacccacgcaccgccacacaggcacagattatcgacctgtacgcggctgccgggtaa

SEQ ID NO: 39940 - protein, 395 aa, Salmonella typhimurium
MQAELQTALFQAFDTLNLQRVKTFSVPPVTLCGLGALGACGQEAQARGVSHLFVMVDSFLHQAGMTAPLARSLAMKGVAMTVWPCPPGEPCITDVCAAVAQLREAACDGVVAFGGGSVLDAAKAVALLVTNPDQTLSAMTEHSTLRPRLPLIAVPTTAGTGSETTNVTVIIDAVSGRKQVLAHASLMPDVAILDAAVTEGVPPNVTAMTGIDALTHAIEAYSALNATPFTDSLAIGAIAMIGKSLPKAVGYGHDLAARENMLLASCMAGMAFSSAGLGLCHAMAHQPGAALHIPHGQANAMLLPTVMGFNRMVCRERFSQIGRALTNKKSDDRDAIAAVCELIAEVGQSKRLADAGAKPEHYSAWAQAALEDICLRSNPRTATQAQIIDLYAAAG

SEQ ID NO: 39941 - DNA, 25 bp, Artificial sequence
  Primer sequence
atgatggctaacagaatgattctga

SEQ ID NO: 39942 - DNA, 23 bp, Artificial sequence
  Primer sequence
ttaccaggcggtatggtaaagct

SEQ ID NO: 39943 - protein, 429 aa, Artificial sequence
  Consensus
  Variant (5)..(6): Xaa in position 5 to 6 is any amino acid
  Variant (8)..(8): Xaa in position 8 is any amino acid
  Variant (9)..(12): Xaa in position 9 to 12 is any or no amino acid
  Variant (14)..(19): Xaa in position 14 to 19 is any amino acid
  Variant (20)..(21): Xaa in position 20 to 21 is any or no amino acid
  Variant (23)..(27): Xaa in position 23 to 27 is any amino acid
  Variant (28)..(32): Xaa in position 28 to 32 is any or no amino acid
  Variant (35)..(40): Xaa in position 35 to 40 is any amino acid
  Variant (42)..(45): Xaa in position 42 to 45 is any amino acid
  Variant (47)..(48): Xaa in position 47 to 48 is any amino acid
  Variant (50)..(58): Xaa in position 50 to 58 is any amino acid
  Variant (59)..(59): Xaa in position 59 is any or no amino acid
  Variant (61)..(61): Xaa in position 61 is any amino acid
  Variant (64)..(64): Xaa in position 64 is any amino acid
  Variant (70)..(71): Xaa in position 70 to 71 is any amino acid
  Variant (73)..(73): Xaa in position 73 is any amino acid
  Variant (76)..(76): Xaa in position 76 is any amino acid
  Variant (78)..(78): Xaa in position 78 is any amino acid
  Variant (80)..(91): Xaa in position 80 to 91 is any amino acid
  Variant (92)..(127): Xaa in position 92 to 127 is any or no amino acid
  Variant (129)..(129): Xaa in position 129 is any amino acid
  Variant (131)..(131): Xaa in position 131 is any amino acid
  Variant (142)..(144): Xaa in position 142 to 144 is any amino acid
  Variant (148)..(150): Xaa in position 148 to 150 is any amino acid
  Variant (151)..(157): Xaa in position 151 to 157 is any or no amino acid
  Variant (159)..(160): Xaa in position 159 to 160 is any amino acid
  Variant (162)..(167): Xaa in position 162 to 167 is any amino acid
  Variant (169)..(169): Xaa in position 169 is any amino acid
  Variant (173)..(173): Xaa in position 173 is any amino acid
  Variant (175)..(176): Xaa in position 175 to 176 is any amino acid
  Variant (178)..(180): Xaa in position 178 to 180 is any amino acid
  Variant (183)..(184): Xaa in position 183 to 184 is any amino acid
  Variant (186)..(186): Xaa in position 186 is any amino acid
  Variant (188)..(188): Xaa in position 188 is any amino acid
  Variant (193)..(193): Xaa in position 193 is any amino acid
  Variant (195)..(195): Xaa in position 195 is any amino acid
  Variant (202)..(202): Xaa in position 202 is any amino acid
  Variant (204)..(209): Xaa in position 204 to 209 is any amino acid
  Variant (210)..(224): Xaa in position 210 to 224 is any or no amino acid
  Variant (227)..(228): Xaa in position 227 to 228 is any amino acid
  Variant (231)..(231): Xaa in position 231 is any amino acid
  Variant (234)..(234): Xaa in position 234 is any amino acid
  Variant (237)..(239): Xaa in position 237 to 239 is any amino acid
  Variant (241)..(242): Xaa in position 241 to 242 is any amino acid
  Variant (244)..(249): Xaa in position 244 to 249 is any amino acid
  Variant (250)..(257): Xaa in position 250 to 257 is any or no amino acid
  Variant (260)..(261): Xaa in position 260 to 261 is any amino acid
  Variant (263)..(264): Xaa in position 263 to 264 is any amino acid
  Variant (266)..(267): Xaa in position 266 to 267 is any amino acid
  Variant (274)..(275): Xaa in position 274 to 275 is any amino acid
  Variant (277)..(277): Xaa in position 277 is any amino acid
  Variant (280)..(281): Xaa in position 280 to 281 is any amino acid
  Variant (287)..(287): Xaa in position 287 is any amino acid
  Variant (291)..(292): Xaa in position 291 to 292 is any amino acid
  Variant (293)..(298): Xaa in position 293 to 298 is any or no amino acid
  Variant (300)..(300): Xaa in position 300 is any amino acid
  Variant (303)..(304): Xaa in position 303 to 304 is any amino acid
  Variant (310)..(311): Xaa in position 310 to 311 is any amino acid
  Variant (313)..(314): Xaa in position 313 to 314 is any amino acid
  Variant (317)..(325): Xaa in position 317 to 325 is any amino acid
  Variant (326)..(342): Xaa in position 326 to 342 is any or no amino acid
  Variant (344)..(350): Xaa in position 344 to 350 is any amino acid
  Variant (351)..(364): Xaa in position 351 to 364 is any or no amino acid
  Variant (366)..(367): Xaa in position 366 to 367 is any amino acid
  Variant (369)..(370): Xaa in position 369 to 370 is any amino acid
  Variant (372)..(373): Xaa in position 372 to 373 is any amino acid
  Variant (374)..(375): Xaa in position 374 to 375 is any or no amino acid
  Variant (377)..(377): Xaa in position 377 is any or no amino acid
  Variant (379)..(380): Xaa in position 379 to 380 is any amino acid
  Variant (381)..(381): Xaa in position 381 is any or no amino acid
  Variant (383)..(385): Xaa in position 383 to 385 is any amino acid
  Variant (387)..(392): Xaa in position 387 to 392 is any amino acid
  Variant (393)..(401): Xaa in position 393 to 401 is any or no amino acid
  Variant (404)..(405): Xaa in position 404 to 405 is any amino acid
  Variant (407)..(408): Xaa in position 407 to 408 is any amino acid
  Variant (410)..(414): Xaa in position 410 to 414 is any amino acid
  Variant (416)..(417): Xaa in position 416 to 417 is any or no amino acid
  Variant (420)..(425): Xaa in position 420 to 425 is any amino acid
  Variant (427)..(428): Xaa in position 427 to 428 is any amino acid
IVTDXXLXXXXXGXXXXXXXXLXXXXXXXXXXVFXXXXXXPXXXXVXXGXXXXXXXXXXDXIIXLGGGSXXDXAKXIXLXXXXXXXXXXXXXXXXXXXXXXXXXXXXXXXXXXXXXXXXXXXXXXXXIXIXTTAGTGSEVTXXXVITXXXXXXXXXXKXXIXXXXXXPXVAIXDXXLXXXMPXXLXAXTGMDXLXHAIEAYXSXXXXXXXXXXXXXXXXXXXXXTDXXALXAIXLIXXXLXXAXXXXXXXXXXXXXXARXXMXXAXXLAGMAFXXAXLGXXHAMAHXLGGXXXXXXXXLXHGXXNAILLXXVXXYNXXXXXXXXXXXXXXXXXXXXXXXXXXAXXXXXXXXXXXXXXXXXXXXXIXXIXXLXXXXLXIXXXLXXXGXXXXXXXXXXXXXXXLAXXAXXDXXXXXNXXPRXXXXXXIXXI

SEQ ID NO: 39944 - protein, 16 aa, Artificial sequence
  Consensus
  Variant (2)..(2): Xaa in position 2 is any amino acid
  Variant (3)..(4): Xaa in position 3 to 4 is Ile, Leu or Val
  Variant (5)..(5): Xaa in position 5 is Ala, Gly, Ser or Thr
  Variant (6)..(6): Xaa in position 6 is Phe, Ile, Leu, Met or Val
  Variant (11)..(12): Xaa in position 11 to 12 is any amino acid
  Variant (14)..(14): Xaa in position 14 is any amino acid
  Variant (15)..(15): Xaa in position 15 is Ala, Cys, Gly, Ser or Thr
DXXXXXGGGSXXDXXK

SEQ ID NO: 39945 - protein, 14 aa, Artificial sequence
  Consensus
  Variant (2)..(2): Xaa in position 2 is Ala or Ser
  Variant (5)..(5): Xaa in position 5 is Ala or Gly
  Variant (6)..(6): Xaa in position 6 is Ala or Ser
  Variant (8)..(8): Xaa in position 8 is any amino acid
  Variant (9)..(9): Xaa in position 9 is Gly or Thr
  Variant (10)..(12): Xaa in position 10 to 12 is any amino acid
  Variant (13)..(13): Xaa in position 13 is Ile or Val
  Variant (14)..(14): Xaa in position 14 is Ile, Leu or Val
TXGTXXEXXXXXXX

SEQ ID NO: 39946 - protein, 32 aa, Artificial sequence
  Consensus
  Variant (2)..(8): Xaa in position 2 to 8 is any amino acid
  Variant (9)..(13): Xaa in position 9 to 13 is any or no amino acid
  Variant (15)..(16): Xaa in position 15 to 16 is any amino acid
  Variant (17)..(17): Xaa in position 17 is Ile, Leu or Val
  Variant (18)..(18): Xaa in position 18 is Ala, Cys, Thr or Val
  Variant (20)..(20): Xaa in position 20 is any amino acid
  Variant (21)..(21): Xaa in position 21 is Gly, Ser or Thr
  Variant (23)..(23): Xaa in position 23 is any amino acid
  Variant (25)..(25): Xaa in position 25 is Ala or Val
  Variant (26)..(26): Xaa in position 26 is Phe, Ile, Leu, Met or Val
  Variant (27)..(27): Xaa in position 27 is Ala, Cys, Ser, Thr or Val
  Variant (29)..(30): Xaa in position 29 to 30 is any amino acid
  Variant (32)..(32): Xaa in position 32 is Ala, Cys, Gly, Ser or Thr
DXXXXXXXXXXXXPXXXXAXXGXDXXXHXXEX

SEQ ID NO: 39947 - protein, 32 aa, Artificial sequence
  Consensus
  Variant (2)..(10): Xaa in position 2 to 10 is any amino acid
  Variant (11)..(11): Xaa in position 11 is any or no amino acid
  Variant (13)..(13): Xaa in position 13 is any amino acid
  Variant (14)..(14): Xaa in position 14 is any or no amino acid
  Variant (17)..(23): Xaa in position 17 to 23 is any amino acid
  Variant (24)..(24): Xaa in position 24 is any or no amino acid
  Variant (26)..(26): Xaa in position 26 is Ala, Gly or Ser
  Variant (27)..(27): Xaa in position 27 is Phe, Ile, Leu, Met or Val
  Variant (28)..(28): Xaa in position 28 is Ala, Gly, Gln or Ser
  Variant (29)..(31): Xaa in position 29 to 31 is any amino acid
RXXXXXXXXXXGXXAFXXXXXXXXHXXXXXXG

SEQ ID NO: 39948 - protein, 16 aa, Artificial sequence
  Consensus
  Variant (3)..(4): Xaa in position 3 to 4 is any amino acid
  Variant (5)..(5): Xaa in position 5 is Asn or Val
  Variant (6)..(6): Xaa in position 6 is Ala, Gly, Ser or Thr
  Variant (7)..(8): Xaa in position 7 to 8 is any amino acid
  Variant (9)..(9): Xaa in position 9 is Phe, Ile, Leu, Met or Val
  Variant (10)..(11): Xaa in position 10 to 11 is any amino acid
  Variant (13)..(15): Xaa in position 13 to 15 is any amino acid
HGXXXXXXXXXVXXXN

SEQ ID NO: 39949 - DNA, 1434 bp, Escherichia coli K12; identical to SEQ ID NO: 4679
  CDS (1)..(1434)

SEQ ID NO: 39950 - protein, 477 aa, Escherichia coli K12 [sequence omitted]

SEQ ID NO: 39951 - DNA, 1314 bp, Pyrococcus abyssi; identical to SEQ ID NO: 4681
  CDS (1)..(1314)

SEQ ID NO: 39952 - protein, 437 aa, Pyrococcus abyssi; identical to SEQ ID NO: 4682

SEQ ID NO: 39953 - DNA, 1425 bp, Chlamydia muridarum, Chlamydia trachomatis MoPn; identical to SEQ ID NO: 4683
  CDS (1)..(1425)

SEQ ID NO: 39954 - protein, 474 aa, Chlamydia muridarum, Chlamydia trachomatis MoPn; identical to SEQ ID NO: 4684

SEQ ID NO: 39955 - DNA, 1434 bp, Clostridium acetobutylicum; identical to SEQ ID NO: 4685
  CDS (1)..(1434)

SEQ ID NO: 39956 - protein, 477 aa, Clostridium acetobutylicum; identical to SEQ ID NO: 4686

SEQ ID NO: 39957 - DNA, 1431 bp, Yersinia pestis; identical to SEQ ID NO: 4687
  CDS (1)..(1431)

SEQ ID NO: 39958 - protein, 476 aa, Yersinia pestis; identical to SEQ ID NO: 4688

SEQ ID NO: 39959 - DNA, 1443 bp, Agrobacterium tumefaciens; identical to SEQ ID NO: 4689
  CDS (1)..(1443)

SEQ ID NO: 39960 - protein, 480 aa, Agrobacterium tumefaciens; identical to SEQ ID NO: 4690

SEQ ID NO: 39961 - DNA, 1479 bp, Nostoc sp. PCC 7120; identical to SEQ ID NO: 4691
  CDS (1)..(1479)

SEQ ID NO: 39962 - protein, 492 aa, Nostoc sp. PCC 7120; identical to SEQ ID NO: 4692

SEQ ID NO: 39963 - DNA, 1419 bp, Nostoc sp. PCC 7120; identical to SEQ ID NO: 4693
  CDS (1)..(1419)

SEQ ID NO: 39964 - protein, 472 aa, Nostoc sp. PCC 7120; identical to SEQ ID NO: 4694

SEQ ID NO: 39965 - DNA, 1431 bp, Haemophilus influenzae; identical to SEQ ID NO: 4695
  CDS (1)..(1431)

SEQ ID NO: 39966 - protein, 476 aa, Haemophilus influenzae; identical to SEQ ID NO: 4696

SEQ ID NO: 39967 - DNA, 1392 bp, Aquifex aeolicus; identical to SEQ ID NO: 4697
  CDS (1)..(1392)

SEQ ID NO: 39968 - protein, 463 aa, Aquifex aeolicus; identical to SEQ ID NO: 4698

SEQ ID NO: 39969 - DNA, 1371 bp, Pyrococcus horikoshii; identical to SEQ ID NO: 4699
  CDS (1)..(1371)

SEQ ID NO: 39970 - protein, 456 aa, Pyrococcus horikoshii; identical to SEQ ID NO: 4700

SEQ ID NO: 39971 - DNA, 1431 bp, Chlamydophila pneumoniae, Chlamydia pneumoniae; identical to SEQ ID NO: 4701
  CDS (1)..(1431)

SEQ ID NO: 39972 - protein, 476 aa, Chlamydophila pneumoniae, Chlamydia pneumoniae; identical to SEQ ID NO: 4702

SEQ ID NO: 39973 - DNA, 1452 bp, Lactococcus lactis subsp. lactis; identical to SEQ ID NO: 4703
  CDS (1)..(1452)

SEQ ID NO: 39974 - protein, 483 aa, Lactococcus lactis subsp. lactis; identical to SEQ ID NO: 4704

SEQ ID NO: 39975 - DNA, 1461 bp, Sinorhizobium meliloti; identical to SEQ ID NO: 4705
  CDS (1)..(1461)

SEQ ID NO: 39976 - protein, 486 aa, Sinorhizobium meliloti; identical to SEQ ID NO: 4706

SEQ ID NO: 39977 - DNA, 1425 bp, Chlamydia trachomatis; identical to SEQ ID NO: 4707
  CDS (1)..(1425)

SEQ ID NO: 39978 - protein, 474 aa, Chlamydia trachomatis; identical to SEQ ID NO: 4708

SEQ ID NO: 39979 - DNA, 1701 bp, Sulfolobus solfataricus; identical to SEQ ID NO: 4709
  CDS (1)..(1701)

SEQ ID NO: 39980 - protein, 566 aa, Sulfolobus solfataricus; identical to SEQ ID NO: 4710

SEQ ID NO: 39981 - DNA, 1566 bp, Methanococcus jannaschii; identical to SEQ ID NO: 4711
  CDS (1)..(1566)

SEQ ID NO: 39982 - protein, 521 aa, Methanococcus jannaschii; identical to SEQ ID NO: 4712

SEQ ID NO: 39983 - DNA, 1431 bp, Bacillus halodurans; identical to SEQ ID NO: 4713
  CDS (1)..(1431)

SEQ ID NO: 39984 - protein, 476 aa, Bacillus halodurans; identical to SEQ ID NO: 4714

SEQ ID NO: 39985 - DNA, 1455 bp, Vibrio cholerae; identical to SEQ ID NO: 4715
  CDS (1)..(1455)

SEQ ID NO: 39986 - protein, 484 aa, Vibrio cholerae; identical to SEQ ID NO: 4716

SEQ ID NO: 39987 - DNA, 1833 bp, Arabidopsis thaliana (mouse-ear cress); identical to SEQ ID NO: 4717
  CDS (1)..(1833)

SEQ ID NO: 39988 - protein, 610 aa, Arabidopsis thaliana (mouse-ear cress); identical to SEQ ID NO: 4718

SEQ ID NO: 39989 - DNA, 1461 bp, Thermotoga maritima; identical to SEQ ID NO: 4719
  CDS (1)..(1461)

SEQ ID NO: 39990 - protein, 486 aa, Thermotoga maritima; identical to SEQ ID NO: 4720

SEQ ID NO: 39991 - DNA, 1542 bp, Pseudomonas aeruginosa; identical to SEQ ID NO: 4721
  CDS (1)..(1542)

SEQ ID NO: 39992 - protein, 513 aa, Pseudomonas aeruginosa; identical to SEQ ID NO: 4722

SEQ ID NO: 39993 - DNA, 3078 bp, Arabidopsis thaliana (mouse-ear cress); identical to SEQ ID NO: 4723
  CDS (1)..(3078)

SEQ ID NO: 39994 - protein, 1025 aa, Arabidopsis thaliana (mouse-ear cress); identical to SEQ ID NO: 4724

SEQ ID NO: 39995 - DNA, 1434 bp, Streptococcus pneumoniae; identical to SEQ ID NO: 4725
  CDS (1)..(1434)

SEQ ID NO: 39996 - protein, 477 aa, Streptococcus pneumoniae; identical to SEQ ID NO: 4726

SEQ ID NO: 39997 - DNA, 2533 bp, Oryza sativa (rice); identical to SEQ ID NO: 4727
  CDS (114)..(1994)

SEQ ID NO: 39998 - protein, 626 aa, Oryza sativa (rice); identical to SEQ ID NO: 4728

SEQ ID NO: 39999 - DNA, 1818 bp, Zea mays (maize); identical to SEQ ID NO: 4729
  CDS (1)..(1818)

SEQ ID NO: 40000 - protein, 605 aa, Zea mays (maize); identical to SEQ ID NO: 4730

SEQ ID NO: 40001 - DNA, 1455 bp, Bacillus subtilis; identical to SEQ ID NO: 4731
  CDS (1)..(1455)

SEQ ID NO: 40002 - protein, 484 aa, Bacillus subtilis; identical to SEQ ID NO: 4732

SEQ ID NO: 40003 - DNA, 2168 bp, Manihot esculenta (cassava); identical to SEQ ID NO: 4733
  CDS (75)..(1901)

SEQ ID NO: 40004 - protein, 608 aa, Manihot esculenta (cassava); identical to SEQ ID NO: 4734

SEQ ID NO: 40005 - DNA, 2035 bp, Pisum sativum (garden pea); identical to SEQ ID NO: 4735
  CDS (82)..(1893)

SEQ ID NO: 40006 - protein, 603 aa, Pisum sativum (garden pea); identical to SEQ ID NO: 4736

SEQ ID NO: 40007 - DNA, 1476 bp, Synechocystis sp; identical to SEQ ID NO: 4737
  CDS (1)..(1476)

SEQ ID NO: 40008 - protein, 491 aa, Synechocystis sp; identical to SEQ ID NO: 4738

SEQ ID NO: 40009 - DNA, 1434 bp, Synechocystis sp; identical to SEQ ID NO: 4739
  CDS (1)..(1434)

SEQ ID NO: 40010 - protein, 477 aa, Synechocystis sp; identical to SEQ ID NO: 4740

SEQ ID NO: 40011 - DNA, 2868 bp, Zea mays (maize); identical to SEQ ID NO: 4741
  CDS (670)..(2868)

SEQ ID NO: 40012 - protein, 732 aa, Zea mays (maize); identical to SEQ ID NO: 4742

SEQ ID NO: 40013 - DNA, 2480 bp, Zea mays (maize); identical to SEQ ID NO: 4743
  CDS (58)..(2154)

SEQ ID NO: 40014 - protein, 698 aa, Zea mays (maize); identical to SEQ ID NO: 4744

SEQ ID NO: 40015 - DNA, 6027 bp, Zea mays (maize); identical to SEQ ID NO: 4745
  CDS (120)..(5144)

SEQ ID NO: 40016 - protein, 1674 aa, Zea mays (maize); identical to SEQ ID NO: 4746

SEQ ID NO: 40017 - DNA, 2991 bp, Zea mays (maize); identical to SEQ ID NO: 4747
  misc_feature (2709)..(2709): n is a, c, g, or t
  CDS (602)..(2470)

SEQ ID NO: 40018 - protein, 622 aa, Zea mays (maize); identical to SEQ ID NO: 4748

SEQ ID NO: 40019 - DNA, 2360 bp, Solanum tuberosum (potato); identical to SEQ ID NO: 4749
  CDS (68)..(1993)

SEQ ID NO: 40020 - protein, 641 aa, Solanum tuberosum (potato); identical to SEQ ID NO: 4750

SEQ ID NO: 40021 - DNA, 2124 bp, Ipomoea batatas (sweet potato); identical to SEQ ID NO: 4751
  CDS (23)..(1849)

SEQ ID NO: 40022 - protein, 608 aa, Ipomoea batatas (sweet potato); identical to SEQ ID NO: 4752

SEQ ID NO: 40023 - DNA, 2287 bp, Sorghum bicolor (sorghum); identical to SEQ ID NO: 4753
  CDS (207)..(2033)

SEQ ID NO: 40024 - protein, 608 aa, Sorghum bicolor (sorghum); identical to SEQ ID NO: 4754

SEQ ID NO: 40025 - DNA, 4110 bp, Schizosaccharomyces pombe; identical to SEQ ID NO: 4755
  CDS (1)..(4110)

SEQ ID NO: 40026 - protein, 1369 aa, Schizosaccharomyces pombe; identical to SEQ ID NO: 4756

SEQ ID NO: 40027 - DNA, 1812 bp, Hordeum vulgare (barley); identical to SEQ ID NO: 4757
  CDS (1)..(1812)

SEQ ID NO: 40028 - protein, 603 aa, Hordeum vulgare (barley); identical to SEQ ID NO: 4758

SEQ ID NO: 40029 - DNA, 2161 bp, Solanum tuberosum (potato); identical to SEQ ID NO: 4759
  CDS (37)..(1860)

SEQ ID NO: 40030 - protein, 607 aa, Solanum tuberosum (potato); identical to SEQ ID NO: 4760

SEQ ID NO: 40031 - DNA, 2825 bp, Triticum aestivum; identical to SEQ ID NO: 4761
  CDS (162)..(2561)

SEQ ID NO: 40032 - protein, 799 aa, Triticum aestivum; identical to SEQ ID NO: 4762

SEQ ID NO: 40033 - DNA, 2771 bp, Triticum aestivum; identical to SEQ ID NO: 4763
  CDS (280)..(2550)

SEQ ID NO: 40034 - protein, 756 aa, Triticum aestivum; identical to SEQ ID NO: 4764

SEQ ID NO: 40035 - DNA, 4121 bp, Zea mays; identical to SEQ ID NO: 4765
  CDS (442)..(3954)

SEQ ID NO: 40036 - protein, 1170 aa, Zea mays; identical to SEQ ID NO: 4766

SEQ ID NO: 40037 - DNA, 3240 bp, Chlamydomonas reinhardtii; identical to SEQ ID NO: 4767
  CDS (138)..(2264)

SEQ ID NO: 40038 - protein, 708 aa, Chlamydomonas reinhardtii; identical to SEQ ID NO: 4768

SEQ ID NO: 40039 - DNA, 3049 bp, Chlamydomonas reinhardtii; identical to SEQ ID NO: 4769
  CDS (190)..(1920)

SEQ ID NO: 40040 - protein, 576 aa, Chlamydomonas reinhardtii; identical to SEQ ID NO: 4770

SEQ ID NO: 40041 - DNA, 2716 bp, Chlamydomonas reinhardtii; identical to SEQ ID NO: 4771
  CDS (93)..(2048)

SEQ ID NO: 40042 - protein, 651 aa, Chlamydomonas reinhardtii; identical to SEQ ID NO: 4772

SEQ ID NO: 40043 - DNA, 2325 bp, Ipomoea batatas; identical to SEQ ID NO: 4773
  CDS (155)..(2047)

SEQ ID NO: 40044 - protein, 630 aa, Ipomoea batatas; identical to SEQ ID NO: 4774

SEQ ID NO: 40045 - DNA, 1440 bp, Erwinia carotovora subsp; identical to SEQ ID NO: 4775
  CDS (1)..(1440)

SEQ ID NO: 40046 - protein, 479 aa, Erwinia carotovora subsp; identical to SEQ ID NO: 4776

SEQ ID NO: 40047 - DNA, 1497 bp, Bacillus thuringiensis serovar konkukian str; identical to SEQ ID NO: 4777
  CDS (1)..(1497)

SEQ ID NO: 40048 - protein, 498 aa, Bacillus thuringiensis serovar konkukian str; identical to SEQ ID NO: 4778

SEQ ID NO: 40049 - DNA, 1431 bp, Mycoplasma mobile; identical to SEQ ID NO: 4779
  CDS (1)..(1431): transl-table=4

SEQ ID NO: 40050 - protein, 476 aa, Mycoplasma mobile; identical to SEQ ID NO: 4780

SEQ ID NO: 40051 - DNA, 1815 bp, Hordeum bulbosum; identical to SEQ ID NO: 4781
  CDS (1)..(1815)

SEQ ID NO: 40052 - protein, 604 aa, Hordeum bulbosum; identical to SEQ ID NO: 4782

SEQ ID NO: 40053 - DNA, 1527 bp, Photobacterium profundum; identical to SEQ ID NO: 4783
  CDS (1)..(1527)

SEQ ID NO: 40054 - protein, 508 aa, Photobacterium profundum; identical to SEQ ID NO: 4784

SEQ ID NO: 40055 - DNA, 1569 bp, Methanococcus maripaludis; identical to SEQ ID NO: 4785
  CDS (1)..(1569)

SEQ ID NO: 40056 - protein, 522 aa, Methanococcus maripaludis; identical to SEQ ID NO: 4786

SEQ ID NO: 40057 - DNA, 1503 bp, Parachlamydia sp; identical to SEQ ID NO: 4787
  CDS (1)..(1503)

SEQ ID NO: 40058 - protein, 500 aa, Parachlamydia sp; identical to SEQ ID NO: 4788

SEQ ID NO: 40059 - DNA, 1452 bp, Rhodopseudomonas palustris; identical to SEQ ID NO: 4789
  CDS (1)..(1452)

SEQ ID NO: 40060 - protein, 483 aa, Rhodopseudomonas palustris; identical to SEQ ID NO: 4790

SEQ ID NO: 40061 - DNA, 1173 bp, Corynebacterium diphtheriae; identical to SEQ ID NO: 4791
  CDS (1)..(1173)

SEQ ID NO: 40062 - protein, 390 aa, Corynebacterium diphtheriae; identical to SEQ ID NO: 4792

SEQ ID NO: 40063 - DNA, 1578 bp, Ostreococcus tauri; identical to SEQ ID NO: 4793
  CDS (1)..(1578)

SEQ ID NO: 40064 - protein, 525 aa, Ostreococcus tauri; identical to SEQ ID NO: 4794

SEQ ID NO: 40065 - DNA, 1725 bp, Ostreococcus tauri; identical to SEQ ID NO: 4795
  CDS (1)..(1725)

SEQ ID NO: 40066 - protein, 574 aa, Ostreococcus tauri; identical to SEQ ID NO: 4796

SEQ ID NO: 40067 - DNA, 2022 bp, Ostreococcus tauri; identical to SEQ ID NO: 4797
  CDS (1)..(2022)

SEQ ID NO: 40068 - protein, 673 aa, Ostreococcus tauri; identical to SEQ ID NO: 4798

SEQ ID NO: 40069 - DNA, 2939 bp, Colocasia esculenta; identical to SEQ ID NO: 4799
  CDS (220)..(2634)

SEQ ID NO: 40070 - protein, 804 aa, Colocasia esculenta; identical to SEQ ID NO: 4800

SEQ ID NO: 40071 - DNA, 1554 bp, Thermoproteus tenax; identical to SEQ ID NO: 4801
  CDS (1)..(1554)

SEQ ID NO: 40072 - protein, 517 aa, Thermoproteus tenax; identical to SEQ ID NO: 4802

SEQ ID NO: 40073 - DNA, 1470 bp, Desulfovibrio vulgaris; identical to SEQ ID NO: 4803
  CDS (1)..(1470)

SEQ ID NO: 40074 - protein, 489 aa, Desulfovibrio vulgaris; identical to SEQ ID NO: 4804

SEQ ID NO: 40075 - DNA, 1323 bp, Thermus thermophilus; identical to SEQ ID NO: 4805
  CDS (1)..(1323)

SEQ ID NO: 40076 - protein, 440 aa, Thermus thermophilus; identical to SEQ ID NO: 4806

SEQ ID NO: 40077 - DNA, 1431 bp, Bacillus cereus; identical to SEQ ID NO: 4807
  CDS (1)..(1431)

SEQ ID NO: 40078 - protein, 476 aa, Bacillus cereus; identical to SEQ ID NO: 4808

SEQ ID NO: 40079 - DNA, 1476 bp, Treponema denticola; identical to SEQ ID NO: 4809
  CDS (1)..(1476)

SEQ ID NO: 40080 - protein, 491 aa, Treponema denticola; identical to SEQ ID NO: 4810

SEQ ID NO: 40081 - DNA, 1173 bp, Mycobacterium paratuberculosis; identical to SEQ ID NO: 4811
  CDS (1)..(1173)

SEQ ID NO: 40082 - protein, 390 aa, Mycobacterium paratuberculosis; identical to SEQ ID NO: 4812

SEQ ID NO: 40083 - DNA, 2486 bp, Phaseolus vulgaris; identical to SEQ ID NO: 4813
  CDS (39)..(2255)

SEQ ID NO: 40084 - protein, 738 aa, Phaseolus vulgaris; identical to SEQ ID NO: 4814

SEQ ID NO: 40085 - DNA, 2570 bp, Phaseolus vulgaris; identical to SEQ ID NO: 4815
  CDS (135)..(2309)

SEQ ID NO: 40086 - protein, 724 aa, Phaseolus vulgaris; identical to SEQ ID NO: 4816

SEQ ID NO: 40087 - DNA, 2444 bp, Phaseolus vulgaris; identical to SEQ ID NO: 4817
  CDS (78)..(2015)

SEQ ID NO: 40088 - protein, 645 aa, Phaseolus vulgaris; identical to SEQ ID NO: 4818

SEQ ID NO: 40089 - DNA, 1827 bp, Hordeum spontaneum; identical to SEQ ID NO: 4819
  CDS (1)..(1827)

SEQ ID NO: 40090 - protein, 608 aa, Hordeum spontaneum; identical to SEQ ID NO: 4820

SEQ ID NO: 40091 - DNA, 1248 bp, Gloeobacter violaceus; identical to SEQ ID NO: 4821
  CDS (1)..(1248)

SEQ ID NO: 40092 - protein, 415 aa, Gloeobacter violaceus; identical to SEQ ID NO: 4822

SEQ ID NO: 40093 - DNA, 3219 bp, Oryza sativa; identical to SEQ ID NO: 4823
  CDS (1)..(3219)

SEQ ID NO: 40094 - protein, 1072 aa, Oryza sativa; identical to SEQ ID NO: 4824

SEQ ID NO: 40095 - DNA, 2547 bp, Oryza sativa; identical to SEQ ID NO: 4825
  CDS (97)..(2022)

SEQ ID NO: 40096 - protein, 641 aa, Oryza sativa; identical to SEQ ID NO: 4826

SEQ ID NO: 40097 - DNA, 1242 bp, Streptomyces avermitilis; identical to SEQ ID NO: 4827
  CDS (1)..(1242)

SEQ ID NO: 40098 - protein, 413 aa, Streptomyces avermitilis; identical to SEQ ID NO: 4828

SEQ ID NO: 40099 - DNA, 2208 bp, Phaseolus vulgaris; identical to SEQ ID NO: 4829
  CDS (144)..(1991)

SEQ ID NO: 40100 - protein, 615 aa, Phaseolus vulgaris; identical to SEQ ID NO: 4830

SEQ ID NO: 40101 - DNA, 2748 bp, Oryza sativa; identical to SEQ ID NO: 4831
  CDS (1)..(2748)

SEQ ID NO: 40102 - protein, 915 aa, Oryza sativa; identical to SEQ ID NO: 4832

SEQ ID NO: 40103 - DNA, 1605 bp, Shewanella oneidensis; identical to SEQ ID NO: 4833
  CDS (1)..(1605)

SEQ ID NO: 40104 - protein, 534 aa, Shewanella oneidensis; identical to SEQ ID NO: 4834

SEQ ID NO: 40105 - DNA, 1173 bp, Corynebacterium efficiens; identical to SEQ ID NO: 4835
  CDS (1)..(1173)

SEQ ID NO: 40106 - protein, 390 aa, Corynebacterium efficiens; identical to SEQ ID NO: 4836

SEQ ID NO: 40107 - DNA, 2340 bp, Colocasia esculenta; identical to SEQ ID NO: 4837
  CDS (155)..(2086)

SEQ ID NO: 40108 - protein, 643 aa, Colocasia esculenta; identical to SEQ ID NO: 4838

SEQ ID NO: 40109 - DNA, 2409 bp, Hordeum vulgare; identical to SEQ ID NO: 4839
  CDS (1)..(2409)

SEQ ID NO: 40110 - protein, 802 aa, Hordeum vulgare; identical to SEQ ID NO: 4840

SEQ ID NO: 40111 - DNA, 2115 bp, Setaria italica; identical to SEQ ID NO: 4841
  CDS (142)..(1959)

SEQ ID NO: 40112 - protein, 605 aa, Setaria italica; identical to SEQ ID NO: 4842

SEQ ID NO: 40113 - DNA, 2081 bp, Triticum aestivum; identical to SEQ ID NO: 4843
  CDS (1)..(1800)

SEQ ID NO: 40114 - protein, 599 aa, Triticum aestivum; identical to SEQ ID NO: 4844

SEQ ID NO: 40115 - DNA, 1230 bp, Corynebacterium glutamicum; identical to SEQ ID NO: 4845
  CDS (1)..(1230)

SEQ ID NO: 40116 - protein, 409 aa, Corynebacterium glutamicum; identical to SEQ ID NO: 4846

SEQ ID NO: 40117 - DNA, 1356 bp, Pyrococcus furiosus; identical to SEQ ID NO: 4847
  CDS (1)..(1356)

SEQ ID NO: 40118 - protein, 451 aa, Pyrococcus furiosus; identical to SEQ ID NO: 4848

SEQ ID NO: 40119 - DNA, 2112 bp, Oryza sativa; identical to SEQ ID NO: 4849
  CDS (61)..(1887)

SEQ ID NO: 40120 - protein, 608 aa, Oryza sativa; identical to SEQ ID NO: 4850

SEQ ID NO: 40121 - DNA, 2496 bp, Oryza sativa; identical to SEQ ID NO: 4851
  CDS (1)..(2496)

SEQ ID NO: 40122 - protein, 831 aa, Oryza sativa; identical to SEQ ID NO: 4852

SEQ ID NO: 40123 - DNA, 1443 bp, Rhizobium loti; identical to SEQ ID NO: 4853
  CDS (1)..(1443)

SEQ ID NO: 40124 - protein, 480 aa, Rhizobium loti; identical to SEQ ID NO: 4854

SEQ ID NO: 40125 - DNA, 2100 bp, Pisum sativum; identical to SEQ ID NO: 4855
  CDS (6)..(1847)

SEQ ID NO: 40126 - protein, 613 aa, Pisum sativum; identical to SEQ ID NO: 4856

SEQ ID NO: 40127 - DNA, 3386 bp, Triticum aestivum; identical to SEQ ID NO: 4857
  CDS (251)..(2995)

SEQ ID NO: 40128 - protein, 914 aa, Triticum aestivum; identical to SEQ ID NO: 4858

SEQ ID NO: 40129 - DNA, 2919 bp, Oryza sativa; identical to SEQ ID NO: 4859
  CDS (165)..(2597)

SEQ ID NO: 40130 - protein, 810 aa, Oryza sativa; identical to SEQ ID NO: 4860

SEQ ID NO: 40131 - DNA, 2394 bp, Oryza sativa; identical to SEQ ID NO: 4861
  CDS (34)..(2118)

SEQ ID NO: 40132 - protein, 694 aa, Oryza sativa; identical to SEQ ID NO: 4862

SEQ ID NO: 40133 - DNA, 2903 bp, Oryza sativa; identical to SEQ ID NO: 4863
  CDS (86)..(2335)

SEQ ID NO: 40134 - protein, 749 aa, Oryza sativa; identical to SEQ ID NO: 4864

SEQ ID NO: 40135 - DNA, 1719 bp, Sulfolobus tokodaii; identical to SEQ ID NO: 4865
  CDS (1)..(1719)

SEQ ID NO: 40136 - protein, 572 aa, Sulfolobus tokodaii; identical to SEQ ID NO: 4866

SEQ ID NO: 40137 - DNA, 2270 bp, Perilla frutescens; identical to SEQ ID NO: 4867
  CDS (172)..(1986)

SEQ ID NO: 40138 - protein, 604 aa, Perilla frutescens; identical to SEQ ID NO: 4868

SEQ ID NO: 40139 - DNA, 1701 bp, Sulfolobus acidocaldarius; identical to SEQ ID NO: 4869
  CDS (1)..(1701)

SEQ ID NO: 40140 - protein, 566 aa, Sulfolobus acidocaldarius; identical to SEQ ID NO: 4870

SEQ ID NO: 40141 - DNA, 2793 bp, Triticum aestivum; identical to SEQ ID NO: 4871
  CDS (135)..(2531)

SEQ ID NO: 40142 - protein, 798 aa, Triticum aestivum; identical to SEQ ID NO: 4872

SEQ ID NO: 40143 - DNA, 5346 bp, Triticum aestivum; identical to SEQ ID NO: 4873
  CDS (29)..(4915)

SEQ ID NO: 40144 - protein, 1628 aa, Triticum aestivum; identical to SEQ ID NO: 4874

SEQ ID NO: 40145 - DNA, 2502 bp, Arabidopsis thaliana; identical to SEQ ID NO: 4875
  CDS (1)..(2379)

SEQ ID NO: 40146 - protein, 792 aa, Arabidopsis thaliana; identical to SEQ ID NO: 4876

SEQ ID NO: 40147 - DNA, 2592 bp, Sorghum bicolor; identical to SEQ ID NO: 4877
  CDS (59)..(1948)

SEQ ID NO: 40148 - protein, 629 aa, Sorghum bicolor; identical to SEQ ID NO: 4878

SEQ ID NO: 40149 - DNA, 1815 bp, Triticum turgidum subsp; identical to SEQ ID NO: 4879
  CDS (1)..(1815)

SEQ ID NO: 40150 - protein, 604 aa, Triticum turgidum subsp; identical to SEQ ID NO: 4880

SEQ ID NO: 40151 - DNA, 2575 bp, Manihot esculenta; identical to SEQ ID NO: 4881
  CDS (50)..(2305)

SEQ ID NO: 40152 - protein, 751 aa, Manihot esculenta; identical to SEQ ID NO: 4882

SEQ ID NO: 40153 - DNA, 2842 bp, Triticum aestivum; identical to SEQ ID NO: 4883
  CDS (89)..(2488)

SEQ ID NO: 40154 - protein, 799 aa, Triticum aestivum; identical to SEQ ID NO: 4884

SEQ ID NO: 40155 - DNA, 1818 bp, Triticum monococcum; identical to SEQ ID NO: 4885
  CDS (1)..(1818)

SEQ ID NO: 40156 - protein, 605 aa, Triticum monococcum; identical to SEQ ID NO: 4886

SEQ ID NO: 40157 - DNA, 2081 bp, Triticum aestivum; identical to SEQ ID NO: 4887
  CDS (120)..(1919)

SEQ ID NO: 40158 - protein, 599 aa, Triticum aestivum; identical to SEQ ID NO: 4888

SEQ ID NO: 40159 - DNA, 2591 bp, Triticum aestivum; identical to SEQ ID NO: 4889
  CDS (256)..(2199)

SEQ ID NO: 40160 - protein, 647 aa, Triticum aestivum; identical to SEQ ID NO: 4890

SEQ ID NO: 40161 - DNA, 1872 bp, Oryza sativa; identical to SEQ ID NO: 4891
  CDS (1)..(1872)

SEQ ID NO: 40162 - protein, 623 aa, Oryza sativa; identical to SEQ ID NO: 4892

SEQ ID NO: 40163 - DNA, 2028 bp, Triticum aestivum; identical to SEQ ID NO: 4893
  CDS (30)..(1754)

SEQ ID NO: 40164 - protein, 574 aa, Triticum aestivum; identical to SEQ ID NO: 4894

SEQ ID NO: 40165 - DNA, 3901 bp, Vigna unguiculata; identical to SEQ ID NO: 4895
  CDS (161)..(3604)

SEQ ID NO: 40166 - protein, 1147 aa, Vigna unguiculata; identical to SEQ ID NO: 4896

SEQ ID NO: 40167 - DNA, 3519 bp, Vigna unguiculata; identical to SEQ ID NO: 4897
  CDS (386)..(3010)

SEQ ID NO: 40168 - protein, 874 aa, Vigna unguiculata; identical to SEQ ID NO: 4898

SEQ ID NO: 40169 - DNA, 2221 bp, Phaseolus vulgaris; identical to SEQ ID NO: 4899
  CDS (30)..(1850)

SEQ ID NO: 40170 - protein, 606 aa, Phaseolus vulgaris; identical to SEQ ID NO: 4900

SEQ ID NO: 40171 - DNA, 2107 bp, Astragalus membranaceus; identical to SEQ ID NO: 4901
  CDS (96)..(1919)

SEQ ID NO: 40172 - protein, 607 aa, Astragalus membranaceus; identical to SEQ ID NO: 4902

SEQ ID NO: 40173 - DNA, 1389 bp, Bradyrhizobium japonicum; identical to SEQ ID NO: 4903
  CDS (1)..(1389)

SEQ ID NO: 40174 - protein, 462 aa, Bradyrhizobium japonicum; identical to SEQ ID NO: 4904

SEQ ID NO: 40175 - DNA, 1530 bp, Agrobacterium tumefaciens; identical to SEQ ID NO: 4905
  CDS (1)..(1530)

SEQ ID NO: 40176 - protein, 509 aa, Agrobacterium tumefaciens; identical to SEQ ID NO: 4906

SEQ ID NO: 40177 - DNA, 1449 bp, Bradyrhizobium japonicum; identical to SEQ ID NO: 4907
  CDS (1)..(1449)

SEQ ID NO: 40178 - protein, 482 aa, Bradyrhizobium japonicum; identical to SEQ ID NO: 4908

SEQ ID NO: 40179 - DNA, 1431 bp, Bacillus cereus; identical to SEQ ID NO: 4909
  CDS (1)..(1431)

SEQ ID NO: 40180 - protein, 476 aa, Bacillus cereus; identical to SEQ ID NO: 4910

SEQ ID NO: 40181 - DNA, 1458 bp, Bacillus stearothermophilus; identical to SEQ ID NO: 4911
  CDS (1)..(1458)

SEQ ID NO: 40182 - protein, 485 aa, Bacillus stearothermophilus; identical to SEQ ID NO: 4912

SEQ ID NO: 40183 - DNA, 1533 bp, Bordetella bronchiseptica; identical to SEQ ID NO: 4913
  CDS (1)..(1533)

SEQ ID NO: 40184 - protein, 510 aa, Bordetella bronchiseptica; identical to SEQ ID NO: 4914

SEQ ID NO: 40185 - DNA, 1428 bp, Chlamydophila caviae; identical to SEQ ID NO: 4915
  CDS (1)..(1428)

SEQ ID NO: 40186 - protein, 475 aa, Chlamydophila caviae; identical to SEQ ID NO: 4916

SEQ ID NO: 40187 - DNA, 1467 bp, Chlorobium tepidum; identical to SEQ ID NO: 4917
  CDS (1)..(1467)

SEQ ID NO: 40188 - protein, 488 aa, Chlorobium tepidum; identical to SEQ ID NO: 4918

SEQ ID NO: 40189 - DNA, 1449 bp, Clostridium perfringens; identical to SEQ ID NO: 4919
  CDS (1)..(1449)

SEQ ID NO: 40190 - protein, 482 aa, Clostridium perfringens; identical to SEQ ID NO: 4920

SEQ ID NO: 40191 - DNA, 1335 bp, Deinococcus radiodurans; identical to SEQ ID NO: 4921
  CDS (1)..(1335)

SEQ ID NO: 40192 - protein, 444 aa, Deinococcus radiodurans; identical to SEQ ID NO: 4922

SEQ ID NO: 40193 - DNA, 1386 bp, Fusobacterium nucleatum; identical to SEQ ID NO: 4923
  CDS (1)..(1386)

SEQ ID NO: 40194 - protein, 461 aa, Fusobacterium nucleatum; identical to SEQ ID NO: 4924

SEQ ID NO: 40195 - DNA, 1377 bp, Gloeobacter violaceus; identical to SEQ ID NO: 4925
  CDS (1)..(1377)

SEQ ID NO: 40196 - protein, 458 aa, Gloeobacter violaceus; identical to SEQ ID NO: 4926

SEQ ID NO: 40197 - DNA, 1440 bp, Lactobacillus plantarum; identical to SEQ ID NO: 4927
  CDS (1)..(1440)

SEQ ID NO: 40198 - protein, 479 aa, Lactobacillus plantarum; identical to SEQ ID NO: 4928

SEQ ID NO: 40199 - DNA, 1488 bp, Nitrosomonas europaea; identical to SEQ ID NO: 4929
  CDS (1)..(1488)

SEQ ID NO: 40200 - protein, 495 aa, Nitrosomonas europaea; identical to SEQ ID NO: 4930

SEQ ID NO: 40201 - DNA, 1434 bp, Oceanobacillus iheyensis; identical to SEQ ID NO: 4931
  CDS (1)..(1434)

SEQ ID NO: 40202 - protein, 477 aa, Oceanobacillus iheyensis; identical to SEQ ID NO: 4932

SEQ ID NO: 40203 - DNA, 1443 bp, Pasteurella multocida; identical to SEQ ID NO: 4933
  CDS (1)..(1443)

SEQ ID NO: 40204 - protein, 480 aa, Pasteurella multocida; identical to SEQ ID NO: 4934

SEQ ID NO: 40205 - DNA, 1506 bp, Prochlorococcus marinus; identical to SEQ ID NO: 4935
  CDS (1)..(1506)

SEQ ID NO: 40206 - protein, 501 aa, Prochlorococcus marinus; identical to SEQ ID NO: 4936

SEQ ID NO: 40207 - DNA, 1500 bp, Prochlorococcus marinus; identical to SEQ ID NO: 4937
  CDS (1)..(1500)

SEQ ID NO: 40208 - protein, 499 aa, Prochlorococcus marinus; identical to SEQ ID NO: 4938

SEQ ID NO: 40209 - DNA, 1452 bp, Prochlorococcus marinus subsp; identical to SEQ ID NO: 4939
  CDS (1)..(1452)

SEQ ID NO: 40210 - protein, 483 aa, Prochlorococcus marinus subsp; identical to SEQ ID NO: 4940

SEQ ID NO: 40211 - DNA, 1560 bp, Pseudomonas putida; identical to SEQ ID NO: 4941
  CDS (1)..(1560)

SEQ ID NO: 40212 - protein, 519 aa, Pseudomonas putida; identical to SEQ ID NO: 4942

SEQ ID NO: 40213 - DNA, 1455 bp, Pseudomonas syringae; identical to SEQ ID NO: 4943
  CDS (1)..(1455)

SEQ ID NO: 40214 - protein, 484 aa, Pseudomonas syringae; identical to SEQ ID NO: 4944

SEQ ID NO: 40215 - DNA, 1626 bp, Ralstonia solanacearum; identical to SEQ ID NO: 4945
  CDS (1)..(1626)

SEQ ID NO: 40216 - protein, 541 aa, Ralstonia solanacearum; identical to SEQ ID NO: 4946

SEQ ID NO: 40217 - DNA, 1446 bp, Rhizobium loti; identical to SEQ ID NO: 4947
  CDS (1)..(1446)

SEQ ID NO: 40218 - protein, 481 aa, Rhizobium loti; identical to SEQ ID NO: 4948

SEQ ID NO: 40219 - DNA, 1443 bp, Rhizobium tropici; identical to SEQ ID NO: 4949
  CDS (1)..(1443)

SEQ ID NO: 40220 - protein, 480 aa, Rhizobium tropici; identical to SEQ ID NO: 4950

SEQ ID NO: 40221 - DNA, 1524 bp, Rhodopirellula baltica; identical to SEQ ID NO: 4951
  CDS (1)..(1524)

SEQ ID NO: 40222 - protein, 507 aa, Rhodopirellula baltica; identical to SEQ ID NO: 4952

SEQ ID NO: 40223 - DNA, 1434 bp, Rhodobacter sphaeroides; identical to SEQ ID NO: 4953
  CDS (1)..(1434)

SEQ ID NO: 40224 - protein, 477 aa, Rhodobacter sphaeroides; identical to SEQ ID NO: 4954

SEQ ID NO: 40225 - DNA, 1434 bp, Salmonella typhimurium; identical to SEQ ID NO: 4955
  CDS (1)..(1434)

SEQ ID NO: 40226 - protein, 477 aa, Salmonella typhimurium; identical to SEQ ID NO: 4956

SEQ ID NO: 40227 - DNA, 1431 bp, Streptococcus mutans; identical to SEQ ID NO: 4957
  CDS (1)..(1431)

SEQ ID NO: 40228 - protein, 476 aa, Streptococcus mutans; identical to SEQ ID NO: 4958

SEQ ID NO: 40229 - DNA, 1425 bp, Synechococcus elongatus; identical to SEQ ID NO: 4959
  CDS (1)..(1425)

SEQ ID NO: 40230 - protein, 474 aa, Synechococcus elongatus; identical to SEQ ID NO: 4960

SEQ ID NO: 40231 - DNA, 1398 bp, Synechococcus sp; identical to SEQ ID NO: 4961
  CDS (1)..(1398)

SEQ ID NO: 40232 - protein, 465 aa, Synechococcus sp; identical to SEQ ID NO: 4962

SEQ ID NO: 40233 - DNA, 1542 bp, Synechococcus sp; identical to SEQ ID NO: 4963
  CDS (1)..(1542)

SEQ ID NO: 40234 - protein, 513 aa, Synechococcus sp; identical to SEQ ID NO: 4964

SEQ ID NO: 40235 - DNA, 1317 bp, Thermus caldophilus; identical to SEQ ID NO: 4965
  CDS (1)..(1317)

SEQ ID NO: 40236 - protein, 438 aa, Thermus caldophilus; identical to SEQ ID NO: 4966

SEQ ID NO: 40237 - DNA, 1458 bp, Vibrio parahaemolyticus; identical to SEQ ID NO: 4967
  CDS (1)..(1458)

SEQ ID NO: 40238 - protein, 485 aa, Vibrio parahaemolyticus; identical to SEQ ID NO: 4968

SEQ ID NO: 40239 - DNA, 1458 bp, Vibrio vulnificus; identical to SEQ ID NO: 4969
  CDS (1)..(1458)

SEQ ID NO: 40240 - protein, 485 aa, Vibrio vulnificus; identical to SEQ ID NO: 4970

SEQ ID NO: 40241 - DNA, 1425 bp, Xanthomonas axonopodis; identical to SEQ ID NO: 4971
  CDS (1)..(1425)

SEQ ID NO: 40242 - protein, 474 aa, Xanthomonas axonopodis; identical to SEQ ID NO: 4972

SEQ ID NO: 40243 - DNA, 1425 bp, Xanthomonas campestris; identical to SEQ ID NO: 4973
  CDS (1)..(1425)

SEQ ID NO: 40244 - protein, 474 aa, Xanthomonas campestris; identical to SEQ ID NO: 4974

SEQ ID NO: 40245 - DNA, 2345 bp, Antirrhinum majus; identical to SEQ ID NO: 4975
  CDS (10)..(1836)

SEQ ID NO: 40246 - protein, 608 aa, Antirrhinum majus; identical to SEQ ID NO: 4976

SEQ ID NO: 40247 - DNA, 2211 bp, Ipomoea batatas; identical to SEQ ID NO: 4977
  CDS (93)..(1919)

SEQ ID NO: 40248 - protein, 608 aa, Ipomoea batatas; identical to SEQ ID NO: 4978

SEQ ID NO: 40249 - DNA, 2988 bp, Pisum sativum; identical to SEQ ID NO: 4979
  CDS (140)..(2398)

SEQ ID NO: 40250 - protein, 752 aa, Pisum sativum; identical to SEQ ID NO: 4980

SEQ ID NO: 40251 - DNA, 2329 bp, Arabidopsis thaliana; identical to SEQ ID NO: 4981
  CDS (67)..(2025)

SEQ ID NO: 40252 - protein, 652 aa, Arabidopsis thaliana; identical to SEQ ID NO: 4982

SEQ ID NO: 40253 - DNA, 4127 bp, Solanum tuberosum; identical to SEQ ID NO: 4983
  CDS (143)..(3835)

SEQ ID NO: 40254 - protein, 1230 aa, Solanum tuberosum; identical to SEQ ID NO: 4984

SEQ ID NO: 40255 - DNA, 25 bp, Artificial sequence
  Primer sequence
atgcaggttttacatgtatgttcag

SEQ ID NO: 40256 - DNA, 26 bp, Artificial sequence
  Primer sequence
ttatttcaagcgatagtaaagctcac

SEQ ID NO: 40257 - protein, 974 aa, Artificial sequence; identical to SEQ ID NO: 32738
  Consensus
  Variant (2)..(2): Xaa in position 2 is any amino acid
  Variant (5)..(5): Xaa in position 5 is any amino acid
  Variant (10)..(10): Xaa in position 10 is any amino acid
  Variant (14)..(14): Xaa in position 14 is any amino acid
  Variant (18)..(108): Xaa in position 18 to 108 is any or no amino acid
  Variant (119)..(119): Xaa in position 119 is any amino acid
  Variant (123)..(124): Xaa in position 123 to 124 is any amino acid
  Variant (126)..(151): Xaa in position 126 to 151 is any or no amino acid
  Variant (153)..(153): Xaa in position 153 is any amino acid
  Variant (155)..(155): Xaa in position 155 is any amino acid
  Variant (160)..(160): Xaa in position 160 is any amino acid
  Variant (162)..(171): Xaa in position 162 to 171 is any amino acid
  Variant (173)..(178): Xaa in position 173 to 178 is any amino acid
  Variant (179)..(209): Xaa in position 179 to 209 is any or no amino acid
  Variant (211)..(216): Xaa in position 211 to 216 is any amino acid
  Variant (217)..(218): Xaa in position 217 to 218 is any or no amino acid
  Variant (221)..(223): Xaa in position 221 to 223 is any amino acid
  Variant (227)..(227): Xaa in position 227 is any amino acid
  Variant (229)..(229): Xaa in position 229 is any amino acid
  Variant (231)..(232): Xaa in position 231 to 232 is any amino acid
  Variant (234)..(234): Xaa in position 234 is any amino acid
  Variant (235)..(262): Xaa in position 235 to 262 is any or no amino acid
  Variant (264)..(264): Xaa in position 264 is any amino acid
  Variant (266)..(268): Xaa in position 266 to 268 is any amino acid
  Variant (272)..(275): Xaa in position 272 to 275 is any amino acid
  Variant (279)..(280): Xaa in position 279 to 280 is any amino acid
  Variant (281)..(406): Xaa in position 281 to 406 is any or no amino acid
  Variant (420)..(420): Xaa in position 420 is any amino acid
  Variant (424)..(425): Xaa in position 424 to 425 is any or no amino acid
  Variant (427)..(429): Xaa in position 427 to 429 is any or no amino acid
  Variant (431)..(442): Xaa in position 431 to 442 is any or no amino acid
  Variant (446)..(446): Xaa in position 446 is any amino acid
  Variant (456)..(456): Xaa in position 456 is any amino acid
  Variant (457)..(464): Xaa in position 457 to 464 is any or no amino acid
  Variant (466)..(475): Xaa in position 466 to 475 is any or no amino acid
  Variant (477)..(491): Xaa in position 477 to 491 is any or no amino acid
  Variant (493)..(514): Xaa in position 493 to 514 is any or no amino acid
  Variant (523)..(524): Xaa in position 523 to 524 is any or no amino acid
  Variant (529)..(529): Xaa in position 529 is any amino acid
  Variant (537)..(537): Xaa in position 537 is any amino acid
  Variant (540)..(540): Xaa in position 540 is any amino acid
  Variant (542)..(549): Xaa in position 542 to 549 is any or no amino acid
  Variant (551)..(551): Xaa in position 551 is any or no amino acid
  Variant (553)..(553): Xaa in position 553 is any or no amino acid
  Variant (557)..(557): Xaa in position 557 is any or no amino acid
  Variant (560)..(560): Xaa in position 560 is any amino acid
  Variant (561)..(567): Xaa in position 561 to 567 is any or no amino acid
  Variant (569)..(569): Xaa in position 569 is any amino acid
  Variant (577)..(578): Xaa in position 577 to 578 is any amino acid
  Variant (579)..(579): Xaa in position 579 is any or no amino acid
  Variant (583)..(584): Xaa in position 583 to 584 is any amino acid
  Variant (586)..(587): Xaa in position 586 to 587 is any or no amino acid
  Variant (589)..(607): Xaa in position 589 to 607 is any or no amino acid
  Variant (609)..(612): Xaa in position 609 to 612 is any or no amino acid
  Variant (614)..(641): Xaa in position 614 to 641 is any or no amino acid
  Variant (643)..(645): Xaa in position 643 to 645 is any or no amino acid
  Variant (647)..(647): Xaa in position 647 is any or no amino acid
  Variant (651)..(652): Xaa in position 651 to 652 is any amino acid
  Variant (656)..(656): Xaa in position 656 is any amino acid
  Variant (658)..(663): Xaa in position 658 to 663 is any or no amino acid
  Variant (668)..(668): Xaa in position 668 is any amino acid
  Variant (673)..(674): Xaa in position 673 to 674 is any amino acid
  Variant (682)..(683): Xaa in position 682 to 683 is any amino acid
  Variant (686)..(687): Xaa in position 686 to 687 is any amino acid
  Variant (690)..(692): Xaa in position 690 to 692 is any amino acid
  Variant (693)..(704): Xaa in position 693 to 704 is any or no amino acid
  Variant (715)..(715): Xaa in position 715 is any amino acid
  Variant (716)..(729): Xaa in position 716 to 729 is any or no amino acid
  Variant (732)..(733): Xaa in position 732 to 733 is any or no amino acid
  Variant (735)..(736): Xaa in position 735 to 736 is any amino acid
  Variant (738)..(739): Xaa in position 738 to 739 is any amino acid
  Variant (740)..(740): Xaa in position 740 is any or no amino acid
  Variant (742)..(743): Xaa in position 742 to 743 is any amino acid
  Variant (745)..(748): Xaa in position 745 to 748 is any or no amino acid
  Variant (750)..(752): Xaa in position 750 to 752 is any or no amino acid
  Variant (754)..(754): Xaa in position 754 is any or no amino acid
  Variant (756)..(758): Xaa in position 756 to 758 is any amino acid
  Variant (762)..(762): Xaa in position 762 is any amino acid
  Variant (764)..(764): Xaa in position 764 is any amino acid
  Variant (782)..(844): Xaa in position 782 to 844 is any or no amino acid
  Variant (847)..(847): Xaa in position 847 is any amino acid
  Variant (858)..(859): Xaa in position 858 to 859 is any amino acid
  Variant (864)..(864): Xaa in position 864 is any amino acid
  Variant (868)..(868): Xaa in position 868 is any amino acid
  Variant (870)..(871): Xaa in position 870 to 871 is any amino acid
  Variant (872)..(892): Xaa in position 872 to 892 is any or no amino acid
  Variant (894)..(894): Xaa in position 894 is any or no amino acid
  Variant (897)..(897): Xaa in position 897 is any amino acid
  Variant (900)..(901): Xaa in position 900 to 901 is any amino acid
  Variant (903)..(905): Xaa in position 903 to 905 is any amino acid
  Variant (907)..(908): Xaa in position 907 to 908 is any amino acid
  Variant (911)..(911): Xaa in position 911 is any amino acid
  Variant (915)..(916): Xaa in position 915 to 916 is any or no amino acid
  Variant (918)..(942): Xaa in position 918 to 942 is any or no amino acid
  Variant (944)..(945): Xaa in position 944 to 945 is any or no amino acid
  Variant (947)..(952): Xaa in position 947 to 952 is any or no amino acid
  Variant (955)..(956): Xaa in position 955 to 956 is any amino acid
  Variant (961)..(962): Xaa in position 961 to 962 is any amino acid
  Variant (965)..(966): Xaa in position 965 to 966 is any amino acid
  Variant (968)..(969): Xaa in position 968 to 969 is any amino acid
  Variant (972)..(973): Xaa in position 972 to 973 is any amino acid

SEQ ID NO: 40258 - protein, 56 aa, Artificial sequence; identical to SEQ ID NO: 6176
  Consensus
  Variant (1)..(1): Xaa in position 1 is Gly or Ala
  Variant (2)..(4): Xaa in position 2 to 4 is any amino acid
  Variant (5)..(5): Xaa in position 5 is Ala, Ser or Cys
  Variant (6)..(7): Xaa in position 6 to 7 is any amino acid
  Variant (8)..(8): Xaa in position 8 is Val, Ile, Leu or Ala
  Variant (9)..(9): Xaa in position 9 is any amino acid
  Variant (10)..(10): Xaa in position 10 is Thr, Ala or Val
  Variant (13)..(14): Xaa in position 13 to 14 is any amino acid
  Variant (15)..(15): Xaa in position 15 is Tyr, Met or His
  Variant (16)..(16): Xaa in position 16 is Ala, Ser, Leu, Lys or Val
  Variant (17)..(17): Xaa in position 17 is any amino acid
  Variant (18)..(18): Xaa in position 18 is Glu, Gln or Asp
  Variant (19)..(19): Xaa in position 19 is Ile, Leu, Val or Glu
  Variant (20)..(28): Xaa in position 20 to 28 is any amino acid
  Variant (29)..(43): Xaa in position 29 to 43 is any or no amino acid
  Variant (44)..(44): Xaa in position 44 is Gly, Val or Tyr
  Variant (45)..(45): Xaa in position 45 is Ile or Val
  Variant (46)..(46): Xaa in position 46 is any amino acid
  Variant (49)..(49): Xaa in position 49 is Ile, Met, Val, Leu or Cys
  Variant (51)..(52): Xaa in position 51 to 52 is any amino acid
  Variant (53)..(53): Xaa in position 53 is any or no amino acid
  Variant (54)..(54): Xaa in position 54 is Trp, Tyr, Phe or Leu
  Variant (55)..(55): Xaa in position 55 is any amino acid
  Variant (56)..(56): Xaa in position 56 is Pro or Glu

SEQ ID NO: 40259 - protein, 65 aa, Artificial sequence; identical to SEQ ID NO: 6177
  Consensus
  Variant (1)..(1): Xaa in position 1 is Lys, Arg or Phe
  Variant (2)..(4): Xaa in position 2 to 4 is any amino acid
  Variant (5)..(5): Xaa in position 5 is Lys, Arg, Ala or Glu
  Variant (6)..(7): Xaa in position 6 to 7 is any amino acid
  Variant (8)..(8): Xaa in position 8 is Leu, Val or Ile
  Variant (9)..(11): Xaa in position 9 to 11 is any amino acid
  Variant (12)..(12): Xaa in position 12 is Leu, Val, Phe, Met or Thr
  Variant (13)..(13): Xaa in position 13 is any amino acid
  Variant (14)..(14): Xaa in position 14 is Leu, Ile, Phe or Val
  Variant (15)..(19): Xaa in position 15 to 19 is any amino acid
  Variant (20)..(22): Xaa in position 20 to 22 is any or no amino acid
  Variant (23)..(23): Xaa in position 23 is Leu, Val, Ile or Met
  Variant (24)..(24): Xaa in position 24 is Ile, Val, Phe, Leu, Tyr or Met
  Variant (25)..(26): Xaa in position 25 to 26 is any amino acid
  Variant (27)..(27): Xaa in position 27 is Ile or Val
  Variant (28)..(28): Xaa in position 28 is Gly, Ser, Thr, Cys or Ala
  Variant (30)..(30): Xaa in position 30 is Leu, Ile or Phe
  Variant (31)..(32): Xaa in position 31 to 32 is any amino acid
  Variant (33)..(33): Xaa in position 33 is any or no amino acid
  Variant (37)..(37): Xaa in position 37 is any amino acid
  Variant (38)..(38): Xaa in position 38 is Asp, His or Glu
  Variant (39)..(39): Xaa in position 39 is any amino acid
  Variant (40)..(40): Xaa in position 40 is Ile, Leu, Val, Met, Ala or Thr
  Variant (41)..(54): Xaa in position 41 to 54 is any amino acid
  Variant (55)..(59): Xaa in position 55 to 59 is any or no amino acid
  Variant (60)..(60): Xaa in position 60 is Val, Ile, Ala, Leu or Tyr
  Variant (61)..(61): Xaa in position 61 is Leu, Ile, Val, Met or Cys
  Variant (62)..(62): Xaa in position 62 is Leu, Val, Ile or Ala
  Variant (64)..(64): Xaa in position 64 is any amino acid
  Variant (65)..(65): Xaa in position 65 is Gly, Ala, Ser, Pro or Cys

SEQ ID NO: 40260 - protein, 51 aa, Artificial sequence; identical to SEQ ID NO: 6178
  Consensus
  Variant (1)..(1): Xaa in position 1 is Phe, Tyr, Leu or His
  Variant (2)..(5): Xaa in position 2 to 5 is any amino acid
  Variant (6)..(6): Xaa in position 6 is Ala, Ser, Ile or Val
  Variant (7)..(7): Xaa in position 7 is His, Arg or Gln
  Variant (8)..(8): Xaa in position 8 is any amino acid
  Variant (9)..(9): Xaa in position 9 is Ile, Val, Leu, Met or Ala
  Variant (10)..(10): Xaa in position 10 is any amino acid
  Variant (11)..(11): Xaa in position 11 is Ala, Gly or Thr
  Variant (12)..(12): Xaa in position 12 is Gly, Ala or Ser
  Variant (13)..(13): Xaa in position 13 is any amino acid
  Variant (15)..(16): Xaa in position 15 to 16 is any amino acid
  Variant (17)..(17): Xaa in position 17 is Leu, Ile, Val, Ala, Met or Cys
  Variant (18)..(18): Xaa in position 18 is Met, Ile, Val, His or Cys
  Variant (19)..(19): Xaa in position 19 is Pro or Thr
  Variant (21)..(21): Xaa in position 21 is any amino acid
  Variant (22)..(22): Xaa in position 22 is Phe or Tyr
  Variant (24)..(24): Xaa in position 24 is Pro or Ala
  Variant (25)..(25): Xaa in position 25 is Cys, Phe or Leu
  Variant (27)..(27): Xaa in position 27 is Leu or Ile
  Variant (28)..(28): Xaa in position 28 is any amino acid
  Variant (29)..(29): Xaa in position 29 is Gln, Asn or Pro
  Variant (30)..(30): Xaa in position 30 is Leu, Met or Ile
  Variant (31)..(31): Xaa in position 31 is any amino acid
  Variant (32)..(32): Xaa in position 32 is Ala, Gly or Ser
  Variant (33)..(33): Xaa in position 33 is Met, Leu or Gln
  Variant (34)..(34): Xaa in position 34 is any amino acid
  Variant (35)..(35): Xaa in position 35 is Tyr, Phe, Cys or Leu
  Variant (36)..(36): Xaa in position 36 is Gly, Ala or Asn
  Variant (37)..(37): Xaa in position 37 is Thr, Ser, Ala or Cys
  Variant (38)..(38): Xaa in position 38 is Val, Ile, Leu, Pro or Ala
  Variant (39)..(39): Xaa in position 39 is Pro, Cys or Val
  Variant (40)..(40): Xaa in position 40 is Ile, Val, Leu or Ala
  Variant (41)..(41): Xaa in position 41 is Val, Ala or Cys
  Variant (42)..(42): Xaa in position 42 is Arg, His, Ala, Ser or Thr
  Variant (43)..(43): Xaa in position 43 is any amino acid
  Variant (44)..(44): Xaa in position 44 is Thr or Val
  Variant (47)..(47): Xaa in position 47 is Leu or Ile
  Variant (48)..(48): Xaa in position 48 is any amino acid
  Variant (49)..(49): Xaa in position 49 is Asp or Glu
  Variant (50)..(50): Xaa in position 50 is Thr, Ser or Val
  Variant (51)..(51): Xaa in position 51 is Val or Ile

SEQ ID NO: 40261 - DNA, 1182 bp, Escherichia coli
  CDS (1)..(1182)
atgtcgaaaagcaatccgtctgaagtgaaattggccgtaccgacatccggtggcttctccgggctgaaatcactgaatttgcaggtcttcgtgatgattgcagctatcatcgcaatcatgctgttctttacctggaccaccgatggtgcctacttaagcgcccgtaacgtctccaacctgttacgccagaccgcgattaccggcatcctcgcggtaggaatggtgttcgtcataatttctgctgaaatcgacctttccgtcggctcaatgatggggctgttaggtggcgtcgcggcgatttgtgacgtctggttaggctggcctttgccacttaccatcattgtgacgctggttctgggactgcttctcggtgcctggaacggatggtgggtcgcgtaccgtaaagtcccttcatttattgtcaccctcgcgggcatgttggcatttcgcggcatactcattggcatcaccaacggcacgactgtatcccccaccagcgccgcgatgtcacaaattgggcaaagctatctccccgccagtaccggcttcatcattggcgcgcttggcttaatggcttttgttggttggcaatggcgcggaagaatgcgccgtcaggctttgggtttacagtctccggcctctaccgcagtagtcggtcgccaggctttaaccgctatcatcgtattaggcgcaatctggctgttgaatgattaccgtggcgttcccactcctgttctgctgctgacgttgctgttactcggcggaatgtttatggcaacgcggacggcatttggacgacgcatttatgccatcggcggcaatctggaagcagcacgtctctccgggattaacgttgaacgcaccaaacttgccgtgttcgcgattaacggattaatggtagccatcgccggattaatccttagttctcgacttggcgctggttcaccttctgcgggaaatatcgccgaactggacgcaattgcagcatgcgtgattggcggcaccagcctggctggcggtgtgggaagcgttgccggagcagtaatgggggcatttatcatggcttcactggataacggcatgagtatgatggatgtaccgaccttctggcagtatatcgttaaaggtgcgattctgttgctggcagtatggatggactccgcaaccaaacgccgttcttga

SEQ ID NO: 40262 - protein, 393 aa, Escherichia coli
MSKSNPSEVKLAVPTSGGFSGLKSLNLQVFVMIAAIIAIMLFFTWTTDGAYLSARNVSNLLRQTAITGILAVGMVFVIISAEIDLSVGSMMGLLGGVAAICDVWLGWPLPLTIIVTLVLGLLLGAWNGWWVAYRKVPSFIVTLAGMLAFRGILIGITNGTTVSPTSAAMSQIGQSYLPASTGFIIGALGLMAFVGWQWRGRMRRQALGLQSPASTAVVGRQALTAIIVLGAIWLLNDYRGVPTPVLLLTLLLLGGMFMATRTAFGRRIYAIGGNLEAARLSGINVERTKLAVFAINGLMVAIAGLILSSRLGAGSPSAGNIAELDAIAACVIGGTSLAGGVGSVAGAVMGAFIMASLDNGMSMMDVPTFWQYIVKGAILLLAVWMDSATKRRS

SEQ ID NO: 40263 - DNA, 996 bp, Mesorhizobium loti MAFF303099
  CDS (1)..(996): transl_table=11
atggctgagatgacaacgggacaaggattggcgtcgatccggccggggtcggtgggtcggttgcgaggctgggcgcaaagccttggcctgctctgggtcctgatagtgttgtgcgccttcgcagtgtatctgtcgccgagcttcatccagaccggcaacatgttgaatgtcggccgccaggtcgcgctgtttggcatcgtcagcgtcggcatgaccttcgtgattctgacacgcggcatcgatctttccgtcggttccatcgtcggtgtcgtcgcggttgccacagcgctgatgctctcatctggcgttccaatcccgttggcgatgattgcggcgctggggatgggagccgtgttcggcgccatcaacggagcaggcgtcgttttctttggcatgccgcccttcatcatgaccctcggcacgctggtgatggggcgcggcattgccatgaccatcgccaacggcgagccgaagacgcttggcgatgcctcggatgccttctcctatctgggaagcggttttctcttcggcattcccgtaccgatctggatcttcgttgccatagccgccgtggctttcgttgtcctacgacacacgcctttcggtcgccaaatctacgcggtcggttcaaacaccgaggcggcgcggcttgccggcatcaacgtgccgcgcgtgctgatgtcggtctatgccatctcgggcgtgctgtcggcgctgaccgccctggtttttgtctcacggctcaccgttggtgagcccaccgctggcaccaatctcgaactcgaggccatctcgatcgtcgtcatcggcggcaccagcctgtttggcggcgaaggcggcgtcatcggcaccgtgatcggcgccgcaatcattgccgtcatggctaatatattgaatttgctaggtatatcgccattcacacagcagatcgtgaagggcgccatcatcatcgccgcggtgatgttcgaggtctaccgtcacaaaagacggtcctga

SEQ ID NO: 40264 - protein, 331 aa, Mesorhizobium loti MAFF303099
MAEMTTGQGLASIRPGSVGRLRGWAQSLGLLWVLIVLCAFAVYLSPSFIQTGNMLNVGRQVALFGIVSVGMTFVILTRGIDLSVGSIVGVVAVATALMLSSGVPIPLAMIAALGMGAVFGAINGAGVVFFGMPPFIMTLGTLVMGRGIAMTIANGEPKTLGDASDAFSYLGSGFLFGIPVPIWIFVAIAAVAFVVLRHTPFGRQIYAVGSNTEAARLAGINVPRVLMSVYAISGVLSALTALVFVSRLTVGEPTAGTNLELEAISIVVIGGTSLFGGEGGVIGTVIGAAIIAVMANILNLLGISPFTQQIVKGAIIIAAVMFEVYRHKRRS

SEQ ID NO: 40265 - DNA, 987 bp, Mesorhizobium loti MAFF303099
  CDS (1)..(987): transl_table=11
atgaccgacatccaaagcccggcgaaagctgcagccgctcagccaggcggtcgctccgcgttacaacatctgctgcagggcgagcggccctacatgctctatgtcgccttcgccgtcatgctgatcgtcttcagcctagcgtcaccctggttcctgtcgatcgacaattttctcaacatcggccgccagacgacactggtctcgatcatcgcggtgggcatgacattcgtcatcatctccaggcagatcgacctgtccgtcgcctcgacgctggcgctttcgggcatgagcgcatcgctggccatggcctttgtcgccaacaactgggtcgtcggtgccgcggcggggctgggcaccggggcgctgatcgggctgctcaacggtgtcctgaccacgcgcctcgaaatcccgtccttcctggtgacgctgggcacgctgagcggcgcgcgcggcctggcgctgatggtcaccaacaccaagccggtcatcatcaccaacgaatattatttcgcgatcttcggcgagggctcggtgctcggtataccggcgccgatcctgtggacgctcggcgtcaccatcgccggcatcttgctgctgcactacagcgtctatgggcggcgggtttacgccgccggcggcaacccgacggccgcgctctattccggcgtccacatcaagcaggtcacgacgcttgccttcgtgctgaccggcacgctcgccgggctggcgtcgctgatcctgtcggcgcgctcgcacgcggcgcggcccgatgtggtgcaaggcatggagctcgacgtcatcgcctcggtcatccttggcggctgcagcctgttcggcggccgcggcttcgtgctcggcacgctgctcggcagcctgatcatcggcacgctcaacaacgggctggtgctgctcggcgtcagctcgtcgctgcaactcgtcatcaagggggcaatcatcgtcgccgcggtcgcgttcacgaggaggtaa

SEQ ID NO: 40266 - protein, 328 aa, Mesorhizobium loti MAFF303099
MTDIQSPAKAAAAQPGGRSALQHLLQGERPYMLYVAFAVMLIVFSLASPWFLSIDNFLNIGRQTTLVSIIAVGMTFVIISRQIDLSVASTLALSGMSASLAMAFVANNWVVGAAAGLGTGALIGLLNGVLTTRLEIPSFLVTLGTLSGARGLALMVTNTKPVIITNEYYFAIFGEGSVLGIPAPILWTLGVTIAGILLLHYSVYGRRVYAAGGNPTAALYSGVHIKQVTTLAFVLTGTLAGLASLILSARSHAARPDVVQGMELDVIASVILGGCSLFGGRGFVLGTLLGSLIIGTLNNGLVLLGVSSSLQLVIKGAIIVAAVAFTRR

SEQ ID NO: 40267 - DNA, 1017 bp, Mesorhizobium loti MAFF303099
  CDS (1)..(1017): transl_table=11
atgagcatcgccgaagagcagagccagcgcggcggcgcgacgatcgcgcggctgctgatgagtttcgggccgctgctgttcctggcggcgctggtcgtcgtcttcaccgttttgaagccgagcttcatcgacccgatcaatctgttcaacatcacgcggcagatctcgatcaccgggctgatcgcgctcggcatgaccttcgtcatcctcaccgccggtatcgacctctcggtcggctcgctgctggccttctgcggcatggtcgccgccgtcgtcgccaagggcggtgctgccaacacgctgtcgctgtcgacctcaggcacgcagggctatggctggttcgcggcgctgctcgccgccgtcatcgtcggcgccgccgccggcggcgtgcaggggcttgccatcacccgcctgaaagtgccgcccttcgtcgtcacgctgggcgggcttacggtgtttcgcgggctgacgctgaccatctccaatggcggcccgatctcgggcttcgacgcctcgatgcgctggttcggcacggggctgatcggcccggtgccggtcccggcgatcatcttcgccgtcgccgcgatcctgtgccacatcgtgctgcgctacacgcgctatggccgcgccgtctacgccgtcggcggcaatgccgaggccgcacggctgtcgggcctgcgcgtcgaccgcatcctggtctcggtctatgtcatcgtcggcttcttcgccgggctcgccgccttcgtgctgtcggcgcggctcaattcctcggaagcggtcgccggcatcggctatgagctgacggtgatctccgccgtcgtcatcggcggcacctcgctgttcggtggcatcggctcggtcggcggcacggtggtgggcgcggcgctaatcggcgtgctgcagaacgggctgcagttcaacaatgtgtcgtcctacacgcaaagcatcgtgattgggctcatcctgatcctggcggtggcgtttgaccgatggctgaagtcgcgggtgcgaaggtag

SEQ ID NO: 40268 - protein, 338 aa, Mesorhizobium loti MAFF303099
MSIAEEQSQRGGATIARLLMSFGPLLFLAALVVVFTVLKPSFIDPINLFNITRQISITGLIALGMTFVILTAGIDLSVGSLLAFCGMVAAVVAKGGAANTLSLSTSGTQGYGWFAALLAAVIVGAAAGGVQGLAITRLKVPPFVVTLGGLTVFRGLTLTISNGGPISGFDASMRWFGTGLIGPVPVPAIIFAVAAILCHIVLRYTRYGRAVYAVGGNAEAARLSGLRVDRILVSVYVIVGFFAGLAAFVLSARLNSSEAVAGIGYELTVISAVVIGGTSLFGGIGSVGGTVVGAALIGVLQNGLQFNNVSSYTQSIVIGLILILAVAFDRWLKSRVRR

SEQ ID NO: 40269 - DNA, 1098 bp, Mesorhizobium loti MAFF303099
  CDS (1)..(1098): transl_table=11
atggtttcagagattcgcgacgagcgggtccggtccgtttcacgcctgagccgcctgctaagcaggccggagcttggcgcggccgccggtaccgtgctggtcttcgtgttcttcgccatcacggcgggaagcacggggctgttcagtgccaagggcatcgtcaatttcctcgaagtctcggcccagcttggcattctcgccgctcccgtggccctgctgatgatcgccggcgagtttgatctgtcggtcggctcgatgatcggctttgccggcatcctcatcgccatccctgccgtattctggggctggccgatctggctttcgctgctgttcaccttcgccgtctgcggcggcatcggcgcgctgaacgggctcgccgtcgtcaggaccggcctgccctccttcatcgtgacgctcggcagcctcttcatgttgcgcggcctcacgcttggcctcacgcgcggcatttcagggcggacccaggtgtcgggcgtgcacgagctggcgcagaacgatcccctcaacagcctgttctctggccaggtgttcaccggcctgatcgcctggcttgccgacctcggcctgatcggcaagcgggcggacggaatgccgtcgatatcaggcattccggtgtcgatcgtgtggtggatcgtgctgacactggcctgcacctggctcttgacgcgcagccgcttcggcaactggatcttcgccgccgggggcgaagccaatgccgcgcgcaatctcggcgtgccggtggcgcgcaccaagatcacgctgttcgtcatgacggcgctcgcggcggccctgttcgcggcgatccaggtgctggtcaccggctccgccgacacgctgcgcggcacgcagaaggaattcgaggccatcatcgccgtcgtcatcggcggcacgctgctgaccggcggctatggatcggccatcggcgccatgttcggcgccctgatcttcggcgtggtgcagatgggcatcttctacaccggcatcgacaccgactggttcaagctgttcatgggcgccatgatggtcatcgcggtgctgttcaacagctatgtgcgcaaccgcgccatgaggagtcggtaa

SEQ ID NO: 40270 - protein, 365 aa, Mesorhizobium loti MAFF303099
MVSEIRDERVRSVSRLSRLLSRPELGAAAGTVLVFVFFAITAGSTGLFSAKGIVNFLEVSAQLGILAAPVALLMIAGEFDLSVGSMIGFAGILIAIPAVFWGWPIWLSLLFTFAVCGGIGALNGLAVVRTGLPSFIVTLGSLFMLRGLTLGLTRGISGRTQVSGVHELAQNDPLNSLFSGQVFTGLIAWLADLGLIGKRADGMPSISGIPVSIVWWIVLTLACTWLLTRSRFGNWIFAAGGEANAARNLGVPVARTKITLFVMTALAAALFAAIQVLVTGSADTLRGTQKEFEAIIAVVIGGTLLTGGYGSAIGAMFGALIFGVVQMGIFYTGIDTDWFKLFMGAMMVIAVLFNSYVRNRAMRSR

SEQ ID NO: 40271 - DNA, 969 bp, Mesorhizobium loti MAFF303099
  CDS (1)..(969): transl_table=11
atgagcaccgaggcgattgctgccgaaaaacccaagcgcaattacaacgcactgttcgggctgacgctgctggcgctgctggtgttgctctgggtcatcctgtcgctgtcgacatcgagcttcgcctcggccaacaacatctcgaaccttttgcgtcagggttcgatgatcgccatcctggcggtcggccagaccttcgtcatcatcaccggcggcatcgatctgtccgtcggtgcggtggtcggcttcgccaccgtcattgccgcgatgctgatcaatgccggcataccggtcttcctcgccatcctgatcacgctgctggtcggcgttgccatcggcctgttccacggcttcggcatcgtcaagatgggcctgccgcccttcatcatcacgctggcgacgctgacctcgctgcgcggcatcggccttctgatgaccaacggcaactcgatctccatcaacaatgatgccttccaggaattctcgcgcaactccttcctcggcgtgcccaatctgttctggatggtcatcctggtcggcattccggcctatatcttcctgcatcacagccgctggggccgctacctcttctcggtcggctccaacgccgaggcctcgcgcctctccggcgtcaatgtccagcgcaccatctacatggcttacacgctgtcgggcctctgcgcagcctttgtcggcgtgctcctggcctcgcgcatcggcatcggcaacccgacccaggccgagggctgggaattgcaggcgatcgcgtcctcggtcatcggcggcacctcgctgttcggtgcggtcggctcggtgcacggtccgctgctcggcgccttcatcctcgccaccatcaacaacggcgccaacctgctcaacgtcaacgccttctggcagcgcatcatcactggcgtgctgatcatcgtcatcgtctatttcgacggtctgcgccgccgcggcggcaagtga

SEQ ID NO: 40272 - protein, 322 aa, Mesorhizobium loti MAFF303099
MSTEAIAAEKPKRNYNALFGLTLLALLVLLWVILSLSTSSFASANNISNLLRQGSMIAILAVGQTFVIITGGIDLSVGAVVGFATVIAAMLINAGIPVFLAILITLLVGVAIGLFHGFGIVKMGLPPFIITLATLTSLRGIGLLMTNGNSISINNDAFQEFSRNSFLGVPNLFWMVILVGIPAYIFLHHSRWGRYLFSVGSNAEASRLSGVNVQRTIYMAYTLSGLCAAFVGVLLASRIGIGNPTQAEGWELQAIASSVIGGTSLFGAVGSVHGPLLGAFILATINNGANLLNVNAFWQRIITGVLIIVIVYFDGLRRRGGK

SEQ ID NO: 40273 - DNA, 993 bp, Mesorhizobium loti MAFF303099
  CDS (1)..(993): transl_table=11
atgaccgacagaacgacgacgagcgtggatcaggcggcggtcaggagccggcggctgcgcacagccttcgcggcgctcggcatgctgccggtgctggtgctgctggcggcgggcttccagttcatcaatccgcgcttcctcaccgaaaccaatctgctcatcgtcacgcagcaatcgtcgatcaacatcgtgctcgccgccggcatgaccttcgtcatcctgaccggcggcatcgacctgtcggtcggctccatcctcgccgcgtcggcgatggtggcggtgctggtgtcactggtgcccgactggggcctgctcggcgtgccggcggccatcctcgtcggcctcggcttcgggctcgtgaacgggctgctcgtcgcctatatcaggctgccacccttcatcgtcacgctgggttcgctgacggccgtgcgcggcgttgcccgcctgctcgggcaggacacgacggtgttcaattcggacctgccgttcgacttcatcggcaatggctcgctgttcggcattccctggctggtcgtcatcgcgctgtcggtggtcgtgctgtcctggctggtgctcaagcgcaccgtgctcggcgcctggatctatgcggtcggcggcaatgccgaggcggcgcggctgaccggcatcaaggtgccgctggtgctgctcttcgtctatggcgtgtccggcctgctcgccggcctcggcggcgccatgtcggcggcaaggctttacgccgccaacggcctgcagcttggccagtcctacgagctcgacgccatcgccgccgtcatcctcggcggcaccagtttcgtcggcggcgtcggctcgatctggggcacgctgatcggcggcctgatcatcgcggttctgtccaacgggctcatcttggccggtgtctcggacatctggcagtacatcatcaagggattggtcatcatcgtggcggtcgccctcgaccgctaccggctccaggcaggggcgagaacgtga

SEQ ID NO: 40274 - protein, 330 aa, Mesorhizobium loti MAFF303099
MTDRTTTSVDQAAVRSRRLRTAFAALGMLPVLVLLAAGFQFINPRFLTETNLLIVTQQSSINIVLAAGMTFVILTGGIDLSVGSILAASAMVAVLVSLVPDWGLLGVPAAILVGLGFGLVNGLLVAYIRLPPFIVTLGSLTAVRGVARLLGQDTTVFNSDLPFDFIGNGSLFGIPWLVVIALSVVVLSWLVLKRTVLGAWIYAVGGNAEAARLTGIKVPLVLLFVYGVSGLLAGLGGAMSAARLYAANGLQLGQSYELDAIAAVILGGTSFVGGVGSIWGTLIGGLIIAVLSNGLILAGVSDIWQYIIKGLVIIVAVALDRYRLQAGART

SEQ ID NO: 40275 - DNA, 1332 bp, Mesorhizobium loti MAFF303099
  CDS (1)..(1332): transl_table=11
atgaccgacacgacctctaatcaaccggtcggcagcactgcggcggacagggcgcgtgcatccgaactcagcgccgtcgggcggttcctcaaggctaccgagctcgatacgcgcatgctcggcatggtcggcgcgctgctggtcatctgggtcggcatccatatcctgtcgggcgggcttttcctgacgccgcgcaatctgtggaacctgtcggtgcagacctcgtcggtcgcgatcatggcgaccggcatggtgctggtcatcgtcatgcgcaacatcgacctctcggtcggatccgtcgaaggcgtgatcggcatgatcatgggcgtggcgcaggctgaattcctcatccgcgtcgtcggtttccagcttggaaatccctggctctggatcatcgcgctggcggccggcgtggtgcttggcctcctgatcggcgcattccagggcttcatcatcgcctatatggaggttccggccttcatcgtgacgctgggcggcctgctggtctggcgcggcatggcatggctgatcaccagcggccgcacggtcgcgccgctcgacacaaccttccaactgatgggcggcggaccacgcggctcgatcggcgccaccgccagctggatcgtcggaatcgtcgcttgcgcggctgtcgccttcgcgctgctcaacggccggtcacagcgcaaacggttccactttccactgcgcccggtttgggccgagattttgcttggcggggttgcctgcgccgctatccttggcgccgtctggatcgccaattcctatccatggccgatcggcatcgtgcgccagtatgcccagcagaacggcattaccgttcccgaaggcgggctgtacatcgcgcatggcattgccataccggtgctgatggcggtggccgtgggcattatcatgacgttcatcaccaagcgcacgcgtttcggccgctatgttttcgccattggcggcaatccggaggcggccgaacttgccggtatcaacacccgctgggtgaccatgaaggttttcatgatcatgggcgtgctggccgcgatcagcgcggcgatctcttcggcccggctcaacgcatcgaccaatgcgctgggcacgctggacgagcttctggtcatcgccgccgccgtcatcggcggcacgtcgctcgccggcggcgccggcacggtgatgggcgccatgctgggcgcgcttctgatgcagtcattgcagtcgggcatggtgctgctcggcatcgactcgccgctgcagagcatcgtcgtcggcgccgtgctggtcatcgcggtgtggctcgacaccgtctatcgcaagcgggtttag

SEQ ID NO: 40276 - protein, 443 aa, Mesorhizobium loti MAFF303099
MTDTTSNQPVGSTAADRARASELSAVGRFLKATELDTRMLGMVGALLVIWVGIHILSGGLFLTPRNLWNLSVQTSSVAIMATGMVLVIVMRNIDLSVGSVEGVIGMIMGVAQAEFLIRVVGFQLGNPWLWIIALAAGVVLGLLIGAFQGFIIAYMEVPAFIVTLGGLLVWRGMAWLITSGRTVAPLDTTFQLMGGGPRGSIGATASWIVGIVACAAVAFALLNGRSQRKRFHFPLRPVWAEILLGGVACAAILGAVWIANSYPWPIGIVRQYAQQNGITVPEGGLYIAHGIAIPVLMAVAVGIIMTFITKRTRFGRYVFAIGGNPEAAELAGINTRWVTMKVFMIMGVLAAISAAISSARLNASTNALGTLDELLVIAAAVIGGTSLAGGAGTVMGAMLGALLMQSLQSGMVLLGIDSPLQSIVVGAVLVIAVWLDTVYRKRV

SEQ ID NO: 40277 - DNA, 1287 bp, Mesorhizobium loti MAFF303099
  CDS (1)..(1287): transl_table=11
atgagcaccgacagcgcccccgccccgcagggcaacatcgcagaggaccagcgtccacgcatcgccgtctcggcgctgacgacgaacctgcgcgaatacggtctcatcatcgcgctgatcgtcatcatgctgttcttccagttcaccacgtcgggaacgctgttcaagccggtcaacctcagcaatttggtgcagcagaactcgttcatcatcgtgatggcgctgggcatgctgctggtcatcgtttccggctatatcgacctcagcgtcggatcggtcgccggtttcatcggcgcgctggcggcaaacatgatggtcatctggcagctcggaccgctcagcaatccgctggtggtttcgatcgtctgcctgatcgtgggcggcctgatcggtgcggcgcaaggctattggatcgcctaccaccggataccgagcttcatcgtgacattggccggcatgctgatcttccgcggcatctgccaggcgctgctgggcggcggctcttcggtgggcccccttccggacggcttcaaggcgctgagctccggcttcatcccggacgttatcggcccgctgacgctgatcccgccgacggtgaacgccgccggcaagaccatcgtgggcagcggcctgacactgcacatgacgacgatcgtgctcggtctgatcgccgtggtggcctatgcctatttcggggtgaggacacgacgcaagcgcgaacgccacggctatgaagccgagcccttccccctgttcgtcatcaaaacgctggtcgccagcgcgctggcgctgttcctggtctatgagttcgccagctacaggggcctgccggtggtgctgctcgtcatgggcgtactgatctcgctgttcgtcttcgtcaccaagcgcatgaccatcggccgccgcatctacgcgatgggcggcaatcccaaggcggcgcagctgtcgggcatcaacaccgagcggctgacgctgctggtgttcatcaatatgggcgtgctgtcggcgctgggcggcctcatcatcgcggcgcgtctcggccaggccgtgccggcggccggtctgggctcagagctcgacgtcatcgccgccgtcttcatcggcggcgcctcggcgatgggcggcgtcggccaagtcatcggcgccgtggtcggcggcttcatcatgggcgtgatgaacaacggcatgtcgatcatgggtgtcaatgtcgactggcagcaggtggtcaaaggcctggtgctgctcggcgccgtgatcttcgacgtctacaacaagaacaaggcctga

SEQ ID NO: 40278 - protein, 428 aa, Mesorhizobium loti MAFF303099
MSTDSAPAPQGNIAEDQRPRIAVSALTTNLREYGLIIALIVIMLFFQFTTSGTLFKPVNLSNLVQQNSFIIVMALGMLLVIVSGYIDLSVGSVAGFIGALAANMMVIWQLGPLSNPLVVSIVCLIVGGLIGAAQGYWIAYHRIPSFIVTLAGMLIFRGICQALLGGGSSVGPLPDGFKALSSGFIPDVIGPLTLIPPTVNAAGKTIVGSGLTLHMTTIVLGLIAVVAYAYFGVRTRRKRERHGYEAEPFPLFVIKTLVASALALFLVYEFASYRGLPVVLLVMGVLISLFVFVTKRMTIGRRIYAMGGNPKAAQLSGINTERLTLLVFINMGVLSALGGLIIAARLGQAVPAAGLGSELDVIAAVFIGGASAMGGVGQVIGAVVGGFIMGVMNNGMSIMGVNVDWQQVVKGLVLLGAVIFDVYNKNKA

SEQ ID NO: 40279 - DNA, 996 bp, Mesorhizobium loti MAFF303099
  CDS (1)..(996): transl_table=11
atgagcgatatccctgccccgcgccacattcccgaccggctcgacaagccgtttcgctcggcgatcttttcctgggaggcgctgctggtcgtggtggccgttgccatcttcgccatcaacagcttcgcctcgccctatttcctcgacccctattcgctgtcggatctgaccttcaatttcacggagaagggcctgatcgcctttgccatggcgctgctgatcatttcgggcgagatcgacctgtcggtggccgccatcatcgcactggcatcgaccatgatgggcatggcggtgcaggcgggagccggcacgccggtgctggtgctgatcggcatcgtggtgggcctcggctgcggcgccttcaacgggctcttggtgacaaggcttggcctgccgtcgatcgtcgtcaccatcggcacgatgagcctgttccgcggcatcgccttcatcatccttggcgaccaggcctataagggctatcccgaaagcttcgccttcttcggccagggctatgtctggtgggtggtctcgttcgagctggtgctcttcctcatcgccgccgtcgtctactggttcctgctgcatcgcacgagtttcggccgccgcgtctttgccatcggcaacaatccggtcgctgcgcagttttccggcgtgcgcgtcggccgcatcaaattcatccttttctgcctgaccggactgatgtcaggcatagcttcggtgctgatcacctcacggctcggctcgacgaggccgtcgatcgcgcagggctatgagctggaagtcatcaccatggtggtgctcggcggcgtcagcattctgggcggcgccggcagcattgtcggcgtcgtgctggcagccttcatcatggggctggtgaccttcggccttggcctgctcaacgtgccgggcatcgtcatgtcgatcttcatcggcctgctgctgatcatcgtcatcgccctgccgatcgtctggcggcggctgcgcggaggacgttga

SEQ ID NO: 40280 - protein, 331 aa, Mesorhizobium loti MAFF303099
MSDIPAPRHIPDRLDKPFRSAIFSWEALLVVVAVAIFAINSFASPYFLDPYSLSDLTFNFTEKGLIAFAMALLIISGEIDLSVAAIIALASTMMGMAVQAGAGTPVLVLIGIVVGLGCGAFNGLLVTRLGLPSIVVTIGTMSLFRGIAFIILGDQAYKGYPESFAFFGQGYVWWVVSFELVLFLIAAVVYWFLLHRTSFGRRVFAIGNNPVAAQFSGVRVGRIKFILFCLTGLMSGIASVLITSRLGSTRPSIAQGYELEVITMVVLGGVSILGGAGSIVGVVLAAFIMGLVTFGLGLLNVPGIVMSIFIGLLLIIVIALPIVWRRLRGGR

SEQ ID NO: 40281 - DNA, 978 bp, Mesorhizobium loti MAFF303099
  CDS (1)..(978): transl_table=11
atgaaggcctttctcaaataccgcgagatctggctggccgcggctatcatcgtgctgatcgggctgatctcgacccgcttcccggcttttgccgaccccggcaacctgggccaggtgttcaacgacacctcgatcctgatgatcctggcgctcggccagatggtggtgatcctgacgcggtcgatcgacctgtcgatggcctctaatctctgcttcaccggtatggtggtggcgatgctgaacgcggcacacccggcgatcccgatcccggtgttgatcgtcatcgcgctcgctgtcgggcttgcgctgggcgccatcaacggccttctggtgtggcggctgaacattccttcgatcgtggtgactttgggcacgctgaccatctatcgcggcgccactttcgtcctgtccggcggcgcctgggtcaatgccgacaagatgagcccggagttcatcggcttccagcgcgccgccttcctcggcattccggtgctgtcctggattgccatcctggtcatcgcgctgttcttcgtgctgatgacgcgcaccgcgctcggccgctcgatctatgccatcggcgtcaacccgaccgcgtcaatctataccggcatcgatgtcggccgcacgaaattcatcgtcttctgcatctccggcatgatcggcgggcttgccggctatctctggatctcgcgttacgtcatcgcctcggtcgaagtcgccaacggctatgagctcaacatcatcgccgcctgcgtcatcggcggcatttcgatcgccggcggcatcggctcggtcggcggcgcggtgctgggcgcgctgttcctcggcatcatctccaacgcgctcccggtcatcaacatctcgcccttctggcagatggcgatttcgggtagcgccatcatcctggccgtcgtgctcaacgcgcgcggcgaacgccagcagggtcgcatcatcctgagaaaggcggaggcggcatga

SEQ ID NO: 40282 - protein, 325 aa, Mesorhizobium loti MAFF303099
MKAFLKYREIWLAAAIIVLIGLISTRFPAFADPGNLGQVFNDTSILMILALGQMVVILTRSIDLSMASNLCFTGMVVAMLNAAHPAIPIPVLIVIALAVGLALGAINGLLVWRLNIPSIVVTLGTLTIYRGATFVLSGGAWVNADKMSPEFIGFQRAAFLGIPVLSWIAILVIALFFVLMTRTALGRSIYAIGVNPTASIYTGIDVGRTKFIVFCISGMIGGLAGYLWISRYVIASVEVANGYELNIIAACVIGGISIAGGIGSVGGAVLGALFLGIISNALPVINISPFWQMAISGSAIILAVVLNARGERQQGRIILRKAEAA

SEQ ID NO: 40283 - DNA, 999 bp, Mesorhizobium loti MAFF303099
  CDS (1)..(999): transl_table=11
atgaagctcaggaccttcatcgcgctgattgccgtgctggtgttcttctccatcgccgccccgaacttcctgtccgccgccaatctgatcctgatggccaagcatgtggcgctcaacgccttcctcgccatgggcatgaccttcgtcatcatcaccggcggcatcgacctttcggtcggctcgatcgtcggcctgtgcggcatggtggccggctatctcgtgctcaacggcatcgacctgcaattcggctacaccatctacttcaacgtggtggagatcgcattgatcaccctggcggtcggcattttgatcggcgccgtcaacggactgctgatcacccggctcaacgtcgcacccttcatcgccacgctcggcgtcctctatgtggcgcgcggcctggcgctgctgtcgtctgacggccgcaccttccccaatctggtcggcaagccggaactcggcaccaccggcttcggcttcctcggcgcaggccggctcgtcggcttgcccgtctcgatctggatcctgatcgtggtggcgctgggcgcggcgtatctcgcccggtacacgccgctcggccgccacatcttcgccgtcggtggaaacgagcgcgcggcgcgcatttcgggcgtacgcgtcaacatggtcaagatgttcgtctacatgttctccggcttctgcgcggcgatcgtcggcctgatcatctcgtcggagctgatggcctcgcatcctgcaacaggcgagagcttcgaactgaatgccatcgctgcggcggtgcttggaggcacctcgatgtcgggcggccgcggcacgatcggcggcaccatcgtcggcgccttcgtcatcggcatcctgtcggatgggctggtgatgatgggcgtgagctccttctggcagatggtgatcaaaggcctcgtcatcatcgtcgccgtcgtcgtcgaccaggcacagcgccggcttcagcagcgtgtcaccctgatgcagatggcaaaggcgggttga

SEQ ID NO: 40284 - protein, 332 aa, Mesorhizobium loti MAFF303099
MKLRTFIALIAVLVFFSIAAPNFLSAANLILMAKHVALNAFLAMGMTFVIITGGIDLSVGSIVGLCGMVAGYLVLNGIDLQFGYTIYFNVVEIALITLAVGILIGAVNGLLITRLNVAPFIATLGVLYVARGLALLSSDGRTFPNLVGKPELGTTGFGFLGAGRLVGLPVSIWILIVVALGAAYLARYTPLGRHIFAVGGNERAARISGVRVNMVKMFVYMFSGFCAAIVGLIISSELMASHPATGESFELNAIAAAVLGGTSMSGGRGTIGGTIVGAFVIGILSDGLVMMGVSSFWQMVIKGLVIIVAVVVDQAQRRLQQRVTLMQMAKAG

SEQ ID NO: 40285 - DNA, 1002 bp, Mesorhizobium loti MAFF303099
  CDS (1)..(1002): transl_table=11
atgaacagcctcgagcttcgcgcatcgaaagcgcagaccgacgccaggggcgcttccacgcgccttgtggagcgccttggcgttcacaacatcagccttctggtcgcgctcgccattctcatcatcatcttcggctcgttgcgcggcgacgtgttcttctcgagccgaaacctgctcaacatcggccttggcgtcaccattctcggcgtgctggcgatgagccagaccgtggtcatcgtcgccggcggtctcgatatcgctgtcggcgccactgtcggtctaaccacagtctcgacggcaatggccatccaggcgaccgggtcgccggcggccggcatcgttgccggcctggtgcttggtggtcttgccggtctcgtcaacggcctcatcatcacctacgggcgcgtcaacgcggtcattgccacgctcggcaccatggcgatctttcgcggcatcgccttcatcatgtccgacggccagtcaatcgccatcttcagcgatacgttccggttcatcggcattggacgcatcctcggcctgccgttgctggtctggattttggtgctgaccgcgatcgcattccacctcttcctcgcgcgttcgatcgtcggccgcaacatctatgcactgggcggcaatcccgttgtcgcccgcttctcgggcatcaacatcaaccgctaccgcgtcggcatctacatcatgagtggtgttgccgccggattggccgggatcctgctggccgcccgtaccggttcgggtcagcccgtatccgggtcccagggcctggaactcgaggcgataacggcggccgtgctgggtggctgtgccctgcagggcggcaagggcacgattgtcggcgcgctgctcggtgtcgccatcattggcgtgctcaacaacggaatgatactgacgtccgtgccaaccttctatcaattgctggcaaaaggctcactgctgatccttgctgtggtcattgccgagtaccacttgaacaggacatga

SEQ ID NO: 40286 - protein, 333 aa, Mesorhizobium loti MAFF303099
MNSLELRASKAQTDARGASTRLVERLGVHNISLLVALAILIIIFGSLRGDVFFSSRNLLNIGLGVTILGVLAMSQTVVIVAGGLDIAVGATVGLTTVSTAMAIQATGSPAAGIVAGLVLGGLAGLVNGLIITYGRVNAVIATLGTMAIFRGIAFIMSDGQSIAIFSDTFRFIGIGRILGLPLLVWILVLTAIAFHLFLARSIVGRNIYALGGNPVVARFSGININRYRVGIYIMSGVAAGLAGILLAARTGSGQPVSGSQGLELEAITAAVLGGCALQGGKGTIVGALLGVAIIGVLNNGMILTSVPTFYQLLAKGSLLILAVVIAEYHLNRT

SEQ ID NO: 40287 - DNA, 1029 bp, Mesorhizobium loti MAFF303099
  CDS (1)..(1029): transl_table=11
gtggagatcgcggcccgttcaaaaccatgtcgcgggttccctgtggaaaatcattcgcttgtccaacgcctgattgcgcggcctgaattcggtcccttcgtgctgctcgtcgtcgagatcggcgttttctggggcttcaaccacgacttcctgtcgccgcagaacatctccaacacgctggccttcaccgtcgagctcggcctgatcgcgctggcgatgaccttgctgatgacatcgggcgaattcgacctgtccgtcggatccctgttcggcttctcgcccgtgctgatgtggacgctgttcaacggcggcgtcacctcgctggagatgggcttcgtcatcgcgctggtggttgctgccttgatcggcctggtcaatggctggttcgtcacgcagctcaagatcccgtccttcctggtgaccctcggcatgctgctcgtagtgcgcggcagtgcccttttcatcaccgacggttttccgcagcgcacctggagcgccgagggcagctggctggcggaggcgctggtcggcgacttcttcatcgggccgttccgcatctacatgtcgctgttctggttcatcgccgcggcgatcgcgctcggctttgtgctgacgcaaagccggaccggcaactggatccaggcggcgggcggcaatcccaacgcggcgcgcgcccgcggcgtgaatgtcaaccgcgtcaagattggcctgttcgtgctgtcgtcgctcatggcctcgctggccggcgtcatctcttcgttgcgcacgtcggccgccaatcccaacagcggcaccggctacgagctcgaagtcatcgccatggtggtgatcggcggcacggcgctgaccggcggacgcgggaccatcatcggcaccgtgctcggcatcctgatcctgcgcgtgatgcgcaacggcatcgtgctgatcggcgtgcccggtcttgcctacaacatcttcatcggcgcgatcatccttggcatgatggcgctccactcatggctggaacgccggcaccaggcagggacttga

SEQ ID NO: 40288 - protein, 342 aa, Mesorhizobium loti MAFF303099
MEIAARSKPCRGFPVENHSLVQRLIARPEFGPFVLLVVEIGVFWGFNHDFLSPQNISNTLAFTVELGLIALAMTLLMTSGEFDLSVGSLFGFSPVLMWTLFNGGVTSLEMGFVIALVVAALIGLVNGWFVTQLKIPSFLVTLGMLLVVRGSALFITDGFPQRTWSAEGSWLAEALVGDFFIGPFRIYMSLFWFIAAAIALGFVLTQSRTGNWIQAAGGNPNAARARGVNVNRVKIGLFVLSSLMASLAGVISSLRTSAANPNSGTGYELEVIAMVVIGGTALTGGRGTIIGTVLGILILRVMRNGIVLIGVPGLAYNIFIGAIILGMMALHSWLERRHQAGT

SEQ ID NO: 40289 - DNA, 1062 bp, Mesorhizobium loti MAFF303099
  CDS (1)..(1062): transl_table=11
atgactcaagctcaggaattcgagaaggttctctcggccagcgacaccagcgttgccgcgttcgacgaacacaaatcggcagtcaggcgcgtgcagcacttcctgcattcgacgccggcggcagtgccgctcatcgtgctggtcctgtcgatcatcatcttcggcatcaccattggcgggcgcttcttctcgtcctacacgctgacgctgatcctgcaacagatagccatcgtcggtattctgggtgctgcgcagacactggtcatcctgaccgccggcatcgacctgtcgatcggcgtcatcatggtgatctcagccgtgatcatgggcaattgcgccgtcagctacggcttgccgagcgtggtggccgtggcgctcgggcttgccacgggtgccgcctgcgggctgctcaatgggttgctggtcgcctacatgaagctgccgcctttcatcgtgacgctgggcacgtggaacatcgtcatggccacgaactttatctattcggccaatgaaacgatccgtgacaccgacgtcgacacccaggcgccgctgctgcatctgttcgccctgagcttcaaggtgggtaccgcggtgctgacgctcggtgtcatcgccatggtcgcgctggtgttgctcctctggtacgtcctcaaccacaccgcctggggccgacatgtctacgccgttggcgacgaccaggaggcggccaagctgtcgggcatccagaccaagaaggtgctggtgacggtctacacccttgccgggctgatcgccgccttcgccgcctgggtctccatcggccgcaacggttcgatctcaccgtcggcggccgtcaccgactacaatctgcaagcgatcaccgcgacggtgatcggtggtatttccctcttcggcgggcgcggctcgatcctgggcacgctgttcggcgcgatgatcgtcggcgtcgtctccatgggcctcaacatgctgggcgccgacccgcagtggaaagtgctgctcaccggtgtgttgatcatcggcgccgtggcggtcgaccaatggatcagaaaggtttcggcatga

SEQ ID NO: 40290 - protein, 353 aa, Mesorhizobium loti MAFF303099
MTQAQEFEKVLSASDTSVAAFDEHKSAVRRVQHFLHSTPAAVPLIVLVLSIIIFGITIGGRFFSSYTLTLILQQIAIVGILGAAQTLVILTAGIDLSIGVIMVISAVIMGNCAVSYGLPSVVAVALGLATGAACGLLNGLLVAYMKLPPFIVTLGTWNIVMATNFIYSANETIRDTDVDTQAPLLHLFALSFKVGTAVLTLGVIAMVALVLLLWYVLNHTAWGRHVYAVGDDQEAAKLSGIQTKKVLVTVYTLAGLIAAFAAWVSIGRNGSISPSAAVTDYNLQAITATVIGGISLFGGRGSILGTLFGAMIVGVVSMGLNMLGADPQWKVLLTGVLIIGAVAVDQWIRKVSA

SEQ ID NO: 40291 - DNA, 975 bp, Mesorhizobium loti MAFF303099
  CDS (1)..(975): transl_table=11
gtggtgcgcttccagagcctgatcggcctggtcgtggtggcgatcggcggcatcatcttctcgccgcgccggcacggccagatcctgttcctcgatcccgacaacatcgccaacatcgtgcgcgccgtgtcggagaccggcatcatcgccatcggcatgaccttcgtcatcatcaccgccggcatcgacctgtcggtcggcgcggtgctcggcctgtccagcgtcgtcaccgcgtcgatgatgatctcgggcggcttcgggctcattcccaccatcctcgccgtgcttatcatgggcgtcgtcttcggcgccatccagggcaccatctccacccgctttcggctggagccgttcatcgtcacgctcgccggcttgcaggcggcgcgcggcctggcgctggtcgtctcgggcaaccagtacatcaatatttcctatggcgacgggccgggcctggcaccgccggtgtttgcgatcctcggcgagcggctgttcaacaacaccgtgccggtcgccaccatcgtcttcatcgtctttgccgcgatcgcaaccatcgtgctcaacaccacgcgcttcggccgctatgtcttcgccgtcggcggcaatgagcgcgccgcgcgcatttccggcgtgcccgtctcgatggtgaagatctcggtctatgccatcaccggttttgcttcggctctggccggcatcgtccatgccggccagttcaatttcggcagcgccaatgacggcatgggctacgagctcaccgcgatcgccgccgtggtcatcggtggcacaagcctgtttggcggcgccggctcgatggttggcaccgtggccggcaccatcatgctgggcgcgctcgccaacatcctgcagctcaacaacatcacgccggccatgcagttgctcgcgaccgccgcgatcatcgtgctggcggcagtgcttcaatccctcgttcgccgccgcgagggtttgggtcgttag

SEQ ID NO: 40292 - protein, 324 aa, Mesorhizobium loti MAFF303099
MVRFQSLIGLVVVAIGGIIFSPRRHGQILFLDPDNIANIVRAVSETGIIAIGMTFVIITAGIDLSVGAVLGLSSVVTASMMISGGFGLIPTILAVLIMGVVFGAIQGTISTRFRLEPFIVTLAGLQAARGLALVVSGNQYINISYGDGPGLAPPVFAILGERLFNNTVPVATIVFIVFAAIATIVLNTTRFGRYVFAVGGNERAARISGVPVSMVKISVYAITGFASALAGIVHAGQFNFGSANDGMGYELTAIAAVVIGGTSLFGGAGSMVGTVAGTIMLGALANILQLNNITPAMQLLATAAIIVLAAVLQSLVRRREGLGR

SEQ ID NO: 40293 - DNA, 954 bp, Thermotoga maritima MSB8
  CDS (1)..(954): transl_table=11
ttggcttcgaaatttaagaagagaactttcagagaactcggtcctttagttgctctcgtcagtctggctgtttttacggctatcttgaatcctcgctttctgacggcattcaatcttcaggctctcggaaggcagatcgcgatctttggccttttagctatcggggaaacctttgtcatcatctccgggggaggagccatcgacctctcccccggttccatggtggcgctcacaggggtaatggttgcatggctcatgactcacggtgttcccgtgtggatctctgtaattctcattctgttgttctctataggagcaggtgcgtggcatggcttgtttgtcacaaagctcagagttcccgcttttatcatcacccttggaactctgacgatcgcccgaggcatggcagccgtgatcacaaagggatggcctatcatcggactcccgtcttctttcttgaaaatcgggcagggtgaatttttgaagataccgatcccggtgtggattctccttgcagtggctcttgtggcagatttcttcctcagaaagaccgtttatggaaaacacctgagggcttccggcggtaacgaagtcgccgcaagattttccggagtgaacgtagacagagtgcgaatgatagcgttcatggtatcgggattcctcgccggtgtggtggggataatcattgcggcaaggctttctcaagggcaaccaggtgtcggtagtatgtacgaactctatgccatagcctccactgtaatcggtggaacgagtctcacgggaggagaaggaagtgttttaggagcaatcgtaggcgcgagtatcataagtcttctctggaacgctctcgttcttctcaacgtttcgacgtactggcacaacgtagtcatcggaatcgtcatagttgtggcagtaactctcgacatattgagaaggagacttgcaagcaaataa

SEQ ID NO: 40294 - protein, 317 aa, Thermotoga maritima MSB8
MASKFKKRTFRELGPLVALVSLAVFTAILNPRFLTAFNLQALGRQIAIFGLLAIGETFVIISGGGAIDLSPGSMVALTGVMVAWLMTHGVPVWISVILILLFSIGAGAWHGLFVTKLRVPAFIITLGTLTIARGMAAVITKGWPIIGLPSSFLKIGQGEFLKIPIPVWILLAVALVADFFLRKTVYGKHLRASGGNEVAARFSGVNVDRVRMIAFMVSGFLAGVVGIIIAARLSQGQPGVGSMYELYAIASTVIGGTSLTGGEGSVLGAIVGASIISLLWNALVLLNVSTYWHNVVIGIVIVVAVTLDILRRRLASK

SEQ ID NO: 40295 - DNA, 996 bp, Thermotoga maritima MSB8
  CDS (1)..(996): transl_table=11
atgcaggtcgagagatccagagcgaagatttcgtggtatcaaaggatatctcgctatcagtcgattttcatacttcttggtcttatcgtcttgttcagttttctgtccaatcgatttctcactcttgaaaatttctggatcattctcagacaaacagctgttaacctctgtatagctgtgggtatgacgtttgtcattctcacgggaggaatagatctatctgttggttctatccttggattctcgggggctgtaaccgcaaaacttttgaagtatggtctgatactaagtgcgtttggtgtcgtgctcaagttcaatcctcttggtgcatcaataattggagtcttggctggttttgcaataggattgttcaatgggtttattatcacaagattcaatattcccccatttgtggccacactgggaacaatgacagcagttagaggattcatcatgcttctgactaaaggacatcctataacgcgattgggtgatagttttgacttcataggttctgggtggtttttagggattccaatgccagtctggatagccgctatagccacaggagtaggcatttttattctcagaaaaactcagtttggaagatatgtatatgctgttggaggtaatgaaaaagcagcagttctctctggtgtgaattcaaaactgacgaaactctgggtgtacgcgatatcgggtatcctctcggctgttgcaggtctaatagttaccgcccgtttagattcagcccagccaaatgctggtttgatgtacgagctagatgcaatagccgcaacagttattggaggagcctctctttcaggtggaaaaggaactctcataggaactgttgtaggtgcattgataattggtgttttgaacgatgggttggtactcgttggtgtttctcctttctggcaacaggttgcaaagggattcataataatagctgctgtgatagcagaaaaactcggtagaggggaaaaggagtga

SEQ ID NO: 40296 - protein, 331 aa, Thermotoga maritima MSB8
MQVERSRAKISWYQRISRYQSIFILLGLIVLFSFLSNRFLTLENFWIILRQTAVNLCIAVGMTFVILTGGIDLSVGSILGFSGAVTAKLLKYGLILSAFGVVLKFNPLGASIIGVLAGFAIGLFNGFIITRFNIPPFVATLGTMTAVRGFIMLLTKGHPITRLGDSFDFIGSGWFLGIPMPVWIAAIATGVGIFILRKTQFGRYVYAVGGNEKAAVLSGVNSKLTKLWVYAISGILSAVAGLIVTARLDSAQPNAGLMYELDAIAATVIGGASLSGGKGTLIGTVVGALIIGVLNDGLVLVGVSPFWQQVAKGFIIIAAVIAEKLGRGEKE

SEQ ID NO: 40297 - DNA, 1014 bp, Vibrio cholerae O1 biovar eltor str. N16961
  CDS (1)..(1014): transl_table=11
atgactatggatgctgtcaaatcatttgcaattaaacatttaaaagagggcgcaatctacgcagtgctgtttattctgctggcgattattgtgattcaagagccctcatttctaagcttacgtaacctcagtaatatcctgactcaatcctcggtgcgcgtgattattgcgttgggggtagcaggtttgattgtgactcaaggcactgacttatcagctggtcgccaagtgggtctcgccgcggtgatttccgctactttgttgcaatcaatggataacgtgaacaaagtattcccaagcttgggtgaaattccgattcttgcggtcatcattagtgtctgcttgattggtgcgattatcggtttggtcaacggtgtgatcgtcgcttacctcaaagtaacgccgtttatcgcgaccttaggcaccatgatcatcgtctacggcattaactcgctgtactacgactcggtcggtgcatcaccgattgcgggttttgatgaacgcttcactaccttcactcaaggctttatccgaattggggattttcggttctcctacatcaccttctacgccattatcgcgatcatttttatgtgggtactgtggaataaaaccgtgttcggcaaaaacatttttgcggttggtggaaacccagaagcggcgaaagtgtcgggtgttaacgtgcctttgactctgcttaaagtgtatgcgctttccggtgtgttctatgcgtttggcggtatgctcgaagcgggacgaattggtagtgctaccaacaacttaggcttcttatatgagttggatgcgattgcggcgtgtgtggtgggcggtgtctcattcgctggcggggtggggagtatcgctggggtcgtaaccggggtactgatcttcacagtaatcaactacggtatgacctacatcggcgttagcccatactggcagtacatcattaaaggctcgatcatcatcttcgctgtagcgctggattcaatgaaatacgccaataagaagtaa

SEQ ID NO: 40298 - protein, 337 aa, Vibrio cholerae O1 biovar eltor str. N16961
MTMDAVKSFAIKHLKEGAIYAVLFILLAIIVIQEPSFLSLRNLSNILTQSSVRVIIALGVAGLIVTQGTDLSAGRQVGLAAVISATLLQSMDNVNKVFPSLGEIPILAVIISVCLIGAIIGLVNGVIVAYLKVTPFIATLGTMIIVYGINSLYYDSVGASPIAGFDERFTTFTQGFIRIGDFRFSYITFYAIIAIIFMWVLWNKTVFGKNIFAVGGNPEAAKVSGVNVPLTLLKVYALSGVFYAFGGMLEAGRIGSATNNLGFLYELDAIAACVVGGVSFAGGVGSIAGVVTGVLIFTVINYGMTYIGVSPYWQYIIKGSIIIFAVALDSMKYANKK

SEQ ID NO: 40299 - DNA, 999 bp, Vibrio cholerae O1 biovar eltor str. N16961
  CDS (1)..(999): transl_table=11
atgaaacaaggatacagcatgagtacccgaaccatgactaatacgacatctgataaccgtaaaaaactgctcagcaaagagtggttgattgaacaaaaatcgctgatcgcactgctgtttttagtggttgtcgtctctttcttaaacccgaattttttcacggttgataacttactgaatattctgcgccaaacttcggtcaacgcgatcatcgcggtgggtatgaccttggtcatcttaaccgcagggattgatttgagcgttggctcagtattagcactgtgtggcgcttttgcggccaccttagtggcgatggaagttcctgttctggtagctgtgcctacggctttgctggctggtgctgcgcttggcgcaatcagcggcatcatcattgccaaaggcaaagtgcaggcctttatcgcgacgttagtgacgatgactctgctgcgcggtgtcactatggtgtacaccgatgggcgtccgatttcgaccggattcactgatacggcggacacctttgcatggtttggtacaggctacacattgggcattccggttccggtatggctgatggtcgtggtatttgccggcgcttggtacttgctcaatcacactcgctttggccgctatgtgtatgcagtgggcggcaacgaatcagcaactcgcctttcaggtatcaacgtagatcgcgtcaaaatcggcgtgtatgccatctgtggtttactggctgcgctagcaggcatcatcgtcacatctcgcctttcttctgcgcaacctactgcgggtatgggctatgagttggatgcgattgcggctgtggtgctagggggcaccagtttgatgggcggtaaaggtcgcatcatgggcacgctgatcggcgctctcatcatcggatttttaaacaacgcattgaacttgctcgatgtttcctcctactaccaaatgattgcgaaagctgtggttattttgctggcggtcttggtagacaacaaaaaataa

SEQ ID NO: 40300 - protein, 332 aa, Vibrio cholerae O1 biovar eltor str. N16961
MKQGYSMSTRTMTNTTSDNRKKLLSKEWLIEQKSLIALLFLVVVVSFLNPNFFTVDNLLNILRQTSVNAIIAVGMTLVILTAGIDLSVGSVLALCGAFAATLVAMEVPVLVAVPTALLAGAALGAISGIIIAKGKVQAFIATLVTMTLLRGVTMVYTDGRPISTGFTDTADTFAWFGTGYTLGIPVPVWLMVVVFAGAWYLLNHTRFGRYVYAVGGNESATRLSGINVDRVKIGVYAICGLLAALAGIIVTSRLSSAQPTAGMGYELDAIAAVVLGGTSLMGGKGRIMGTLIGALIIGFLNNALNLLDVSSYYQMIAKAVVILLAVLVDNKK

SEQ ID NO: 40301 - DNA, 1167 bp, Bacillus halodurans C-125
  CDS (1)..(1167): transl_table=11
atgaagttagctgaacttttaaaaaataatatgcgttcctatgggatgatcgtcgcgcttatgtttatcattttgttattcagcgtgttgtccgacggaattttgttacgtccactaaatgtaacaaatttaattttgcaaaacagttatattttagttcttgcgatcggtatggtgatggtgattattgcggggcatatcgatttgtccgttggttccgtctgtgcttttgttggggcaattgcggccattttaatgattgatatgcagcttcctacagctcttgctgtactaatctgcttattgctaggtgctcttatcggtgcatggcacggattttttattgcttacttaaaaatgccgtcttttatcgtcacattggccggcatgcttctatttagagggctgacgatggtcgtgttaggcggtcaatcaaagtccccctatccacctgaatttatcttgattagttcaggcttcctacctgatatcccttttttaggattggcctcttatcatacattaacgatgttgatcggtgtggtgctttctctgtttgttatctttagcgagcttaaagaacgacgagtccagataaacaatcaatttatggtacttcccaaagggttttttatcgcaaaattgatcgggatggtagcgattattaacatttttacgtttgtcttagcttcttatagagggattccaaatattcttgtgattctttttgtgcttattgttctcttttcgtttgtcatgaataaaacggtgatcggacgccacatttatgcaacaggaggaaatcaaaaagccgcagagttatccggtgtcaagacgaagcgagtgacgttttgggtttttgttaacatgggttttttatcggccatggcaggattaatttacgccgcccgcctaaactcagcaaccccgagagccggtacgatgtttgagcttgatgcgattgccgctgcttttatcggtggagcttcaatggccggaggagtcgggacgattgtcggtgctgttgttggggggctcgtaatgggggttatgaacaacggaatgtcattacttgggattagtatagactggcaacaagccattaaaggactcgttctgctagccgcggtcggttttgacatttataatcgaaacaaagcaaaatga

SEQ ID NO: 40302 - protein, 388 aa, Bacillus halodurans C-125
MKLAELLKNNMRSYGMIVALMFIILLFSVLSDGILLRPLNVTNLILQNSYILVLAIGMVMVIIAGHIDLSVGSVCAFVGAIAAILMIDMQLPTALAVLICLLLGALIGAWHGFFIAYLKMPSFIVTLAGMLLFRGLTMVVLGGQSKSPYPPEFILISSGFLPDIPFLGLASYHTLTMLIGVVLSLFVIFSELKERRVQINNQFMVLPKGFFIAKLIGMVAIINIFTFVLASYRGIPNILVILFVLIVLFSFVMNKTVIGRHIYATGGNQKAAELSGVKTKRVTFWVFVNMGFLSAMAGLIYAARLNSATPRAGTMFELDAIAAAFIGGASMAGGVGTIVGAVVGGLVMGVMNNGMSLLGISIDWQQAIKGLVLLAAVGFDIYNRNKAK

SEQ ID NO: 40303 - DNA, 945 bp, Bacillus halodurans C-125
  CDS (1)..(945): transl_table=11
atgtccgacaataaacaaataaagtcgctgcttactactattggaccgtttataggattgttttttatcgttttgatcattagtttcttaaaccctgatttcctctcattatcaaatattatgaacgtcttacggcaagtgtcgatcaacgccttaattgccttcgggatgacctttgttattttaacaggcgggattgatttatccgttggggccattctcgctctgtccagtgctgtcacagcatggttaatggtcaacagcgtcgatccgatcttagccgttctgatcggtctattggccggtactctctttggtgcgattaacggattggtgatttccaaagggaaggtagccccttttattgccacattggcgacgatgacgatttatcgaggactcacactcgtgtttaccgatggtcgtccgatttcaggatttgagtcgtcgacgatgtttgaaatgctcggcagaggatatttcttcggaattccggttcctgccgtgacaatgatcattagcttcatcattctttacctcattttaaagaaaacgacgttcggtcgtcgcgtgtatgctgttggtggtaaccaagaagcggcgatcttatcagggattaaagtagaccgaatcaaaatttatgtctactcattaaccggttttttatcggcccttgccggtatgattttaacctcccgtttatattcggctcagcctactgctggaagcatgtatgagcttgatgcgattgctgccgttgtccttggtgggacgagcttaacgggaggccgaggttggatcgtcggtaccttaatcggtgccttgatcataggagtcctaaacaatggactgaacttgttgggcgtaagctcatttttccagcaagttgtcaaagggagtgtcattttactcgcggtcttattggatcgtagaaaatcagcgtaa

SEQ ID NO: 40304 - protein, 314 aa, Bacillus halodurans C-125
MSDNKQIKSLLTTIGPFIGLFFIVLIISFLNPDFLSLSNIMNVLRQVSINALIAFGMTFVILTGGIDLSVGAILALSSAVTAWLMVNSVDPILAVLIGLLAGTLFGAINGLVISKGKVAPFIATLATMTIYRGLTLVFTDGRPISGFESSTMFEMLGRGYFFGIPVPAVTMIISFIILYLILKKTTFGRRVYAVGGNQEAAILSGIKVDRIKIYVYSLTGFLSALAGMILTSRLYSAQPTAGSMYELDAIAAVVLGGTSLTGGRGWIVGTLIGALIIGVLNNGLNLLGVSSFFQQVVKGSVILLAVLLDRRKSA

SEQ ID NO: 40305 - DNA, 969 bp, Pasteurella multocida subsp. multocida str. Pm70
  CDS (1)..(969): transl_table=11
atgacaactcaagcaaaaccattccaattcggtaaattcttaattgaacaacgttccatcattgccttactggtgctgattgcgatcgtctcaatgatcaatcctgactttttcagtgtggataatattctcaatattttacgccaaacttcagtcaacgcaattattgccgtcgggatgacatttgtgatcttgattgccgggatcgatctttcggtcggttcggtacttgcattaacgggggctattgccgcctcgatggtcagtactgagttaccaatactgctcgtcattccagtcacactcttgattggtacattactgggcgggatcagcggtgttattgtcgcgaaagggaaagtacaagccttcattgctactctcgtaaccatgaccttattacgtggtgtgaccatggtttataccgatggacgcccaattagtacaggcttttcggaaggtgcggatacgttttcgctgttaggcacgggttatgtattcggtatccctgtcccaatttggattatggcatttgtctttgctgcctcttggtatgtattaaaacatacacgtattgggcgttatatttatgcacttggggggaatgaagccgccacccaattatctggcattaacgtcaataaaattaaaatctttgtttttgccgtcagtggcttcttatctgcccttgccggtctgattgtcacttcacgtttatcctctgctcaaccgactgccggtgtgtcatatgagcttgatgcgattgccgcggttgtagtcggcggaacaagcttaatgggcggaaaaggacgcgtcatgggcactttaattggcgcattgattattggtttcttaaataacgcgctgaatttactggatatttcctcttactatcaaatgattgcaaaagcattagttatcttagtcgcggttttagcggataactatttaggcaccaaaaaagtttaa

SEQ ID NO: 40306 - protein, 322 aa, Pasteurella multocida subsp. multocida str. Pm70
MTTQAKPFQFGKFLIEQRSIIALLVLIAIVSMINPDFFSVDNILNILRQTSVNAIIAVGMTFVILIAGIDLSVGSVLALTGAIAASMVSTELPILLVIPVTLLIGTLLGGISGVIVAKGKVQAFIATLVTMTLLRGVTMVYTDGRPISTGFSEGADTFSLLGTGYVFGIPVPIWIMAFVFAASWYVLKHTRIGRYIYALGGNEAATQLSGINVNKIKIFVFAVSGFLSALAGLIVTSRLSSAQPTAGVSYELDAIAAVVVGGTSLMGGKGRVMGTLIGALIIGFLNNALNLLDISSYYQMIAKALVILVAVLADNYLGTKKV

SEQ ID NO: 40307 - DNA, 1011 bp, Pasteurella multocida subsp. multocida str. Pm70
  CDS (1)..(1011): transl_table=11
atggctgcattaaaacaaaataaatcccttgatttctttaaacaaaatgcaatctactttgtattattaattttactcgggatcatcattgttcaagacccaacattcttgaacttacgaaacttcagtaacattttaacgcaatcttccgtacgcttaatcatcgcgctgggtgtagccggcttacttgtcacacaagggacagacttatctgccggtcgccaagtcggtttagcggcggttatttcagcgaccttgttacaagccatggacaactttaaccgcgttttcccggatttacctgagctcccaattccggttgtaattttaactgtttgtgcgattggtgcagtcatcggtttagtaaatggtttagttattgcttacttaaacgtaacaccatttattgccaccatggggaccatgattatcgtttatgggattaactcactttactatgatgcggtaggaggatcgccaattgcaggctttaacgaaaccttctcaacgtttgcacaaggtttctttaaattcggttccttcaaactgtcctatatcacgatttatgctgctgttgcgaccttcttagtgtgggtattgtggaataaaacgcgctttggtaaaaatatctttgctatcggtggtaacccagaagcggctcgtgtatctggcgttaacgtcgcacgtaacttagtggttatctatatgatcgcggggatgttctacggttttggtgggatgttagaagccggtcgtatcggttctgccactaataacttaggtttcatgtatgaattagatgcgattgctgcctgtgtagtagggggcgtctcattcgccggtggtgtgggtacggttattggtgtggtaactggggtaattatctttaccgtcatcaactacggcttaacctatatcggtgttaacccatattggcaatatatcatcaaaggtagcatcatcattcttgcggtggctatcgactcactcaaatacgcgaagaaaaaataa

SEQ ID NO: 40308 - protein, 336 aa, Pasteurella multocida subsp. multocida str. Pm70
MAALKQNKSLDFFKQNAIYFVLLILLGIIIVQDPTFLNLRNFSNILTQSSVRLIIALGVAGLLVTQGTDLSAGRQVGLAAVISATLLQAMDNFNRVFPDLPELPIPVVILTVCAIGAVIGLVNGLVIAYLNVTPFIATMGTMIIVYGINSLYYDAVGGSPIAGFNETFSTFAQGFFKFGSFKLSYITIYAAVATFLVWVLWNKTRFGKNIFAIGGNPEAARVSGVNVARNLVVIYMIAGMFYGFGGMLEAGRIGSATNNLGFMYELDAIAACVVGGVSFAGGVGTVIGVVTGVIIFTVINYGLTYIGVNPYWQYIIKGSIIILAVAIDSLKYAKKK

SEQ ID NO: 40309 - DNA, 993 bp, Pasteurella multocida subsp. multocida str. Pm70
  CDS (1)..(993): transl_table=11
atgtggaaatttatacaagataaccgtgaattaaccattgtctttgcgatcggattgctgtttaccttactcagtcttggaggcagcggctttcatttacaaacgttggcaatgatttttaactcggcacaaattgtgattttgctggcgattggtgccacgtttgtcattttgacacgcaatattgatgtgtcggtgggttcaacgatgggcttatgtgccgtcattgctggtagtttacttaatgccggatttggtgcgagcgcttttgtgattactctatgttgtgggctgttggctggtttatttaatggcattttagtcacactactacgtatccctgccattgtggcgaccttaggaacacttggcttgtataaaggtattatgttgctaattacaggtggtaaatggattgagggcttaccacaggatttaaaaaccttgtctgcgccagcatttttgcacatttcgccgatcggttggctacttttaggcttgattggcttaacgtatttctttttaaccaaaatgaaagcagggcgtgacttttacgcggtgggtgacaatttgcaaggggcattacaactgggagtgcgcgtgaatcaagttcgcatcgctgcatttgcgattaacggtacgatggcggcattagccggtattgtgtttgcctcacaaatcggctttgtgcctaactcaacggggaatggattagaaatgaaagcgattgccgcttgtgtattaggtgggattagcttacttggtggggcggggaacattattggtgctgttttaggtgcctatttcctgatccaaattgactctattttggtgttgttaaaagtgcctgcttattggaataactttgtagcaggtttagtgctcttagcggtcttggtgtttgatggacgtattcgcgtgatgattaacaataatattaaacttcagcgttatgcccgtttcttaaaagacgatcaagatgcggtgaaataa

SEQ ID NO: 40310 - protein, 330 aa, Pasteurella multocida subsp. multocida str. Pm70
MWKFIQDNRELTIVFAIGLLFTLLSLGGSGFHLQTLAMIFNSAQIVILLAIGATFVILTRNIDVSVGSTMGLCAVIAGSLLNAGFGASAFVITLCCGLLAGLFNGILVTLLRIPAIVATLGTLGLYKGIMLLITGGKWIEGLPQDLKTLSAPAFLHISPIGWLLLGLIGLTYFFLTKMKAGRDFYAVGDNLQGALQLGVRVNQVRIAAFAINGTMAALAGIVFASQIGFVPNSTGNGLEMKAIAACVLGGISLLGGAGNIIGAVLGAYFLIQIDSILVLLKVPAYWNNFVAGLVLLAVLVFDGRIRVMINNNIKLQRYARFLKDDQDAVK

SEQ ID NO: 40311 - DNA, 1044 bp, Pasteurella multocida subsp. multocida str. Pm70
  CDS (1)..(1044): transl_table=11
atgaataggtattgtatgacaaatttaagaaaaattttctcaaaattaggcatcggtatcattttactgttaatgattattggtatgtcgttaagttccgatgtgtttttgtccacgaataatattatcaatatcttattacaggtttcgattatttgtgtcatttctgtgggtatgacctatgtcattttaaccggtggcattgatctgtcagttggctctattgtcgcactcagtgccgtttgtttaggggtttttacacattggggaatggattggttaggtgaaaatccttccagcttttctgtcttaatgattgtcattagcgcgattatcgcaacaatttttgttggtatcctttgtggttatgttaatggattagtgattgtgtatggtaaagtgacgccctttatcacaacattgggtatgatggggattgcgagaggacttgcgttaaccatttcagatggcaaaactatctataattttccagatacattgcgttttttaggaaatgggcgtattgcactgacggaaacatttgcgctcccggtacccgttattattgcgttacttgtcgtgttagtgagtttttacgtgctaacacaaacgatgtttggtcgacagatttatgcgttaggcggaaaccgtgaagcagttcgattgtccggtattaatattgagaaacttgaaattaaagcttatgtgattaatggcgcattagcggcaattggtgccatcattttagttggacgtttaaatgcggcacagcctatcgctggaaacggttatgaattagatgctatcgctgcaaccgtgataggcgggacaagtttgatgggcggcgtgggatcggtggtcagtacttctattggggcgcttattatgggggtgttacaaaatgggctgacgttattgaacgtcacctcgtatttgcagcgcttgattattggtttagtgattattttagcggtatttttagatcaattacgtcgtggcgaagtatcaacacgccgtttgaaacggttattttttagagaataa

SEQ ID NO: 40312 - protein, 347 aa, Pasteurella multocida subsp. multocida str. Pm70
MNRYCMTNLRKIFSKLGIGIILLLMIIGMSLSSDVFLSTNNIINILLQVSIICVISVGMTYVILTGGIDLSVGSIVALSAVCLGVFTHWGMDWLGENPSSFSVLMIVISAIIATIFVGILCGYVNGLVIVYGKVTPFITTLGMMGIARGLALTISDGKTIYNFPDTLRFLGNGRIALTETFALPVPVIIALLVVLVSFYVLTQTMFGRQIYALGGNREAVRLSGINIEKLEIKAYVINGALAAIGAIILVGRLNAAQPIAGNGYELDAIAATVIGGTSLMGGVGSVVSTSIGALIMGVLQNGLTLLNVTSYLQRLIIGLVIILAVFLDQLRRGEVSTRRLKRLFFRE

SEQ ID NO: 40313 - DNA, 972 bp, Pasteurella multocida subsp. multocida str. Pm70
  CDS (1)..(972): transl_table=11
atgggaacaacacaaccggttaaaccgggttttaaaaaactggcaattgcagatgcgatgcaggcaatggggattttacccatcttgattttaattgtgatcgtgttttcttttgtggcaccaaactttatgacagaagctaatatgatgaatattactcgtcaagcatcaattaatattgtgttagccgcagggatgacatttgtgattttaacgggcgggattgacctttcagttggttcgattttaggggtgacggcggtgattggactggttacctcgctcaatcccgcattggcagaatttgcggtcccgttagcgttactcgcgggtttaggtatgggggtatttaatggtttattggttgcgtatgcaggtctacctccatttattgtcacgctaggtacatatactgcattacgtggcgcagcctatttagtagcagatgggacaacggtgatcaactctaaaatctcattcagttggataggaaatggttatcttggctcggtaccttggctagtgattatcgcctttgccgtgattgccgtgtgctggtttattttacgtcgcacgacgttaggcacccatatttatgcggtcgggggtaacttgcaagccgcacgtttaacaggtatcaaagtctctttagtcttaatcttcgtttacgctgccagcggattattatctggcttaggcggcgtaatgagtgcatctcgtttgtatagcgccaatggtaatcttggtgtaggctatgaacttgatgcaattgcagccgttattttaggtggcacgagtttcgtgggcggtatcggaaccattacggggacgctcatcggtgcattaattattgcgactttaaataatggtatgactttaatgggagtgtcatatttctggcagctcgttattaaaggtggggtaatcatcgtggcagtattgatcgacaagtaccgtacccgttcagcttaa

SEQ ID NO: 40314 - protein, 323 aa, Pasteurella multocida subsp. multocida str. Pm70
MGTTQPVKPGFKKLAIADAMQAMGILPILILIVIVFSFVAPNFMTEANMMNITRQASINIVLAAGMTFVILTGGIDLSVGSILGVTAVIGLVTSLNPALAEFAVPLALLAGLGMGVFNGLLVAYAGLPPFIVTLGTYTALRGAAYLVADGTTVINSKISFSWIGNGYLGSVPWLVIIAFAVIAVCWFILRRTTLGTHIYAVGGNLQAARLTGIKVSLVLIFVYAASGLLSGLGGVMSASRLYSANGNLGVGYELDAIAAVILGGTSFVGGIGTITGTLIGALIIATLNNGMTLMGVSYFWQLVIKGGVIIVAVLIDKYRTRSA

SEQ ID NO: 40315 - DNA, 999 bp, Pseudomonas aeruginosa PAO1
  CDS (1)..(999): transl_table=11
atgagcgacccgacgtcttccgctaccgccgccgcagcgccaaccctgcgacgcggcaactatttcggcctgggcacctacctcggcctggccggcgcgctgctggcgatgatcgcgctgttctcggcgctgagcagccacttcctcagctatggcaccttcctcgccatcgccaaccagatccccgacctggtggtgctggcggtgggcatgaccttcattctgatcgtcggcggcatcgatctctcggtaggttcggtgctggccctggcggcctcggcggtaagcctggcgacgctcggctggggctggggcgtgctgccggcggcgatgctcgggatggcctgcgcgaccctggccggctgcgtcaccggttcgatcacggtggcctggcggattccctcgttcatcgtgtccctcggggtgctggagatggcccgtgggctggcctaccagatgaccgactcgcgcacggcctatatcggcgacgcctatgcctggctgtccaatccgctggcgttcggcatttcgccggccttcgtgatcgccctgctggtgatgttcgccgcccaggcggtgctcacccgcacggtgttcggccgctacctgatcggcatcggcaccaacgaagaagcggtgcgattggccggtgtgaacccgaaaccctataagattgcagtattcgccctgatggggctgctcgccgggttggccgcgctgttccagatctcgcgtctggaagcggccgatcccaacgccggggtcggcctggaactccaggtcatcgccgcggtggtgatcggcggcaccagcctgatgggcgggcgaggttcggtggtcagcaccttcttcggcgtgctgatcatttccgtattggcggcggggctggcgcagatcggtgcgtcggagccgaccaaacgaatcattaccggggcggtgatcgtggtagcggtggtgctggatacctatcgcagccatcgcgcccgcagacagggctga

SEQ ID NO: 40316 - protein, 332 aa, Pseudomonas aeruginosa PAO1
MSDPTSSATAAAAPTLRRGNYFGLGTYLGLAGALLAMIALFSALSSHFLSYGTFLAIANQIPDLVVLAVGMTFILIVGGIDLSVGSVLALAASAVSLATLGWGWGVLPAAMLGMACATLAGCVTGSITVAWRIPSFIVSLGVLEMARGLAYQMTDSRTAYIGDAYAWLSNPLAFGISPAFVIALLVMFAAQAVLTRTVFGRYLIGIGTNEEAVRLAGVNPKPYKIAVFALMGLLAGLAALFQISRLEAADPNAGVGLELQVIAAVVIGGTSLMGGRGSVVSTFFGVLIISVLAAGLAQIGASEPTKRIITGAVIVVAVVLDTYRSHRARRQG

SEQ ID NO: 40317 - DNA, 942 bp, Lactococcus lactis subsp. lactis Il1403
  CDS (1)..(942): transl_table=11
gtgaaagctctatctcaaaaattcagttctttaacgacaatgattgctctgattgttttgatgattatcattacatgtatcaatcccaactttatgacggcaaataatttgctaaatttactcttacaagtcacggctaatggatttattgcctttgggatgaccttcgtaattctaacttcaggaattgacctgtcagttggcgcaattttagccctttcaagtgcagtgtccgcaggttttatagcccaaggaatgcctttaccgctagcagtagtctgtgcgttaatcattggtgcttttcttggagcgatcaatggtgcacttattgcctatgggaaattggcccctttcattgtaactttagctactcaaatggtttaccgcggagcaacccttgtttttactgatggtaatccaattactaaacacatggatggctatttcttagcctatattggacaaggttatttactgggtattcctttccctgttattttaatgattcttgttttcattgttttatggattttacttcataaaacagcctttggtaaatcagtttatgctttgggtggtaatgaaaaagctgcttatatttcaggaattaaactaaataaagtaaaaattgccatttacactttatctggagcaatgtccgcaatttctggtttaatcatcagttctcgtttgtcatcagcaacgccacaagcaggttctggctacgaaatgtatgcaatcgctgccgttgtccttgggggaacctctctaatgggaggaaaagggcgtatgtttggaactatgattggggtattaatcattggtgttctaaataatggtttaaatataattggtgtgtcagccttttggcaacaagtcatccaaggattagttattctcgttgcagttcttatcgatgtcattcgtagcaaacggaaatag

SEQ ID NO: 40318 - protein, 313 aa, Lactococcus lactis subsp. lactis Il1403
MKALSQKFSSLTTMIALIVLMIIITCINPNFMTANNLLNLLLQVTANGFIAFGMTFVILTSGIDLSVGAILALSSAVSAGFIAQGMPLPLAVVCALIIGAFLGAINGALIAYGKLAPFIVTLATQMVYRGATLVFTDGNPITKHMDGYFLAYIGQGYLLGIPFPVILMILVFIVLWILLHKTAFGKSVYALGGNEKAAYISGIKLNKVKIAIYTLSGAMSAISGLIISSRLSSATPQAGSGYEMYAIAAVVLGGTSLMGGKGRMFGTMIGVLIIGVLNNGLNIIGVSAFWQQVIQGLVILVAVLIDVIRSKRK
